United States Patent Application Publication US 2011/0183924 A1 - sequence listing, part 37

SEQ ID NO: 85221 - DNA, 861 bp, Homo sapiens
aaagcttcccgagagccatggttggtccaggcaggcagtcggagcacctcgtggagcggctgctaacccagggtggggtggggtggggtggaggggtctgcttgtagtactctcagtcctgatgtcacaggcgcggcaaggacatcgcaaggaggagtcggattacagtaaggatgggcagtgcagcaggcagcccgagcgcactctccagccgccggggatcttagccctggaaaggcagcctgcaaggcgctcatcccgcggaggaggcacgctctcggcgctcactgctctccacgccggggacatttccaccgaatgtagcatgaaagggctctgctctacgtgccagccttgggtgagagctgatgctgaagacaccgcggtgggattccagctgtctgattaatgagaaacataatgtattttggtggtacatgccagagtcctgctctcccggcccttgtccgtccaccagcccctcctttgcaaccatcgctggatattaaaccatttcttccctttcctcttgacactgcagctgcagtcaacctcttccccaatttcaatgcgatggacccgattcagaaagctgtaataaaccatacattcggggttcctcttccccaccgaagaaagcaaatcatatcatgcaacatttgccagttgagatttaattctgatgtctgtgtggcatgtcgtaaaaggaacatggcggccaaggtatttggagatatggactaatcactttgggtcataattaaacaattgcaggcttgaccatttaccagatgattattgtattagtcttctattgctgctaaaataaatcaccacaaactcagtggcctgaaacaacac

SEQ ID NO: 85222 - DNA, 445 bp, Homo sapiens
caaaattccaatggaactgacaagctttatttctatttgttgtatttcttttttctcattacagatggacccgattcagaaagctgtaataaaccatacattcggggttcctcttccccaccgaagaaagcaaatcatatcatgcaacatttgccagttgagatttaattctgatgtaagtttatcatttagtgttcacttaaaaaaaaaaaatacattttgctgttctaatcttgcaggagaaaagatttcttaagacattttctccagtaactgagcatgtcaaaattcaaagataacattttaactcactatgtgctttaattttggagtttattatgttatgtttggttgtttactacagaaaattcacatgtaaacaagcttaaatacttgcagtttaatatttttatttatttatttattttttagtcttttgggaatg

SEQ ID NO: 85223 - DNA, 473 bp, Homo sapiens
actgaagccccattccacaacgtattagcaacctgttttgatgccaaagccaaatagtgacagttgcagtaatgaatatttgctacagggcgctggcagaaaaatggcacagaaatgcaagcccaaaccatctcaaatctttctcttctcactgaatttcacccattatttttaactccttgtcacatatattgtcccagagtctttggtagagtagtgcaaagaaatctgaatcagcctttgggaaacagtaagaaaagcgaatcgttttcctactttctcatcttttgcagggggaaaaaaaggtgcaatgaagccctgtggtttattcttaccattctgcacaagaggttagttgagagctataggttttccttttctttcctccttctaaatgattttaagcaacttaataccttagcattatggtatttggatatacgtaattgactctagcttgggccacgcttagt

SEQ ID NO: 85224 - DNA, 2017 bp, Homo sapiens
aaagcttcccgagagccatggttggtccaggcaggcagtcggagcacctcgtggagcggctgctaacccagggtggggtggggtggggtggaggggtctgcttgtagtactctcagtcctgatgtcacaggcgcggcaaggacatcgcaaggaggagtcggattacagtaaggatgggcagtgcagcaggcagcccgagcgcactctccagccgccggggatcttagccctggaaaggcagcctgcaaggcgctcatcccgcggaggaggcacgctctcggcgctcactgctctccacgccggggacatttccaccgaatgtagcatgaaagggctctgctctacgtgccagccttgggtgagagctgatgctgaagacaccgcggtgggattccagctgtctgattaatgagaaacataatgtattttggtggtacatgccagagtcctgctctcccggcccttgtccgtccaccagcccctcctttgcaaccatcgctggatattaaaccatttcttccctttcctcttgacactgcagctgcagtcaacctcttccccaatttcaatgcgatggacccgattcagaaagctgtaataaaccatacattcggggttcctcttccccaccgaagaaagcaaatcatatcatgcaacatttgccagttgagatttaattctgatagccaggctgcggcccactacaaaggcacgaaacatgccaagaagctcaaagcactggaagccatgaaaaataagcagaaatctgtaactgccaaggacagcgcaaagactaccttcacctccatcactaccaataccatcaataccagctctgacaaaacagacggtactgcagggacaccagcaatatcaacgacgacaactgtggaaatccgcaaaagcagtgttatgacaactgagatcacctctaaagtggaaaaaagcccaacgacagccactggcaatagctcatgtccttctactgagaccgaggaagaaaaggcaaaacggcttctttactgttcgctatgcaaggttgctgtcaactctgcctcgcagctggaggcgcacaacagtggtactaagcacaaaaccatgttagaagcccggaatggaagtggcactatcaaagcctttcctagggcaggagtgaaaggcaaaggacctgttaataaaggaaacacaggcctccaaaataaaacatttcactgtgaaatctgtgatgtgcacgtcaactcggaaacgcaacttaaacagcacattagcagtagaaggcacaaagacagagctgctgggaagcccccgaaacctaaatacagtccttacaacaaactacagaagacagcacatccactgggggtaaaattagtattttcaaaagaaccttcaaagccattggctccacgaattctaccaaatcctctagcagctgcagcagccgcagcagcagtggcagtgagttcccccttcagtcttcgaactgctccagcagcaacactgttccagacttctgcgcttcctccggcactcctgcggccagctcccggacccattcggaccgcccacactcctgtgctgtttgctccttactaaattccaaataggagtaattgtactgcaataatttttcaaaaaacaaaaaacaaaacaaacaaaagagaactatgcagtgtttatttatagtttaaagtatatctgaagagccaggacttttgatagtgaattgaaaaggttataaaaaagtgggggaggtttgggggtgggagggagggagtggtattttctccacattaaagcattcctcttgaacgctgattgttttagaagtgatctccagcattgatttgtagtggtatctagaccttctgaagcctctgtgactgtgcttttgggcacctatttccctctgcattgtctgtcctgctttatgaaacaactatacattgtctaagggcattaactggttccaatgtatataaaataatttactctgtagattaaaatcgtacaaaaa

SEQ ID NO: 85225 - DNA, 1233 bp, Homo sapiens
aaagcttcccgagagccatggttggtccaggcaggcagtcggagcacctcgtggagcggctgctaacccagggtggggtggggtggggtggaggggtctgcttgtagtactctcagtcctgatgtcacaggcgcggcaaggacatcgcaaggaggagtcggattacagtaaggatgggcagtgcagcaggcagcccgagcgcactctccagccgccggggatcttagccctggaaaggcagcctgcaaggcgctcatcccgcggaggaggcacgctctcggcgctcactgctctccacgccggggacatttccaccgaatgtagcatgaaagggctctgctctacgtgccagccttgggtgagagctgatgctgaagacaccgcggtgggattccagctgtctgattaatgagaaacataatgtattttggtggtacatgccagagtcctgctctcccggcccttgtccgtccaccagcccctcctttgcaaccatcgctggatattaaaccatttcttccctttcctcttgacactgcagctgcagtcaacctcttccccaatttcaatgcgatggacccgattcagaaagctgtaataaaccatacattcggggttcctcttccccaccgaagaaagcaaatcatatcatgcaacatttgccagttgagatttaattctgatagccaggctgcggcccactacaaaggcacgaaacatgccaagaagctcaaagcactggaagccatgaaaaataagcagaaatctgtaactgccaaggacagcgcaaagactaccttcacctccatcactaccaataccatcaataccagctctgacaaaacagacggtactgcagggacaccagcaatatcaacgacgacaactgtggaaatccgcaaaagcagtgttatgacaactgagatcacctctaaagtggaaaaaagcccaacgacagccactggcaatagctcatgtccttctactgagaccgaggaagaaaaggcaaaacggcttctttactgttcgctatgcaaggttgctgtcaactctgcctcgcagctggaggcgcacaacagtggtgagatgcagcgatttcttttttgtttcaacagctctgcaattatcttcctctgaatagattagatcttttgcagcaggggacaaaggggtggaggaaaactggcaattattacatggaaatcattaaccattaaaaaataaaaatgacga

SEQ ID NO: 85226 - DNA, 322 bp, Homo sapiens
gggattataggcatgagccaccgtgcccggtcttaattatcttttatacattcgaattgtctcataaatacatatctaacagtttatgtagattcagtgttttaccacttcaggtaaaacatagaagccttacatccatataaagctctttatactccctcactgattctttaagtagttgccatgtgttttacatttgcattgtgtttctgctttcaggagtcatacatattttaaagaacttaagaggagaaaaatagtcttttatatttactcagtaatttaccacttcttttttttttttttaaaccagttctttgtt

SEQ ID NO: 85227 - DNA, 1922 bp, Homo sapiens
tctggagccaagtaatggtgatactgatgcttccttttctttgccgcgctcggattctgagtttcacaagaatgtacctgggtgccccttagcgggatatgaatagcttcttcggaaccccagcggccagctggtgcctcctggaaagtgacgtctcatctgcaccggacaaggaggcggggagggagcgcagagcactcagcgtccagcagcgcggcgggccagcctggagcggaagcctggagtggagcaggcagtccgcgggggacagacgtcggctgggattgagccggcagactgcgaaaagtagctggagccggagcagggacagaacctgttgctgcagacgggcttggtggattctggttcctgccgccgacagggctcgccgggagaggttcatcatgaatgagaaatgggacacaaactcttcagaaaactggcatcccatctggaatgtcaatgacacaaagcatcatctgtactcagatattaatattacctatgtgaactactatcttcaccagcctcaagtggcagcaatcttcattatttcctactttctgatcttctttttgtgcatgatgggaaatactgtggtttgctttattgtaatgaggaacaaacatatgcacacagtcactaatctcttcatcttaaacctggccataagtgatttactagttggcatattctgcatgcctataacactgctggacaatattatagcaggatggccatttggaaacacgatgtgcaagatcagtggattggtccagggaatatctgtcgcagcttcagtctttacgttagttgcaattgctgtagataggttccagtgtgtggtctacccttttaaaccaaagctcactatcaagacagcgtttgtcattattatgatcatctgggtcctagccatcaccattatgtctccatctgcagtaatgttacatgtgcaagaagaaaaatattaccgagtgagactcaactcccagaataaaaccagtccagtctactggtgccgggaagactggccaaatcaggaaatgaggaagatctacaccactgtgctgtttgccaacatctacctggctcccctctccctcattgtcatcatgtatggaaggattggaatttcactcttcagggctgcagttcctcacacaggcaggaagaaccaggagcagtggcacgtggtgtccaggaagaagcagaagatcattaagatgctcctgattgtggccctgctttttattctctcatggctgcccctgtggactctaatgatgctctcagactacgctgacctttctccaaatgaactgcagatcatcaacatctacatctacccttttgcacactggctggcattcggcaacagcagtgtcaatcccatcatttatggtttcttcaacgagaatttccgccgtggtttccaagaagctttccagctccagctctgccaaaaaagagcaaagcctatggaagcttatgccctaaaagctaaaagccatgtgctcataaacacatctaatcagcttgtccaggaatctacatttcaaaaccctcatggggaaaccttgctttataggaaaagtgctgaaaaaccccaacaggaattagtgatggaagaattaaaagaaactactaacagcagtgagatttaaaaagagctagtgtgataatcctaactctactacgcattatatatttaaatccattgctttttgtggctttgcacttcaaatttttcaaagaatgttctaaataaaacatttactgaaagccctctctggcaaaaaaattaaaaataaacaaaaatggtcataagatcataaacaatcttatgttgtataaaaatacgtagagtgacttagacatgtttgcatgaataaatatatttctagagaacagttaacaaa

SEQ ID NO: 85228 - DNA, 1562 bp, Homo sapiens
  misc_feature (2)..(4): n is a, c, g, or t
  misc_feature (6)..(6): n is a, c, g, or t
  misc_feature (9)..(13): n is a, c, g, or t
  misc_feature (16)..(16): n is a, c, g, or t
  misc_feature (21)..(21): n is a, c, g, or t
  misc_feature (29)..(30): n is a, c, g, or t
tnnntntgnnnnnctnttctntctcttcnntattaaggttcatcatgaatgagaaatgggacacaaactcttcagaaaactggcatcccatctggaatgtcaatgacacaaagcatcatctgtactcagatattaatattacctatgtgaactactatcttcaccagcctcaagtggcagcaatcttcattatttcctactttctgatcttctttttgtgcatgatgggaaatactgtggtttgctttattgtaatgaggaacaaacatatgcacacagtcactaatctcttcatcttaaacctggccataagtgatttactagttggcatattctgcatgcctataacactgctggacaatattatagcaggatggccatttggaaacacgatgtgcaagatcagtggattggtccagggaatatctgtcgcagcttcagtctttacgttagttgcaattgctgtagataggttccagtgtgtggtctacccttttaaaccaaagctcactatcaagacagcgtttgtcattattatgatcatctgggtcctagccatcaccattatgtctccatctgcagtaatgttacatgtgcaagaagaaaaatattaccgagtgagactcaactcccagaataaaaccagtccagtctactggtgccgggaagactggccaaatcaggaaatgaggaagatctacaccactgtgctgtttgccaacatctacctggctcccctctccctcattgtcatcatgtatggaaggattggaatttcactcttcagggctgcagttcctcacacaggcaggaagaaccaggagcagtggcacgtggtgtccaggaagaagcagaagatcattaagatgctcctgattgtggccctgctttttattctctcatggctgcccctgtggactctaatgatgctctcagactacgctgacctttctccaaatgaactgcagatcatcaacatctacatctacccttttgcacactggctggcattcggcaacagcagtgtcaatcccatcatttatggtttcttcaacgagaatttccgccgtggtttccaagaagctttccagctccagctctgccaaaaaagagcaaagcctatggaagcttatgccctaaaagctaaaagccatgtgctcataaacacatctaatcagcttgtccaggaatctacatttcaaaaccctcatggggaaaccttgctttataggaaaagtgctgaaaaaccccaacaggaattagtgatggaagaattaaaagaaactactaacagcagtgagatttaaaaagagctagtgtgataatcctaactctactacgcattatatatttaaatccattgctttttgtggctttgcacttcaaatttttcaaagaatgttctaaataaaacatttactgaaagccctctctggcaaaaaaattaaaaataaacaaaaatggtcataagatcataaacaatcttatgttgtataaaaatacgtagagtgacttagacatgtttgcatgaataaatatatttctagagaacagttaacaaa

SEQ ID NO: 85229 - DNA, 1140 bp, Homo sapiens
  misc_feature (40)..(40): n is a, c, g, or t
ttcattttttttttattagggagaggtttgaaaaacaaanaaaaacttaggttccagtgtgtggtctacccttttaaaccaaagctcactatcaagacagcgtttgtcattattatgatcatctgggtcctagccatcaccattatgtctccatctgcagtaatgttacatgtgcaagaagaaaaatattaccgagtgagactcaactcccagaataaaaccagtccagtctactggtgccgggaagactggccaaatcaggaaatgaggaagatctacaccactgtgctgtttgccaacatctacctggctcccctctccctcattgtcatcatgtatggaaggattggaatttcactcttcagggctgcagttcctcacacaggcaggaagaaccaggagcagtggcacgtggtgtccaggaagaagcagaagatcattaagatgctcctgattgtggccctgctttttattctctcatggctgcccctgtggactctaatgatgctctcagactacgctgacctttctccaaatgaactgcagatcatcaacatctacatctacccttttgcacactggctggcattcggcaacagcagtgtcaatcccatcatttatggtttcttcaacgagaatttccgccgtggtttccaagaagctttccagctccagctctgccaaaaaagagcaaagcctatggaagcttatgccctaaaagctaaaagccatgtgctcataaacacatctaatcagcttgtccaggaatctacatttcaaaaccctcatggggaaaccttgctttataggaaaagtgctgaaaaaccccaacaggaattagtgatggaagaattaaaagaaactactaacagcagtgagatttaaaaagagctagtgtgataatcctaactctactacgcattatatatttaaatccattgctttttgtggctttgcacttcaaatttttcaaagaatgttctaaataaaacatttactgaaagccctctctggcaaaaaaattaaaaataaacaaaaatggtcataagatcataaacaatcttatgttgtataaaaatacgtagagtgacttagacatgtttgcatgaataaatatatttctagagaacagttaacaaa

SEQ ID NO: 85230 - DNA, 1210 bp, Homo sapiens
ctgtttcattttcctttcaggatggccatttggaaacacgatgtgcaagatcagtggattggtccagggaatatctgtcgcagcttcagtctttacgttagttgcaattgctgtagataggttccagtgtgtggtctacccttttaaaccaaagctcactatcaagacagcgtttgtcattattatgatcatctgggtcctagccatcaccattatgtctccatctgcagtaatgttacatgtgcaagaagaaaaatattaccgagtgagactcaactcccagaataaaaccagtccagtctactggtgccgggaagactggccaaatcaggaaatgaggaagatctacaccactgtgctgtttgccaacatctacctggctcccctctccctcattgtcatcatgtatggaaggattggaatttcactcttcagggctgcagttcctcacacaggcaggaagaaccaggagcagtggcacgtggtgtccaggaagaagcagaagatcattaagatgctcctgattgtggccctgctttttattctctcatggctgcccctgtggactctaatgatgctctcagactacgctgacctttctccaaatgaactgcagatcatcaacatctacatctacccttttgcacactggctggcattcggcaacagcagtgtcaatcccatcatttatggtttcttcaacgagaatttccgccgtggtttccaagaagctttccagctccagctctgccaaaaaagagcaaagcctatggaagcttatgccctaaaagctaaaagccatgtgctcataaacacatctaatcagcttgtccaggaatctacatttcaaaaccctcatggggaaaccttgctttataggaaaagtgctgaaaaaccccaacaggaattagtgatggaagaattaaaagaaactactaacagcagtgagatttaaaaagagctagtgtgataatcctaactctactacgcattatatatttaaatccattgctttttgtggctttgcacttcaaatttttcaaagaatgttctaaataaaacatttactgaaagccctctctggcaaaaaaattaaaaataaacaaaaatggtcataagatcataaacaatcttatgttgtataaaaatacgtagagtgacttagacatgtttgcatgaataaatatatttctagagaacagttaacaaa

SEQ ID NO: 85231 - DNA, 1875 bp, Homo sapiens
aaaggcctcctgagtagctgggactacaggcgcccgccaccacgcctggctaatttttttgtatttttagtagggacggcgtttcactgtgttagccagatggtctccatctcccgacctcgtgatccacccacctcggcctcccaaagtgctgggattacaggcgtgagaccgcgcccggccaatttcctttcttagttgcctctgcccacctcttctcttctgcttccatattacaggtttcctcagttgcgaaattaggatgttaattatagcttttgacatacaagaaacatcaaaaagattgaatgtcttaataagagtgaagcatgtagatcagtgactgctatgttcatcatgaatgagaaatgggacacaaactcttcagaaaactggcatcccatctggaatgtcaatgacacaaagcatcatctgtactcagatattaatattacctatgtgaactactatcttcaccagcctcaagtggcagcaatcttcattatttcctactttctgatcttctttttgtgcatgatgggaaatactgtggtttgctttattgtaatgaggaacaaacatatgcacacagtcactaatctcttcatcttaaacctggccataagtgatttactagttggcatattctgcatgcctataacactgctggacaatattatagcaggatggccatttggaaacacgatgtgcaagatcagtggattggtccagggaatatctgtcgcagcttcagtctttacgttagttgcaattgctgtagataggttccagtgtgtggtctacccttttaaaccaaagctcactatcaagacagcgtttgtcattattatgatcatctgggtcctagccatcaccattatgtctccatctgcagtaatgttacatgtgcaagaagaaaaatattaccgagtgagactcaactcccagaataaaaccagtccagtctactggtgccgggaagactggccaaatcaggaaatgaggaagatctacaccactgtgctgtttgccaacatctacctggctcccctctccctcattgtcatcatgtatggaaggattggaatttcactcttcagggctgcagttcctcacacaggcaggaagaaccaggagcagtggcacgtggtgtccaggaagaagcagaagatcattaagatgctcctgattgtggccctgctttttattctctcatggctgcccctgtggactctaatgatgctctcagactacgctgacctttctccaaatgaactgcagatcatcaacatctacatctacccttttgcacactggctggcattcggcaacagcagtgtcaatcccatcatttatggtttcttcaacgagaatttccgccgtggtttccaagaagctttccagctccagctctgccaaaaaagagcaaagcctatggaagcttatgccctaaaagctaaaagccatgtgctcataaacacatctaatcagcttgtccaggaatctacatttcaaaaccctcatggggaaaccttgctttataggaaaagtgctgaaaaaccccaacaggaattagtgatggaagaattaaaagaaactactaacagcagtgagatttaaaaagagctagtgtgataatcctaactctactacgcattatatatttaaatccattgctttttgtggctttgcacttcaaatttttcaaagaatgttctaaataaaacatttactgaaagccctctctggcaaaaaaattaaaaataaacaaaaatggtcataagatcataaacaatcttatgttgtataaaaatacgtagagtgacttagacatgtttgcatgaataaatatatttctagagaacagttaacaaa

SEQ ID NO: 85232 - DNA, 1655 bp, Homo sapiens
  misc_feature (1)..(3): n is a, c, g, or t
nnnttaaggctggcattactgcaaacctcttggcaaaatttgatgttaattatagcttttgacatacaagaaacatcaaaaagattgaatgtcttaataagagtgaagcatgtagatcagtgactgctatgttcatcatgaatgagaaatgggacacaaactcttcagaaaactggcatcccatctggaatgtcaatgacacaaagcatcatctgtactcagatattaatattacctatgtgaactactatcttcaccagcctcaagtggcagcaatcttcattatttcctactttctgatcttctttttgtgcatgatgggaaatactgtggtttgctttattgtaatgaggaacaaacatatgcacacagtcactaatctcttcatcttaaacctggccataagtgatttactagttggcatattctgcatgcctataacactgctggacaatattatagcaggatggccatttggaaacacgatgtgcaagatcagtggattggtccagggaatatctgtcgcagcttcagtctttacgttagttgcaattgctgtagataggttccagtgtgtggtctacccttttaaaccaaagctcactatcaagacagcgtttgtcattattatgatcatctgggtcctagccatcaccattatgtctccatctgcagtaatgttacatgtgcaagaagaaaaatattaccgagtgagactcaactcccagaataaaaccagtccagtctactggtgccgggaagactggccaaatcaggaaatgaggaagatctacaccactgtgctgtttgccaacatctacctggctcccctctccctcattgtcatcatgtatggaaggattggaatttcactcttcagggctgcagttcctcacacaggcaggaagaaccaggagcagtggcacgtggtgtccaggaagaagcagaagatcattaagatgctcctgattgtggccctgctttttattctctcatggctgcccctgtggactctaatgatgctctcagactacgctgacctttctccaaatgaactgcagatcatcaacatctacatctacccttttgcacactggctggcattcggcaacagcagtgtcaatcccatcatttatggtttcttcaacgagaatttccgccgtggtttccaagaagctttccagctccagctctgccaaaaaagagcaaagcctatggaagcttatgccctaaaagctaaaagccatgtgctcataaacacatctaatcagcttgtccaggaatctacatttcaaaaccctcatggggaaaccttgctttataggaaaagtgctgaaaaaccccaacaggaattagtgatggaagaattaaaagaaactactaacagcagtgagatttaaaaagagctagtgtgataatcctaactctactacgcattatatatttaaatccattgctttttgtggctttgcacttcaaatttttcaaagaatgttctaaataaaacatttactgaaagccctctctggcaaaaaaattaaaaataaacaaaaatggtcataagatcataaacaatcttatgttgtataaaaatacgtagagtgacttagacatgtttgcatgaataaatatatttctagagaacagttaacaaa

SEQ ID NO: 85233 - DNA, 845 bp, Homo sapiens
acgatccggtggtagatctgggatatggtccaagtccagactcttccctgtcacccttgactgttagatgagatagtggatctgagggcctttgaaccatggagttagtaggacttgctgactggtcatggtttaaggagacgagaaaggtctggagcgcctctcagccatccagtttggcaatgggagtgaagtgaacagaagggtcctctggctggagagcagagttcctgcctagagcagcagccaagctgcagcccatccacccactaacccatgtttcacaggctgcccggtgccctggagaaactggccccaaggtctgaccctgccctgcaggagctatgggtctgactgggagatggccttgatcacaactttctaattctgcatgttatgagtgactccattgccctagacccagaattccctggccacctccctgcagggctgtgaagcccatgacaggcctcaccttttctctgctggagcacctgctgtcacagaggcgacagctcctgctgagcttgcctgtgtattttttataagttcttctcaagtgtcacttgtcttgccaggtagatctgcagctccctgagggcagggaccatgaggtgagtgacctccatggagggtctgatgagtcttttcaaacaggtagtcacttaaacaaaaaagagaggaacttggatggtgatggctctgctgagtgaaacggcctcatccttgaacctgaagagtcctgccctgttcaggggagaaggcctcaagtgagcacttctcagatctcagattccccaggcattttgtgtcacctgacctcaggccttagtttctgtccccag

SEQ ID NO: 85234 - DNA, 771 bp, Homo sapiens
tggatgcactacttttgcaactcttctggaaatctaaaattattttaaaataaaaagttttttaaatgacatgcagtgtgaaacacgagaggaaaatgacaaaaatactttaggaaaaacaaaactggagaaaagtttcctaggctaggccacaggccatatgacctaagacactacattaccacagtcaccagtgagtggtcataaccttaacaagaagccaaatcacacctggttctattccaaggaactgggaaaatgcagaggatgtactggttgtctgttttggaaccaactggaggaacagaaaactgaggcccaggttagaaacggcagaatgtatgtctggttagtgagacccaagatatccggcacacaagttacagaaatctcatgacttatggcaaattgaaactctacacaaagatgaaaatataagtgttgtatttatctcattgtgtggcttacacttacactccagaatgagaagtagtaagaaaagaatctgagacagaaatttcttgaattaaaaaccccagcattactcacgcactggcaacgggtgggcatcagtgcgggtaaattactaagctagtaaccttgttaggacataggctcttgcttaggttaaaacagcaacttaaatgaaaggaatgtacaggtgctttttgccacctgggaagtaaaaatatctgatgtcacccaaagatgcaataaagcctgggtttcagccaggcgcggtgtctcatccatgtcatcccagcattctgg

SEQ ID NO: 85235 - DNA, 301 bp, Homo sapiens
acaaaattttcacccaggcagaattgactctttgtccaaattgctgatacaatttgattcaaagtcgctatggataaaattttccagttttctaagattggggatgtgggtgggtgacatttccttattttttcccctctttaacagaatcatagactgatactaataacagccaggcttggagtggtggctcatgcctctaatcttggcactttaggaggctaaggcaggaggatcgcttgagcccaggagttcaaggccagcctgggcaatgtagggagacctcatcgctattaaaaaa

SEQ ID NO: 85236 - DNA, 629 bp, Homo sapiens
tgggggcattttggaaatctgtgggagcattattattgcaaagcgctgctaacatgtagtggtcagaacgcaagggtgcacaatattctctaatgtgtagaattgccccacactgcaataatcatcttgtttcccagttacttctcaaatgtcttgatcttcgaggtagggccttccatttttcttattatctccagacttgaaattgccataggttgacatatatcataagaaattttagtatccatcagcaccccacttctttcatttttctgtatgcacacagaatgtcttctggtctttactcaaatacaagcattcggtgtgcgtgaatacatgcgttagactatttcattgtttcctactgcagtcctgcataagcatttacatattaacatacaaatcattttattataaattacttttatttatcctttacattgtagttagtagatcagttttctgaaattgtaaatatatgttatataatttatcaatttagttttagaattgtacagacagctgtaaaaagggggtgatgagactgataggaagtccattctccacaagttttttgggaacatttttacttagtgaggttttcagttcctacccatctccacagcgtt

SEQ ID NO: 85237 - DNA, 471 bp, Homo sapiens
gctatttgggaggcggaggcaggagaatcacttgagctggggaggcagaggttgcagtgagccaagatgacgtcactacactccagcctgggttacagggcaagactttgtctcaaataaaaaggaaaagaaaataagaatttttaaaatcagtgctttaagctaccagtttaagaagctaggaaagggccaggtgtggtgtctcccacctgtaatcccagcactttgggaggtcaaggcgggcagattacctgaggtcaggagttcgagaccagcctggccaacatggtgaaaccccatctctacaaaaatacaaaaattagccaggtattgatggcaggtgcctgtaatcccagctactcaggaggctgaggcaggagaaacgcttgaacccgggaggcggaggttgcagtgagccgagatcacaccattgaactccagcgtgggcgacagaacaagactccatctcac

SEQ ID NO: 85238 - DNA, 1112 bp, Homo sapiens
gcacgagtaatatcagacaaaggagcttaaagatcaggatttcttccagaggtaaaggttgggggggcgttcttcgtaaagataaggatcagttcatcaagaagatacaacagtcctaaatgtgtaacttttataaaacagtatacccaacaattgcagaatattgttttaagtagacatgaactgctcaacaatatagaccaaatgctggaccataaaataagtcacactaaattccaaaaggaataaaatcatacatggtatattgttaaaccacaaaataaacttgaaattaataaagttaacttgaaaaatccccagataatttggtatcaagtaaacttgttaatcactaatggatcagaggagaatttacaagggaaattagagaatattttaaatctagaccagatgtgatagcatacacctgtaatcccagcactttgggtggtggccaaggtgggaggatcacttgaggccaggagttcaagaccagcctggggaacatagggagaccttgtctctgcaaaaaaaaaaaaaaaatttaagtagctgggtgtggttgtacatacctgtagtcctagcactcaggaggctggggtgggagacttgattgagcccaggaattcaagactgcagtgagctgtgattctgctgctgcactccaggaaaggcgacagagctagaccttttctctaaaaagaaaaaattaaattaaaaaaattttattttcaatttaatgaccagaaagtttgtgggtgtagctaaaacagtgtttagaaaaattttcatagctttaaatacatgtattagaaaacaagaattttcggctgggcgcaatggctcatgcctatgatcccagcactttgggaggctgagatgggcagatcgcttgaggtcaggagttcgagaccagcctggccaacatggtgaaaccccatctctacaaaaatacaaaaattagccaggtattgatggcaggtgcctgtaatcccagctactcaggaggctgaggcaggagaaacgcttgaacccgggaggcggaggttgcagtgagccgagatcacaccattgaactccagcgtgggcgacagaacaagactccatctcac

SEQ ID NO: 85239 - DNA, 817 bp, Homo sapiens
aaaaaaaaaaaaaaaaatcttgcttatagtgaaaaacatacaaattaaatctacactgagacaccatttctcactatcagtttggcaaaaactcaaaagcttgattatatgcatactcttggcaagtatgtgaagaatatatactctcatacattgagaagaataatataccaggtagaattaaaggactcactctgttgctgcccaggctggagtgcagtggcgcatctccgctcactgcaagctccacctccctggttcacgccattctcctgcctcagcctccctacactcaggaggctggggtgggagacttgattgagcccaggaattcaagactgcagtgagctgtgattctgctgctgcactccaggaaaggcgacagagctagaccttttctctaaaaagaaaaaattaaattaaaaaaattttattttcaatttaatgaccagaaagtttgtgggtgtagctaaaacagtgtttagaaaaattttcatagctttaaatacatgtattagaaaacaagaattttcggctgggcgcaatggctcatgcctatgatcccagcactttgggaggctgagatgggcagatcgcttgaggtcaggagttcgagaccagcctggccaacatggtgaaaccccatctctacaaaaatacaaaaattagccaggtattgatggcaggtgcctgtaatcccagctactcaggaggctgaggcaggagaaacgcttgaacccgggaggcggaggttgcagtgagccgagatcacaccattgaactccagcgtgggcgacagaacaagactccatctcac

SEQ ID NO: 85240 - DNA, 538 bp, Homo sapiens
cacaagggaggtcctacccatggaaataagaaaatagtgatccaagttttcacccaacttttgaaatttcaatattttgagccaaatgccttctgaaatgggaggctttgatagtgggaaatactgaaattatcttttccctcagacctttagtgaaacacacatatagttttcactctatgacagtataaacaactcaaatctatactgtttgttaagaacagtttcaagaattaaaaagtgctttagcgttatgatgtattgacatgtttgagcttcagttggggttcaaaacaaccccaacgaggtgaataatgcatataatacattttagatgaatgcactgaatctcagagcagtgaattcagcctgtgcagattcatatagcaaatgatagtgctgcagccagaactgggtctttagaaattacatattaacatgttttctaagtaagtcattttccatcattgccttcaaggatgttttatatcaattgttcagatttccataatatagaagatgcctccatgaaaaaaaa

SEQ ID NO: 85241 - DNA, 351 bp, Homo sapiens
ttggtagagtgattctggaagagtgcatgcatgtgcattcacatgttttattaacatgtgaatatgaaagatattaagcacccatttgtccattttaaatatataattgtatcccttctgtccaacagcatttcactgtagacatttttaagtgtcagttttttagctgaaaaactagaaaaccaaggaagtaaatcattgcccaagctagacttgatcttttcagcatgtcagagtctcatgctttagaaaaccagagaccactctcactattttgtgttcatcctctttctccatttccagtcactttttctgcactgacttcaggttaatcttccataagagggcctt

SEQ ID NO: 85242 - DNA, 712 bp, Homo sapiens
  misc_feature (55)..(55): n is a, c, g, or t
  misc_feature (126)..(126): n is a, c, g, or t
  misc_feature (285)..(285): n is a, c, g, or t
  misc_feature (703)..(712): n is a, c, g, or t
aatgaatggaccctatctagggtccttgtttctccaaaacccgaacagacacccnggtcttgtcacaaacttggcctgtgacctgcagcacatgactgtcactcttgggcctcagtttccccatcnaaaaaacagaggtcatgtgaaatgatggtctctaaggtgccttctaactgatacattatgacaatctttccaaaagcaattgttattcaatggctgagcaaaaaagttataaaattatcccttgtgggaagattcagaccaaggtccagttttctctanatgaaaatgcaacactttacaatgttgtgtaagtgcagaaagtgaaaagacaatcattaaaaagctgagaaaaataaagtcaggaaagaatgctacataaatcgctcagtctgacttcaaagggaaatttttttccaaagtaagatcatgagaattgatttatgtcctcagagccaatgcaaatgcaggatttgtacaatatccatttatcagttccaaaggagctgatttacggcccacctcttctagtttgtattctgtccagctcagaaagttaactgacaacacagaaagaaatatcctctgtctcattgcagatgacgggttataaatgagcacaacttgattctctgttctggaaaattagtgttttgaaactctcattagaaattagtcattaaagctgttcccaaacttnnnnnnnnnn

SEQ ID NO: 85243 - DNA, 466 bp, Homo sapiens
cttcattagttaccccaagacttggcaatcaccctgaccctgttattatatgctagccaatttttcagcaccaaaacaaaaccaccagggagcttgtgccttaagcaccaacatgtacacacactctcctgatatttgccaaaagccacaagtccaggagccatacaaactgctatttcaatgtaaaattgttcattcaaattccaaaccaagattaaaaataattaatcagtattagcataaaacattcaaaatccctaacaaaagcagttttgagatctttccaagattttgaaaatcctaaaaaacatatttagattcctgaagtgagggcaatctccttagcaaatctaagtggtcaagaagacaacatacacatacctcaaattaagactaatttttgcctcctatgacttgcatttctttcaaaacaccctaaagcagtggttcacaaacattagcatgc

SEQ ID NO: 85244 - DNA, 383 bp, Homo sapiens
ctaagtcaaaggtcaaaccacacacttgaaatctcatcacctgtttggccctgttttaagtgtgctttactttctttaatttctgctctaaagcttttaaataaactttcactcctgctctaaaatggaggctgaggcaggagaattgcttgaacccaggagggttcagttagttcagattattctcagggtttcttaagtgaacactctggaaatgttctggtcttcatgataaaggaaatgcaggtaaatatcttttatagctttaacatggatcttttaaagcactctactatattttgaattaaatgatattgatgattttggagcttacaatctattgagggagacaggttaaaccaataagcacagcattaaataca

SEQ ID NO: 85245 - DNA, 395 bp, Homo sapiens
aatgatgtgagggtacaaagagagaaagagaaatagagtccaaacaggggaaagatacttaagtgcctctaggaaggttggggtgtgggttggaggagctaagtgctgagtgtcttaagggagttcgcccacagaagcggagaggaaaagtcaattcaggcagggggcacactgtcaagcaaggcatagagaggaaaaacagcacagtttatgcaaactataagtggtctgttttattggtgcataacaattgctatgagaaggccaagtgtgggggctcacttctgcaatcccagcactttgggaggccaaatcaggaggatcactgcggtctagaagtttgaaaccaccttgggcaacagagtgatatctgttctctgcaacaaataaaaatt

SEQ ID NO: 85246 - DNA, 550 bp, Homo sapiens
  misc_feature (388)..(388): n is a, c, g, or t
tcctcgtttttcatcaattattgtattgttgccttcctggttattttttaatcaagtgctgaacgttgtgcatggaaaattatagttaatttgatgatgggataatgccttcttcctccaaagaagatttatttttgcactggcagatggtttgtgtgcatgcagaggtagatcatctgatttcattcaggttttgggttgtatttaattttttggtgagggctgatccatttttagttcactcttacttgtaggttgtatcttttcagcagtaccaatggaaaccctggaatgtttatcaaagccagtatgctttggcaaattaatttttgccccatcagtccagtgaaactgcccaaagctctactcaggttttcagccttccagntttctgcttttaaaatcagctaatactttaagggggatagtggtgtcaaataatgtatttatctcataaaattttctgctctatgaaatcttggcccctcaagtcttaattgtctttggcagctatgtgataccttctaacaaatgtttaaattttgtccag

SEQ ID NO: 85247 - DNA, 1320 bp, Homo sapiens
gagagaccagaaggtgccaaccgcagaggggtgcagatatctccccctattccccaccccacctcccttgggttttgttcaccgtgctgtcatctgtttttcagacctttttggcatctaacatggtgaagaaaggagtaaagaagagaacaaagtaactcctgggggagcgaagagcgctggtgaccaacaccaccaacgccaccaccagctcctgctgctgcggccacccacgtccaccatttaccgggaggctccagaggcgtaggcagcggatccgagaaaggagcgaggggagtcagccggcttttccgaggagttatggatgttggtgcattcacttctggccagatccgcgcccagagggagctaaccagcagccaccacctcgagctctctccttgccttgcatcgggtcttacccttccagtatgttccttctgatgagacaatttccagtgccgagagtttcagtacaatgtggaaatggatactgacacattgtgcctcagcctttccccacctgcccggctgctgctgctgctgctttttgttgctgttcttggtgtcttccgtccctgtcacctgccaagcccttggtcaggacatggtgtcaccagaggccaccaactcttcttcctcctccttctcctctccttccagcgcgggaaggcatgtgcggagctacaatcaccttcaaggagatgtccgctggagaaagctattctctttcaccaagtactttctcaagattgagaagaacgggaaggtcagcgggaccaagaaggagaactgcccgtacagcatcctggagataacatcagtagaaatcggagttgttgccgtcaaagccattaacagcaactattacttagccatgaacaagaaggggaaactctatggctcaaaagaatttaacaatgactgtaagctgaaggagaggatagaggaaaatggatacaatacctatgcatcatttaactggcagcataatgggaggcaaatgtatgtggcattgaatggaaaaggagctccaaggagaggacagaaaacacgaaggaaaaacacctctgctcactttcttccaatggtggtacactcatagaggaaggcaacgtttgtggatgcagtagaaccaatggctcttttgccaagaatagtggatattcttcatgaagacagtagattgaaaggcaaagacacgttgcagatgtctgcttgcttaaaagaaagccagcctttgaaggtttttgtattcactgctgacatatgatgttcttttaattagttctgtgtcatgtcttataatcaagatatagg

SEQ ID NO: 85248 - DNA, 412 bp, Homo sapiens
ttttttaaaatggtatgtcacttgcattaatttaatagcctttaaaaagcagcatcctgagcaataataagtcacctgcactcagatcaatacagagttgtaaaaggaaaaaaactattaggaatacataataggggaaaagagttctgatatgatttggctgtgtccccactgaaatctcattttgaattgtaataatccccacgtcaagggcagagcctggtggagataattgaaacatgggggcagattccctcagactgttcttgtggtagtgaataactctcacaagatctaatggttttataaatgggatttgccctgcataagctctcttgcctgccaccatgtaagttgtaactctgctcctcattcaccttctgccatgattgtgaggcctccccagccacat

SEQ ID NO: 85249 - DNA, 158 bp, Homo sapiens
aattataactacttagaaaaagtgtttggcagtatctgtgaaagctgggcacatgcatactcgatggccccagcaatctacttctacaaaggtactcacaagaagtatgcatagaatgtttaaagcagcattacaatggccacaaactagaaactacc

SEQ ID NO: 85250 - DNA, 374 bp, Homo sapiens
tccctgcagcccctggtagccatttaatctgttttctgtgtggagttgtcccagacatttcatatgagtggaatcatacactatgtgcccttttgtgtatggcgtctttcacttaccatatttttttcaagcttcagccatgttgaagcatgtgtcagtgtttattcttttttatgactgaataatattctattatatggatataccacatttttgataatccattcatcagttggtagacatttggcttgtctccactttttgtctgttatgagtaatgccactttgaacactcatgtacattttcacagtcttttaagaacgatttttaatatatagagtataaatcagtgagaaaaatgcaaattaattca

SEQ ID NO: 85251 - DNA, 432 bp, Homo sapiens
gtcacttctgaaaccaaaccgcttagcaggtcagcacctatccactgttgggccattgccatgcactccgctggttcagggtggcccctacaactctattcactgccactcagctccaagggtgcagtttgcttatgctagcagtggccacttggattctagagtagaaatatgcacttaaaatccttagtctgtcatccagacatcatggtccactcacggtggttggttctgcagcaaagaacatacacatcatgcatgttaatccatttcatgtagaagctagcagaaagtctccctcaggaaaacaccttggctcaacatgtgatgtcgccttgtgtgtgtgctcaggctgctaatgaaaactcacttagactgtacccagggagccccagagttgaattatgaataagaggatttcaaagtatatca

SEQ ID NO: 85252 - DNA, 342 bp, Homo sapiens
tcaaaacttatttaacatttaaaatattattttattcactattcttagtaaagtttcactcttattccgttattctgaaatatataacttaatatgctttgttattggcagagccctcttctttgtcagggtgtgaatttaggtaatcagtgatgtagtatgagcataatgcttgcggaagggttgtggttgtgtattttctaaggaagatcagttggctacccagacaagatcacagagcagcatttattattcgaagaccgatctgccaatgtaataaatatagaactgtctcataggatggacttaaccaagttcactgatatacaaatcaaaattcca

SEQ ID NO: 85253 - DNA, 1231 bp, Homo sapiens
aattccggcgcacggagggacgcggccggcgcccatggcgttcgcgctgctgcggcccgtcggcgcgcacgtgctgtacccggacgtgcggctgctgagcgaggacgaggagaaccgcagcgagagcgacgcgtcggaccagtcgttcggctgctgcgagggcccggaggcggcgcggcgcggcccgggccccgggggcgggcggcgggcgggcggcggcggcggcgcgggccccgtggtggtggtgcgacagcggcaggcggccaacgcgcgggagcgggaccgcactcagagcgtgaacacggccttcacggcgctgcgcacgctcatccccaccgagccggtggaccgcaagctgtccaagatcgagacgctgcgcctggcgtccagctacatcgcgcacctggccaacgtgctgctgctgggcgactcggccgacgacgggcagccgtgcttccgtgccgcgggcagtgccaagggcgccgtccccgccgcgccgacgcgccgccagccgcgctccatctgcaccttctgcctcagcaaccagcgcaaggggggtggccgtcgtgacctggggggcagctgcttgaaggtgaggggggtggccccccttcgagggccacggagatgagcctggaccctggagaaggaggccaggagccagccactggctggacagggaagaagaccccaggagccaagcccaccccttctttgtgtagggaccgggggaccatggcctgttccgggacactctgggcagggccctcgggacatctccacccgatcctggagagctgtgaggatccattcagcctgcccagctctggctggtcagagacaaggcagaacttttggaaaaacaaagactgttggtgacagggtgtgtgtgtatctgtgcgtgagtgtgagtgtgtgtgagagagaattggtgagtttaaaataaaagctatttttaaataaaagacgtcgttctgagctgaggagagtcccgtggacatcggaggtcagaggtgggccctcccctggacctagagagaggcacagatgttctgggggctgccctgagccctggaagggtgggggtggggcgggggaaggcaggcagagccccctctccgggcgccataaccaaactttcctcagtctgctgtttatcagatgttcttaacaactgttaggtgtctgatatggttggtaaagaaatcttaattttacttatttttgaata

SEQ ID NO: 85254 - DNA, 502 bp, Homo sapiens
agcagtggcagaagggaagaaggttaaggctggagagtaggaatgggcctagggataagatattcactgttaattttcaaagagaagccatggctggatttttggcatgtgaatgatgacctacagttagcttaaggttttaagaaagaacaagcagtcctggggagactgaagcaggatgcaatataaagcagggagatgaattaggatgttctagaaacttactggatgatggtatgatgagaaaaggatggctcaggcactggatgggaaagatgctacactttatgataaaactgagctgaaaaaaagcatgcttacctttttggtcttttagtatttataggcacaaaataaatgttcaatttacttccttgcctcattctctctccactcccgggagtggagagagaatgaaggggtggtggttctgggttcgatttgagttcacctgtgggcagtgggcagtgggcagtgtcttggtgaaagggaacggatacta

SEQ ID NO: 85255 - DNA, 1624 bp, Homo sapiens
tctgccttctctgcctgaggtacttgtttgcaaggagggcttaaaagaaaacggaaatcccgagggcttaaaagaaaagcggaaatccccgcaactgctcaacctctcgtgactgcctgtgttctggggttctgagagggaccgtgcgctgcctggggaagcaatgcaagtctccatagcctgcacagagcacaatttgaagagtcggaatggtgaggaccgacttctgagcaagcagagctccaccgcccccaatgtggtgaacgcagcccgggccaaattccgcacggtcgctatcatcgcgcgcagcctggggacgttcacgcctcagcatcacatttctctcaaagagtccaccgcaaagcagactggcatgaaatataggaatcttggaaaatcaggactcagagtttcttgcttgggtcttggaacatgggtgacatttggaggtcaaatttcagatgaggttgctgaacggctgatgaccatcgcctatgaaagtggtgttaacctctttgatactgccgaagtctatgctgctggaaaggctgaagtgattctggggagcatcatcaagaagaaaggctggaggaggtccagtctggtcataacaaccaaactctactggggtggaaaagctgaaacagaaagagggctgtcaagaaagcatattattgaaggattgaagggctccctccagaggctgcagctcgagtatgtggatgtggtctttgcaaatcgaccggacagtaacactcccatggaagaaattgtccgagccatgacacatgtgataaaccaaggcatggcgatgtactggggcacctcgagatggagtgctatggagatcatggaagcctattctgtagcaagacagttcaatatgatcccaccggtctgtgaacaagctgagtaccatcttttccagagagagaaagtggaggtccagctgccagagctctaccacaaaataggtgttggcgcaatgacatggtctccacttgcctgtggaatcatctcaggaaaatacggaaacggggtgcctgaaagttccagggcttcactgaagtgctaccagtggttgaaagaaagaattgtaagtgaagaagggagaaaacagcaaaacaagctaaaagacctttccccaattgcggagcgtctgggatgcacactacctcagctagctgttgcgtggtgcctgagaaatgaaggtgtgagttctgtgctcctgggatcatccactcctgaacaactcattgaaaaccttggtgccattcaggttctcccaaagatgacatcacatgtggtaaatgagattgataacatactgcgcaacaagccctacagcaagaaggactatagatcataaggcaatgcatgaaccacagaagctgcatggttaaaatagcggcctgtgcccagtacagaaaggtgttactaaccagtcttttgaatcacttagcagcttgctgctcaacctctagtgtccctccctggattcatccaggttgttcccagccctttgtccttgtctgttagggcctctttcttccatggggcgtggcaagggaatagcgacttagtgttctaaataataacatggtcatttccggagtacttgcca

SEQ ID NO: 85256 - DNA, 880 bp, Homo sapiens
aaattttttttgaggttcacatattttattgaattaccattctttgacatcagatctttaccagacattaacatttcaatgttatgcttttccccagtgctaccagtggttgaaagaaagaattgtaagtgaagaagggagaaaacagcaaaacaagctaaaagacctttccccaattgcggagcgtctgggatgcacactacctcagctagctgttggtaagaaaattactaagctatggggtggtagagggacttctgctgagatcatagttttctattgctgaccacacccttaccatgataaaatgtctattgcagggacagatgatctctgaagcataaactcctgctaaatataaagtgagttatttgaggttccccagaattttctacatgatagcaaatttttcttacttctttctccttgctcttataacatagtttgaatgagaacatgtcagtgataacatacactatcacagatgtcaggggtgaactgtgtagtgacatccatttcttctggctcaaatttctgtctgttgaaaactaaaccagggttggtgagaagataagatacagggctgtgacaggcccaaggctactgccacatgaaaagctgatcctagagaaatagcttcaccctgaaagttcttgaaggccataaacgttgttcttctaatgctgtggagtccatgaaaggtcatgattgctggtaacaattgaaaaccacacgcggccgggcgcggtggctcacgcctgtaattccagcactttgggaggccgaggcaggtggatcacgaggtcaggagatcgagaccatcctggctaacagggtgaaaccccgtctctactaaaaatacaaaaaaattacccgggtg

SEQ ID NO: 85257 - DNA, 518 bp, Homo sapiens
ctttatcgtagtgtacaattcacaccttgactaatttgctctggacttaactcaatccaaaccctcaatccaaaccctcccaaagaattaataagggttccctacctttcatattgctcttagtgaaatcggtggtgacaaatttgcttattatttggcatcctacatgtttcttggtttgtactgatttcaccaaagtaaacatttctcatgcatacaaattacagcgaagccttatttctcatcagtataaatttggttgtaatctcattcctccctaggaagcctattctgtagcaagacagttcaatatgatcccaccggtctgtgaacaagctgagtaccatcttttccagagagagaaagtggaggtccagctgccagagctctaccacaaaataggtaatcttcaaaataaaagctactgagtatttttaacaagagaaagatcactgattcggggaaaaaataaaaacagtgttattgaaatgctttcctaaatgtccctaattaacata

SEQ ID NO: 85258 - DNA, 4588 bp, Homo sapiens
tgataacccaaggtattcacagcaagatacagtgagtcttaaagttaagcaccgtgcaattagctttgcttccttgggtttttgaaacatgcatctgtataaacctgcctgtgcagacatcccgagccccaagctgggtctgccaaaatccagtgaatcggctctaaaatgtagatggcacctagcagtgaccaagactcagcctcaggcggcctgcaaacctgtgaggcccagtggagcagccgaacagaaatatgtggaaaagtttctacgtgttcatggaatttcgttgcaggaaaccaccagagcagagacgggcatggcatacaggaatcttggaaaatcaggactcagagtttcttgcttgggtcttggaacatgggtgacatttggaggtcaaatttcagatgaggttgctgaacggctgatgaccatcgcctatgaaagtggtgttaacctctttgatactgccgaagtctatgctgctggaaaggctgaagtgattctggggagcatcatcaagaagaaaggctggaggaggtccagtctggtcataacaaccaaactctactggggtggaaaagctgaaacagaaagagggctgtcaagaaagcatattattgaaggattgaagggctccctccagaggctgcagctcgagtatgtggatgtggtctttgcaaatcgaccggacagtaacactcccatggaagaaattgtccgagccatgacacatgtgataaaccaaggcatggcgatgtactggggcacctcgagatggagtgctatggagatcatggaagcctattctgtagcaagacagttcaatatgatcccaccggtctgtgaacaagctgagtaccatcttttccagagagagaaagtggaggtccagctgccagagctctaccacaaaataggtgttggcgcaatgacatggtctccacttgcctgtggaatcatctcaggaaaatacggaaacggggtgcctgaaagttccagggcttcactgaagtgctaccagtggttgaaagaaagaattgtaagtgaagaagggagaaaacagcaaaacaagctaaaagacctttccccaattgcggagcgtctgggatgcacactacctcagctagctgttgcgtggtgcctgagaaatgaaggtgtgagttctgtgctcctgggatcatccactcctgaacaactcattgaaaaccttggtgccattcaggttctcccaaagatgacatcacatgtggtaaatgagattgataacatactgcgcaacaagccctacagcaagaaggactatagatcataaggcaatgcatgaaccacagaagctgcatggttaaaatagcggcctgtgcccagtacagaaaggtgttactaaccagtcttttgaatcacttagcagcttgctgctcaacctctagtgtccctccctggattctttgaggtgtctgctgtcgctaccactgtgcacatctgaaaactcacaaccaagaaaatccattctattttcttatcttggactggagtcacctattcttgcattgctgtatacacctcatgcttatgcaatgggaagaatatgggggccagggggtgtggtactaccttcaggcatttggtaactcaaagaaggctgtacagatatattttttcaaaagaacaaaatccacagatgcaatgtgagttgcgtaagaaacagagtagatagactaaattcagtgaaggaaaggaattgagagatttttcttagtaaatagattattgttaagtaaatagttattaaaaatatatctcactgcaaaaaaaaaaaaagcagtatcttcactcaaaagtcttgcttggaagaataagcagaaagaattttatatattttttttctattttcacattcatactaacaagttttgttccatttgttattcaataaaacaaaaatttctaggtatttgctttattacctttcaaatatttactgttgcttggccccaagaatggccttgtacaacttatccagaatgtctattaggattctaatgttatgtccacttacaagtagagacagtaaaaggatgaatacccaatctttagtgacaatgcagctgatttatgaaagagagggctacactgctatggaaacttagcttcaaagaaaatgcaatgtatctgcaattaggtgttcattttttactacattttattaaaacctgctttatactttcaactgcttgtaggcacaacttctgcaagtttaaatatttgagctttacaaataaacatacacatgctcagttttttaagtaaacctgtaaaatacccaggaaggcaaatgttcattgtttaattagcactgggattttataatataatgtttggtatttttgaggcattgttaacatgaaagtcaaccactggctttgtgaaaaatgctatgtcactattcagaatatgctgggtaaattaacttgcctagtgaaaagcaaaatgttaaagaaagaacttctggttctataatcatattatatgcactaaactatatgcatgaaagttctttgcatggattaatggggcttacccttgttgcactcgaaatctgaggtgtatctagccctgccactattggctacttaccctcattaatatcccacttgagaaaaattgtgagactatactgtgtcaatatctgtaaaaagagagaaaacatgtttttttttttttgaagggggtggtgtgggagtggccctttaactctatttggctatctgaggatgtacaaaattctcatttaattttctggtcagcaagttccccacacagaaatcactctgaggtttacagaagaactgtaatattattttaaaatgcgattttctgtcattagttctagatatgtacttcatggttaaattctaaatctgaaaatgctagtgggagatatcaagaaattttctttttgattactagtacctgtattctaacagagagtttgaattttttgcccgtgttatcagaatgatggaaattgatcattttcagttgttcattgtgtattcaatccagcgaactgctgtatgtatagaggagctgaggtgctgtctaatgggaaatgtgatttgattgatttatttgcttagagtaataaaagcattttgtgcattcaatcttacaatagattttatctgatctttcactgtaaggcttatgtgtattttccatatatgtaaaacatacacatgtaaaatatatgtggccataaattaggcaataatcatctaaataaaaattatattggcagctaagctgcactgaatactcaacagaaatagtagtgatcaaaagtctgagatttaaattgcaatccaaacatattctatcatcaatcaatcaatggagattaactactgaagataccatttctcactgggttttagaacactccgcactaaggttaaggcttcacaaattcacttttaaaaacttacttgcaaatcaaaaccaaatataaatattatggcttagctgtgggaacagccagttttttatatgcgaatctgtcatggtaaatatactaatgtatttcacagttagttagttagttatgtccttaagaaaaaattccacgcactcttattattttcttttctcttccaaaaagaattccctggcagagaatctatcattccaaaaggtaacctgggtaccagccatccctatatggaaatctcaggcaaactagaaaccctgtgtctggcttcccactttaaaagaactgtcacttcatcttcatgacaagagtgccaaagtcatgaggcagatgtcagagcctgaaggaaacttagccatctgcaaagccatccctctttgacaaacgagcaaagcaggcctggatagatgatgaaaaaacttgcccaaactcacacactgctagttgatggcagaaccaggcctagaacccaagtattttgtgttctagttcagtgctccattaggtagatttttttttctttttaagctttaaagaagaagttttatgcagaaattgtttgtgagaatgttgaagttaaaaaacatagttattaatccaaactcagaaatcaaacagggataagtcagcgaaaagatgatatattgaaaattcatgaaggccaacgagaagttagcctctatcgccctgaaaatttaaaccaaccccccaaaagaccctcctaatctattaattcctctgcttgggagtcccaaggaagtgaaagagaatcccttagagctctgatacatctataaattggttttctccataaatgtacacatacatgtatccttccatcctgtctccagaagcagcagtgactggcatgcacactgaaaacaaagaaatagggcaggcaggaaggcacagcaggtacatactggcagaggcctgatgtctgccctttactgtaactgctcaatgcctttcattgcctcacatacatttgattggtaactacaaagatgtgcatttacatgtgtgagatattaaaatgatggttacatgtatacatatgtaccaaacctgcatggtcagcacatgtatcccagaact

SEQ ID NO: 85259 - DNA, 4542 bp, Homo sapiens
tgataacccaaggtattcacagcaagatacagtgagtcttaaagttaagcaccgtgcaattagctttgcttccttgggtttttgaaacatgcatctgtataaacctgcctgtgcagacatcccgagccccaagctgggtctgccaaaatccagtgaatcggctctaaaatgtagatggcacctagcagtgaccaagactcagcctcaggcggcctgcaaacctgtgaggcccagtggagcagccgaacagaaatatgtggaaaagtttctacgtgttcatggaatttcgttgcaggaaaccaccagagcagagacgggcatggcatacaggaatcttggaaaatcaggactcagagtttcttgcttgggtcttggaacatgggtgacatttggaggtcaaatttcagatgaggttgctgaacggctgatgaccatcgcctatgaaagtggtgttaacctctttgatactgccgaagtctatgctgctggaaaggctgaagtgattctggggagcatcatcaagaagaaaggctggaggaggtccagtctggtcataacaaccaaactctactggggtggaaaagctgaaacagaaagagggctgtcaagaaagcatattattgaaggattgaagggctccctccagaggctgcagctcgagtatgtggatgtggtctttgcaaatcgaccggacagtaacactcccatggaagaaattgtccgagccatgacacatgtgataaaccaaggcatggcgatgtactggggcacctcgagatggagtgctatggagatcatggaagcctattctgtagcaagacagttcaatatgatcccaccggtctgtgaacaagctgagtaccatcttttccagagagagaaagtggaggtccagctgccagagctctaccacaaaataggtgttggcgcaatgacatggtctccacttgcctgtggaatcatctcaggaaaatacggaaacggggtgcctgaaagttccagggcttcactgaagtgctaccagtggttgaaagaaagaattgtaagtgaagaagggagaaaacagcaaaacaagctaaaagacctttccccaattgcggagcgtctgggatgcacactacctcagctagctgttgcgtggtgcctgagaaatgaaggtgtgagttctgtgctcctgggatcatccactcctgaacaactcattgaaaaccttggtgccattcaggttctcccaaagatgacatcacatgtggtaaatgagattgataacatactgcgcaacaagccctacagcaagaaggactatagatcataaggcaatgcatgaaccacagaagctgcatggttaaaatagcggcctgtgcccagtacagaaaggtgttactaaccagtcttttgaatcacttagcagcttgctgctcaacctctagtgtccctccctggattctttgaggtgtctgctgtcgctaccactgtgcacatctgaaaactcacaaccaagaaaatccattctattttcttatcttggactggagtcacctattcttgcattgctgtatacacctcatgcttatgcaatgggaagaatatgggggccagggggtgtggtactaccttcaggcatttggtaactcaaagaaggctgtacagatatattttttcaaaagaacaaaatccacagatgcaatgtgagttgcgtaagaaacagagtagatagactaaattcagtgaaggaaaggaattgagagatttttcttagtaaatagattattgttaagtaaatagttattaaaaatatatctcactgcaaaaaaaaaaaaagcagtatcttcactcaaaagtcttgcttggaagaataagcagaaagaattttatatattttttttctattttcacattcatactaacaagttttgttccatttgttattcaataaaacaaaaatttctaggtatttgctttattacctttcaaatatttactgttgcttggccccaagaatggccttgtacaacttatccagaatgtctattaggattctaatgttatgtccacttacaagtagagacagtaaaaggatgaatacccaatctttagtgacaatgcagctgatttatgaaagagagggctacactgctatggaaacttagcttcaaagaaaatgcaatgtatctgcaattaggtgttcattttttactacattttattaaaacctgctttatactttcaactgcttgtaggcacaacttctgcaagtttaaatatttgagctttacaaataaacatacacatgctcagttttttaagtaaacctgtaaaatacccaggaaggcaaatgttcattgtttaattagcactgggattttataatataatgtttggtatttttgaggcattgttaacatgaaagtcaaccactggctttgtgaaaaatgctatgtcactattcagaatatgctgggtaaattaacttgcctagtgaaaagcaaaatgttaaagaaagaacttctggttctataatcatattatatgcactaaactatatgcatgaaagttctttgcatggattaatggggcttacccttgttgcactcgaaatctgaggtgtatctagccctgccactattggctacttaccctcattaatatcccacttgagaaaaattgtgagactatactgtgtcaatatctgtaaaaagagagaaaacatgtttttttttttttgaagggggtggtgtgggagtggccctttaactctatttggctatctgaggatgtacaaaattctcatttaattttctggtcagcaagttccccacacagaaatcactctgaggtttacagaagaactgtaatattattttaaaatgcgattttctgtcattagttctagatatgtacttcatggttaaattctaaatctgaaaatgctagtgggagatatcaagaaattttctttttgattactagtacctgtattctaacagagagtttgaattttttgcccgtgttatcagaatgatggaaattgatcattttcagttgttcattgtgtattcaatccagcgaactgctgtatgtatagaggagctgaggtgctgtctaatgggaaatgtgatttgattgatttatttgcttagagtaataaaagcattttgtgcattcaatcttacaatagattttatctgatctttcactgtaaggcttatgtgtattttccatatatgtaaaacatacacatgtaaaatatatgtggccataaattaggcaataatcatctaaataaaaattatattggcagctaagctgcactgaatactcaacagaaatagtagtgatcaaaagtctgagatttaaattgcaatccaaacatattctatcatggttttagaacactccgcactaaggttaaggcttcacaaattcacttttaaaaacttacttgcaaatcaaaaccaaatataaatattatggcttagctgtgggaacagccagttttttatatgcgaatctgtcatggtaaatatactaatgtatttcacagttagttagttagttatgtccttaagaaaaaattccacgcactcttattattttcttttctcttccaaaaagaattccctggcagagaatctatcattccaaaaggtaacctgggtaccagccatccctatatggaaatctcaggcaaactagaaaccctgtgtctggcttcccactttaaaagaactgtcacttcatcttcatgacaagagtgccaaagtcatgaggcagatgtcagagcctgaaggaaacttagccatctgcaaagccatccctctttgacaaacgagcaaagcaggcctggatagatgatgaaaaaacttgcccaaactcacacactgctagttgatggcagaaccaggcctagaacccaagtattttgtgttctagttcagtgctccattaggtagatttttttttctttttaagctttaaagaagaagttttatgcagaaattgtttgtgagaatgttgaagttaaaaaacatagttattaatccaaactcagaaatcaaacagggataagtcagcgaaaagatgatatattgaaaattcatgaaggccaacgagaagttagcctctatcgccctgaaaatttaaaccaaccccccaaaagaccctcctaatctattaattcctctgcttgggagtcccaaggaagtgaaagagaatcccttagagctctgatacatctataaattggttttctccataaatgtacacatacatgtatccttccatcctgtctccagaagcagcagtgactggcatgcacactgaaaacaaagaaatagggcaggcaggaaggcacagcaggtacatactggcagaggcctgatgtctgccctttactgtaactgctcaatgcctttcattgcctcacatacatttgattggtaactacaaagatgtgcatttacatgtgtgagatattaaaatgatggttacatgtatacatatgtaccaaacctgcatggtcagcacatgtatcccagaact

SEQ ID NO: 85260 - DNA, 4538 bp, Homo sapiens
tgataacccaaggtattcacagcaagatacagtgagtcttaaagttaagcaccgtgcaattagctttgcttccttgggtttttgaaacatgcatctgtataaacctgcctgtgcagacatcccgagccccaagctgggtctgccaaaatccagtgaatcggctctaaaatgtagatggcacctagcagtgaccaagactcagcctcaggcggcctgcaaacctgtgaggcccagtggagcagccgaacagaaatatgtggaaaagtttctacgtgttcatggaatttcgttgcaggaaaccaccagagcagagacgggcatggcatacaggaatcttggaaaatcaggactcagagtttcttgcttgggtcttggaacatgggtgacatttggaggtcaaatttcagatgaggttgctgaacggctgatgaccatcgcctatgaaagtggtgttaacctctttgatactgccgaagtctatgctgctggaaaggctgaagtgattctggggagcatcatcaagaagaaaggctggaggaggtccagtctggtcataacaaccaaactctactggggtggaaaagctgaaacagaaagagggctgtcaagaaagcatattattgaaggattgaagggctccctccagaggctgcagctcgagtatgtggatgtggtctttgcaaatcgaccggacagtaacactcccatggaagaaattgtccgagccatgacacatgtgataaaccaaggcatggcgatgtactggggcacctcgagatggagtgctatggagatcatggaagcctattctgtagcaagacagttcaatatgatcccaccggtctgtgaacaagctgagtaccatcttttccagagagagaaagtggaggtccagctgccagagctctaccacaaaataggtgttggcgcaatgacatggtctccacttgcctgtggaatcatctcaggaaaatacggaaacggggtgcctgaaagttccagggcttcactgaagtgctaccagtggttgaaagaaagaattgtaagtgaagaagggagaaaacagcaaaacaagctaaaagacctttccccaattgcggagcgtctgggatgcacactacctcagctagctgttgcgtggtgcctgagaaatgaaggtgtgagttctgtgctcctgggatcatccactcctgaacaactcattgaaaaccttggtgccattcaggttctcccaaagatgacatcacatgtggtaaatgagattgataacatactgcgcaacaagccctacagcaagaaggactatagatcataaggcaatgcatgaaccacagaagctgcatggttaaaatagcggcctgtgcccagtacagaaaggtgttactaaccagtcttttgaatcacttagcagcttgctgctcaacctctagtgtccctccctggattctttgaggtgtctgctgtcgctaccactgtgcacatctgaaaactcacaaccaagaaaatccattctattttcttatcttggactggagtcacctattcttgcattgctgtatacacctcatgcttatgcaatgggaagaatatgggggccagggggtgtggtactaccttcaggcatttggtaactcaaagaaggctgtacagatatattttttcaaaagaacaaaatccacagatgcaatgtgagttgcgtaagaaacagagtagatagactaaattcagtgaaggaaaggaattgagagatttttcttagtaaatagattattgttaagtaaatagttattaaaaatatatctcactgcaaaaaaaaaaaaagcagtatcttcactcaaaagtcttgcttggaagaataagcagaaagaattttatatattttttttctattttcacattcatactaacaagttttgttccatttgttattcaataaaacaaaaatttctaggtatttgctttattacctttcaaatatttactgttgcttggccccaagaatggccttgtacaacttatccagaatgtctattaggattctaatgttatgtccacttacaagtagagacagtaaaaggatgaatacccaatctttagtgacaatgcagctgatttatgaaagagagggctacactgctatggaaacttagcttcaaagaaaatgcaatgtatctgcaattaggtgttcattttttactacattttattaaaacctgctttatactttcaactgcttgtaggcacaacttctgcaagtttaaatatttgagctttacaaataaacatacacatgctcagttttttaagtaaacctgtaaaatacccaggaaggcaaatgttcattgtttaattagcactgggattttataatataatgtttggtatttttgaggcattgttaacatgaaagtcaaccactggctttgtgaaaaatgctatgtcactattcagaatatgctgggtaaattaacttgcctagtgaaaagcaaaatgttaaagaaagaacttctggttctataatcatattatatgcactaaactatatgcatgaaagttctttgcatggattaatggggcttacccttgttgcactcgaaatctgaggtgtatctagccctgccactattggctacttaccctcattaatatcccacttgagaaaaattgtgagactatactgtgtcaatatctgtaaaaagagagaaaacatgtttttttttttttgaagggggtggtgtgggagtggccctttaactctatttggctatctgaggatgtacaaaattctcatttaattttctggtcagcaagttccccacacagaaatcactctgaggtttacagaagaactgtaatattattttaaaatgcgattttctgtcattagttctagatatgtacttcatggttaaattctaaatctgaaaatgctagtgggagatatcaagaaattttctttttgattactagtacctgtattctaacagagagtttgaattttttgcccgtgttatcagaatgatggaaattgatcattttcagttgttcattgtgtattcaatccagcgaactgctgtatgtatagaggagctgaggtgctgtctaatgggaaatgtgatttgattgatttatttgcttagagtaataaaagcattttgtgcattcaatcttacaatagattttatctgatctttcactgtaaggcttatgtgtattttccatatatgtaaaacatacacatgtaaaatatatgtggccataaattaggcaataatcatctaaataaaaattatattggcagctaagctgcactgaatactcaacagaaatagtagtgatcaaaagtctgagatttaaattgcaatccaaacatattctatcatcaatcaatcaatggagattaactactgaagataccatttctcactgaaaacttacttgcaaatcaaaaccaaatataaatattatggcttagctgtgggaacagccagttttttatatgcgaatctgtcatggtaaatatactaatgtatttcacagttagttagttagttatgtccttaagaaaaaattccacgcactcttattattttcttttctcttccaaaaagaattccctggcagagaatctatcattccaaaaggtaacctgggtaccagccatccctatatggaaatctcaggcaaactagaaaccctgtgtctggcttcccactttaaaagaactgtcacttcatcttcatgacaagagtgccaaagtcatgaggcagatgtcagagcctgaaggaaacttagccatctgcaaagccatccctctttgacaaacgagcaaagcaggcctggatagatgatgaaaaaacttgcccaaactcacacactgctagttgatggcagaaccaggcctagaacccaagtattttgtgttctagttcagtgctccattaggtagatttttttttctttttaagctttaaagaagaagttttatgcagaaattgtttgtgagaatgttgaagttaaaaaacatagttattaatccaaactcagaaatcaaacagggataagtcagcgaaaagatgatatattgaaaattcatgaaggccaacgagaagttagcctctatcgccctgaaaatttaaaccaaccccccaaaagaccctcctaatctattaattcctctgcttgggagtcccaaggaagtgaaagagaatcccttagagctctgatacatctataaattggttttctccataaatgtacacatacatgtatccttccatcctgtctccagaagcagcagtgactggcatgcacactgaaaacaaagaaatagggcaggcaggaaggcacagcaggtacatactggcagaggcctgatgtctgccctttactgtaactgctcaatgcctttcattgcctcacatacatttgattggtaactacaaagatgtgcatttacatgtgtgagatattaaaatgatggttacatgtatacatatgtaccaaacctgcatggtcagcacatgtatcccagaact

SEQ ID NO: 85261 - DNA, 4586 bp, Homo sapiens
  misc_feature (231)..(231): n is a, c, g, or t
  misc_feature (252)..(254): n is a, c, g, or t
  misc_feature (285)..(286): n is a, c, g, or t
  misc_feature (290)..(290): n is a, c, g, or t
  misc_feature (302)..(302): n is a, c, g, or t
  misc_feature (305)..(305): n is a, c, g, or t
ttcagattactttgatgacagtgacttccagtcttctctgaaagatctccacgatgctggcagcccggacaggggcagcggggagtcagatctcagaggagaacaccaagttaaggagacagtctgggttttctgtagcagggaaagacaaatctcccaagaaagcctcagaaaacgctaaagacagcagccttagtccctcaggggaaagccagctcagggcgcgtcaantggctctgctgcgcgaagtgnnnatgaactggtacctaaagctctgcgacctgnncagngagcacaccacngtntgcaccacaggcatgccgcacaggaatcttggaaaatcaggactcagagtttcttgcttgggtcttggaacatgggtgacatttggaggtcaaatttcagatgaggttgctgaacggctgatgaccatcgcctatgaaagtggtgttaacctctttgatactgccgaagtctatgctgctggaaaggctgaagtgattctggggagcatcatcaagaagaaaggctggaggaggtccagtctggtcataacaaccaaactctactggggtggaaaagctgaaacagaaagagggctgtcaagaaagcatattattgaaggattgaagggctccctccagaggctgcagctcgagtatgtggatgtggtctttgcaaatcgaccggacagtaacactcccatggaagaaattgtccgagccatgacacatgtgataaaccaaggcatggcgatgtactggggcacctcgagatggagtgctatggagatcatggaagcctattctgtagcaagacagttcaatatgatcccaccggtctgtgaacaagctgagtaccatcttttccagagagagaaagtggaggtccagctgccagagctctaccacaaaataggtgttggcgcaatgacatggtctccacttgcctgtggaatcatctcaggaaaatacggaaacggggtgcctgaaagttccagggcttcactgaagtgctaccagtggttgaaagaaagaattgtaagtgaagaagggagaaaacagcaaaacaagctaaaagacctttccccaattgcggagcgtctgggatgcacactacctcagctagctgttgcgtggtgcctgagaaatgaaggtgtgagttctgtgctcctgggatcatccactcctgaacaactcattgaaaaccttggtgccattcaggttctcccaaagatgacatcacatgtggtaaatgagattgataacatactgcgcaacaagccctacagcaagaaggactatagatcataaggcaatgcatgaaccacagaagctgcatggttaaaatagcggcctgtgcccagtacagaaaggtgttactaaccagtcttttgaatcacttagcagcttgctgctcaacctctagtgtccctccctggattctttgaggtgtctgctgtcgctaccactgtgcacatctgaaaactcacaaccaagaaaatccattctattttcttatcttggactggagtcacctattcttgcattgctgtatacacctcatgcttatgcaatgggaagaatatgggggccagggggtgtggtactaccttcaggcatttggtaactcaaagaaggctgtacagatatattttttcaaaagaacaaaatccacagatgcaatgtgagttgcgtaagaaacagagtagatagactaaattcagtgaaggaaaggaattgagagatttttcttagtaaatagattattgttaagtaaatagttattaaaaatatatctcactgcaaaaaaaaaaaaagcagtatcttcactcaaaagtcttgcttggaagaataagcagaaagaattttatatattttttttctattttcacattcatactaacaagttttgttccatttgttattcaataaaacaaaaatttctaggtatttgctttattacctttcaaatatttactgttgcttggccccaagaatggccttgtacaacttatccagaatgtctattaggattctaatgttatgtccacttacaagtagagacagtaaaaggatgaatacccaatctttagtgacaatgcagctgatttatgaaagagagggctacactgctatggaaacttagcttcaaagaaaatgcaatgtatctgcaattaggtgttcattttttactacattttattaaaacctgctttatactttcaactgcttgtaggcacaacttctgcaagtttaaatatttgagctttacaaataaacatacacatgctcagttttttaagtaaacctgtaaaatacccaggaaggcaaatgttcattgtttaattagcactgggattttataatataatgtttggtatttttgaggcattgttaacatgaaagtcaaccactggctttgtgaaaaatgctatgtcactattcagaatatgctgggtaaattaacttgcctagtgaaaagcaaaatgttaaagaaagaacttctggttctataatcatattatatgcactaaactatatgcatgaaagttctttgcatggattaatggggcttacccttgttgcactcgaaatctgaggtgtatctagccctgccactattggctacttaccctcattaatatcccacttgagaaaaattgtgagactatactgtgtcaatatctgtaaaaagagagaaaacatgtttttttttttttgaagggggtggtgtgggagtggccctttaactctatttggctatctgaggatgtacaaaattctcatttaattttctggtcagcaagttccccacacagaaatcactctgaggtttacagaagaactgtaatattattttaaaatgcgattttctgtcattagttctagatatgtacttcatggttaaattctaaatctgaaaatgctagtgggagatatcaagaaattttctttttgattactagtacctgtattctaacagagagtttgaattttttgcccgtgttatcagaatgatggaaattgatcattttcagttgttcattgtgtattcaatccagcgaactgctgtatgtatagaggagctgaggtgctgtctaatgggaaatgtgatttgattgatttatttgcttagagtaataaaagcattttgtgcattcaatcttacaatagattttatctgatctttcactgtaaggcttatgtgtattttccatatatgtaaaacatacacatgtaaaatatatgtggccataaattaggcaataatcatctaaataaaaattatattggcagctaagctgcactgaatactcaacagaaatagtagtgatcaaaagtctgagatttaaattgcaatccaaacatattctatcatcaatcaatcaatggagattaactactgaagataccatttctcactgggttttagaacactccgcactaaggttaaggcttcacaaattcacttttaaaaacttacttgcaaatcaaaaccaaatataaatattatggcttagctgtgggaacagccagttttttatatgcgaatctgtcatggtaaatatactaatgtatttcacagttagttagttagttatgtccttaagaaaaaattccacgcactcttattattttcttttctcttccaaaaagaattccctggcagagaatctatcattccaaaaggtaacctgggtaccagccatccctatatggaaatctcaggcaaactagaaaccctgtgtctggcttcccactttaaaagaactgtcacttcatcttcatgacaagagtgccaaagtcatgaggcagatgtcagagcctgaaggaaacttagccatctgcaaagccatccctctttgacaaacgagcaaagcaggcctggatagatgatgaaaaaacttgcccaaactcacacactgctagttgatggcagaaccaggcctagaacccaagtattttgtgttctagttcagtgctccattaggtagatttttttttctttttaagctttaaagaagaagttttatgcagaaattgtttgtgagaatgttgaagttaaaaaacatagttattaatccaaactcagaaatcaaacagggataagtcagcgaaaagatgatatattgaaaattcatgaaggccaacgagaagttagcctctatcgccctgaaaatttaaaccaaccccccaaaagaccctcctaatctattaattcctctgcttgggagtcccaaggaagtgaaagagaatcccttagagctctgatacatctataaattggttttctccataaatgtacacatacatgtatccttccatcctgtctccagaagcagcagtgactggcatgcacactgaaaacaaagaaatagggcaggcaggaaggcacagcaggtacatactggcagaggcctgatgtctgccctttactgtaactgctcaatgcctttcattgcctcacatacatttgattggtaactacaaagatgtgcatttacatgtgtgagatattaaaatgatggttacatgtatacatatgtaccaaacctgcatggtcagcacatgtatcccagaact

SEQ ID NO: 85262 - DNA, 5355 bp, Homo sapiens
cccccagttccaactgttgtgctgcagcagatttggtctgagtctgggcagagcccctttttatggagcaaccctcccgatttgttacagcaagagcctggtgcaagtgatctttgccttcccatcgcacacaaaggcaaagagctccttaaagggacctgcctgctcctccgtgcagctgcaaacccgtgtcggtgcaggctcagcaacccaggctttcgctcgagaatgagtggggaggggtcttgaggagcccccacgtcctcccggagcggaggcgggagggagctgacagccggagtggatggagaccaccagtccgaggggacccgcttgcgattagctgcttcttgggatgctccgcgcgccagttgagcatcctgcctgtggtccaggggatgctggcggcgcatcttgcggtaagcctgcgctgatttgagccatcgcccagaagcgagcccgcattcagacaccgcggaccggctccgcgaagggctgcgtgcagtcaccatgaatgctcagctctaggcttctgtaaaaacctcccccactgcatggatttggctgtttaatcagccgagattacagcccgggaagatttgcaaacctgattctccctccagctgctgtgacaacttcggggccgtctgtttacttctctgggtccccggggactctttcctgcatcgcagccccttgtgccactttgtgggcttggctcgaaagtcagccgccaggactcctctgacggcatccccaggaagggggagcaaggagggcttaaaagaaaagcggaaatccccgcaactgctcaacctctcgtgactgcctgtgttctggggttctgagagggaccgtgcgctgcctggggaagcaatgcaagtctccatagcctgcacagagcacaatttgaagagtcggaatggtgaggaccgacttctgagcaagcagagctccaccgcccccaatgtggtgaacgcagcccgggccaaattccgcacggtcgctatcatcgcgcgcagcctggggacgttcacgcctcagcatcacatttctctcaaagagtccaccgcaaagcagactggcatgaaatataggaatcttggaaaatcaggactcagagtttcttgcttgggtcttggaacatgggtgacatttggaggtcaaatttcagatgaggttgctgaacggctgatgaccatcgcctatgaaagtggtgttaacctctttgatactgccgaagtctatgctgctggaaaggctgaagtgattctggggagcatcatcaagaagaaaggctggaggaggtccagtctggtcataacaaccaaactctactggggtggaaaagctgaaacagaaagagggctgtcaagaaagcatattattgaaggattgaagggctccctccagaggctgcagctcgagtatgtggatgtggtctttgcaaatcgaccggacagtaacactcccatggaagaaattgtccgagccatgacacatgtgataaaccaaggcatggcgatgtactggggcacctcgagatggagtgctatggagatcatggaagcctattctgtagcaagacagttcaatatgatcccaccggtctgtgaacaagctgagtaccatcttttccagagagagaaagtggaggtccagctgccagagctctaccacaaaataggtgttggcgcaatgacatggtctccacttgcctgtggaatcatctcaggaaaatacggaaacggggtgcctgaaagttccagggcttcactgaagtgctaccagtggttgaaagaaagaattgtaagtgaagaagggagaaaacagcaaaacaagctaaaagacctttccccaattgcggagcgtctgggatgcacactacctcagctagctgttgcgtggtgcctgagaaatgaaggtgtgagttctgtgctcctgggatcatccactcctgaacaactcattgaaaaccttggtgccattcaggttctcccaaagatgacatcacatgtggtaaatgagattgataacatactgcgcaacaagccctacagcaagaaggactatagatcataaggcaatgcatgaaccacagaagctgcatggttaaaatagcggcctgtgcccagtacagaaaggtgttactaaccagtcttttgaatcacttagcagcttgctgctcaacctctagtgtccctccctggattctttgaggtgtctgctgtcgctaccactgtgcacatctgaaaactcacaaccaagaaaatccattctattttcttatcttggactggagtcacctattcttgcattgctgtatacacctcatgcttatgcaatgggaagaatatgggggccagggggtgtggtactaccttcaggcatttggtaactcaaagaaggctgtacagatatattttttcaaaagaacaaaatccacagatgcaatgtgagttgcgtaagaaacagagtagatagactaaattcagtgaaggaaaggaattgagagatttttcttagtaaatagattattgttaagtaaatagttattaaaaatatatctcactgcaaaaaaaaaaaaagcagtatcttcactcaaaagtcttgcttggaagaataagcagaaagaattttatatattttttttctattttcacattcatactaacaagttttgttccatttgttattcaataaaacaaaaatttctaggtatttgctttattacctttcaaatatttactgttgcttggccccaagaatggccttgtacaacttatccagaatgtctattaggattctaatgttatgtccacttacaagtagagacagtaaaaggatgaatacccaatctttagtgacaatgcagctgatttatgaaagagagggctacactgctatggaaacttagcttcaaagaaaatgcaatgtatctgcaattaggtgttcattttttactacattttattaaaacctgctttatactttcaactgcttgtaggcacaacttctgcaagtttaaatatttgagctttacaaataaacatacacatgctcagttttttaagtaaacctgtaaaatacccaggaaggcaaatgttcattgtttaattagcactgggattttataatataatgtttggtatttttgaggcattgttaacatgaaagtcaaccactggctttgtgaaaaatgctatgtcactattcagaatatgctgggtaaattaacttgcctagtgaaaagcaaaatgttaaagaaagaacttctggttctataatcatattatatgcactaaactatatgcatgaaagttctttgcatggattaatggggcttacccttgttgcactcgaaatctgaggtgtatctagccctgccactattggctacttaccctcattaatatcccacttgagaaaaattgtgagactatactgtgtcaatatctgtaaaaagagagaaaacatgtttttttttttttgaagggggtggtgtgggagtggccctttaactctatttggctatctgaggatgtacaaaattctcatttaattttctggtcagcaagttccccacacagaaatcactctgaggtttacagaagaactgtaatattattttaaaatgcgattttctgtcattagttctagatatgtacttcatggttaaattctaaatctgaaaatgctagtgggagatatcaagaaattttctttttgattactagtacctgtattctaacagagagtttgaattttttgcccgtgttatcagaatgatggaaattgatcattttcagttgttcattgtgtattcaatccagcgaactgctgtatgtatagaggagctgaggtgctgtctaatgggaaatgtgatttgattgatttatttgcttagagtaataaaagcattttgtgcattcaatcttacaatagattttatctgatctttcactgtaaggcttatgtgtattttccatatatgtaaaacatacacatgtaaaatatatgtggccataaattaggcaataatcatctaaataaaaattatattggcagctaagctgcactgaatactcaacagaaatagtagtgatcaaaagtctgagatttaaattgcaatccaaacatattctatcatcaatcaatcaatggagattaactactgaagataccatttctcactgggttttagaacactccgcactaaggttaaggcttcacaaattcacttttaaaaacttacttgcaaatcaaaaccaaatataaatattatggcttagctgtgggaacagccagttttttatatgcgaatctgtcatggtaaatatactaatgtatttcacagttagttagttagttatgtccttaagaaaaaattccacgcactcttattattttcttttctcttccaaaaagaattccctggcagagaatctatcattccaaaaggtaacctgggtaccagccatccctatatggaaatctcaggcaaactagaaaccctgtgtctggcttcccactttaaaagaactgtcacttcatcttcatgacaagagtgccaaagtcatgaggcagatgtcagagcctgaaggaaacttagccatctgcaaagccatccctctttgacaaacgagcaaagcaggcctggatagatgatgaaaaaacttgcccaaactcacacactgctagttgatggcagaaccaggcctagaacccaagtattttgtgttctagttcagtgctccattaggtagatttttttttctttttaagctttaaagaagaagttttatgcagaaattgtttgtgagaatgttgaagttaaaaaacatagttattaatccaaactcagaaatcaaacagggataagtcagcgaaaagatgatatattgaaaattcatgaaggccaacgagaagttagcctctatcgccctgaaaatttaaaccaaccccccaaaagaccctcctaatctattaattcctctgcttgggagtcccaaggaagtgaaagagaatcccttagagctctgatacatctataaattggttttctccataaatgtacacatacatgtatccttccatcctgtctccagaagcagcagtgactggcatgcacactgaaaacaaagaaatagggcaggcaggaaggcacagcaggtacatactggcagaggcctgatgtctgccctttactgtaactgctcaatgcctttcattgcctcacatacatttgattggtaactacaaagatgtgcatttacatgtgtgagatattaaaatgatggttacatgtatacatatgtaccaaacctgcatggtcagcacatgtatcccagaact

SEQ ID NO: 85263 - DNA, 4239 bp, Homo sapiens
gctgagacttctttctttccctctccactaaaactaagaaaaataaggagtggttagtgagaggttgctgaacggctgatgaccatcgcctatgaaagtggtgttaacctctttgatactgccgaagtctatgctgctggaaaggctgaagtgattctggggagcatcatcaagaagaaaggctggaggaggtccagtctggtcataacaaccaaactctactggggtggaaaagctgaaacagaaagagggctgtcaagaaagcatattattgaaggattgaagggctccctccagaggctgcagctcgagtatgtggatgtggtctttgcaaatcgaccggacagtaacactcccatggaagaaattgtccgagccatgacacatgtgataaaccaaggcatggcgatgtactggggcacctcgagatggagtgctatggagatcatggaagcctattctgtagcaagacagttcaatatgatcccaccggtctgtgaacaagctgagtaccatcttttccagagagagaaagtggaggtccagctgccagagctctaccacaaaataggtgttggcgcaatgacatggtctccacttgcctgtggaatcatctcaggaaaatacggaaacggggtgcctgaaagttccagggcttcactgaagtgctaccagtggttgaaagaaagaattgtaagtgaagaagggagaaaacagcaaaacaagctaaaagacctttccccaattgcggagcgtctgggatgcacactacctcagctagctgttgcgtggtgcctgagaaatgaaggtgtgagttctgtgctcctgggatcatccactcctgaacaactcattgaaaaccttggtgccattcaggttctcccaaagatgacatcacatgtggtaaatgagattgataacatactgcgcaacaagccctacagcaagaaggactatagatcataaggcaatgcatgaaccacagaagctgcatggttaaaatagcggcctgtgcccagtacagaaaggtgttactaaccagtcttttgaatcacttagcagcttgctgctcaacctctagtgtccctccctggattctttgaggtgtctgctgtcgctaccactgtgcacatctgaaaactcacaaccaagaaaatccattctattttcttatcttggactggagtcacctattcttgcattgctgtatacacctcatgcttatgcaatgggaagaatatgggggccagggggtgtggtactaccttcaggcatttggtaactcaaagaaggctgtacagatatattttttcaaaagaacaaaatccacagatgcaatgtgagttgcgtaagaaacagagtagatagactaaattcagtgaaggaaaggaattgagagatttttcttagtaaatagattattgttaagtaaatagttattaaaaatatatctcactgcaaaaaaaaaaaaagcagtatcttcactcaaaagtcttgcttggaagaataagcagaaagaattttatatattttttttctattttcacattcatactaacaagttttgttccatttgttattcaataaaacaaaaatttctaggtatttgctttattacctttcaaatatttactgttgcttggccccaagaatggccttgtacaacttatccagaatgtctattaggattctaatgttatgtccacttacaagtagagacagtaaaaggatgaatacccaatctttagtgacaatgcagctgatttatgaaagagagggctacactgctatggaaacttagcttcaaagaaaatgcaatgtatctgcaattaggtgttcattttttactacattttattaaaacctgctttatactttcaactgcttgtaggcacaacttctgcaagtttaaatatttgagctttacaaataaacatacacatgctcagttttttaagtaaacctgtaaaatacccaggaaggcaaatgttcattgtttaattagcactgggattttataatataatgtttggtatttttgaggcattgttaacatgaaagtcaaccactggctttgtgaaaaatgctatgtcactattcagaatatgctgggtaaattaacttgcctagtgaaaagcaaaatgttaaagaaagaacttctggttctataatcatattatatgcactaaactatatgcatgaaagttctttgcatggattaatggggcttacccttgttgcactcgaaatctgaggtgtatctagccctgccactattggctacttaccctcattaatatcccacttgagaaaaattgtgagactatactgtgtcaatatctgtaaaaagagagaaaacatgtttttttttttttgaagggggtggtgtgggagtggccctttaactctatttggctatctgaggatgtacaaaattctcatttaattttctggtcagcaagttccccacacagaaatcactctgaggtttacagaagaactgtaatattattttaaaatgcgattttctgtcattagttctagatatgtacttcatggttaaattctaaatctgaaaatgctagtgggagatatcaagaaattttctttttgattactagtacctgtattctaacagagagtttgaattttttgcccgtgttatcagaatgatggaaattgatcattttcagttgttcattgtgtattcaatccagcgaactgctgtatgtatagaggagctgaggtgctgtctaatgggaaatgtgatttgattgatttatttgcttagagtaataaaagcattttgtgcattcaatcttacaatagattttatctgatctttcactgtaaggcttatgtgtattttccatatatgtaaaacatacacatgtaaaatatatgtggccataaattaggcaataatcatctaaataaaaattatattggcagctaagctgcactgaatactcaacagaaatagtagtgatcaaaagtctgagatttaaattgcaatccaaacatattctatcatcaatcaatcaatggagattaactactgaagataccatttctcactgggttttagaacactccgcactaaggttaaggcttcacaaattcacttttaaaaacttacttgcaaatcaaaaccaaatataaatattatggcttagctgtgggaacagccagttttttatatgcgaatctgtcatggtaaatatactaatgtatttcacagttagttagttagttatgtccttaagaaaaaattccacgcactcttattattttcttttctcttccaaaaagaattccctggcagagaatctatcattccaaaaggtaacctgggtaccagccatccctatatggaaatctcaggcaaactagaaaccctgtgtctggcttcccactttaaaagaactgtcacttcatcttcatgacaagagtgccaaagtcatgaggcagatgtcagagcctgaaggaaacttagccatctgcaaagccatccctctttgacaaacgagcaaagcaggcctggatagatgatgaaaaaacttgcccaaactcacacactgctagttgatggcagaaccaggcctagaacccaagtattttgtgttctagttcagtgctccattaggtagatttttttttctttttaagctttaaagaagaagttttatgcagaaattgtttgtgagaatgttgaagttaaaaaacatagttattaatccaaactcagaaatcaaacagggataagtcagcgaaaagatgatatattgaaaattcatgaaggccaacgagaagttagcctctatcgccctgaaaatttaaaccaaccccccaaaagaccctcctaatctattaattcctctgcttgggagtcccaaggaagtgaaagagaatcccttagagctctgatacatctataaattggttttctccataaatgtacacatacatgtatccttccatcctgtctccagaagcagcagtgactggcatgcacactgaaaacaaagaaatagggcaggcaggaaggcacagcaggtacatactggcagaggcctgatgtctgccctttactgtaactgctcaatgcctttcattgcctcacatacatttgattggtaactacaaagatgtgcatttacatgtgtgagatattaaaatgatggttacatgtatacatatgtaccaaacctgcatggtcagcacatgtatcccagaact

SEQ ID NO: 85264 - DNA, 4028 bp, Homo sapiens
cctacaccaatcactgtatactatcactccagttcacttttccatgctattccatctacctgggatgcctgttaaaccccagccatccttcaccagggataagaccaccagtcagaataaatctctccttagtctctagacctgtgctgtgtactactatggttctagccacatgtggctattgtatgcgggaaagatggtgagtcccaaacagagatgtgctttaagtgtaacatgttcacaagatgtgacttagtaccaaaaacaactgtcaagtatcttttctatattgattacatgttgaaataatgttttggatataatgaagtaaaaacatgtattaatttcactgttctttttaaggtatctaatagaaaattttaaattacaaatgtggcttgcattatatttctgttggatagagctgctctatatttctatgagccttcacttatgcctttatgccttcatttatgcagtcaatcaacaaggcccctgacctcaaggagcttacaatgtgatggtgttgggggcggggggcttagatttcagctgtggtttatgaagatatatgattctagattactttgctaaatatagagcacaaaaaaccgaatgatcaacactgctaacaatatcctttgtacttctcctcctgctctcaggttctcccaaagatgacatcacatgtggtaaatgagattgataacatactgcgcaacaagccctacagcaagaaggactatagatcataaggcaatgcatgaaccacagaagctgcatggttaaaatagcggcctgtgcccagtacagaaaggtgttactaaccagtcttttgaatcacttagcagcttgctgctcaacctctagtgtccctccctggattctttgaggtgtctgctgtcgctaccactgtgcacatctgaaaactcacaaccaagaaaatccattctattttcttatcttggactggagtcacctattcttgcattgctgtatacacctcatgcttatgcaatgggaagaatatgggggccagggggtgtggtactaccttcaggcatttggtaactcaaagaaggctgtacagatatattttttcaaaagaacaaaatccacagatgcaatgtgagttgcgtaagaaacagagtagatagactaaattcagtgaaggaaaggaattgagagatttttcttagtaaatagattattgttaagtaaatagttattaaaaatatatctcactgcaaaaaaaaaaaaagcagtatcttcactcaaaagtcttgcttggaagaataagcagaaagaattttatatattttttttctattttcacattcatactaacaagttttgttccatttgttattcaataaaacaaaaatttctaggtatttgctttattacctttcaaatatttactgttgcttggccccaagaatggccttgtacaacttatccagaatgtctattaggattctaatgttatgtccacttacaagtagagacagtaaaaggatgaatacccaatctttagtgacaatgcagctgatttatgaaagagagggctacactgctatggaaacttagcttcaaagaaaatgcaatgtatctgcaattaggtgttcattttttactacattttattaaaacctgctttatactttcaactgcttgtaggcacaacttctgcaagtttaaatatttgagctttacaaataaacatacacatgctcagttttttaagtaaacctgtaaaatacccaggaaggcaaatgttcattgtttaattagcactgggattttataatataatgtttggtatttttgaggcattgttaacatgaaagtcaaccactggctttgtgaaaaatgctatgtcactattcagaatatgctgggtaaattaacttgcctagtgaaaagcaaaatgttaaagaaagaacttctggttctataatcatattatatgcactaaactatatgcatgaaagttctttgcatggattaatggggcttacccttgttgcactcgaaatctgaggtgtatctagccctgccactattggctacttaccctcattaatatcccacttgagaaaaattgtgagactatactgtgtcaatatctgtaaaaagagagaaaacatgtttttttttttttgaagggggtggtgtgggagtggccctttaactctatttggctatctgaggatgtacaaaattctcatttaattttctggtcagcaagttccccacacagaaatcactctgaggtttacagaagaactgtaatattattttaaaatgcgattttctgtcattagttctagatatgtacttcatggttaaattctaaatctgaaaatgctagtgggagatatcaagaaattttctttttgattactagtacctgtattctaacagagagtttgaattttttgcccgtgttatcagaatgatggaaattgatcattttcagttgttcattgtgtattcaatccagcgaactgctgtatgtatagaggagctgaggtgctgtctaatgggaaatgtgatttgattgatttatttgcttagagtaataaaagcattttgtgcattcaatcttacaatagattttatctgatctttcactgtaaggcttatgtgtattttccatatatgtaaaacatacacatgtaaaatatatgtggccataaattaggcaataatcatctaaataaaaattatattggcagctaagctgcactgaatactcaacagaaatagtagtgatcaaaagtctgagatttaaattgcaatccaaacatattctatcatcaatcaatcaatggagattaactactgaagataccatttctcactgggttttagaacactccgcactaaggttaaggcttcacaaattcacttttaaaaacttacttgcaaatcaaaaccaaatataaatattatggcttagctgtgggaacagccagttttttatatgcgaatctgtcatggtaaatatactaatgtatttcacagttagttagttagttatgtccttaagaaaaaattccacgcactcttattattttcttttctcttccaaaaagaattccctggcagagaatctatcattccaaaaggtaacctgggtaccagccatccctatatggaaatctcaggcaaactagaaaccctgtgtctggcttcccactttaaaagaactgtcacttcatcttcatgacaagagtgccaaagtcatgaggcagatgtcagagcctgaaggaaacttagccatctgcaaagccatccctctttgacaaacgagcaaagcaggcctggatagatgatgaaaaaacttgcccaaactcacacactgctagttgatggcagaaccaggcctagaacccaagtattttgtgttctagttcagtgctccattaggtagatttttttttctttttaagctttaaagaagaagttttatgcagaaattgtttgtgagaatgttgaagttaaaaaacatagttattaatccaaactcagaaatcaaacagggataagtcagcgaaaagatgatatattgaaaattcatgaaggccaacgagaagttagcctctatcgccctgaaaatttaaaccaaccccccaaaagaccctcctaatctattaattcctctgcttgggagtcccaaggaagtgaaagagaatcccttagagctctgatacatctataaattggttttctccataaatgtacacatacatgtatccttccatcctgtctccagaagcagcagtgactggcatgcacactgaaaacaaagaaatagggcaggcaggaaggcacagcaggtacatactggcagaggcctgatgtctgccctttactgtaactgctcaatgcctttcattgcctcacatacatttgattggtaactacaaagatgtgcatttacatgtgtgagatattaaaatgatggttacatgtatacatatgtaccaaacctgcatggtcagcacatgtatcccagaact

SEQ ID NO: 85265 - DNA, 3399 bp, Homo sapiens
  misc_feature (30)..(31): n is a, c, g, or t
agagaaagggaaagaggaggcggcggcccnncttaggttctcccaaagatgacatcacatgtggtaaatgagattgataacatactgcgcaacaagccctacagcaagaaggactatagatcataaggcaatgcatgaaccacagaagctgcatggttaaaatagcggcctgtgcccagtacagaaaggtgttactaaccagtcttttgaatcacttagcagcttgctgctcaacctctagtgtccctccctggattctttgaggtgtctgctgtcgctaccactgtgcacatctgaaaactcacaaccaagaaaatccattctattttcttatcttggactggagtcacctattcttgcattgctgtatacacctcatgcttatgcaatgggaagaatatgggggccagggggtgtggtactaccttcaggcatttggtaactcaaagaaggctgtacagatatattttttcaaaagaacaaaatccacagatgcaatgtgagttgcgtaagaaacagagtagatagactaaattcagtgaaggaaaggaattgagagatttttcttagtaaatagattattgttaagtaaatagttattaaaaatatatctcactgcaaaaaaaaaaaaagcagtatcttcactcaaaagtcttgcttggaagaataagcagaaagaattttatatattttttttctattttcacattcatactaacaagttttgttccatttgttattcaataaaacaaaaatttctaggtatttgctttattacctttcaaatatttactgttgcttggccccaagaatggccttgtacaacttatccagaatgtctattaggattctaatgttatgtccacttacaagtagagacagtaaaaggatgaatacccaatctttagtgacaatgcagctgatttatgaaagagagggctacactgctatggaaacttagcttcaaagaaaatgcaatgtatctgcaattaggtgttcattttttactacattttattaaaacctgctttatactttcaactgcttgtaggcacaacttctgcaagtttaaatatttgagctttacaaataaacatacacatgctcagttttttaagtaaacctgtaaaatacccaggaaggcaaatgttcattgtttaattagcactgggattttataatataatgtttggtatttttgaggcattgttaacatgaaagtcaaccactggctttgtgaaaaatgctatgtcactattcagaatatgctgggtaaattaacttgcctagtgaaaagcaaaatgttaaagaaagaacttctggttctataatcatattatatgcactaaactatatgcatgaaagttctttgcatggattaatggggcttacccttgttgcactcgaaatctgaggtgtatctagccctgccactattggctacttaccctcattaatatcccacttgagaaaaattgtgagactatactgtgtcaatatctgtaaaaagagagaaaacatgtttttttttttttgaagggggtggtgtgggagtggccctttaactctatttggctatctgaggatgtacaaaattctcatttaattttctggtcagcaagttccccacacagaaatcactctgaggtttacagaagaactgtaatattattttaaaatgcgattttctgtcattagttctagatatgtacttcatggttaaattctaaatctgaaaatgctagtgggagatatcaagaaattttctttttgattactagtacctgtattctaacagagagtttgaattttttgcccgtgttatcagaatgatggaaattgatcattttcagttgttcattgtgtattcaatccagcgaactgctgtatgtatagaggagctgaggtgctgtctaatgggaaatgtgatttgattgatttatttgcttagagtaataaaagcattttgtgcattcaatcttacaatagattttatctgatctttcactgtaaggcttatgtgtattttccatatatgtaaaacatacacatgtaaaatatatgtggccataaattaggcaataatcatctaaataaaaattatattggcagctaagctgcactgaatactcaacagaaatagtagtgatcaaaagtctgagatttaaattgcaatccaaacatattctatcatcaatcaatcaatggagattaactactgaagataccatttctcactgggttttagaacactccgcactaaggttaaggcttcacaaattcacttttaaaaacttacttgcaaatcaaaaccaaatataaatattatggcttagctgtgggaacagccagttttttatatgcgaatctgtcatggtaaatatactaatgtatttcacagttagttagttagttatgtccttaagaaaaaattccacgcactcttattattttcttttctcttccaaaaagaattccctggcagagaatctatcattccaaaaggtaacctgggtaccagccatccctatatggaaatctcaggcaaactagaaaccctgtgtctggcttcccactttaaaagaactgtcacttcatcttcatgacaagagtgccaaagtcatgaggcagatgtcagagcctgaaggaaacttagccatctgcaaagccatccctctttgacaaacgagcaaagcaggcctggatagatgatgaaaaaacttgcccaaactcacacactgctagttgatggcagaaccaggcctagaacccaagtattttgtgttctagttcagtgctccattaggtagatttttttttctttttaagctttaaagaagaagttttatgcagaaattgtttgtgagaatgttgaagttaaaaaacatagttattaatccaaactcagaaatcaaacagggataagtcagcgaaaagatgatatattgaaaattcatgaaggccaacgagaagttagcctctatcgccctgaaaatttaaaccaaccccccaaaagaccctcctaatctattaattcctctgcttgggagtcccaaggaagtgaaagagaatcccttagagctctgatacatctataaattggttttctccataaatgtacacatacatgtatccttccatcctgtctccagaagcagcagtgactggcatgcacactgaaaacaaagaaatagggcaggcaggaaggcacagcaggtacatactggcagaggcctgatgtctgccctttactgtaactgctcaatgcctttcattgcctcacatacatttgattggtaactacaaagatgtgcatttacatgtgtgagatattaaaatgatggttacatgtatacatatgtaccaaacctgcatggtcagcacatgtatcccagaact

SEQ ID NO: 85266 - DNA, 1991 bp, Homo sapiens
agcgtggtcgcggccgaggtacgcggtattggctacttaccctcattaatatcccacttgagaaaaattgtgagactatactgtgtcaatatctgtaaaaagagagaaaacatgtttttttttttttgaagggggtggtgtgggagtggccctttaactctatttggctatctgaggatgtacaaaattctcatttaattttctggtcagcaagttccccacacagaaatcactctgaggtttacagaagaactgtaatattattttaaaatgcgattttctgtcattagttctagatatgtacttcatggttaaattctaaatctgaaaatgctagtgggagatatcaagaaattttctttttgattactagtacctgtattctaacagagagtttgaattttttgcccgtgttatcagaatgatggaaattgatcattttcagttgttcattgtgtattcaatccagcgaactgctgtatgtatagaggagctgaggtgctgtctaatgggaaatgtgatttgattgatttatttgcttagagtaataaaagcattttgtgcattcaatcttacaatagattttatctgatctttcactgtaaggcttatgtgtattttccatatatgtaaaacatacacatgtaaaatatatgtggccataaattaggcaataatcatctaaataaaaattatattggcagctaagctgcactgaatactcaacagaaatagtagtgatcaaaagtctgagatttaaattgcaatccaaacatattctatcatcaatcaatcaatggagattaactactgaagataccatttctcactgggttttagaacactccgcactaaggttaaggcttcacaaattcacttttaaaaacttacttgcaaatcaaaaccaaatataaatattatggcttagctgtgggaacagccagttttttatatgcgaatctgtcatggtaaatatactaatgtatttcacagttagttagttagttatgtccttaagaaaaaattccacgcactcttattattttcttttctcttccaaaaagaattccctggcagagaatctatcattccaaaaggtaacctgggtaccagccatccctatatggaaatctcaggcaaactagaaaccctgtgtctggcttcccactttaaaagaactgtcacttcatcttcatgacaagagtgccaaagtcatgaggcagatgtcagagcctgaaggaaacttagccatctgcaaagccatccctctttgacaaacgagcaaagcaggcctggatagatgatgaaaaaacttgcccaaactcacacactgctagttgatggcagaaccaggcctagaacccaagtattttgtgttctagttcagtgctccattaggtagatttttttttctttttaagctttaaagaagaagttttatgcagaaattgtttgtgagaatgttgaagttaaaaaacatagttattaatccaaactcagaaatcaaacagggataagtcagcgaaaagatgatatattgaaaattcatgaaggccaacgagaagttagcctctatcgccctgaaaatttaaaccaaccccccaaaagaccctcctaatctattaattcctctgcttgggagtcccaaggaagtgaaagagaatcccttagagctctgatacatctataaattggttttctccataaatgtacacatacatgtatccttccatcctgtctccagaagcagcagtgactggcatgcacactgaaaacaaagaaatagggcaggcaggaaggcacagcaggtacatactggcagaggcctgatgtctgccctttactgtaactgctcaatgcctttcattgcctcacatacatttgattggtaactacaaagatgtgcatttacatgtgtgagatattaaaatgatggttacatgtatacatatgtaccaaacctgcatggtcagcacatgtatcccagaact

SEQ ID NO: 85267 - DNA, 1034 bp, Homo sapiens
tgataacccaaggtattcacagcaagatacagtgagtcttaaagttaagcaccgtgcaattagctttgcttccttgggtttttgaaacatgcatctgtataaacctgcctgtgcagacatcccgagccccaagctgggtctgccaaaatccagtgaatcggctctaaaatgtagatggcacctagcagtgaccaagactcagcctcaggcggcctgcaaacctgtgaggcccagtggagcagccgaacagaaatatgtggaaaagtttctacgtgttcatggaatttcgttgcaggaaaccaccagagcagagacgggcatggcatacaggaatcttggaaaatcaggactcagagtttcttgcttgggtcttggaacatgggtgacatttggaggtcaaatttcagatgaggttgctgaacggctgatgaccatcgcctatgaaagtggtgttaacctctttgatactgccgaagtctatgctgctggaaaggctgaagtgattctggggagcatcatcaagaagaaaggctggaggaagtaacttgacaagaagctgattatccccccacacacatgcatttatgtttgctgtttattttattaactctggatgcaaaggaatgatgaaacaagaagactttgggataaataccccaaagctttcttatctgaacacatttagtcagcatctctcctgtgtgcccaggaaccctattatctggctattcagaacaatgcttcatctgctatccttgagaaacatgaggggctgtgcttacacgtccctttccaacacctcctgtagccaaagatagtggtaataagggaagctataacatctatgggcagtggggaggtaatacttccccatttcactatagatttcagccccaacagccactacttccccagcacgagtacagaattaagcaaagcccagcaaaggttactgaacaagtttggggtcctcctctgccctggcataatatctgctgattaccaaataaatgacagtgtaatgatattagtga

SEQ ID NO: 85268 - DNA, 400 bp, Homo sapiens
taaaaaggtaaatcatgtattctttattaggccaggaatcatcaagcaataaaagtaaaggaagaacttaaaatggtcattatattttcaatatcatttagtgttgttgctgcaaatggaaaatggaatgtcagtttgcccaaaggtaccatcagccttcaaaccatcaatatttcctgtcagactataatgttgtcaccaatattaggctaattttattaatcaaacaaacaattgcattaagcttctaagctttggctagaggagtaaaaatcgcataactttgaaaagtagacaaattcatgaaatgctgtctgtttgaccttccacagaaattgtccgagccatgacacatgtgataaaccaaggcatggcgatgtactggggcacctcgagatgg

SEQ ID NO: 85269 - DNA, 1225 bp, Homo sapiens
catccccagccagatttagctgctgacagctgcttgggactctgccgccagggcctggcccagacctgcctgcctctctcctctccctcagtgactcctgagccacagcccctccatggcccagaaggaagaggctgctgtggccactgaggctgcctcccagaatggggaggatctggagaacctggacgaccctgagaagctgaaagagctgattgagctgccgccctttgagattgtcacaggagaacggctgcctgccaacttctttaaattccagttccggaatgtggagtacagttccgggaggaacaagaccttcctctgctatgtggttgaagcacagggcaaggggggccaagtgcaggcatctcggggatacctagaggatgagcatgcggctgcccatgcagaggaagctttcttcaacaccatcctgccagccttcgacccagccctgcggtacaatgtcacctggtatgtgtcctccagcccctgtgcagcgtgtgctgaccgcattatcaaaacccttagcaagaccaagaacctgcgtctgctcattctggtgggtcgactcttcatgtgggaggagccggagatccaggctgctctgaagaagctgaaggaggctggctgtaaactgcgcatcatgaagccccaggacttcgaatatgtctggcagaattttgtggagcaagaagagggtgaatccaaggcctttcagccctgggaggacattcaggagaacttcctatactacgaggagaagttggcagacatcctgaagtagggcaactgggctttgcctcacgtattcctgctgccaccaagagacagcaatgacatgtacagccatctgggacatgcctgtcttcctaataccatttggagctggacaacatttgacaccaaccaatcatactggacaaggcccttagaggacttgaaatatacttctcatgctgtagtttatttaggctgtgactctctctctaatgctgctctcgggaaggacgaaagtgacctgcaaggagagaaatgcaaccatacatgggctccagtcaactatgggactgaaggtcctaattgctcacccaagggggctgcttaacacaaacagcctcagacccgaggtttagatttctgaaatatgcattttatgttaagttgggtatttttttaaaaaaagaaaaacagcaacattaataaaagaagtggtgtgttt

SEQ ID NO: 85270 - DNA, 1800 bp, Homo sapiens
tttgccaacccatgaagatacaactttcagccatttcttttaaaaagcaggacccagtcactgaagtcagtgagcctatgatagggtatactgtgtggtactctgctcacataaaataagacactttatagtggtgaacagtagtcaaaacagatttctgagggtgccctctgagaatataaaatttaacttttagaattccttgaagattttgttagtgtatgtactatcactgtaattataaacccaacatagattctacagactaaccggcagcttaaaatttaaccccagtatattttcctttcagacatctttcagagtcaagggcccaggtgcctaactagcaagtccttagagcttttttttttttttttttttttcagtgatttcaaatataactgtattatctggacccattaacatgcttccctgtcttctatttgaattgctcatgtttgtgaagggaaaggttaagatatatcaagttaaaaaaaaaaaaactggcatgagataagagtgtaatctaaaagcccaaaagaacaaccctgcttaattaaaataatcttgagaaatgagcatttgttaaataaagtgtcttattttacatacttatttcatctttcttttttttttttttaatgacaaaatagtatttaatcctatatttagtcaaaagaccagagttaaaccagatctcttctggggctttttctgtgtaaaccacatcaaaacatgaacgaaagactggcttctggtttagtcaatcctggtaaatttacccaatcctgcaaaggaaactatggaggagaaatccagggacttgttgggaagggcacacagaaaccttagttcaaaaagaaactagtcattgttcggggccagcagagctctcagtaacacattttctttgtttgttttaccaaggtattcctgctgccaccaagagacagcaatgacatgtacagccatctgggacatgcctgtcttcctaataccatttggagctggacaacatttgacaccaaccaatcatactggacaaggcccttagaggacttgaaatatacttctcatgctgtagtttatttaggctgtgactctctctctaatgctgctctcgggaaggacgaaagtgacctgcaaggagagaaatgcaaccatacatgggctccagtcaactatgggactgaaggtcctaattgctcacccaagggggctgcttaacacaaacagcctcagacccgaggtttagatttctgaaatatgcattttatgttaagttgggtatttttttaaaaaaagaaaaacagcaacattaataaaagaagtggtgtgtttaaaaaaacacacaacacaaaacaaacatccccccccccggtgagagcccgccaaggccacttcaaaaactgccaaacaccaacacaaggggcaccggggccaaaaaagggcaacggcgaaacgggggcacaagaggggagcaccaaaggaagaaaaaaccgcgggtgcacacagagacaaccacagacgaccaagcggaacaaaccacacacaaaaaataaaacacaaccgaccccagagggcaaacaacacccaccaacacgaccccgcggacacacaactgactccgcccacaagagggagagaaatctcggaaagacagtcaacaaacaaaagacgggaaactccacacagccacaacacgggagaagaaccacacaacagacgagcaagaaccacgagcaaatcagaatcagacaatgattcaagcaccccccgccccgcacgcacgaggaaagc

SEQ ID NO: 85271 - DNA, 1130 bp, Homo sapiens
ttgtcactgatgttaccacagacaagacctatttatagtaagagtgaatgcatttctgaagtactgacctggaagagctacctactctaggctggttctagaaacaagaacttatcattctttcctgtccttttgtctccttgacctacagagaacggctgcctgccaacttctttaaattccagttccggaatgtggagtacagttccgggaggaacaagaccttcctctgctatgtggttgaagcacagggcaaggggggccaagtgcaggcatctcggggatacctagaggatgagcatgcggctgcccatgcagaggaagctttcttcaacaccatcctgccagccttcgacccagccctgcggtacaatgtcacctggtatgtgtcctccagcccctgtgcagcgtgtgctgaccgcattatcaaaacccttagcaagaccaagaacctgcgtctgctcattctggtgggtcgactcttcatgtgggaggagccggagatccaggctgctctgaagaagctgaaggaggctggctgtaaactgcgcatcatgaagccccaggacttcgaatatgtctggcagaattttgtggagcaagaagagggtgaatccaaggcctttcagccctgggaggacattcaggagaacttcctatactacgaggagaagttggcagacatcctgaagtagggcaactgggctttgcctcacgtattcctgctgccaccaagagacagcaatgacatgtacagccatctgggacatgcctgtcttcctaataccatttggagctggacaacatttgacaccaaccaatcatactggacaaggcccttagaggacttgaaatatacttctcatgctgtagtttatttaggctgtgactctctctctaatgctgctctcgggaaggacgaaagtgacctgcaaggagagaaatgcaaccatacatgggctccagtcaactatgggactgaaggtcctaattgctcacccaagggggctgcttaacacaaacagcctcagacccgaggtttagatttctgaaatatgcattttatgttaagttgggtatttttttaaaaaaagaaaaacagcaacattaataaaagaagtggtgtgttt

SEQ ID NO: 85272 - DNA, 1029 bp, Homo sapiens
catccccagccagatttagctgctgacagctgcttgggactctgccgccagggcctggcccagacctgcctgcctctctcctctccctcagtgactcctgagccacagcccctccatggcccagaaggaagaggctgctgtggccactgaggctgcctcccagaatggggaggatctggagaacctggacgaccctgagaagctgaaagagctgattgagctgccgccctttgagattgtcacaggagaacggctgcctgccaacttctttaaattccagttccggaatgtggagtacagttccgggaggaacaagaccgcattatcaaaacccttagcaagaccaagaacctgcgtctgctcattctggtgggtcgactcttcatgtgggaggagccggagatccaggctgctctgaagaagctgaaggaggctggctgtaaactgcgcatcatgaagccccaggacttcgaatatgtctggcagaattttgtggagcaagaagagggtgaatccaaggcctttcagccctgggaggacattcaggagaacttcctatactacgaggagaagttggcagacatcctgaagtagggcaactgggctttgcctcacgtattcctgctgccaccaagagacagcaatgacatgtacagccatctgggacatgcctgtcttcctaataccatttggagctggacaacatttgacaccaaccaatcatactggacaaggcccttagaggacttgaaatatacttctcatgctgtagtttatttaggctgtgactctctctctaatgctgctctcgggaaggacgaaagtgacctgcaaggagagaaatgcaaccatacatgggctccagtcaactatgggactgaaggtcctaattgctcacccaagggggctgcttaacacaaacagcctcagacccgaggtttagatttctgaaatatgcattttatgttaagttgggtatttttttaaaaaaagaaaaacagcaacattaataaaagaagtggtgtgttt

SEQ ID NO: 85273 - DNA, 3134 bp, Homo sapiens
tttgccaacccatgaagatacaactttcagccatttcttttaaaaagcaggacccagtcactgaagtcagtgagcctatgatagggtatactgtgtggtactctgctcacataaaataagacactttatagtggtgaacagtagtcaaaacagatttctgagggtgccctctgagaatataaaatttaacttttagaattccttgaagattttgttagtgtatgtactatcactgtaattataaacccaacatagattctacagactaaccggcagcttaaaatttaaccccagtatattttcctttcagacatctttcagagtcaagggcccaggtgcctaactagcaagtccttagagcttttttttttttttttttttttcagtgatttcaaatataactgtattatctggacccattaacatgcttccctgtcttctatttgaattgctcatgtttgtgaagggaaaggttaagatatatcaagttaaaaaaaaaaaaactggcatgagataagagtgtaatctaaaagcccaaaagaacaaccctgcttaattaaaataatcttgagaaatgagcatttgttaaataaagtgtcttattttacatacttatttcatctttcttttttttttttttaatgacaaaatagtatttaatcctatatttagtcaaaagaccagagttaaaccagatctcttctggggctttttctgtgtaaaccacatcaaaacatgaacgaaagactggcttctggtttagtcaatcctggtaaatttacccaatcctgcaaaggaaactatggaggagaaatccagggacttgttgggaagggcacacagaaaccttagttcaaaaagaaactagtcattgttcggggccagcagagctctcagtaacacattttctttgtttgttttaccaaggtattcctgctgccaccaagagacagcaatgacatgtacagccatctgggacatgcctgtcttcctaataccatttggagctggacaacatttgacaccaaccaatcatactggacaaggcccttagaggacttgaaatatacttctcatgctgtagtttatttaggctgtgactctctctctaatgctgctctcgggaaggacgaaagtgacctgcaaggagagaaatgcaaccatacatgggctccagtcaactatgggactgaaggtcctaattgctcacccaagggggctgcttaacacaaacagcctcagacccgaggtttagatttctgaaatatgcattttatgttaagttgggtatttttttaaaaaaagaaaaacagcaacattaataaaagaagtggtgtgtttttcccgtggccagatttttaagaaacttgaacatctggaagttgccacagacaagcgagctagtccagacacagggacactccaggctatgaaccaagccatggttaaaccaagacttgcctagacaatgcagaataactctcccatacagacttcttacgacaatcaagtgagggcctttcccttctctgaaggcaagtaatagggcagaaggtggaacaaaaagcatgagaaatctaaggtagccacatcccaaatgccagttaataagcaactagcttctttattagagaggagcgggtgaaaagtagtagtttaatgttcagatatacaatcatttaaaagtattcaatacatggtgtttgatggtaatggcaggatgatgtcaagtctctctttttttttttttaaaggtttgtttgagtcctatgtggaagcaaaaattcacaggtgaatttccgggtgtttgccaaactctaactaggtttccaggaataatgtgttcactctgattaccagggcatgcctcctttcctcaggcttcaagtgtgataagtcgtcggaatttgacccaagactactatcggcaaatgacaaagtgctttatcacattcctgctaagtcccagaattccacttacagccaatcctgaatgagactaggttttgtctaaagaatcaaggctcaaacgccaagaaaaaaataataataataaccataatctctttaaaagtaaaggaagcctagaaaatccatgttttgacttgtgttaaggtttacagatggtactcaatttacaatggtttgtcttgcaatttttggactttacaacggtgcaaaagccatacacattcagtacacccttcaactgaactcaacttaagatggggttacccagacatagacctaagttgaggagcatctgtaattgcagagttaagcaaaatattttaagtttctttaagtttcttatcccccactctcactttcaattttgtgtatttagataatctctccttcctttttcccttcaactttatgtggacaaaagcaatgcttcaagaaaagcctcaatctaaaagtttgataatgaacttgaccctccactgcccctaccccaacaacatgaagaacttgtctgttccacctagaaatacaaaagtgaaatacttttttgaaactgttgcctcttatcaggctgatatgtgataagaacacagtctaaagtacaaagattatatttaaccagtactttcctggtgttttaaccagccccttctaaaatacagttgttcttttatacttgggaaagcagcaagtcctgtgacagacccaaagtcactctagggagaaaatcaatagcaagtctggctgttttaactctcaacaccactgtaagggaaaacaagaaaatgtctagtttcccgaatagctctgatactgaaccattggctaaatccatgaactttattttcctaccatgaccacaatagacgactggtctttgcagcttcggaagaaaagaggactaatatttagaccccagctggctgcacatccaaatcttctatggaggttaaaaacacaaaagtggccatcccactccaccaccaaatttttttttttaattgagatagggtcttgctctgttgcccacactggagtgcagtggcacaatcacagctcaatgcaacttcaacctcccaggctcaagccatcctcccgcctcaacctctagagtagctggaactacaggcctgcaccaccaggcccagctaatttttaatttcttt

SEQ ID NO: 85274 - DNA, 1684 bp, Homo sapiens
catccccagccagatttagctgctgacagctgcttgggactctgccgccagggcctggcccagacctgcctgcctctctcctctccctcagtgactcctgagccacagcccctccatggcccagaaggaagaggctgctgtggccactgaggctgcctcccagaatggggaggatctggagaacctggacgaccctgagaagctgaaagagctgattgagctgccgccctttgagattgtcacaggagaacggctgcctgccaacttctttaaattccagttccggaatgtggagtacagttccgggaggaacaagaccttcctctgctatgtggttgaagcacagggcaaggggggccaagtgcaggcatctcggggatacctagaggatgagcatgcggctgcccatgcagaggaagctttcttcaacaccatcctgccagccttcgacccagccctgcggtacaatgtcacctggtatgtgtcctccagcccctgtgcagcgtgtgctgaccgcattatcaaaacccttagcaagaccaagaacctgcgtctgctcattctggtgggtcgactcttcatgtgggaggagccggagatccaggctgctctgaagaagctgaaggaggctggctgtaaactgcgcatcatgaagccccaggacttcgaatatgtctggcagaattttgtggagcaagaagagggtgaatccaaggcctttcagccctgggaggacattcaggagaacttcctatactacgaggagaagttggcagacatcctgaagtagggcaactgggctttgcctcacgtattcctgctgccaccaagagacagcaatgacatgtacagccatctgggacatgcctgtcttcctaataccatttggagctggacaacatttgacaccaaccaatcatactggacaaggcccttagaggacttgaaatatacttctcatgctgtagtttatttaggctgtgactctctctctaatgctgctctcgggaaggacgaaagtgacctgcaaggagagaaatgcaaccatacatgggctccagtcaactatgggactgaaggtcctaattgctcacccaagggggctgcttaacacaaacagcctcagacccgaggtttagatttctgaaatatgcattttatgttaagttgggtatttttttaaaaaaagaaaaacagcaacattaataaaagaagtggtgtgtttaaaaaaacacacaacacaaaacaaacatccccccccccggtgagagcccgccaaggccacttcaaaaactgccaaacaccaacacaaggggcaccggggccaaaaaagggcaacggcgaaacgggggcacaagaggggagcaccaaaggaagaaaaaaccgcgggtgcacacagagacaaccacagacgaccaagcggaacaaaccacacacaaaaaataaaacacaaccgaccccagagggcaaacaacacccaccaacacgaccccgcggacacacaactgactccgcccacaagagggagagaaatctcggaaagacagtcaacaaacaaaagacgggaaactccacacagccacaacacgggagaagaaccacacaacagacgagcaagaaccacgagcaaatcagaatcagacaatgattcaagcaccccccgccccgcacgcacgaggaaagc

SEQ ID NO: 85275 - DNA, 3018 bp, Homo sapiens
catccccagccagatttagctgctgacagctgcttgggactctgccgccagggcctggcccagacctgcctgcctctctcctctccctcagtgactcctgagccacagcccctccatggcccagaaggaagaggctgctgtggccactgaggctgcctcccagaatggggaggatctggagaacctggacgaccctgagaagctgaaagagctgattgagctgccgccctttgagattgtcacaggagaacggctgcctgccaacttctttaaattccagttccggaatgtggagtacagttccgggaggaacaagaccttcctctgctatgtggttgaagcacagggcaaggggggccaagtgcaggcatctcggggatacctagaggatgagcatgcggctgcccatgcagaggaagctttcttcaacaccatcctgccagccttcgacccagccctgcggtacaatgtcacctggtatgtgtcctccagcccctgtgcagcgtgtgctgaccgcattatcaaaacccttagcaagaccaagaacctgcgtctgctcattctggtgggtcgactcttcatgtgggaggagccggagatccaggctgctctgaagaagctgaaggaggctggctgtaaactgcgcatcatgaagccccaggacttcgaatatgtctggcagaattttgtggagcaagaagagggtgaatccaaggcctttcagccctgggaggacattcaggagaacttcctatactacgaggagaagttggcagacatcctgaagtagggcaactgggctttgcctcacgtattcctgctgccaccaagagacagcaatgacatgtacagccatctgggacatgcctgtcttcctaataccatttggagctggacaacatttgacaccaaccaatcatactggacaaggcccttagaggacttgaaatatacttctcatgctgtagtttatttaggctgtgactctctctctaatgctgctctcgggaaggacgaaagtgacctgcaaggagagaaatgcaaccatacatgggctccagtcaactatgggactgaaggtcctaattgctcacccaagggggctgcttaacacaaacagcctcagacccgaggtttagatttctgaaatatgcattttatgttaagttgggtatttttttaaaaaaagaaaaacagcaacattaataaaagaagtggtgtgtttttcccgtggccagatttttaagaaacttgaacatctggaagttgccacagacaagcgagctagtccagacacagggacactccaggctatgaaccaagccatggttaaaccaagacttgcctagacaatgcagaataactctcccatacagacttcttacgacaatcaagtgagggcctttcccttctctgaaggcaagtaatagggcagaaggtggaacaaaaagcatgagaaatctaaggtagccacatcccaaatgccagttaataagcaactagcttctttattagagaggagcgggtgaaaagtagtagtttaatgttcagatatacaatcatttaaaagtattcaatacatggtgtttgatggtaatggcaggatgatgtcaagtctctctttttttttttttaaaggtttgtttgagtcctatgtggaagcaaaaattcacaggtgaatttccgggtgtttgccaaactctaactaggtttccaggaataatgtgttcactctgattaccagggcatgcctcctttcctcaggcttcaagtgtgataagtcgtcggaatttgacccaagactactatcggcaaatgacaaagtgctttatcacattcctgctaagtcccagaattccacttacagccaatcctgaatgagactaggttttgtctaaagaatcaaggctcaaacgccaagaaaaaaataataataataaccataatctctttaaaagtaaaggaagcctagaaaatccatgttttgacttgtgttaaggtttacagatggtactcaatttacaatggtttgtcttgcaatttttggactttacaacggtgcaaaagccatacacattcagtacacccttcaactgaactcaacttaagatggggttacccagacatagacctaagttgaggagcatctgtaattgcagagttaagcaaaatattttaagtttctttaagtttcttatcccccactctcactttcaattttgtgtatttagataatctctccttcctttttcccttcaactttatgtggacaaaagcaatgcttcaagaaaagcctcaatctaaaagtttgataatgaacttgaccctccactgcccctaccccaacaacatgaagaacttgtctgttccacctagaaatacaaaagtgaaatacttttttgaaactgttgcctcttatcaggctgatatgtgataagaacacagtctaaagtacaaagattatatttaaccagtactttcctggtgttttaaccagccccttctaaaatacagttgttcttttatacttgggaaagcagcaagtcctgtgacagacccaaagtcactctagggagaaaatcaatagcaagtctggctgttttaactctcaacaccactgtaagggaaaacaagaaaatgtctagtttcccgaatagctctgatactgaaccattggctaaatccatgaactttattttcctaccatgaccacaatagacgactggtctttgcagcttcggaagaaaagaggactaatatttagaccccagctggctgcacatccaaatcttctatggaggttaaaaacacaaaagtggccatcccactccaccaccaaatttttttttttaattgagatagggtcttgctctgttgcccacactggagtgcagtggcacaatcacagctcaatgcaacttcaacctcccaggctcaagccatcctcccgcctcaacctctagagtagctggaactacaggcctgcaccaccaggcccagctaatttttaatttcttt

SEQ ID NO: 85276 - DNA, 1178 bp, Homo sapiens
catccccagccagatttagctgctgacagctgcttgggactctgccgccagggcctggcccagacctgcctgcctctctcctctccctcagtgactcctgagccacagcccctccatggcccagaaggaagaggctgctgtggccactgaggctgcctcccagaatggggaggatctggagaacctggacgaccctgagaagctgaaagagctgattgagctgccgccctttgagattgtcacaggagaacggctgcctgccaacttctttaaattccagttccggaatgtggagtacagttccgggaggaacaagaccttcctctgctatgtggttgaagcacaggcatgcggctgcccatgcagaggaagctttcttcaacaccatcctgccagccttcgacccagccctgcggtacaatgtcacctggtatgtgtcctccagcccctgtgcagcgtgtgctgaccgcattatcaaaacccttagcaagaccaagaacctgcgtctgctcattctggtgggtcgactcttcatgtgggaggagccggagatccaggctgctctgaagaagctgaaggaggctggctgtaaactgcgcatcatgaagccccaggacttcgaatatgtctggcagaattttgtggagcaagaagagggtgaatccaaggcctttcagccctgggaggacattcaggagaacttcctatactacgaggagaagttggcagacatcctgaagtagggcaactgggctttgcctcacgtattcctgctgccaccaagagacagcaatgacatgtacagccatctgggacatgcctgtcttcctaataccatttggagctggacaacatttgacaccaaccaatcatactggacaaggcccttagaggacttgaaatatacttctcatgctgtagtttatttaggctgtgactctctctctaatgctgctctcgggaaggacgaaagtgacctgcaaggagagaaatgcaaccatacatgggctccagtcaactatgggactgaaggtcctaattgctcacccaagggggctgcttaacacaaacagcctcagacccgaggtttagatttctgaaatatgcattttatgttaagttgggtatttttttaaaaaaagaaaaacagcaacattaataaaagaagtggtgtgttt

SEQ ID NO: 85277 - DNA, 2927 bp, Homo sapiens
cgggagtgcagcggctgagaaggtcccttcggtgaaggcgagttccgggacaacagagagggccgcaccgtttccgagtctctcggaggctcagttctcagcgcaccattccccacagctctcctttttactttacccctacccgacacttgaccccggcagtgtgaaccccgctgggagcgtccaaagccatgcctcatcgcggctgcgcagcgcacgtgcacagcctcgcaggagtctcggcgattggctgtgacgcagtttccggcgtgagcggcgaaagccgggagggcgagcgagagagcaagcaggcagcaggctgccggcgggcgggcggacggcacagagggagggagcgagcgagcagtgagtaagccagcaagggcggtcgggtcccgaggtcagccgagatttctcaggtccctccggccccctccctggagtccacagcgcctccggtgtccagaggatcggacacggcccggcccggccatggcctcgttgctgaaggtggatcaggaagtgaagctcaaggttgattctttcagggagcggatcacaagtgaggcagaagacttggtggcaaattttttcccaaagaagttattagaacttgatagttttctgaaggaaccaatcttaaacatccatgacctaactcagatccactctgacatgaatctcccagtccctgaccccattcttctcaccaatagccatgatggactggatggtcccacttataagaagcgaaggttggatgagtgtgaagaagccttccaaggaaccaaggtgtttgtgatgcccaatgggatgctgaaaagcaaccagcagctggtggacattattgagaaagtgaaacctgagatccggctgttgattgagaaatgtaacacggtcaaaatgtgggtacagctcctgattcccaggatagaagatggaaacaactttggggtgtccattcaggaggaaacagttgcagagctaagaactgttgagagtgaagctgcatcttatctggaccagatttctagatattatattacaagagccaaattggtttctaaaatagctaaatatccccatgtggaggactatcgccgcaccgtgacagagattgatgagaaagaatatatcagccttcggctcatcatatcagagctgaggaatcaatatgtcactctacatgacatgatcctgaaaaatatcgagaagatcaaacggccccggagcagcaatgcagagactctgtactgaggccagggccagggccaggggactctgtgagtctggctcaagaccgacattgccttggtttgttacatgactatcgtgatggggaaactggctggaaatagtaatcacacctctctgtttttagttagagtctaatgaaactctcatctagttctgtgatgtgtttacctcttttttcaggcctcaggaactcttctatttccttccctaataccccacacccaacctgtcgtaatttctggagaactccaggtttgtgtgtgcaggatgttggcacaaaaatacctgtgttttcattctccccctctctccctcctgtgtcttgcgctttatgttttcttccgtttgataattagttggttaaaagctgagggaaccggaaggaaagtgctaggtgttttttaggaactagggtggcggggggacgaacttctcttcctcacatgaggttactgtttctttcctctgtggggcattggatcctcccacagttgccctggtgatgacttagggcttcccatctgtgtacatcccactttgaatcttgatcgtgacaagaaataccttaggccttcagtcaattccgaagctccttcagttgtttttataatgggcgttttcacatgcacatatgtgtatgcatgtatacgcccatacagacatgcacacacagactcctactccattagctaacataccctccctctccacaacccctgtcacatacctttcaggaggtgacagttgtcttagttgtcatctacccagacaaacgtcctgggcccgtcctccctcctgatactgtagcctcttggtacccagggtgagttggtggagaacagagagatgagaagcagagggcttggggaaagcctgttcctctctgactcagccctttttggcattattgcaagagcttgactcctggttgccttttcccagccagttttcagttggggtgaaggtttctgcaagtgtgaggtccagatgctgctgctcatgttgggctttccttttgggaactatttctctttatttatagtgtcgggcttccggggaaagcaatcattggtgtgtatgtgtatgtgcatgcacacacgtgcatatacacatttgtgtatgtggaaatgtgctgggcaagtcaaaactatagaagagttgcctcctgtctctcgaatcttccagagatatcacttaattgttaacagcttttgtgttaatccccttcagcccctagctcttttattctaccacggctggagagttgatacctgcagtcagcctgccagtgactcttagtgtctgtttctgacttatttttcctgtctctgtcttccaacccccaataatatttccaccggggatgcatcatttttactcccaatattctgtagagagggagtcaggatgctgtcttcccacgaatagtactcagtaacaaaccaattgcattttagttgggcagtgctcccacccaccctccagatcccttccagctaaaacccttcccccttccctccatgtgtttctcagtttcccgtttcgtttgttggactgttccactgcccctcctcctcaccctatcacccatggatcgtaatgtaaaattcttttaccatgtcaagaaattattaaaaatacaggtactttgacctctttctaaagccgca

SEQ ID NO: 85278 - DNA, 256 bp, Homo sapiens
gtacctatacaagaggagtacaccggtcccagaggaacgaaggactacccaggaatcgtcatgataatagaaccgaaatacagggccaatgaggccccttccctccatgtgtttctcagtttcccgtttcgtttgttggactgttccactgcccctcctcctcaccctatcacccatggatcgtaatgtaaaattcttttaccatgtcaagaaattattaaaaatacaggtactttgacctctttctaaagccgca

SEQ ID NO: 85279 - DNA, 2701 bp, Homo sapiens
  misc_feature (51)..(51): n is a, c, g, or t
aacactaccgtagaagcatacctacagggagaggaaaacattgtgcttggntcgaggtcgtggtgttgagcgagagagcaagcaggcagcaggctgccggcgggcgggcggacggcacagagggagggagcgagcgagcagtgagtaagccagcaagggcggtcgggtcccgaggtcagccgagatttctcaggtccctccggccccctccctggagtccacagcgcctccggtgtccagaggatcggacacggcccggcccggccatggcctcgttgctgaaggtggatcaggaagtgaagctcaaggttgattctttcagggagcggatcacaagtgaggcagaagacttggtggcaaattttttcccaaagaagttattagaacttgatagttttctgaaggaaccaatcttaaacatccatgacctaactcagatccactctgacatgaatctcccagtccctgaccccattcttctcaccaatagccatgatggactggatggtcccacttataagaagcgaaggttggatgagtgtgaagaagccttccaaggaaccaaggtgtttgtgatgcccaatgggatgctgaaaagcaaccagcagctggtggacattattgagaaagtgaaacctgagatccggctgttgattgagaaatgtaacacggtcaaaatgtgggtacagctcctgattcccaggatagaagatggaaacaactttggggtgtccattcaggaggaaacagttgcagagctaagaactgttgagagtgaagctgcatcttatctggaccagatttctagatattatattacaagagccaaattggtttctaaaatagctaaatatccccatgtggaggactatcgccgcaccgtgacagagattgatgagaaagaatatatcagccttcggctcatcatatcagagctgaggaatcaatatgtcactctacatgacatgatcctgaaaaatatcgagaagatcaaacggccccggagcagcaatgcagagactctgtactgaggccagggccagggccaggggactctgtgagtctggctcaagaccgacattgccttggtttgttacatgactatcgtgatggggaaactggctggaaatagtaatcacacctctctgtttttagttagagtctaatgaaactctcatctagttctgtgatgtgtttacctcttttttcaggcctcaggaactcttctatttccttccctaataccccacacccaacctgtcgtaatttctggagaactccaggtttgtgtgtgcaggatgttggcacaaaaatacctgtgttttcattctccccctctctccctcctgtgtcttgcgctttatgttttcttccgtttgataattagttggttaaaagctgagggaaccggaaggaaagtgctaggtgttttttaggaactagggtggcggggggacgaacttctcttcctcacatgaggttactgtttctttcctctgtggggcattggatcctcccacagttgccctggtgatgacttagggcttcccatctgtgtacatcccactttgaatcttgatcgtgacaagaaataccttaggccttcagtcaattccgaagctccttcagttgtttttataatgggcgttttcacatgcacatatgtgtatgcatgtatacgcccatacagacatgcacacacagactcctactccattagctaacataccctccctctccacaacccctgtcacatacctttcaggaggtgacagttgtcttagttgtcatctacccagacaaacgtcctgggcccgtcctccctcctgatactgtagcctcttggtacccagggtgagttggtggagaacagagagatgagaagcagagggcttggggaaagcctgttcctctctgactcagccctttttggcattattgcaagagcttgactcctggttgccttttcccagccagttttcagttggggtgaaggtttctgcaagtgtgaggtccagatgctgctgctcatgttgggctttccttttgggaactatttctctttatttatagtgtcgggcttccggggaaagcaatcattggtgtgtatgtgtatgtgcatgcacacacgtgcatatacacatttgtgtatgtggaaatgtgctgggcaagtcaaaactatagaagagttgcctcctgtctctcgaatcttccagagatatcacttaattgttaacagcttttgtgttaatccccttcagcccctagctcttttattctaccacggctggagagttgatacctgcagtcagcctgccagtgactcttagtgtctgtttctgacttatttttcctgtctctgtcttccaacccccaataatatttccaccggggatgcatcatttttactcccaatattctgtagagagggagtcaggatgctgtcttcccacgaatagtactcagtaacaaaccaattgcattttagttgggcagtgctcccacccaccctccagatcccttccagctaaaacccttcccccttccctccatgtgtttctcagtttcccgtttcgtttgttggactgttccactgcccctcctcctcaccctatcacccatggatcgtaatgtaaaattcttttaccatgtcaagaaattattaaaaatacaggtactttgacctctttctaaagccgca

SEQ ID NO: 85280 - DNA, 2664 bp, Homo sapiens
tatacagctaggtacgaggcctggtggtgagagcgagagagcaagcaggcagcaggctgccggcgggcgggcggacggcacagagggagggagcgagcgagcagtgagtaagccagcaagggcggtcgggtcccgaggtcagccgagatttctcaggtccctccggccccctccctggagtccacagcgcctccggtgtccagaggatcggacacggcccggcccggccatggcctcgttgctgaaggtggatcaggaagtgaagctcaaggttgattctttcagggagcggatcacaagtgaggcagaagacttggtggcaaattttttcccaaagaagttattagaacttgatagttttctgaaggaaccaatcttaaacatccatgacctaactcagatccactctgacatgaatctcccagtccctgaccccattcttctcaccaatagccatgatggactggatggtcccacttataagaagcgaaggttggatgagtgtgaagaagccttccaaggaaccaaggtgtttgtgatgcccaatgggatgctgaaaagcaaccagcagctggtggacattattgagaaagtgaaacctgagatccggctgttgattgagaaatgtaacacggtcaaaatgtgggtacagctcctgattcccaggatagaagatggaaacaactttggggtgtccattcaggaggaaacagttgcagagctaagaactgttgagagtgaagctgcatcttatctggaccagatttctagatattatattacaagagccaaattggtttctaaaatagctaaatatccccatgtggaggactatcgccgcaccgtgacagagattgatgagaaagaatatatcagccttcggctcatcatatcagagctgaggaatcaatatgtcactctacatgacatgatcctgaaaaatatcgagaagatcaaacggccccggagcagcaatgcagagactctgtactgaggccagggccagggccaggggactctgtgagtctggctcaagaccgacattgccttggtttgttacatgactatcgtgatggggaaactggctggaaatagtaatcacacctctctgtttttagttagagtctaatgaaactctcatctagttctgtgatgtgtttacctcttttttcaggcctcaggaactcttctatttccttccctaataccccacacccaacctgtcgtaatttctggagaactccaggtttgtgtgtgcaggatgttggcacaaaaatacctgtgttttcattctccccctctctccctcctgtgtcttgcgctttatgttttcttccgtttgataattagttggttaaaagctgagggaaccggaaggaaagtgctaggtgttttttaggaactagggtggcggggggacgaacttctcttcctcacatgaggttactgtttctttcctctgtggggcattggatcctcccacagttgccctggtgatgacttagggcttcccatctgtgtacatcccactttgaatcttgatcgtgacaagaaataccttaggccttcagtcaattccgaagctccttcagttgtttttataatgggcgttttcacatgcacatatgtgtatgcatgtatacgcccatacagacatgcacacacagactcctactccattagctaacataccctccctctccacaacccctgtcacatacctttcaggaggtgacagttgtcttagttgtcatctacccagacaaacgtcctgggcccgtcctccctcctgatactgtagcctcttggtacccagggtgagttggtggagaacagagagatgagaagcagagggcttggggaaagcctgttcctctctgactcagccctttttggcattattgcaagagcttgactcctggttgccttttcccagccagttttcagttggggtgaaggtttctgcaagtgtgaggtccagatgctgctgctcatgttgggctttccttttgggaactatttctctttatttatagtgtcgggcttccggggaaagcaatcattggtgtgtatgtgtatgtgcatgcacacacgtgcatatacacatttgtgtatgtggaaatgtgctgggcaagtcaaaactatagaagagttgcctcctgtctctcgaatcttccagagatatcacttaattgttaacagcttttgtgttaatccccttcagcccctagctcttttattctaccacggctggagagttgatacctgcagtcagcctgccagtgactcttagtgtctgtttctgacttatttttcctgtctctgtcttccaacccccaataatatttccaccggggatgcatcatttttactcccaatattctgtagagagggagtcaggatgctgtcttcccacgaatagtactcagtaacaaaccaattgcattttagttgggcagtgctcccacccaccctccagatcccttccagctaaaacccttcccccttccctccatgtgtttctcagtttcccgtttcgtttgttggactgttccactgcccctcctcctcaccctatcacccatggatcgtaatgtaaaattcttttaccatgtcaagaaattattaaaaatacaggtactttgacctctttctaaagccgca

SEQ ID NO: 85281 - DNA, 2643 bp, Homo sapiens
taggccgttcagtgtttacatgcatgtgtgccttggctgcgttcgagattggacaggcacagagggagggagcgagcgagcagtgagtaagccagcaagggcggtcgggtcccgaggtcagccgagatttctcaggtccctccggccccctccctggagtccacagcgcctccggtgtccagaggatcggacacggcccggcccggccatggcctcgttgctgaaggtggatcaggaagtgaagctcaaggttgattctttcagggagcggatcacaagtgaggcagaagacttggtggcaaattttttcccaaagaagttattagaacttgatagttttctgaaggaaccaatcttaaacatccatgacctaactcagatccactctgacatgaatctcccagtccctgaccccattcttctcaccaatagccatgatggactggatggtcccacttataagaagcgaaggttggatgagtgtgaagaagccttccaaggaaccaaggtgtttgtgatgcccaatgggatgctgaaaagcaaccagcagctggtggacattattgagaaagtgaaacctgagatccggctgttgattgagaaatgtaacacggtcaaaatgtgggtacagctcctgattcccaggatagaagatggaaacaactttggggtgtccattcaggaggaaacagttgcagagctaagaactgttgagagtgaagctgcatcttatctggaccagatttctagatattatattacaagagccaaattggtttctaaaatagctaaatatccccatgtggaggactatcgccgcaccgtgacagagattgatgagaaagaatatatcagccttcggctcatcatatcagagctgaggaatcaatatgtcactctacatgacatgatcctgaaaaatatcgagaagatcaaacggccccggagcagcaatgcagagactctgtactgaggccagggccagggccaggggactctgtgagtctggctcaagaccgacattgccttggtttgttacatgactatcgtgatggggaaactggctggaaatagtaatcacacctctctgtttttagttagagtctaatgaaactctcatctagttctgtgatgtgtttacctcttttttcaggcctcaggaactcttctatttccttccctaataccccacacccaacctgtcgtaatttctggagaactccaggtttgtgtgtgcaggatgttggcacaaaaatacctgtgttttcattctccccctctctccctcctgtgtcttgcgctttatgttttcttccgtttgataattagttggttaaaagctgagggaaccggaaggaaagtgctaggtgttttttaggaactagggtggcggggggacgaacttctcttcctcacatgaggttactgtttctttcctctgtggggcattggatcctcccacagttgccctggtgatgacttagggcttcccatctgtgtacatcccactttgaatcttgatcgtgacaagaaataccttaggccttcagtcaattccgaagctccttcagttgtttttataatgggcgttttcacatgcacatatgtgtatgcatgtatacgcccatacagacatgcacacacagactcctactccattagctaacataccctccctctccacaacccctgtcacatacctttcaggaggtgacagttgtcttagttgtcatctacccagacaaacgtcctgggcccgtcctccctcctgatactgtagcctcttggtacccagggtgagttggtggagaacagagagatgagaagcagagggcttggggaaagcctgttcctctctgactcagccctttttggcattattgcaagagcttgactcctggttgccttttcccagccagttttcagttggggtgaaggtttctgcaagtgtgaggtccagatgctgctgctcatgttgggctttccttttgggaactatttctctttatttatagtgtcgggcttccggggaaagcaatcattggtgtgtatgtgtatgtgcatgcacacacgtgcatatacacatttgtgtatgtggaaatgtgctgggcaagtcaaaactatagaagagttgcctcctgtctctcgaatcttccagagatatcacttaattgttaacagcttttgtgttaatccccttcagcccctagctcttttattctaccacggctggagagttgatacctgcagtcagcctgccagtgactcttagtgtctgtttctgacttatttttcctgtctctgtcttccaacccccaataatatttccaccggggatgcatcatttttactcccaatattctgtagagagggagtcaggatgctgtcttcccacgaatagtactcagtaacaaaccaattgcattttagttgggcagtgctcccacccaccctccagatcccttccagctaaaacccttcccccttccctccatgtgtttctcagtttcccgtttcgtttgttggactgttccactgcccctcctcctcaccctatcacccatggatcgtaatgtaaaattcttttaccatgtcaagaaattattaaaaatacaggtactttgacctctttctaaagccgca

SEQ ID NO: 85282 - DNA, 2860 bp, Homo sapiens
cgggagtgcagcggctgagaaggtcccttcggtgaaggcgagttccgggacaacagagagggccgcaccgtttccgagtctctcggaggctcagttctcagcgcaccattccccacagctctcctttttactttacccctacccgacacttgaccccggcagtgtgaaccccgctgggagcgtccaaagccatgcctcatcgcggctgcgcagcgcacgtgcacagcctcgcaggagtctcggcgattggctgtgacgcagtttccggcgtgagcggcgaaagccgggagggcgagcgagagagcaagcaggcagcaggctgccggcgggcgggcggacggcacagagggagggagcgagcgagcagtgagtaagccagcaagggcggtcgggtcccgaggtcagccgagatttctcaggtccctccggccccctccctggagtccacagcgcctccggtgtccagaggatcggacacggcccggcccggccatggcctcgttgctgaaggtggatcaggaagtgaagctcaaggttgattctttcagggagcggatcacaagtgaggcagaagacttggtggcaaattttttcccaaagaagttattagaacttgatagttttctgaaggaaccaatcttaaacatccatgacctaactcagatccactctgacatgaatctcccagtccctgaccccattcttctcaccaatagccatgatggactggatggtcccacttataagaagcgaaggttggatgagtgtgaagaagccttccaaggaaccaaggtgtttgtgatgcccaatgggatgctgaaaagcaaccagcagctggtggacattattgagaaagtgaaacctgagatccggctgttgattgagaaatgtaacacggtcaaaatgtgggtacagctcctgattcccaggatagaagatggaaacaactttggggtgtccattcaggaggaaacagttgcagagctaagaactgttgagagtgaagctgcatcttatctggaccagatttctagatattatattacaagagccaaattggtttctaaaatagctaaatatccccatgtggaggactatcgccgcaccgtgacagagattgatgagaaagaatatatcagccttcggctcatcatatcagagctgaggaatcaatatgtcactctacatgacatgatcctgaaaaatatcgagaagatcaaacggccccggagcagcaatgcagagactctgtactgaggccagggccagggccaggggactctgtgagtctggctcaagaccgacattgccttggtttgttacatgactatcgtgatggggaaactggctggaaatagtaatcacacctctctgtttttagttagagtctaatgaaactctcatctagttctgtgatgtgtttacctcttttttcaggcctcaggaactcttctatttccttccctaataccccacacccaacctgtcgtaatttctggagaactccaggtttgtgtgtgcaggatgttggcacaaaaatacctgtgttttcattctccccctctctccctcctgtgtcttgcgctttatgttttcttccgtttgataattagttggttaaaagctgagggaaccggaaggaaagtgctaggtgttttttaggaactagggtggcggggggacgaacttctcttcctcacatgaggttactgtttctttcctctgtggggcattggatcctcccacagttgccctggtgatgacttagggcttcccatctgtgtacatcccactttgaatcttgatcgtgacaagaaataccttaggccttcagtcaattccgaagctccttcagttgtttttataatgggcgttttcacatgcacatatgtgtatgcatgtatacgcccatacagacatgcacacacagactcctactccattagctaacataccctccctctccacaacccctgtcacatacctttcaggaggtgacagttgtcttagttgtcatctacccagacaaacgtcctgggcccgtcctccctcctgatactgtagcctcttggtacccagggtgagttggtggagaacagagagatgagaagcagagggcttggggaaagcctgttcctctctgactcagccctttttggcattattgcaagagcttgactcctggttgccttttcccagccagttttcagttggggtgaaggtttctgcaagtgtgaggtccagatgctgctgctcatgttgggctttccttttgggaactatttctctttatttatagtgtcgggcttccggggaaagcaatcattggtgtgtatgtgtatgtgcatgcacacacgtgcatatacacatttgtgtatgtggaaatgtgctgggcaagtcaaaactatagaagagttgcctcctgtctctcgaatcttccagagatatcacttaattgttaacagcttttgtgttaatccccttcagcccctagctcttttattctaccacggctggagagttgatacctgcagtcagcctgccagtgactcttagtgtctgtttctgacttatttttcctgtctctgtcttccaacccccaataatatttccaccggggatgcatcatttttactcccaatattctgtagagagggagtcaggatgctgtcttcccacgaatagtactcagtaacaaaccaattgcattttagttgggcagtgctcccacccaccctccagatcccttccagctaaaacccttcccccttccctccatgtgtttctcagtttcccgtttcgtttgttggactgttccactggatgaggcatggggatccttagagtcacctcagcatca

SEQ ID NO: 85283 - DNA, 2608 bp, Homo sapiens
ctgaccggcttcctactccccatggcgtctttgtctccctggggataccagctctgagcttccgctcggctcagcccagcccccaactcccggggtcggcttcgcgggagaggaaaatataggatggctttctgtaccgcgtctgatgatggagagtcccggggacacctccgcggacacgtgttggactcagggctttaggcccgtgacagctggttgattctttcagggagcggatcacaagtgaggcagaagacttggtggcaaattttttcccaaagaagttattagaacttgatagttttctgaaggaaccaatcttaaacatccatgacctaactcagatccactctgacatgaatctcccagtccctgaccccattcttctcaccaatagccatgatggactggatggtcccacttataagaagcgaaggttggatgagtgtgaagaagccttccaaggaaccaaggtgtttgtgatgcccaatgggatgctgaaaagcaaccagcagctggtggacattattgagaaagtgaaacctgagatccggctgttgattgagaaatgtaacacggtcaaaatgtgggtacagctcctgattcccaggatagaagatggaaacaactttggggtgtccattcaggaggaaacagttgcagagctaagaactgttgagagtgaagctgcatcttatctggaccagatttctagatattatattacaagagccaaattggtttctaaaatagctaaatatccccatgtggaggactatcgccgcaccgtgacagagattgatgagaaagaatatatcagccttcggctcatcatatcagagctgaggaatcaatatgtcactctacatgacatgatcctgaaaaatatcgagaagatcaaacggccccggagcagcaatgcagagactctgtactgaggccagggccagggccaggggactctgtgagtctggctcaagaccgacattgccttggtttgttacatgactatcgtgatggggaaactggctggaaatagtaatcacacctctctgtttttagttagagtctaatgaaactctcatctagttctgtgatgtgtttacctcttttttcaggcctcaggaactcttctatttccttccctaataccccacacccaacctgtcgtaatttctggagaactccaggtttgtgtgtgcaggatgttggcacaaaaatacctgtgttttcattctccccctctctccctcctgtgtcttgcgctttatgttttcttccgtttgataattagttggttaaaagctgagggaaccggaaggaaagtgctaggtgttttttaggaactagggtggcggggggacgaacttctcttcctcacatgaggttactgtttctttcctctgtggggcattggatcctcccacagttgccctggtgatgacttagggcttcccatctgtgtacatcccactttgaatcttgatcgtgacaagaaataccttaggccttcagtcaattccgaagctccttcagttgtttttataatgggcgttttcacatgcacatatgtgtatgcatgtatacgcccatacagacatgcacacacagactcctactccattagctaacataccctccctctccacaacccctgtcacatacctttcaggaggtgacagttgtcttagttgtcatctacccagacaaacgtcctgggcccgtcctccctcctgatactgtagcctcttggtacccagggtgagttggtggagaacagagagatgagaagcagagggcttggggaaagcctgttcctctctgactcagccctttttggcattattgcaagagcttgactcctggttgccttttcccagccagttttcagttggggtgaaggtttctgcaagtgtgaggtccagatgctgctgctcatgttgggctttccttttgggaactatttctctttatttatagtgtcgggcttccggggaaagcaatcattggtgtgtatgtgtatgtgcatgcacacacgtgcatatacacatttgtgtatgtggaaatgtgctgggcaagtcaaaactatagaagagttgcctcctgtctctcgaatcttccagagatatcacttaattgttaacagcttttgtgttaatccccttcagcccctagctcttttattctaccacggctggagagttgatacctgcagtcagcctgccagtgactcttagtgtctgtttctgacttatttttcctgtctctgtcttccaacccccaataatatttccaccggggatgcatcatttttactcccaatattctgtagagagggagtcaggatgctgtcttcccacgaatagtactcagtaacaaaccaattgcattttagttgggcagtgctcccacccaccctccagatcccttccagctaaaacccttcccccttccctccatgtgtttctcagtttcccgtttcgtttgttggactgttccactgcccctcctcctcaccctatcacccatggatcgtaatgtaaaattcttttaccatgtcaagaaattattaaaaatacaggtactttgacctctttctaaagccgca

SEQ ID NO: 85284 - DNA, 2846 bp, Homo sapiens
cgggagtgcagcggctgagaaggtcccttcggtgaaggcgagttccgggacaacagagagggccgcaccgtttccgagtctctcggaggctcagttctcagcgcaccattccccacagctctcctttttactttacccctacccgacacttgaccccggcagtgtgaaccccgctgggagcgtccaaagccatgcctcatcgcggctgcgcagcgcacgtgcacagcctcgcaggagtctcggcgattggctgtgacgcagtttccggcgtgagcggcgaaagccgggagggcgagcgagagagcaagcaggcagcaggctgccggcgggcgggcggacggcacagagggagggagcgagcgagcagtgagtaagccagcaagggcggtcgggtcccgaggtcagccgagatttctcaggtccctccggccccctccctggagtccacagcgcctccggtgtccagaggatcggacacggcccggcccggccatggcctcgttgctgaaggtggatcaggaagtgaagctcaaggttgattctttcagggagcggatcacaagtgaggcagaagacttggtggcaaattttttcccaaagaagttattagaacttgatagttttctgaaggaaccaatcttaaacatccatgacctaactcagatccactctgacatgaatctcccagtccctgaccccattcttctcaccaatagccatgatggactggatggtcccacttataagaagcgaaggttggatgagtgtgaagaagccttccaaggaaccaaggtgtttgtgatgcccaatgggatgctgaaaagcaaccagcagctggtggacattattgagaaagtgaaacctgagatccggctgttgattgagaaatgtaacacggtcaaaatgtgggtacagctcctgattcccaggatagaagatggaaacaactttggggtgtccattcaggaggaaacagttgcagagctaagaactgttgagagtgaagctgaggactatcgccgcaccgtgacagagattgatgagaaagaatatatcagccttcggctcatcatatcagagctgaggaatcaatatgtcactctacatgacatgatcctgaaaaatatcgagaagatcaaacggccccggagcagcaatgcagagactctgtactgaggccagggccagggccaggggactctgtgagtctggctcaagaccgacattgccttggtttgttacatgactatcgtgatggggaaactggctggaaatagtaatcacacctctctgtttttagttagagtctaatgaaactctcatctagttctgtgatgtgtttacctcttttttcaggcctcaggaactcttctatttccttccctaataccccacacccaacctgtcgtaatttctggagaactccaggtttgtgtgtgcaggatgttggcacaaaaatacctgtgttttcattctccccctctctccctcctgtgtcttgcgctttatgttttcttccgtttgataattagttggttaaaagctgagggaaccggaaggaaagtgctaggtgttttttaggaactagggtggcggggggacgaacttctcttcctcacatgaggttactgtttctttcctctgtggggcattggatcctcccacagttgccctggtgatgacttagggcttcccatctgtgtacatcccactttgaatcttgatcgtgacaagaaataccttaggccttcagtcaattccgaagctccttcagttgtttttataatgggcgttttcacatgcacatatgtgtatgcatgtatacgcccatacagacatgcacacacagactcctactccattagctaacataccctccctctccacaacccctgtcacatacctttcaggaggtgacagttgtcttagttgtcatctacccagacaaacgtcctgggcccgtcctccctcctgatactgtagcctcttggtacccagggtgagttggtggagaacagagagatgagaagcagagggcttggggaaagcctgttcctctctgactcagccctttttggcattattgcaagagcttgactcctggttgccttttcccagccagttttcagttggggtgaaggtttctgcaagtgtgaggtccagatgctgctgctcatgttgggctttccttttgggaactatttctctttatttatagtgtcgggcttccggggaaagcaatcattggtgtgtatgtgtatgtgcatgcacacacgtgcatatacacatttgtgtatgtggaaatgtgctgggcaagtcaaaactatagaagagttgcctcctgtctctcgaatcttccagagatatcacttaattgttaacagcttttgtgttaatccccttcagcccctagctcttttattctaccacggctggagagttgatacctgcagtcagcctgccagtgactcttagtgtctgtttctgacttatttttcctgtctctgtcttccaacccccaataatatttccaccggggatgcatcatttttactcccaatattctgtagagagggagtcaggatgctgtcttcccacgaatagtactcagtaacaaaccaattgcattttagttgggcagtgctcccacccaccctccagatcccttccagctaaaacccttcccccttccctccatgtgtttctcagtttcccgtttcgtttgttggactgttccactgcccctcctcctcaccctatcacccatggatcgtaatgtaaaattcttttaccatgtcaagaaattattaaaaatacaggtactttgacctctttctaaagccgca

SEQ ID NO: 85285 - DNA, 1965 bp, Homo sapiens
ggcatggatcagccgtggttaatcggccgagggtgacagtgaagctgcatcttatctggaccagatttctagatattatattacaagagccaaattggtttctaaaatagctaaatatccccatgtggaggactatcgccgcaccgtgacagagattgatgagaaagaatatatcagccttcggctcatcatatcagagctgaggaatcaatatgtcactctacatgacatgatcctgaaaaatatcgagaagatcaaacggccccggagcagcaatgcagagactctgtactgaggccagggccagggccaggggactctgtgagtctggctcaagaccgacattgccttggtttgttacatgactatcgtgatggggaaactggctggaaatagtaatcacacctctctgtttttagttagagtctaatgaaactctcatctagttctgtgatgtgtttacctcttttttcaggcctcaggaactcttctatttccttccctaataccccacacccaacctgtcgtaatttctggagaactccaggtttgtgtgtgcaggatgttggcacaaaaatacctgtgttttcattctccccctctctccctcctgtgtcttgcgctttatgttttcttccgtttgataattagttggttaaaagctgagggaaccggaaggaaagtgctaggtgttttttaggaactagggtggcggggggacgaacttctcttcctcacatgaggttactgtttctttcctctgtggggcattggatcctcccacagttgccctggtgatgacttagggcttcccatctgtgtacatcccactttgaatcttgatcgtgacaagaaataccttaggccttcagtcaattccgaagctccttcagttgtttttataatgggcgttttcacatgcacatatgtgtatgcatgtatacgcccatacagacatgcacacacagactcctactccattagctaacataccctccctctccacaacccctgtcacatacctttcaggaggtgacagttgtcttagttgtcatctacccagacaaacgtcctgggcccgtcctccctcctgatactgtagcctcttggtacccagggtgagttggtggagaacagagagatgagaagcagagggcttggggaaagcctgttcctctctgactcagccctttttggcattattgcaagagcttgactcctggttgccttttcccagccagttttcagttggggtgaaggtttctgcaagtgtgaggtccagatgctgctgctcatgttgggctttccttttgggaactatttctctttatttatagtgtcgggcttccggggaaagcaatcattggtgtgtatgtgtatgtgcatgcacacacgtgcatatacacatttgtgtatgtggaaatgtgctgggcaagtcaaaactatagaagagttgcctcctgtctctcgaatcttccagagatatcacttaattgttaacagcttttgtgttaatccccttcagcccctagctcttttattctaccacggctggagagttgatacctgcagtcagcctgccagtgactcttagtgtctgtttctgacttatttttcctgtctctgtcttccaacccccaataatatttccaccggggatgcatcatttttactcccaatattctgtagagagggagtcaggatgctgtcttcccacgaatagtactcagtaacaaaccaattgcattttagttgggcagtgctcccacccaccctccagatcccttccagctaaaacccttcccccttccctccatgtgtttctcagtttcccgtttcgtttgttggactgttccactgcccctcctcctcaccctatcacccatggatcgtaatgtaaaattcttttaccatgtcaagaaattattaaaaatacaggtactttgacctctttctaaagccgca

SEQ ID NO: 85286 - DNA, 2099 bp, Homo sapiens
cgggagtgcagcggctgagaaggtcccttcggtgaaggcgagttccgggacaacagagagggccgcaccgtttccgagtctctcggaggctcagttctcagcgcaccattccccacagctctcctttttactttacccctacccgacacttgaccccggcagtgtgaaccccgctgggagcgtccaaagccatgcctcatcgcggctgcgcagcgcacgtgcacagcctcgcaggagtctcggcgattggctgtgacgcagtttccggcgtgagcggcgaaagccgggagggcgagcgagagagcaagcaggcagcaggctgccggcgggcgggcggacggcacagagggagggagcgagcgagcagtgagtaagccagcaagggcggtcgggtcccgaggtcagccgagatttctcaggtccctccggccccctccctggagtccacagcgcctccggtgtccagaggatcggacacggcccggcccggccatggcctcgttgctgaaggtggatcaggaagtgaagctcaaggttgattctttcagggagcggatcacaagtgaggcagaagacttggtggcaaattttttcccaaagaagttattagaacttgatagttttctgaaggaaccaatcttaaacatccatgacctaactcagatccactctgacatgaatctcccagtccctgaccccattcttctcaccaatagccatgatggactggatggtcccacttataagaagcgaaggttggatgagtgtgaagaagccttccaaggaaccaaggtgtttgtgatgcccaatgggatgctgaaaagcaaccagcagctggtggacattattgagaaagtgaaacctgagatccggctgttgattgagaaatgtaacacggtcaaaatgtgggtacagctcctgattcccaggatagaagatggaaacaactttggggtgtccattcaggaggaaacagttgcagagctaagaactgttgagagtgaagctgcatcttatctggaccagatttctagatattatattacaagagccaaattggtttctaaaatagctaaatatccccatgtggaggactatcgccgcaccgtgacagagattgatgagaaagaatatatcagccttcggctcatcatatcagagctgaggaatcaatatgtcactctacatgacatgatcctgaaaaatatcgagaagatcaaacggccccggagcagcaatgcagagactctgtactgaggccagggccagggccaggggactctgtgagtctggctcaagaccgacattgccttggtttgttacatgactatcgtgatggggaaactggctggaaatagtaatcacacctctctgtttttagttagagtctaatgaaactctcatctagttctgtgatgtgtttacctcttttttcaggcctcaggaactcttctatttccttccctaataccccacacccaacctgtcgtaatttctggagaactccaggtttgtgtgtgcaggatgttggcacaaaaatacctgtgttttcattctccccctctctccctcctgtgtcttgcgctttatgttttcttccgtttgataattagttggttaaaagctgagggaaccggaaggaaagtgctaggtgttttttaggaactagggtggcggggggacgaacttctcttcctcacatgaggttactgtttctttcctctgtggggcattggatcctcccacagttgccctggtgatgacttagggcttcccatctgtgtacatcccactttgaatcttgatcgtgacaagaaataccttaggccttcagtcaattccgaagctccttcagttgtttttataatgggcgttttcacatgcacatatgtgtatgcatgtatacgcccatacagacatgcacacacagactcctaccccttccctccatgtgtttctcagtttcccgtttcgtttgttggactgttccactgcccctcctcctcaccctatcacccatggatcgtaatgtaaaattcttttaccatgtcaagaaattattaaaaatacaggtactttgacctctttctaaagccgca

SEQ ID NO: 85287 - DNA, 1979 bp, Homo sapiens
cgggagtgcagcggctgagaaggtcccttcggtgaaggcgagttccgggacaacagagagggccgcaccgtttccgagtctctcggaggctcagttctcagcgcaccattccccacagctctcctttttactttacccctacccgacacttgaccccggcagtgtgaaccccgctgggagcgtccaaagccatgcctcatcgcggctgcgcagcgcacgtgcacagcctcgcaggagtctcggcgattggctgtgacgcagtttccggcgtgagcggcgaaagccgggagggcgagcgagagagcaagcaggcagcaggctgccggcgggcgggcggacggcacagagggagggagcgagcgagcagtgagtaagccagcaagggcggtcgggtcccgaggtcagccgagatttctcaggtccctccggccccctccctggagtccacagcgcctccggtgtccagaggatcggacacggcccggcccggccatggcctcgttgctgaaggtggatcaggaagtgaagctcaaggttgattctttcagggagcggatcacaagtgaggcagaagacttggtggcaaattttttcccaaagaagttattagaacttgatagttttctgaaggaaccaatcttaaacatccatgacctaactcagatccactctgacatgaatctcccagtccctgaccccattcttctcaccaatagccatgatggactggatggtgaacttctcttcctcacatgaggttactgtttctttcctctgtggggcattggatcctcccacagttgccctggtgatgacttagggcttcccatctgtgtacatcccactttgaatcttgatcgtgacaagaaataccttaggccttcagtcaattccgaagctccttcagttgtttttataatgggcgttttcacatgcacatatgtgtatgcatgtatacgcccatacagacatgcacacacagactcctactccattagctaacataccctccctctccacaacccctgtcacatacctttcaggaggtgacagttgtcttagttgtcatctacccagacaaacgtcctgggcccgtcctccctcctgatactgtagcctcttggtacccagggtgagttggtggagaacagagagatgagaagcagagggcttggggaaagcctgttcctctctgactcagccctttttggcattattgcaagagcttgactcctggttgccttttcccagccagttttcagttggggtgaaggtttctgcaagtgtgaggtccagatgctgctgctcatgttgggctttccttttgggaactatttctctttatttatagtgtcgggcttccggggaaagcaatcattggtgtgtatgtgtatgtgcatgcacacacgtgcatatacacatttgtgtatgtggaaatgtgctgggcaagtcaaaactatagaagagttgcctcctgtctctcgaatcttccagagatatcacttaattgttaacagcttttgtgttaatccccttcagcccctagctcttttattctaccacggctggagagttgatacctgcagtcagcctgccagtgactcttagtgtctgtttctgacttatttttcctgtctctgtcttccaacccccaataatatttccaccggggatgcatcatttttactcccaatattctgtagagagggagtcaggatgctgtcttcccacgaatagtactcagtaacaaaccaattgcattttagttgggcagtgctcccacccaccctccagatcccttccagctaaaacccttcccccttccctccatgtgtttctcagtttcccgtttcgtttgttggactgttccactgcccctcctcctcaccctatcacccatggatcgtaatgtaaaattcttttaccatgtcaagaaattattaaaaatacaggtactttgacctctttctaaagccgca

SEQ ID NO: 85288 - DNA, 1313 bp, Homo sapiens
acctccagcaggatcatggcggcggctggccccctaggtgttttttaggaactagggtggcggggggacgaacttctcttcctcacatgaggttactgtttctttcctctgtggggcattggatcctcccacagttgccctggtgatgacttagggcttcccatctgtgtacatcccactttgaatcttgatcgtgacaagaaataccttaggccttcagtcaattccgaagctccttcagttgtttttataatgggcgttttcacatgcacatatgtgtatgcatgtatacgcccatacagacatgcacacacagactcctactccattagctaacataccctccctctccacaacccctgtcacatacctttcaggaggtgacagttgtcttagttgtcatctacccagacaaacgtcctgggcccgtcctccctcctgatactgtagcctcttggtacccagggtgagttggtggagaacagagagatgagaagcagagggcttggggaaagcctgttcctctctgactcagccctttttggcattattgcaagagcttgactcctggttgccttttcccagccagttttcagttggggtgaaggtttctgcaagtgtgaggtccagatgctgctgctcatgttgggctttccttttgggaactatttctctttatttatagtgtcgggcttccggggaaagcaatcattggtgtgtatgtgtatgtgcatgcacacacgtgcatatacacatttgtgtatgtggaaatgtgctgggcaagtcaaaactatagaagagttgcctcctgtctctcgaatcttccagagatatcacttaattgttaacagcttttgtgttaatccccttcagcccctagctcttttattctaccacggctggagagttgatacctgcagtcagcctgccagtgactcttagtgtctgtttctgacttatttttcctgtctctgtcttccaacccccaataatatttccaccggggatgcatcatttttactcccaatattctgtagagagggagtcaggatgctgtcttcccacgaatagtactcagtaacaaaccaattgcattttagttgggcagtgctcccacccaccctccagatcccttccagctaaaacccttcccccttccctccatgtgtttctcagtttcccgtttcgtttgttggactgttccactgcccctcctcctcaccctatcacccatggatcgtaatgtaaaattcttttaccatgtcaagaaattattaaaaatacaggtactttgacctctttctaaagccgca

SEQ ID NO: 85289 - DNA, 1013 bp, Homo sapiens
cactggcccctcgcaatgcagaagaactctgctgcccatcgcttcccagggagtgaggcagcatggctctgcaggcatggaagatggccttcaccgttgtcatctacccagacaaacgtcctgggcccgtcctccctcctgatactgtagcctcttggtacccagggtgagttggtggagaacagagagatgagaagcagagggcttggggaaagcctgttcctctctgactcagccctttttggcattattgcaagagcttgactcctggttgccttttcccagccagttttcagttggggtgaaggtttctgcaagtgtgaggtccagatgctgctgctcatgttgggctttccttttgggaactatttctctttatttatagtgtcgggcttccggggaaagcaatcattggtgtgtatgtgtatgtgcatgcacacacgtgcatatacacatttgtgtatgtggaaatgtgctgggcaagtcaaaactatagaagagttgcctcctgtctctcgaatcttccagagatatcacttaattgttaacagcttttgtgttaatccccttcagcccctagctcttttattctaccacggctggagagttgatacctgcagtcagcctgccagtgactcttagtgtctgtttctgacttatttttcctgtctctgtcttccaacccccaataatatttccaccggggatgcatcatttttactcccaatattctgtagagagggagtcaggatgctgtcttcccacgaatagtactcagtaacaaaccaattgcattttagttgggcagtgctcccacccaccctccagatcccttccagctaaaacccttcccccttccctccatgtgtttctcagtttcccgtttcgtttgttggactgttccactgcccctcctcctcaccctatcacccatggatcgtaatgtaaaattcttttaccatgtcaagaaattattaaaaatacaggtactttgacctctttctaaagccgca

SEQ ID NO: 85290 - DNA, 892 bp, Homo sapiens
cggacgcgtgggtcggacgcgtggtgtagcctcttggtacccagggtgagttggtggagaacagagagatgagaagcagagggcttggggaaagcctgttcctctctgactcagccctttttggcattattgcaagagcttgactcctggttgccttttcccagccagttttcagttggggtgaaggtttctgcaagtgtgaggtccagatgctgctgctcatgttgggctttccttttgggaactatttctctttatttatagtgtcgggcttccggggaaagcaatcattggtgtgtatgtgtatgtgcatgcacacacgtgcatatacacatttgtgtatgtggaaatgtgctgggcaagtcaaaactatagaagagttgcctcctgtctctcgaatcttccagagatatcacttaattgttaacagcttttgtgttaatccccttcagcccctagctcttttattctaccacggctggagagttgatacctgcagtcagcctgccagtgactcttagtgtctgtttctgacttatttttcctgtctctgtcttccaacccccaataatatttccaccggggatgcatcatttttactcccaatattctgtagagagggagtcaggatgctgtcttcccacgaatagtactcagtaacaaaccaattgcattttagttgggcagtgctcccacccaccctccagatcccttccagctaaaacccttcccccttccctccatgtgtttctcagtttcccgtttcgtttgttggactgttccactgcccctcctcctcaccctatcacccatggatcgtaatgtaaaattcttttaccatgtcaagaaattattaaaaatacaggtactttgacctctttctaaagccgca

SEQ ID NO: 85291 - DNA, 566 bp, Homo sapiens
gttagttttaccctactgatgatgtgttgttgccaagtcaaaactatagaagagttgcctcctgtctctcgaatcttccagagatatcacttaattgttaacagcttttgtgttaatccccttcagcccctagctcttttattctaccacggctggagagttgatacctgcagtcagcctgccagtgactcttagtgtctgtttctgacttatttttcctgtctctgtcttccaacccccaataatatttccaccggggatgcatcatttttactcccaatattctgtagagagggagtcaggatgctgtcttcccacgaatagtactcagtaacaaaccaattgcattttagttgggcagtgctcccacccaccctccagatcccttccagctaaaacccttcccccttccctccatgtgtttctcagtttcccgtttcgtttgttggactgttccactgcccctcctcctcaccctatcacccatggatcgtaatgtaaaattcttttaccatgtcaagaaattattaaaaatacaggtactttgacctctttctaaagccgca

SEQ ID NO: 85292 - DNA, 1134 bp, Homo sapiens
cgggagtgcagcggctgagaaggtcccttcggtgaaggcgagttccgggacaacagagagggccgcaccgtttccgagtctctcggaggctcagttctcagcgcaccattccccacagctctcctttttactttacccctacccgacacttgaccccggcagtgtgaaccccgctgggagcgtccaaagccatgcctcatcgcggctgcgcagcgcacgtgcacagcctcgcaggagtctcggcgattggctgtgacgcagtttccggcgtgagcggcgaaagccgggagggcgagcgagagagcaagcaggcagcaggctgccggcgggcgggcggacggcacagagggagggagcgagcgagcagtgagtaagccagcaagggcggtcgggtcccgaggtcagccgagatttctcaggtccctccggccccctccctggagtccacagcgcctccggtgtccagaggatcggacacggcccggcccggccatggcctcgttgctgaaggtggatcaggaagtgaagctcaagacagcttcagacacaggaggaagggagggaagggggaggacagaggagacaggcaggtgctgtcctcaaagccctgcgttcttctgagatggaaaaatggatcctcaaaaaaataaagtatttgcagtctgggggcctctcagcttcttattacagttacaaggttgattctttcagggagcggatcacaagtgaggcagaagacttggtggcaaattttttcccaaagaagttattagaacttgatagttttctgaaggaaccaatcttaaacatccatgacctaactcagatccactctgacatgaatctcccagtccctgaccccattcttctcaccaatagccatgatggactggatggtcccacttataagaagcgaaggttggatgagtgtgaagaagccttccaaggaaccaaggtgtttgtgatgcccaatgggatgctgaaaagcaaccagcagctggtggacattattgagaaagtgaaacctgagatccggctgttgattgagaaatgtaacacgcaaatgtgggtacagtcctgattcccaggttgagtgggacccttggggggcctcggcgaacgtgcagcagacgt

SEQ ID NO: 85293 - DNA, 632 bp, Homo sapiens
tatacagctaggtacgaggcctggtggtgagagcgagagagcaagcaggcagcaggctgccggcgggcgggcggacggcacagagggagggagcgagcgagcagtgagtaagccagcaagggcggtcgggtcccgaggtcagccgagatttctcaggtccctccggccccctccctggagtccacagcgcctccggtgtccagaggatcggacacggcccggcccggccatggcctcgttgctgaaggtggatcaggaagtgaagctcaaggttgattctttcagggagcggatcacaagtgaggcagaagacttggtggcaaattttttcccaaagaagttattagaacttgatagttttctgaaggaaccaatcttaaacatccatgacctaactcagatccactctgacatgaatctcccagtccctgaccccattcttctcaccaaattagcccattgattggaccttgggacttgggttaccacagactttacttaacgccaccgccgacaacgggtttggggacttgaacggttgggtggaagggaaaagggcccgttttcgcaagaggggaaagcccgaaagtggatggttaatggctggacttggccgcgaaattggaggagtg

SEQ ID NO: 85294 - DNA, 2665 bp, Homo sapiens
aactaacgcgctaggtacgaggcctgggtgttagcgagagagcaagcaggcagcaggctgccggcgggcgggcggacggcacagagggagggagcgagcgagcagtgagtaagccagcaagggcggtcgggtcccgaggtcagccgagatttctcaggtccctccggccccctccctggagtccacagcgcctccggtgtccagaggatcggacacggcccggcccggccatggcctcgttgctgaaggtggatcaggaagtgaagctcaaggttgattctttcagggagcggatcacaagtgaggcagaagacttggtggcaaattttttcccaaagaagttattagaacttgatagttttctgaaggaaccaatcttaaacatccatgacctaactcagatccactctgacatgaatctcccagtccctgaccccattcttctcaccaatagccatgatggactggatggtcccacttataagaagcgaaggttggatgagtgtgaagaagccttccaaggaaccaaggtgtttgtgatgcccaatgggatgctgaaaagcaaccagcagctggtggacattattgagaaagtgaaacctgagatccggctgttgattgagaaatgtaacacggtcaaaatgtgggtacagctcctgattcccaggatagaagatggaaacaactttggggtgtccattcaggaggaaacagttgcagagctaagaactgttgagagtgaagctgcatcttatctggaccagatttctagatattatattacaagagccaaattggtttctaaaatagctaaatatccccatgtggaggactatcgccgcaccgtgacagagattgatgagaaagaatatatcagccttcggctcatcatatcagagctgaggaatcaatatgtcactctacatgacatgatcctgaaaaatatcgagaagatcaaacggccccggagcagcaatgcagagactctgtactgaggccagggccagggccaggggactctgtgagtctggctcaagaccgacattgccttggtttgttacatgactatcgtgatggggaaactggctggaaatagtaatcacacctctctgtttttagttagagtctaatgaaactctcatctagttctgtgatgtgtttacctcttttttcaggcctcaggaactcttctatttccttccctaataccccacacccaacctgtcgtaatttctggagaactccaggtttgtgtgtgcaggatgttggcacaaaaatacctgtgttttcattctccccctctctccctcctgtgtcttgcgctttatgttttcttccgtttgataattagttggttaaaagctgagggaaccggaaggaaagtgctaggtgttttttaggaactagggtggcggggggacgaacttctcttcctcacatgaggttactgtttctttcctctgtggggcattggatcctcccacagttgccctggtgatgacttagggcttcccatctgtgtacatcccactttgaatcttgatcgtgacaagaaataccttaggccttcagtcaattccgaagctccttcagttgtttttataatgggcgttttcacatgcacatatgtgtatgcatgtatacgcccatacagacatgcacacacagactcctactccattagctaacataccctccctctccacaacccctgtcacatacctttcaggaggtgacagttgtcttagttgtcatctacccagacaaacgtcctgggcccgtcctccctcctgatactgtagcctcttggtacccagggtgagttggtggagaacagagagatgagaagcagagggcttggggaaagcctgttcctctctgactcagccctttttggcattattgcaagagcttgactcctggttgccttttcccagccagttttcagttggggtgaaggtttctgcaagtgtgaggtccagatgctgctgctcatgttgggctttccttttgggaactatttctctttatttatagtgtcgggcttccggggaaagcaatcattggtgtgtatgtgtatgtgcatgcacacacgtgcatatacacatttgtgtatgtggaaatgtgctgggcaagtcaaaactatagaagagttgcctcctgtctctcgaatcttccagagatatcacttaattgttaacagcttttgtgttaatccccttcagcccctagctcttttattctaccacggctggagagttgatacctgcagtcagcctgccagtgactcttagtgtctgtttctgacttatttttcctgtctctgtcttccaacccccaataatatttccaccggggatgcatcatttttactcccaatattctgtagagagggagtcaggatgctgtcttcccacgaatagtactcagtaacaaaccaattgcattttagttgggcagtgctcccacccaccctccagatcccttccagctaaaacccttcccccttccctccatgtgtttctcagtttcccgtttcgtttgttggactgttccactgcccctcctcctcaccctatcacccatggatcgtaatgtaaaattcttttaccatgtcaagaaattattaaaaatacaggtactttgacctctttctaaagccgca

SEQ ID NO: 85295 - DNA, 3448 bp, Homo sapiens
cgggagtgcagcggctgagaaggtcccttcggtgaaggcgagttccgggacaacagagagggccgcaccgtttccgagtctctcggaggctcagttctcagcgcaccattccccacagctctcctttttactttacccctacccgacacttgaccccggcagtgtgaaccccgctgggagcgtccaaagccatgcctcatcgcggctgcgcagcgcacgtgcacagcctcgcaggagtctcggcgattggctgtgacgcagtttccggcgtgagcggcgaaagccgggagggcgagcgagagagcaagcaggcagcaggctgccggcgggcgggcggacggcacagagggagggagcgagcgagcagtgagtaagccagcaagggcggtcgggtcccgaggtcagccgagatttctcaggtccctccggccccctccctggagtccacagcgcctccggtgtccagaggatcggacacggcccggcccggccatggcctcgttgctgaaggtggatcaggaagtgaagctcaaggttgattctttcagggagcggatcacaagtgaggcagaagacttggtggcaaattttttcccaaagaagttattagaacttgatagttttctgaaggaaccaatcttaaacatccatgacctaactcagatccactctgacatgaatctcccagtccctgaccccattcttctcaccaatagccatgatggactggatggtcccacttataagaagcgaaggttggatgagtgtgaagaagccttccaaggaaccaaggtgtttgtgatgcccaatgggatgctgaaaagcaaccagcagctggtggacattattgagaaagtgaaacctgagatccggctgttgattgagaaatgtaacacggtcaaaatgtgggtacagctcctgattcccaggatagaagatggaaacaactttggggtgtccattcaggaggaaacagttgcagagctaagaactgttgagagtgaagctgcatcttatctggaccagatttctagatattatattacaagagccaaattggtttctaaaatagctaaatatccccatgtggaggactatcgccgcaccgtgacagagattgatgagaaagaatatatcagccttcggctcatcatatcagagctgaggaatcaatatgtcactctacatgacatgatcctgaaaaatatcgagaagatcaaacggccccggagcagcaatgcagagactctgtactgaggccagggccagggccaggggactctgtgagtctggctcaagaccgacattgccttggtttgttacatgactatcgtgatggggaaactggctggaaatagtaatcacacctctctgtttttagttagagtctaatgaaactctcatctagttctgtgatgtgtttacctcttttttcaggcctcaggaactcttctatttccttccctaataccccacacccaacctgtcgtaatttctggagaactccaggtttgtgtgtgcaggatgttggcacaaaaatacctgtgttttcattctccccctctctccctcctgtgtcttgcgctttatgttttcttccgtttgataattagttggttaaaagctgagggaaccggaaggaaagtgctaggtgttttttaggaactagggtggcggggggacgaacttctcttcctcacatgaggttactgtttctttcctctgtggggcattggatcctcccacagttgccctggtgatgacttagggcttcccatctgtgtacatcccactttgaatcttgatcgtgacaagaaataccttaggccttcagtcaattccgaagctccttcagttgtttttataatgggcgttttcacatgcacatatgtgtatgcatgtatacgcccatacagacatgcacacacagactcctactccattagctaacataccctccctctccacaacccctgtcacatacctttcaggaggtgacagttgtcttagttgtcatctacccagacaaacgtcctgggcccgtcctccctcctgatactgtagcctcttggtacccagggtgagttggtggagaacagagagatgagaagcagagggcttggggaaagcctgttcctctctgactcagccctttttggcattattgcaagagcttgactcctggttgccttttcccagccagttttcagttggggtgaaggtttctgcaagtgtgaggtccagatgctgctgctcatgttgggctttccttttgggaactatttctctttatttatagtgtcgggcttccggggaaagcaatcattggtgtgtatgtgtatgtgcatgcacacacgtgcatatacacatttgtgtatgtggaaatgtgctgggcaagtcaaaactatagaagagttgcctcctgtctctcgaatcttccagagatatcacttaattgttaacagcttttgtgttaatccccttcagcccctagctcttttattctaccacggctggagagttgatacctgcagtcagcctgccagtgactcttagtgtctgtttctgacttatttttcctgtctctgtcttccaacccccaataatatttccaccggggatgcatcatttttactcccaatattctgtagagagggagtcaggatgctgtcttcccacgaatagtactcagtaacaaaccaattgcattttagttgggcagtgctcccacccaccctccagatcccttccagctaaaacccttcccccttccctccatgtgtttctcagtttcccgtttcgtttgttggactgttccactgcccctcctcctcaccctatcacccatggatcgtaatgtaaaattcttttaccatgtcaagaaattattaaaaatacaggtactttgacctctttctaaagccgcagaccctggtgcaatgctctggtggctagggatgtactcatgctcatatgtgtgcacgcttggacacccacctccatggacacctagccaccctgttgtgtgtccttatgccagttgagctgaatcttttccccagtatagtggaaagactgaggcttctgcctactgagcaaggttgggtgcttcatttgtgttcagtctgaattatgggaaagttagctcttcccagacctaagctgccttctctccctactttcagaagatcctagttccttccttcccgagtgatacccatgaactgccagtagaggctgctatcgttccatgtgtaaggaatgaactggttcaaggcgcgtcctacccagtcattttctttaccttatactaattcttcctgaataatgtcttcagtttcttgaggagactcctagttttggttttcaaattacttggagggctgcctaggaatctatctccctctgaaataaagtttcctcatcttccaccttgcaaaaagccttc

SEQ ID NO: 85296 - DNA, 3487 bp, Homo sapiens
cgggagtgcagcggctgagaaggtcccttcggtgaaggcgagttccgggacaacagagagggccgcaccgtttccgagtctctcggaggctcagttctcagcgcaccattccccacagctctcctttttactttacccctacccgacacttgaccccggcagtgtgaaccccgctgggagcgtccaaagccatgcctcatcgcggctgcgcagcgcacgtgcacagcctcgcaggagtctcggcgattggctgtgacgcagtttccggcgtgagcggcgaaagccgggagggcgagcgagagagcaagcaggcagcaggctgccggcgggcgggcggacggcacagagggagggagcgagcgagcagtgagtaagccagcaagggcggtcgggtcccgaggtcagccgagatttctcaggtccctccggccccctccctggagtccacagcgcctccggtgtccagaggatcggacacggcccggcccggccatggcctcgttgctgaaggtggatcaggaagtgaagctcaaggttgattctttcagggagcggatcacaagtgaggcagaagacttggtggcaaattttttcccaaagaagttattagaacttgatagttttctgaaggaaccaatcttaaacatccatgacctaactcagatccactctgacatgaatctcccagtccctgaccccattcttctcaccaatagccatgatggactggatggtcccacttataagaagcgaaggttggatgagtgtgaagaagccttccaaggaaccaaggtgtttgtgatgcccaatgggatgctgaaaagcaaccagcagctggtggacattattgagaaagtgaaacctgagatccggctgttgattgagaaatgtaacacgccttcaggcaaaggtcctcatatatgttttgacctccaggtcaaaatgtgggtacagctcctgattcccaggatagaagatggaaacaactttggggtgtccattcaggaggaaacagttgcagagctaagaactgttgagagtgaagctgcatcttatctggaccagatttctagatattatattacaagagccaaattggtttctaaaatagctaaatatccccatgtggaggactatcgccgcaccgtgacagagattgatgagaaagaatatatcagccttcggctcatcatatcagagctgaggaatcaatatgtcactctacatgacatgatcctgaaaaatatcgagaagatcaaacggccccggagcagcaatgcagagactctgtactgaggccagggccagggccaggggactctgtgagtctggctcaagaccgacattgccttggtttgttacatgactatcgtgatggggaaactggctggaaatagtaatcacacctctctgtttttagttagagtctaatgaaactctcatctagttctgtgatgtgtttacctcttttttcaggcctcaggaactcttctatttccttccctaataccccacacccaacctgtcgtaatttctggagaactccaggtttgtgtgtgcaggatgttggcacaaaaatacctgtgttttcattctccccctctctccctcctgtgtcttgcgctttatgttttcttccgtttgataattagttggttaaaagctgagggaaccggaaggaaagtgctaggtgttttttaggaactagggtggcggggggacgaacttctcttcctcacatgaggttactgtttctttcctctgtggggcattggatcctcccacagttgccctggtgatgacttagggcttcccatctgtgtacatcccactttgaatcttgatcgtgacaagaaataccttaggccttcagtcaattccgaagctccttcagttgtttttataatgggcgttttcacatgcacatatgtgtatgcatgtatacgcccatacagacatgcacacacagactcctactccattagctaacataccctccctctccacaacccctgtcacatacctttcaggaggtgacagttgtcttagttgtcatctacccagacaaacgtcctgggcccgtcctccctcctgatactgtagcctcttggtacccagggtgagttggtggagaacagagagatgagaagcagagggcttggggaaagcctgttcctctctgactcagccctttttggcattattgcaagagcttgactcctggttgccttttcccagccagttttcagttggggtgaaggtttctgcaagtgtgaggtccagatgctgctgctcatgttgggctttccttttgggaactatttctctttatttatagtgtcgggcttccggggaaagcaatcattggtgtgtatgtgtatgtgcatgcacacacgtgcatatacacatttgtgtatgtggaaatgtgctgggcaagtcaaaactatagaagagttgcctcctgtctctcgaatcttccagagatatcacttaattgttaacagcttttgtgttaatccccttcagcccctagctcttttattctaccacggctggagagttgatacctgcagtcagcctgccagtgactcttagtgtctgtttctgacttatttttcctgtctctgtcttccaacccccaataatatttccaccggggatgcatcatttttactcccaatattctgtagagagggagtcaggatgctgtcttcccacgaatagtactcagtaacaaaccaattgcattttagttgggcagtgctcccacccaccctccagatcccttccagctaaaacccttcccccttccctccatgtgtttctcagtttcccgtttcgtttgttggactgttccactgcccctcctcctcaccctatcacccatggatcgtaatgtaaaattcttttaccatgtcaagaaattattaaaaatacaggtactttgacctctttctaaagccgcagaccctggtgcaatgctctggtggctagggatgtactcatgctcatatgtgtgcacgcttggacacccacctccatggacacctagccaccctgttgtgtgtccttatgccagttgagctgaatcttttccccagtatagtggaaagactgaggcttctgcctactgagcaaggttgggtgcttcatttgtgttcagtctgaattatgggaaagttagctcttcccagacctaagctgccttctctccctactttcagaagatcctagttccttccttcccgagtgatacccatgaactgccagtagaggctgctatcgttccatgtgtaaggaatgaactggttcaaggcgcgtcctacccagtcattttctttaccttatactaattcttcctgaataatgtcttcagtttcttgaggagactcctagttttggttttcaaattacttggagggctgcctaggaatctatctccctctgaaataaagtttcctcatcttccaccttgcaaaaagccttc

SEQ ID NO: 85297 - DNA, 2070 bp, Homo sapiens
gcagcgatactgaatcggctgtgattgagaaggtaacacggtcaaaatgtgggtacagctcctgattcccaggatagaagatggaaacaactttggggtgtccattcaggaggaaacagttgcagagctaagaactgttgagagtgaagctgcatcttatctggaccagatttctagatattatattacaagagccaaattggtttctaaaatagctaaatatccccatgtggaggactatcgccgcaccgtgacagagattgatgagaaagaatatatcagccttcggctcatcatatcagagctgaggaatcaatatgtcactctacatgacatgatcctgaaaaatatcgagaagatcaaacggccccggagcagcaatgcagagactctgtactgaggccagggccagggccaggggactctgtgagtctggctcaagaccgacattgccttggtttgttacatgactatcgtgatggggaaactggctggaaatagtaatcacacctctctgtttttagttagagtctaatgaaactctcatctagttctgtgatgtgtttacctcttttttcaggcctcaggaactcttctatttccttccctaataccccacacccaacctgtcgtaatttctggagaactccaggtttgtgtgtgcaggatgttggcacaaaaatacctgtgttttcattctccccctctctccctcctgtgtcttgcgctttatgttttcttccgtttgataattagttggttaaaagctgagggaaccggaaggaaagtgctaggtgttttttaggaactagggtggcggggggacgaacttctcttcctcacatgaggttactgtttctttcctctgtggggcattggatcctcccacagttgccctggtgatgacttagggcttcccatctgtgtacatcccactttgaatcttgatcgtgacaagaaataccttaggccttcagtcaattccgaagctccttcagttgtttttataatgggcgttttcacatgcacatatgtgtatgcatgtatacgcccatacagacatgcacacacagactcctactccattagctaacataccctccctctccacaacccctgtcacatacctttcaggaggtgacagttgtcttagttgtcatctacccagacaaacgtcctgggcccgtcctccctcctgatactgtagcctcttggtacccagggtgagttggtggagaacagagagatgagaagcagagggcttggggaaagcctgttcctctctgactcagccctttttggcattattgcaagagcttgactcctggttgccttttcccagccagttttcagttggggtgaaggtttctgcaagtgtgaggtccagatgctgctgctcatgttgggctttccttttgggaactatttctctttatttatagtgtcgggcttccggggaaagcaatcattggtgtgtatgtgtatgtgcatgcacacacgtgcatatacacatttgtgtatgtggaaatgtgctgggcaagtcaaaactatagaagagttgcctcctgtctctcgaatcttccagagatatcacttaattgttaacagcttttgtgttaatccccttcagcccctagctcttttattctaccacggctggagagttgatacctgcagtcagcctgccagtgactcttagtgtctgtttctgacttatttttcctgtctctgtcttccaacccccaataatatttccaccggggatgcatcatttttactcccaatattctgtagagagggagtcaggatgctgtcttcccacgaatagtactcagtaacaaaccaattgcattttagttgggcagtgctcccacccaccctccagatcccttccagctaaaacccttcccccttccctccatgtgtttctcagtttcccgtttcgtttgttggactgttccactgcccctcctcctcaccctatcacccatggatcgtaatgtaaaattcttttaccatgtcaagaaattattaaaaatacaggtactttgacctctttctaaagccgca

SEQ ID NO: 85298 - DNA, 2225 bp, Homo sapiens
cgggagtgcagcggctgagaaggtcccttcggtgaaggcgagttccgggacaacagagagggccgcaccgtttccgagtctctcggaggctcagttctcagcgcaccattccccacagctctcctttttactttacccctacccgacacttgaccccggcagtgtgaaccccgctgggagcgtccaaagccatgcctcatcgcggctgcgcagcgcacgtgcacagcctcgcaggagtctcggcgattggctgtgacgcagtttccggcgtgagcggcgaaagccgggagggcgagcgagagagcaagcaggcagcaggctgccggcgggcgggcggacggcacagagggagggagcgagcgagcagtgagtaagccagcaagggcggtcgggtcccgaggtcagccgagatttctcaggtccctccggccccctccctggagtccacagcgcctccggtgtccagaggatcggacacggcccggcccggccatggcctcgttgctgaaggtggatcaggaagtgaagctcaaggttgattctttcagggagcggatcacaagtgaggcagaagacttggtggcaaattttttcccaaagaagttattagaacttgatagttttctgaaggaaccaatcttaaacatccatgacctaactcagatccactctgacatgaatctcccagtccctgaccccattcttctcaccaatagccatgatggactggatggtcccacttataagaagcgaaggttggatgagtgtgaagaagccttccaaggaaccaaggtgtttgtgatgcccaatgggatgctgaaaagcaaccagcagctggtggacattattgagaaagtgaaacctgagatccggctgttgattgagaaatgtaacacggtcaaaatgtgggtacagctcctgattcccaggatagaagatggaaacaactttggggtgtccattcaggaggaaacagttgcagagctaagaactgttgagagtgaagctgcatcttatctggaccagatttctagatattatattacaagagccaaattggtttctaaaatagctaaatatccccatgtggaggactatcgccgcaccgtgacagagattgatgagaaagaatatatcagccttcggctcatcatatcagagctgaggaatcaatatgtcactctacatgacatgatcctgaaaaatatcgagaagatcaaacggccccggagcagcaatgcagagactctgtactgaggccagggccagggccaggggactctgtgagtctggctcaagaccgacattgccttggtttgttacatgactatcgtgatggggaaactggctggaaatagtaatcacacctctctgtttttagttagagtctaatgaaactctcatctagttctgtgatgtgtttacctcttttttcaggcctcaggaactcttctatttccttccctaataccccacacccaacctgtcgtaatttctggagaactccaggtttgtgtgtgcaggatgttggcacaaaaatacccccttccctccatgtgtttctcagtttcccgtttcgtttgttggactgttccactgcccctcctcctcaccctatcacccatggatcgtaatgtaaaattcttttaccatgtcaagaaattattaaaaatacaggtactttgacctctttctaaagccgcagaccctggtgcaatgctctggtggctagggatgtactcatgctcatatgtgtgcacgcttggacacccacctccatggacacctagccaccctgttgtgtgtccttatgccagttgagctgaatcttttccccagtatagtggaaagactgaggcttctgcctactgagcaaggttgggtgcttcatttgtgttcagtctgaattatgggaaagttagctcttcccagacctaagctgccttctctccctactttcagaagatcctagttccttccttcccgagtgatacccatgaactgccagtagaggctgctatcgttccatgtgtaaggaatgaactggttcaaggcgcgtcctacccagtcattttctttaccttatactaattcttcctgaataatgtcttcagtttcttgaggagactcctagttttggttttcaaattacttggagggctgcctaggaatctatctccctctgaaataaagtttcctcatcttccaccttgcaaaaagccttc

SEQ ID NO: 85299 - DNA, 1414 bp, Homo sapiens
cgggagtgcagcggctgagaaggtcccttcggtgaaggcgagttccgggacaacagagagggccgcaccgtttccgagtctctcggaggctcagttctcagcgcaccattccccacagctctcctttttactttacccctacccgacacttgaccccggcagtgtgaaccccgctgggagcgtccaaagccatgcctcatcgcggctgcgcagcgcacgtgcacagcctcgcaggagtctcggcgattggctgtgacgcagtttccggcgtgagcggcgaaagccgggagggcgagcgagagagcaagcaggcagcaggctgccggcgggcgggcggacggcacagagggagggagcgagcgagcagtgagtaagccagcaagggcggtcgggtcccgaggtcagccgagatttctcaggtccctccggccccctccctggagtccacagcgcctccggtgtccagaggatcggacacggcccggcccggccatggcctcgttgctgaaggtggatcaggaagtgaagctcaaggttgattctttcagggagcggatcacaagtgaggcagaagacttggtggcaaattttttcccaaagaagttattagaacttgatagttttctgaaggaaccaatcttaaacatccatgacctaactcagatccactctgacatgaatctcccagtccctgaccccattcttctcaccaatagccatgatggactggatggtcccacttataagaagcgaaggttggatgagtgtgaagaagccttccaaggaaccaaggtgtttgtgatgcccaatgggatgctgaaaagcaaccagcagctggtggacattattgagaaagtgaaacctgagatccggctgttgattgagaaatgtaacacggtcaaaatgtgggtacagctcctgattcccaggatagaagatggaaacaactttggggtgtccattcaggaggaaacagttgcagagctaagaactgttgagagtgaagctgcatcttatctggaccagatttctagatattatattacaagagccaaattggtttctaaaatagctaaatatccccatgtggaggactatcgccgcaccgtgacagagattgatgagaaagaatatatcagccttcggctcatcatatcagagctgaggaatcaatatgtcactctacatgacatgatcctgaaaaatatcgagaagatcaaacggccccggagcagcaatgcagagactctgtactgaggccagggccagggccaggggactctgtgagtctggctcaagaccgacattgccttggtttgttacatgactatcgtgatggggaaactggctggaaatagtaatcacacctctctgtttttagttagagtctaatgaaactctcatctagttctgt

SEQ ID NO: 85300 - DNA, 1411 bp, Homo sapiens
cgggagtgcagcggctgagaaggtcccttcggtgaaggcgagttccgggacaacagagagggccgcaccgtttccgagtctctcggaggctcagttctcagcgcaccattccccacagctctcctttttactttacccctacccgacacttgaccccggcagtgtgaaccccgctgggagcgtccaaagccatgcctcatcgcggctgcgcagcgcacgtgcacagcctcgcaggagtctcggcgattggctgtgacgcagtttccggcgtgagcggcgaaagccgggagggcgagcgagagagcaagcaggcagcaggctgccggcgggcgggcggacggcacagagggagggagcgagcgagcagtgagtaagccagcaagggcggtcgggtcccgaggtcagccgagatttctcaggtccctccggccccctccctggagtccacagcgcctccggtgtccagaggatcggacacggcccggcccggccatggcctcgttgctgaaggtggatcaggaagtgaagctcaaggttgattctttcagggagcggatcacaagtgaggcagaagacttggtggcaaattttttcccaaagaagttattagaacttgatagttttctgaaggaaccaatcttaaacatccatgacctaactcagatccactctgacatgaatctcccagtccctgaccccattcttctcaccaatagccatgatggactggatggtcccacttataagaagcgaaggttggatgagtgtgaagaagccttccaaggaaccaaggtgtttgtgatgcccaatgggatgctgaaaagcaaccagcagctggtggacattattgagaaagtgaaacctgagatccggctgttgattgagaaatgtaacacggtcaaaatgtgggtacagctcctgattcccaggatagaagatggaaacaactttggggtgtccattcaggaggaaacagttgcagagctaagaactgttgagagtgaagctgcatcttatctggaccagatttctagatattatattacaagagccaaattggtttctaaaatagctaaatatccccatgtggaggactatcgccgcaccgtgacagagattgatgagaaagaatatatcagccttcggctcatcatatcagagctgaggaatcaatatgtcactctacatgacatgatcctgaaaaatatcgagaagatcaaacggccccggagcagcaatgcagagactctgtactgaggccagggctcccccgcaatcggtattttagtctgtcttgttcccccctcccctccggtgcgtaaccagtcccttgtgaagggaaaaatggctgcaaatatttctcacacatttcagttgtttgagcgagtaaaataaaactatcatatagtaa

SEQ ID NO: 85301 - DNA, 494 bp, Homo sapiens
attattctctgcatttaaaagtagaatttaaatagttctcccacctccacctcaatctaaggtgcacacacatacttttagctttactagagggtttttgttaatgtagtctataacagaaattgaggatttctgttatggtatttctattttactatcataccactgaaaagttaagctttctcttaagaatataagaaaaatttaagagacagcatgagctagttgaatagtcttattagtgaattagttttatataaaataaattatacaatggacattccagttatcatctgaaaatataatttagaaatttatgataatatatttctttctgggtctatttaattcagaaacattctcatacaaggtggttcaaagaatccagatttctgggaatggttttggacttcttgaagatataaaatatttgacaatgcattgttcaatatggaatcgtacttttggaaagaaaatctgccagaacattcatg

SEQ ID NO: 85302 - DNA, 245 bp, Homo sapiens
ctaacacgcggatctgactatctctcacgtacagtctcctccctgcacatgaaggagactctgctctaacacgcggatctgactatctcgcacgtagtctcttccctgtacacgaaggagactctgctctaacacgcggatctgactatctcgcacgtacagtctcttccctgtacacgaaggagactctgctctaacacgcggatctgactatctctcacgtacagtctcctccctgcacatga

SEQ ID NO: 85303 - DNA, 467 bp, Homo sapiens
ttgggtgagtaaggttcaagccccctgtatagatagatagatagatagatagatagatagattatatatgtttgtcattctcatcaattggaaaatagcgcctccactatggagcacacacggcaggtagctagagagctgtagaatcacatattcaaaatgttcaaaaagtaaaaaaaaaatccgtgtccgtggggagctccaaattggtctaccttctaattctgcctggttattgataattataagcccaattgtgatccaattttattcttggttttcaatacacactcaagaaacagatcctgtcctcttacattaagattgacaattacaatacgcactgtaagttaaaaagatgctttaacaaaatcagcactttctcccctgactgatttgacgttcaacgatttacttgagaaattaacgccctcttcaatttttcttcttggtttttaattctatgg

SEQ ID NO: 85304 - DNA, 605 bp, Homo sapiens
ctgacctgaattcttcctttttcttcctactaaactctgcttatttgctttagagggaatgtactgtaaagctaatgaatttggagacttggggcagcgtatggacttggttttctgtgttgagagcctgggaactaagaggtggggaggggaagccaggatgcattgcgagtatttctgataaattgccaaaaaagtctcacaggtacgtgaatctctcagtctctaaaaatatgtcatgatttatttctaggttctaagtatgtattcacatttatacctacttttgtatttgtcactcttcttccttttcctgtaagtaggttcccaaaattgtataagcttcaggttcctccaaacttggacctgcccccatcacttatcaccctccagcattgtgttcagctacatgttactgtagtcaccagcatcttgggagtgtgatttataggtggagggacttggtgctcttgatcagaatgatgcttttacctttattcacactgttttccatcctcccaggcacatggtggtttaatctgtagtactgaaaaaagtttaagtggcccatatagaatgagattagaagtactcatatatccttt

SEQ ID NO: 85305 - DNA, 565 bp, Homo sapiens
aggagagacgagggtagggagagagttcagaaaggagagtcctaaggccgtctggattctccttgagccccctccccatcctggtcctgggctgtgtcttcatcacagccacccctccccgatgtgctgttggttcagttaccccagacagtggatttctcagaacagaaattgctaatgttcacgtaaagatgaatgaaatgggaatgatgaaatgtgttaagagaacttaaatccagggtgtgaattgccactgatcctaacagagacgttttagcttttctacttcccacctgccggaagaaagatgagataaaccacttgtgttatttgttcagcattgctgcagcatcagagaggagtgttccccgaccctttgtttttctaggtgacttaatgggttctggcattgtgcatttatctttttaattgtggtaaaagatgcgtaacactaaagttgccattttaagcgttgttaagcatacaggtccgtggcattaagcgcattcacagtgttgtgcagtcatcaccaccatcaattagagctgttttcatcttgcaaaat

SEQ ID NO: 85306 - DNA, 370 bp, Homo sapiens
ggcagatataaccttttctcaaacatctctaattgtctgcataccccactaatattggctacataatacatttatttttgtcatttgggactaagtgccttacttagttttgttcagtgtattcattaattgaagaaatacttattcaggatttctattacttagttttgctcaatatattcactaattgaagaaatatttattcaggacttccattatatgagcactggcctttgtggtacaaagatacaacatgaatctgaaactcaatttaatctagaaagatttattaatataatctcatcagaaaagcaagacatctactgtgatagctacagtattggttagaaatggaaaagagagagcagat

SEQ ID NO: 85307 - DNA, 730 bp, Homo sapiens
ttttagcagagagaaggttttaccatgttggacaggcttgtcttgaactcctgacctcaagtgatccacctgcctcggcctcccaagtagctgggactacagttgtgcaccaccatcccagctaatatttgtattatttgtagagatggggtttcaccatgttgttcaggctgatctcgaactcctggactcaagtgatccacccacctcggcctcccaaagtgctgggattgcagacatgagccattgtgtctggctggattgacagcttttgattttctttatccttaagggttgatcaaattttcctggttctttatataacaagcaattttggaatacagacttgacattttaaatattatgttgtgagactagggccacccttgggtcaaagctgggagagaaaagaggaaaaattttaaaacagaacaaaatggaaaactgccccacttagcagattgcttctgcaagttttggcacctttcttcaatctgtctgctgttattgtaacttttcagagctcttgggtggtggctttttgtatttgtcctgtttttagttgtaatcaacgggagagataggctatagtacgctaacttcaccttggtcagcaccagagttcatgtttgatatggattctatgttctaattcttttttcttaaacagatcatcactgaggctgaggagcagggccaggttaaagaccagaggtcacagaaagagagg

SEQ ID NO: 85308 - DNA, 337 bp, Homo sapiens
acaggtgcttacaagccctgtgctgagtgctggcgactgaaaagatgagtacagcatagggaaggtgctcatggagtttgtgatctggtgggggagcgagttgtgtaatgacgaggaatgtgtctggaggtgagagtttcggggtctgggctttggttgtggatttgccaccaccaggccattgccctaagggcaggccctaacgtctttgggcctcagttttcgcatttataaaaagtggactcaatggacctacaggtcttcacttgctctagagcaacaaaactggagagctgtctcaaggagttttcctgtgcagtggagttcagcctcactg

SEQ ID NO: 85309 - DNA, 589 bp, Homo sapiens
gattacaggcgcccaccaccacgcccggctaatttttgtatatttagcagagacagggtttcaccatgttgactaggctggtcttgaacttctgacctcaggtgatccaccctccttggcctcccaaagtgctgggattataactttgttcagatgtgatagttgcattctgtgtttcatacctctaccaattctgtaattgtgttaaatttgtagctttttaaaaactcttgacattaagaattatgtttcagaagccaacatataaacctgtgggggaagaaactaagagaagcaagaggaacgttaggtttagtcttacgtgcatatgagagaatttaggagaattaaatgacttgccctaaagtcattttttaacactgtagatttagtgtatttttattctaagaataacatgatgagagattttttgtaagttctttatctttgagcagtacataatgaaatatttgcagatgaaatgttatatctcggatttgtttcaaaatgaggtagtttgggttatacatgaaatagaattgtcccagagtttgtggaatttgggtgttgggtacatgggagtttgtta

SEQ ID NO: 85310 - DNA, 932 bp, Homo sapiens
cggaagcaatgcctctgtatactgagctgctcttttccatagcaacaagagtggcagctggccactctgtaactatacgcaacagccctagggttacattcatgtgagggttacattctccagatctggatcagctctagctgggtttaaattctagctctatcataaacttaactggcagcacagccttcggcaagctatcctctgaatgttgatttccttaccagttacaagaaaatatacatgcatacagatatatatgctctaactcacagagcaataagagacttaaataagacgatgcttgtgaaagatgtagagtattgtcagacacacggtgagtgttcaagagatgctagctactttgactatgttcctggagacatgtctatgatttcttctcctacaaatgcttcttgccgtaacttctattcaatgtggagctaccctcatgctgtccatctgcactctgaatgaccccaggactgtcaaacttgcaagtgacctttctgccaaatcatccccaaggaaacccggggcctttgttggcctcacagatgactccatccccatccacacatatcacacattccctcatcccaactattctcacacagccctttcactgcaagcttccttcttccagatgatcatccattcctggaaatgttgaatcactagctgctagagtcagaggagacatatttattcatgaaaatacaaatggcatgtcttcttctgccaacaacttctagtgacacctttacctatgtagtcatacactgacagtcatgcttaggctgttgcatacagttatacaggtttcacactgcacccaggagtgccattcaagctgtagagccctgattcatgttctgggcaagtctactgatcaaactgaccagaattaaccaatgcattggagttgacct

SEQ ID NO: 85311 - DNA, 400 bp, Homo sapiens
cccagaagttttttattatgtaactgaaggtatgcacccttcgatgggtatctccccacttttccccaattcttagcccatggtaactaccattctagtctctgtttcattttttctttctttctttctttttctttctttctttaagatttcacattaaaatgagatcaagcagtatttgtctttctgtatttcgcttatttcacttagcataatgtcttcaaggttcatcaacattgttgtaaatgaaacaatttcattctttattaaagctgaaattatctctttctcacagtttacctatttatttgtatcagaggagtgcaggtacgcttggtgatactaattttatgtctattggctgtatactccaaattgggattaaagatacttctagttt

SEQ ID NO: 85312 - DNA, 415 bp, Homo sapiens
ctgggggctcaatggtgggaaacccaagctttgggcttgtcagagagcagtgactcatataattgggtatgtcccttgagggcatctggaacccgagacaatgctacaagagctatgggctcttgtggggtagggcttccaagccaagtggatctcacatccacctgacgtgagtctctttctcttgtacctgagctgacactcagagtgggaacaaagggaaaagctcctggagcctgtgtgggcctctgtgagggccactctcacggagaagtgactgtttcctggcccaagacagagctgtaggcaggacgcagtggctcatgcctgtaatcccagcactttgggaggccaaggcaagcagatcatgaggtcaggagttcgagaccagcctggccaacatggtgaaaccccg

SEQ ID NO: 85313 - DNA, 416 bp, Homo sapiens
agtttttaaactttgccataaaatatatcacttttatagttttttttaaatggcttaagctatacattcaatataaagatatacaccaggaacttaaagtaggaaaggcaggatttctctaaaataggctagaaattgaggaactctctggggccagattggacacctctatcatcaaagcagtacgcacaccctggctgcagcaatcaaggaagttaccagaacagtcttcagctggatcagtaatgccatgagacttaaaataatcttttaagggtagagtccatagcaacccaatccagctccactgaatcttgtaccccaggggtagtatcagttaagtaccacctgccagctcgtggtctgcaggaaggttcctgccacccaacagtgacttgcttgacttccccgatgca

SEQ ID NO: 85314 - DNA, 724 bp, Homo sapiens
attcaatagtctcctgttgtatagaactactcagtttttttaaacttttgtaatacaaatcactttcttcgtgttcacgtatgcaaatatttcattctttctttggtttatttatttcattaagttttggatcaactttaatgcttcctttaagatagtatacttttttgttctatattatctctctctttgaaactgcctgttcaacaattttcctagaaggtgacagcggaggaaagcctggtgaatgacaaagccatagattagtgtctggttgttacctgaccatgatagtaattaggcaatcagaatggatgagttttcagaggaatttaatgtaaaagaattacagcagaaaactaaagtctgagccttggcttttctgaagccacatccagggaactgaagataaaggagctgccacaggcagaaataatttaaataataggacaaaaatgataattaaggtcagaatgtacactaacatgggatcagcaacactttttttctgcaaatggccaggtagtaagtaaatatcttagacttttcagttcatatgtctgtcattataacatgaaagatgccataatatttaaatgaatagttgtagttgggttacaacaccttcatttctgtaaatttgaatctcatataatgtttacttgtcatgaaattgtactcctttttcttatttttttccaaccattaaaagataagaaaacat

SEQ ID NO: 85315 - DNA, 1874 bp, Homo sapiens
  misc_feature (127)..(127): n is a, c, g, or t
gagctccgtgctgggaggtgggaagggggcttgaccctggggactcaggcagtctggggacagttccaccaggggccggtgcctagaattggtgagggaggcacctcaggggctgggggagaaggancgagcgctcttcgcccctctctggcacccagcggcgcgcctgctggccggaaaggcagcgagaagtccgttctccctgtcctgcccccggcgacttgcggcccgggtgggagtccgcaggctccgggtccccagcgccgctggccagggcgcgggcaaagtttgcctctccgcgtccagccggttctttcgctcccgcagcgccgcaggtgccgcctgtcctcgccttcctgctgcaatcgccccaccatggactccccgatccagatcttccgcggggagccgggccctacctgcgccccgagcgcctgcctgccccccaacagcagcgcctggtttcccggctgggccgagcccgacagcaacggcagcgccggctcggaggacgcgcagctggagcccgcgcacatctccccggccatcccggtcatcatcacggcggtctactccgtagtgttcgtcgtgggcttggtgggcaactcgctggtcatgttcgtgatcatccgatacacaaagatgaagacagcaaccaacatttacatatttaacctggctttggcagatgctttagttactacaaccatgccctttcagagtacggtctacttgatgaattcctggccttttggggatgtgctgtgcaagatagtaatttccattgattactacaacatgttcaccagcatcttcaccttgaccatgatgagcgtggaccgctacattgccgtgtgccaccccgtgaaggctttggacttccgcacacccttgaaggcaaagatcatcaatatctgcatctggctgctgtcgtcatctgttggcatctctgcaatagtccttggaggcaccaaagtcagggaagacgtcgatgtcattgagtgctccttgcagttcccagatgatgactactcctggtgggacctcttcatgaagatctgcgtcttcatctttgccttcgtgatccctgtcctcatcatcatcgtctgctacaccctgatgatcctgcgtctcaagagcgtccggctcctttctggctcccgagagaaagatcgcaacctgcgtaggatcaccagactggtcctggtggtggtggcagtcttcgtcgtctgctggactcccattcacatattcatcctggtggaggctctggggagcacctcccacagcacagctgctctctccagctattacttctgcatcgccttaggctataccaacagtagcctgaatcccattctctacgcctttcttgatgaaaacttcaagcggtgtttccgggacttctgctttccactgaagatgaggatggagcggcagagcactagcagagtccgaaatacagttcaggatcctgcttacctgagggacatcgatgggatgaataaaccagtatgactagtcgtggagatgtcttcgtacagttcttcgggaagagaggagttcaatgatctaggtttaactcagatcactactgcagtcctgaccatgaaaagatagaatttaaaataaacttttagagatctcatggtctgaagtcatcagatgcagaccacgttcgtgatcagtggaaacatcaaggacaaaaggtccacgcaacacatgcacctcttctctagggcacagaagcgaggcagagcctcagttcctctgatgaacaagggaacaggtcttttccttctggtttgctaggtaaggttcagcacccatctgctgtggccttcctatgaaacgtagtttcaaaagctcggttt

SEQ ID NO: 85316 - DNA, 341 bp, Homo sapiens
atttttacatcagcttgtcagaaattatattaaaaacactttggggaaagctaagagcagtgcactgtttagcacagattttgtgagattctatactcttttaatgagcatttcatagggttttttttttgctgtttttttttctttttttgctttgctttactttgccaatcagttacttttataccaaattaacgaagtttctttaaaaacttcctggttaaattgtctgttatcatatagaaaagaatcaaactgaatcactttacatttctctaaagatagttcagtttttaatccatccagagtttgtgaatcagcctgatagatcataagccatt

SEQ ID NO: 85317 - DNA, 422 bp, Homo sapiens
ctcactcagaaagggaaagcacagctgtaaatggtcaacctccagctgtactgttagcaactacattggccatgaataagtactcctgttttcacaggaaaattggatcttagatatgttcaagtccagccactggactagagaaggactttctgaaaaccattgaattttgacactgtttcacttgaattttctcagttttttaatggccccctttgggcagcagcatgctttcagaaggctgcggtgtttacctccgtgagctgtgtggctgcagcacatggagaggcccgttgtgtataatggtgcaggagccagctgcacattcccaccatgccctggcccttctctggaaatatgtgaatagtcctttttgtttgtttagagcagaatttaattctgaggtctcacaggccatcaac

SEQ ID NO: 85318 - DNA, 408 bp, Homo sapiens
gcagtttgagtaaaatggtgaatacttctagataggcacaaaaattttatttcccctagttcactttttaaaaattaataaactttattttttagagcagttttagctttatggcaaaattgaggggaaagtagagttcccatattccaccccctctttttcccactgttgacatccagcacactggcacatttgtttccagtggtgaacttacattagcatattattgtcacccagtgttcatagtttacattagggtttattcttggcattgtacattctataggttttcacaaatgtttaatgacatgtatcccacattgtggtgtcatacaaaatagtttcattgcctaaaaatcctgtttattttgtctgttcattcttccttcccccttagcccctgtcagt

SEQ ID NO: 85319 - DNA, 1300 bp, Homo sapiens
ttaactatggggcgtctttcaatttggtgctcacggaccaatttgccaaatgctgcattctttgactcatcacgggatgatgtcattgctcctgggctggttggacaatgctgggaaccagtgaaggaaactcaaagctgaaaacaggtgacttgagtcacccttctagatccagccctgccatgaatttgtcacatatttatgagccagtcacaggtttcctttgtcataaaagattaattctattcattgttttatttaaaaaatagttgttgagggacaccgtgaagaaagtgaaaggacaacccacagaatgggagtaaatatttgcaaatcatatctgaggaagacttgtacccaaaatatgtaatgaattctcactctcaataataaaagaccaatttctcaattaaaaatgggcacaaaatatctgagtagacatttttccaaagcacatatgcaaatgggcaagaagcacatctaaagatgtataacatcattagtcaccagggaaatgtaagtcaaacctcaataagctactggtttacactcactaggatggctataataaaaaagacagatcattacaagtgttgatgagaatgtggagaaattgcaattctccaatttacaatgggaatgtgctaatgggaatgtaaagctgtgagaccactttggaaaactgtctggcagttcctcaaaaggtgaaacatacagctactctatgacccagcagttctctcctaaatgtatacccaacagaaatgaaaacatttgtccacacaaaatcttgtagataagtgttcatgccatcattattcacagtagccaaaaagcagaaacaatccaactgtctatcaacggataaatggatacaatttggtgtattcatattaatattatggaatattttttcacaatggaaatgaagttttgatacatgctacaatgtagatgaaccttgaaaatattattctaagtgaaaggaaccagtcacaaaaggccacattattgtatcattctgtttatataaaatgtccggatttagcaaatctatagagacagagggtagatttgtggttgggtaaggctggaagggttggtgggaaatggggagtggctgctaataggtatgagattttttgggaggtgatgaaatgttctaaaatagattgttgacctggctcactggctgttgcctgtaatcccaacactttgggaggtcaaagtgggagaatcacttgaggctagaagttcaagaccagcctgggcaataaagtgacaccttctggtctctaca

SEQ ID NO: 85320 - DNA, 490 bp, Homo sapiens
atgtctgcagtttctcagaataaccagctcaaaatatgccagagaagtatattttggggtggcatattctagtctcctccagtcatattttggggtggtgtgtcctgagccccaacaagataggtttcatttttgaaaattgctcttccagtcccactgttcatctcataagcccaggaatcaccacctgttgatttcctaggcatcttcttgctcagggtagtagatgtttggtggactagaaatgcagggagaagaaaaggaaggcttggtgatgtcaaggatttttaaaagcaaactatctcactgtgttctctcaatagtcaccctctgtgctgctcattccatgaggcttaaagctgataactgggggacaaaagggttagggtaacaatttatttttgtctcctgacaatacacacataacttttctgctgtgcttggggaaaatataactgtggattaattctgactcattgttttggaagca

SEQ ID NO: 85321 - DNA, 737 bp, Homo sapiens
ctaacgacgcggcgcccaccgagagctgggggagcccagggcggggagggcgcggccggagcgagcgccgcccgggaaacccgagccccgccagaacccctggcagccacagagctcaggcttcaacgctggcccgacaccagggccaggccagaaatcagcctgggagaagctgggtccggctccgaggctggtgggcacggccccacccggctttgttcttcgcggcgctgaggcggttagtttagcctcccacccaccagacaaaggtgcgggaaatgggaccggtttgacttgttcaggcacatggtcaccctgcacgtcaggggccggctcacccctgatattagcaaccccaagcgtcttggcgcagggagggatccccgtcagccaggtccccacgcagctccaggcagcgccagcgtccaccagggagcaggggcagcagagcccttctccccagacacccttgtgtcttcggaaaatgccaggtccccccccagctgctgttctcgtctttggaggacccggctttactggtgccacatgcctgctgcgggctgtgccatggagggcggcacctgcctcttctcacgtggcagctctggcaccgggaacttcagagaccccagctgggctgagccaccccgggctgaggccttgtgggtcgcctcaaattcaagcctcatgggcccggcctcccgccctaacggtcgctgaagtgtcctgctctcata

SEQ ID NO: 85322 - DNA, 445 bp, Homo sapiens
acatcactgcctcaccccttgcagtgctcatcaacaacccaaacaagcccaatcctgccctgatctcatgtctgtgtcactggaaccaacaggcctgcctcaaccactgtccacctgcacatctgagaggctggcaggtcaccggggctagccgtgcacgtcagttcctgggaagaaagtagaatgtgaatcatcttctctcaaacgcctatcaaaagcccagctgagatcaataattttttgggagaacagacctgtaccaattggctcggtgtttggtgaggtattgtaaatttgatcctaaatcaaagggtatccctagaaggacccacatggaatggcctcctctaaacatccctccatgttgtacttctgactctttccagcaatctcaagcacaagaagcagttgtgggaacccaggcctggcatctgttggcagccca

SEQ ID NO: 85323 - DNA, 280 bp, Homo sapiens
atctgctttctgtcactacagattggcttgtattttttctagagttttatataagggaaatcaaacagtataaactttgcatggggtctggtttctatcactcagtactgaattgagattcatttacgtagttttaaaattttacacacatctttgttactcaaaatgttgtccacaaaccaatagcaagcattacttcagttcgttaaaaatgcagaaatctccactgcacgcagtggctcacacttgtagtcccagcactttgggaggccaaggcggg

SEQ ID NO: 85324 - DNA, 343 bp, Homo sapiens
agccattcaacaagtctctagaagttctcaactttcccacattttcctgtcttcttgtgagccctccaaactgttccaacctctgcctgttacccagttccaaagtcgcttccacgttttcaggtatctttacagcatcaccccactttctggtaccaatttaccatattagtcagttctcacactgctatgaggaaatacccaagactggatagtttataaagaaaagaggtttaattgactcaaagttccgcatggctggggaggcctcaggaaacttacaatcacggcagaaggtacctcttcacagggacccaggagagggaatgagcgcaagcagggg

SEQ ID NO: 85325 - DNA, 235 bp, Homo sapiens
  misc_feature (2)..(2): n is a, c, g, or t
  misc_feature (4)..(4): n is a, c, g, or t
angncctgttgacaaaagagaataatacaggtgtcctcctgaaactgtcaccacagtgaccttcctcagtcaaaaagaaatataaatattattgtgtttctcgtgtctgaggcacctctgaaagcatttatcttttcagagagttcagcacttcatctcacgggttaattaaaccaacctgtagtggcaaagtttagtggtagtgaaaataaacataatcctctttctgttgccc

SEQ ID NO: 85326 - DNA, 801 bp, Homo sapiens
gattttacatttaactttttaacgcatgttgagttgattttcatatatggcaaaaggaagggatccagtgtcaatcttctgcatatggctagcagttataccagccccatacaatttatccttgtaacaaactttcatatgtacccccgaacctaaaataaaagttggaaaatgaaaaatagaaaagtggaacaaacttacacttcaacaaagatatattgtggcatatattgaatgctaatttcttacttataataacataaaatgagttttaagtttccaaaaaaaaaaaaaaaacagtgggtataatgtggatagtatgtacccttgatgggaggtgaggagaatggcaccttataatattcctccccaaaagtcataaccccaatttaaccatgagaaaaaaataagataaatcccaactgagggatattctacagcatacctggccccaaaactatcaagggcatcaaaaacaaggaaagtctaagaaatttcatagccaaaaagagcctaaggagatatgactattaaatgtaatgcagtatcctggatgggatcctggaacagcaaaaggccattaggaaaaactgagtaaatctgaataaagtatggacttcagttaataataatgtatcaatattggttcattcattatttaaaaacgtatcatactaatgtaaaatggggtaactggacatgaggtgtactgtaattctctgtattatcttcctaataaattttgtaagtctaaaactgttctaaaattaaaagcttatttaaacatgtttgtaaaaaagt

SEQ ID NO: 85327 - DNA, 155 bp, Homo sapiens
acagatggtaggttttttaattctttttgaaatgtattctcgttttattgctcaggctggagtgatcacagctgactgtagcctcgaactcctgggctgaagctatcctcctgcctcaacctcccaagtagctaggcccacagggtcaagtcacc

SEQ ID NO: 85328 - DNA, 338 bp, Homo sapiens
atttcatgactaagaacccgaaagcaaatgcaataaaaacaaagataaatagctgggacctaattaaactaaagagcttttgcatggcaaaaggaacagtcagcagagtaaacaggcaacccacagagtgggtgaaaatcttcaccgtctatacatctgacaaaggactaatatcccggatctacaacaaaatcaaacaaatcagtaagaaaataacaaacaatcccatcaaaaatcggccaaggacatgaatagaccgttctcaaaagaatgtatacaaatggccaacaaacatgaaaaaatgctcagcatcactaatgatcagggaaatgcaaatc

SEQ ID NO: 85329 - DNA, 403 bp, Homo sapiens
gcctaactctagttatgcatttcgttatcagctgataagagagaatacatttgtacccagatcccttaacactgagtttttttttgttgctaatgatcatctcatttaacctcttttagaaatgaggaaacttaattccaaggagtgaaatgacctatctaaagttaaaagccagctagctaatttgtttccttattcccagtgctgtattcacttaattcgacatcctgccagatctcgtatacttagtacatgaaatgataggtgaggttttattagtattttcagataagagtatatttgttcatgtctttgtaaaaagggttgctgccttagccaaactgaattccagcaacaagctacttgctttttgtttaattcaagttgtagggctaaaataaaa

SEQ ID NO: 85330 - DNA, 811 bp, Homo sapiens
gcctggagcccctcccctctggctccttccctcaggatttgcggagcctgtaataattgagggacaggcggggcgccatggctcacgcctgtaatcccagcactttgggaggcggaggcgggcggatcacgaggtcaagagatcgacaccatcctggtcaacatggcgaaaccccgtctctactaaaaatacaaaaactagctgggcgtggtggcgcgcgcctgtagtcccagcggctcgggaggctgaggcaggagaatcgcttgaacccgggaggcagaggttgcggtgagccgagatcttgccactgcaccactccagccttggctggacatgagctgaggactcgttgtctctagtaaacaacacatactaagtaaaatcaacacatctttcctgatagataataaagcatagaacaaaattaaaaacaagggagggggcgcgccgcgtcgttataaagattctccccccgaggagagggcgccaccggtagtttccgcgcaaagcaaacagaaagctttcttcgttggtcgagacacgagccaggcgagcgcccccctagctacggagagagcgagccccgcgcgtgaacaatacagcacacaaggcagcgagggagccgcccaggaagcgttgatcacaacaccacggcccgacccacacacgcgcgggagcaagcaacagccggggggcaccctcgccgggagagcactaacggtgcaggagcaagacagaagacccaaacacgacagcagcacgggggcgggggccaacaactggtggcggacgcaagcacccccccgaccga

SEQ ID NO: 85331 - DNA, 175 bp, Homo sapiens
ggaggcactccgtgcacatctcacctaggctgagaccccatctcactcgcactgccgggcacagggcctctcgctcgggtcctttctaggcagttctctgaggcagcaccaaggttcatgcagaaacacacgcgctgggatgttctgtggcagacagtacatcccgcacccatca

SEQ ID NO: 85332 - DNA, 282 bp, Homo sapiens
tctcatctgccccatcttggtggcaggatgtatagataggatggaggtaatggtgttctttttcttttccttatttggttttggactccacatcaaatggagacatgtagatgaaagtggcgtgcatttaaaatgtatgtacacatcagactgctggagatggtagatattatactgcatgtatgttttttttttctttcttttttttttttttttttttttttttttttttttttttttttttttttcaattgggggagaaaaccggggggggggaaaaag

SEQ ID NO: 85333 - DNA, 813 bp, Homo sapiens
gccaagattgcgccactgcactccagcctgggagacagagcgagactccgtctcaaaaaatataaaaataaaagggatatctggattggcggagagactgcaggacagcattcaagtggggttgaattggcccagttgcatctgacttctcacttgtagttcccaagaatgaatatagaatgtgctggaaaagcaacatcctgagaggaagggaccggtgagaaaaggacaggatgtgttccagatccccagaacaggatcccctttgttgctttaggccaacgtgccatgcatccctggagcatgaaacccaggatgggccgccttccagcctcccacagctgtgatgcaagttgaacacatacagagagactgcatctgcactgggtggttttcctgagccttggggagcagaatgcatgaatcccaggtatctgccgatctgtatgtaacaaattcacttcatgtaacttactgtgtgtccgtgagattatctctcactcaactcagacacattggcaaccagtgtgcagtgaacctgcttcacaagcaaggatgtggagaaactattttcgtacattttgtgggaatctgaaatactgcggtcagtatggaaagcagtatcatgggaaacttcctcaactcaagatcacctaccaatccttacagaatcagaatcatcatacaaactggtgaaagcatagtttcccctagaggttgggatgagggcaagaatgtcccctcttatcactactattccacacaatatgaaaggttccagccagtgaaataaaggaaaaagaaataaaagtg

SEQ ID NO: 85334 - DNA, 717 bp, Homo sapiens
gccaagattgcgccactgcactccagcctgggagacagagcgagactccgtctcaaaaaatataaaaataaaagggatatctggattggcggagagactgcaggacagcattcaagtggggttgaattggcccagttgcatctgacttctcacttgtagttcccaagaatgaatatagaatgtgctggaaaagcaacatcctgagaggaagggaccggtgagaaaaggacaggatgtgttccagatccccagaacaggatcccctttgttgctttaggccaacgtgccatgcatccctggagcatgaaacccaggatgggccgccttccagcctcccacagctgtgatgcaagttgaacacatacagagagactgcatctgcactgggtggttttcctgagccttggggagcagaatgcatgaatcccaggtatctgccgatctgtatgtaacaaattcacttcatgtaacttactgtgtgtccgtgagattatctctcactcaactcagacacattggcaaccagtgtgcagtgaacctgcttcacaagcaaggatgtggagaaactattttcgtacattttgtgggaatctgaaatactgcggtcagtatggaaagcagtatcatgggaaacttcctcaactcaagatcacctgaggtcgggaattagagaccagcctggttaacatggtgaaacgaagtctctactaaaaatac

SEQ ID NO: 85335 - DNA, 1241 bp, Homo sapiens
gaccagggcgggccgggacaaagcctgggccgggcctgcgcttccgttcgcttgactggctgcgcttgttttcagggttttggtctgaaaacggatcttacctgcgcagagcaaaatcggttgtagattatatccacgaaaattccttctattaaaatgaatttcaagtcccacctaccctggaagcagaaagagagagaagagagagagtaaagagaaagagaaaagaaagagaagttgaaaaagagaaagaaaaccaagaaagaaagagaaaaaaaccgaaaataaatggacaagaaagaaaaacggtgaaggtcaaccctgtgctcaattccagagactttcctagggacatcgtgttgggcatggaggactaagagatgtagtctggttttgttgcccaggctggtctccagcttctagcctcaagcagtcttcccatctgctcctaccaaagtgctcggattataggcatgaatcaccttgcatgggagataaggacccccacatcaagccctcaggtcactgggatcctggactacggcactgctccaggcaggcctggttatcctgcttgaggcagcaatcctcttgagcctagtgaaatgcaactggctgtacctcaatgatgttgccctgagattctgccagtcgaggtattacttcaatctcctgagaccagcctctacctccagatccagggaggccaacgtgccatgcatccctggagcatgaaacccaggatgggccgccttccagcctcccacagctgtgatgcaagttgaacacatacagagagactgcatctgcactgggtggttttcctgagccttggggagcagaatgcatgaatcccaggtatctgccgatctgtatgtaacaaattcacttcatgtaacttactgtgtgtccgtgagattatctctcactcaactcagacacattggcaaccagtgtgcagtgaacctgcttcacaagcaaggatgtggagaaactattttcgtacattttgtgggaatctgaaatactgcggtcagtatggaaagcagtatcatgggaaacttcctcaactcaagatcacctaccaatccttacagaatcagaatcatcatacaaactggtgaaagcatagtttcccctagaggttgggatgagggcaagaatgtcccctcttatcactactattccacacaatatgaaaggttccagccagtgaaataaaggaaaaagaaataaaagtg

SEQ ID NO: 85336 - DNA, 1683 bp, Homo sapiens
gaccagggcgggccgggacaaagcctgggccgggcctgcgcttccgttcgcttgactggctgcgcttgttttcagggttttggtctgaaaacggatcttacctgcgcagagcaaaatcggttgtagattatatccacgaaaattccttctattaaaatgaatttcaagtcccacctaccctggaagcagaaagagagagaagagagagagtaaagagaaagagaaaagaaagagaagttgaaaaagagaaagaaaaccaagaaagaaagagaaaaaaaccgaaaataaatggacaagaaagaaaaacggtgaaggtcaaccctgtgctcaattccagagactttcctagggacatcgtgttgggcatggaggactaaggccagtgtgaagataagtcaccgattctttaaaaaaaaaaagccagtaacttataaaaatagccataaacgacgtagttttttgttgttgttgttgttttgagacagcgtctccctctgtcccccaggcgggagtacagtggcaggcactcagctcactgtaacctccgcctcctgggttcaagtgattctcttgccccagcctccagagtagccaccacgcccggtccaacttagttttttaatactttttaaaattttaagacagggtctctgccaccgaggctgaaatgcagtggcgcaatcatagctcactgcaaccttgacttcctggggtcctgggcaggtgaccccctgtctcagcctgccgagtagctgtgagtaaaggcctgtgcctctccactgtgctaattttctactgtttgttgctttgtttttaatagagatgtagtctggttttgttgcccaggctggtctccagcttctagcctcaagcagtcttcccatctgctcctaccaaagtgctcggattataggcatgaatcaccttgcatgggagataaggacccccacatcaagccctcaggtcactgggatcctggactacggcactgctccaggcaggcctggttatcctgcttgaggcagcaatcctcttgagcctagtgaaatgcaactggctgtacctcaatgatgttgccctgagattctgccagtcgaggtattacttcaatctcctgagaccagcctctacctccagatccagggaggccaacgtgccatgcatccctggagcatgaaacccaggatgggccgccttccagcctcccacagctgtgatgcaagttgaacacatacagagagactgcatctgcactgggtggttttcctgagccttggggagcagaatgcatgaatcccaggtatctgccgatctgtatgtaacaaattcacttcatgtaacttactgtgtgtccgtgagattatctctcactcaactcagacacattggcaaccagtgtgcagtgaacctgcttcacaagcaaggatgtggagaaactattttcgtacattttgtgggaatctgaaatactgcggtcagtatggaaagcagtatcatgggaaacttcctcaactcaagatcacctaccaatccttacagaatcagaatcatcatacaaactggtgaaagcatagtttcccctagaggttgggatgagggcaagaatgtcccctcttatcactactattccacacaatatgaaaggttccagccagtgaaataaaggaaaaagaaataaaagtg

SEQ ID NO: 85337 - DNA, 453 bp, Homo sapiens
tattaaaatgaatttcaagtcccacctaccctggaagcagaaagagagagaagagagagagtaaagagaaagagaaaagaaagagaagttgaaaaagagaaagaaaaccaagaaagaaagagaaaaaaaccgaaaataaatggacaagaaagaaaagtaaggagggaagggaagggaggaagggaagggaagctttaggaattgaattaacacactttggaattgtctgtgaaggggatgatgcaagctaaaatgtgaaatgcaaaaccctgccagggtagaatgttctatttcatgccagtgcccatagaagataaatacttttcatttatcttccccattcactctagacggtgaaggtcaaccctgtgctcaattccagagactttcctagggacatcgtgttgggcatggaggactaaggccagtgtgaagataagtcaccgattcttt

SEQ ID NO: 85338 - DNA, 484 bp, Homo sapiens
aattcattagctaaaatattatagtttaataatgccataaccgttccatatggcataaaaaattaagacattattataaagcctatcatttgcaaaatgttttacagtttaaaaactactttcatgttcatataaacataatcaaatattatgtttaattataatgagagaaagcaatatgagacaagaaaaagcaggtgtcattttcccaattttacagttgaaacagcaaagcagaaatgttaagtgatttgcagtagtagagtaagaacttaaacccaagcctcttggtaccaagcccatagtttcctctccatctagggcattataaaacctgaggacgagacctagagttttgaaatacaaattaattctgccagaaagctggattctttctctacctgtgtatagccaagattcctaagaacaaaatgaaatgtcttgacatcttttgctaaagttacttaaggattaggttgggtcg

SEQ ID NO: 85339 - DNA, 360 bp, Homo sapiens
cagaaactcaggaataaagccattaactttcaaagaatatgttgtgttgttcgatattttccattcctaatccacatccacgttggtcaagtagagcttcctactcagaagcacagcagttgccatggtgttctcttccatctgaaagcagcaattttccgcagcgtccatttacagaatgtgccatatttactcagattctaatgtatattaaatatgctttggaaacttaacaagaaacgtgcaagctctcagtaaagaaaagttgtagaaaacaaaaactgaacagcaggcatctagtttctcctctcccaaaatggccttagtggattcaaaaatgggaagtgtgaataaaactgc

SEQ ID NO: 85340 - DNA, 348 bp, Homo sapiens
ctttgaatatgttttctgccttaagatattcactttcagttgtacaccctaaattttgtgatgcctcctgtgtactaagcactatgctaagtcttctaatgttttcatttattcctcaaatagctattatgcccattttacggagaacaagttacaaacattccccacagttaccaactgaaaaaatggcagaactaagatttgaatccaacatttttggctctactcctcaaaatatcattacctgaacccagagacaatcataaaataccacattttgcccctatatccttaagaaacattacctgccaattaattctattgtaaactattttctgaagtgacaca

SEQ ID NO: 85341 - DNA, 1024 bp, Homo sapiens
gaagaccaaaatatatattattataaaccacaatatcagagtttgtcaacataataaaccacttgccatttgttggacctatacaactgtacaggagtaagtccacaccaaatcaacctaatttttatttataaatatgactagaacaccaacagcaacagagaaaactgaagaaaagaaagcaactagaagatgtaaaaatattatagctcaggatgtacttcattcttgaagccaaatcagtttgatataaaaattgagtcattcagaggaccacagagtttgtgcaaattgaaagtatgattgttgacttttgttaaacagaaaggccaaacattaggatagctagagttaataagtattttggaaagtaaagctaaagacataccttttaagatatgagataaagtgggcaaatatgagaaaaaagataagagacatggagagagcaaaagttccaacttctgtttaataaagaagcaaacaaaaatagagggaagatgtattcacagacataatacaggaaaattttcctgtgttaaacaaaaaccagccttcagatagataggggcaactgactgtcaacaggaaaacaaaaacagagattgacctggatacttgctgtataattcgaaagttgaaagagaaccttttcagaaagataaactggtaatctgcgggagaatgaaaactggatcgttttctcattggcaaactgagggctagaaggcagtggatcagggccattaaagatctgatggaagttaatagccaagctaatattaaaagtaagacactttgggtatctagggactgaaaattatttcagtggaatataataggtatctagaaatagatcccagaatttcagaaaatgtaatatgaaaaaaatggttcaatcagtaagaagaaggtgaattatttaatttttggtgctggcatatgtagaagaaaataaaattgggcccacatcttagactgcttacaaaagtaaattctatcagaatcaagagattaaatacca

SEQ ID NO: 85342 - DNA, 256 bp, Homo sapiens
cagcaagaccccttaaaaaattaagtacataaaaaaagttaaatcaaagaaacaccatctatatcaagtgactgactttagtgttgactaccaacagtggctctcaagctttcttctggctccacagggattgtatgcatgacacactcctatcaatgacatttattacataatgatgtattatccttcccattttatggtgaggacactgaagtcccaggagtgggagtgcctacatgtacatgagaaaaactga

SEQ ID NO: 85343 - DNA, 337 bp, Homo sapiens
agctaacctcatactaattaatggtaaaaaactggttgctttccccctaggaacaagaatgagacaaagatgtccactccaaccacttctatttaacattctgcttgaggcattagccaggataactaggcaagaaaaagaagtagacaacccaattaagaaatggatgcaaaggatctgaatagaaatttctgcaaagaaggcatacaaatggccaatgagcacttgaaaagatgcttagtattattagttattaggggaatgaaaatcagaaccacagtgagataatgctacttcatacctactagggtgacaaaaaagacaacagtaaatgttg

SEQ ID NO: 85344 - DNA, 1392 bp, Homo sapiens
tgcgctctgcggctgacggcgcttttgtctccggtgagttttgtggcgggaagcttctgcgctggtgcttagtaaccgactttcctccggactcctgcacgacctgctcctacagccggcgatccactcccggctgttcccccggaggtgagcggccctgtgggcttccccggctccccacccccatcgctagagtgctcgccgcgctagcagcctcgcgttccagggctgggggtgcgccgccgggatcctctctgatcgcccacgccccatctgggtccccattcagccgtcagccctgttttgtcctaaggtggtcctaactaggatccacgtggcccatcccacgcccacaggtgctgagttaggcatccctgccatgccctcccagagcaccttcacgatctccttgctgtcccaacacttagcgtgttgcgtgttaactaccctttgtctataaggtttgcaatgtggccctagtatcttccagggtacctaacacattgcagatattcatggtatgtttgttaaataaatgaacttgatagatttgaccctcatagagttatttggacttgcaaaaagtttgtagttaactccaatctgtgatgtgggagagacttctaggcaggttcctttctccagggcatgttcttatatttcccattacccaccacccccctgcaaaaggactgggcctatttcaggaaggtgactgatgcctgcactgtagcacaggggttgtgcattgtgccttgcaggaacaaaattttcaataaagtaaatgtttgtttgtttgtttttgagacggagttttgcttttgttgcagtgagccgagatcgcactgctgtacccagcctgggccacagtgcaagactccatctcaaaaaaaaaagaaaagaaaaagcctgtttaatgcacaggtgtgagtggattgcttatggctatgagataggttgatctcgcccttaccccggggtctggtgtatgctgtgctttcctcagcagtatggctctgacatctcttagatgtcccaacttcagctgttgggagatggtgatattttcaaccctacttcctaaacatctgtctggggttcctttagtcttgaatgtcttatgctcaattatttggtgttgagcctctcttccacaagagctcctccatgtttggatagcagttgaagaggtgtgtgggtgggctgttgggagtgaggatggagtgttcagtgcccatttctcattttacattttaaagtcgttcctccaacatagtgtgtattggtctgaagggggtggtgggatgccaaagcctgctcaagttatggacattgtggccaccatgtggcttaaatgattttttctaactaataaagtggaatatatatttc

SEQ ID NO: 85345 - DNA, 1248 bp, Homo sapiens
tgcgctctgcggctgacggcgcttttgtctccgggtccagaggcctttcagaaggagaaggcagctctgtttctctgcagaggagtagggtcctttcagccatgaagcatgtgttgaacctctacctgttaggtgtggtactgaccctactctccatcttcgttagagtgatggagtccctagagggcttactagagagcccatcgcctgggacctcctggaccaccagaagccaactagccaacacagagcccaccaagggccttccagaccatccatccagaagcatgtgataagacctccttccatactggccatattttggaacactgacctagacatgtccagatgggagtcccattcctagcagacaagctgagcaccgttgtaaccagagaactattactaggccttgaagaacctgtctaactggatgctcattgcctgggcaaggcctgtttaggccggttgcggtggctcatgcctgtaatcctagcactttgggaggctgaggtgggtggatcacctgaggtcaggagttcgagaccagcctcgccaacatggcgaaaccccatctctactaaaaatacaaaagttagctgggtgtggtggcagaggcctgtaatcccagctccttgggaggctgaggcgggagaattgcttgaacccggggacggaggttgcagtgagccgagatcgcactgctgtacccagcctgggccacagtgcaagactccatctcaaaaaaaaaagaaaagaaaaagcctgtttaatgcacaggtgtgagtggattgcttatggctatgagataggttgatctcgcccttaccccggggtctggtgtatgctgtgctttcctcagcagtatggctctgacatctcttagatgtcccaacttcagctgttgggagatggtgatattttcaaccctacttcctaaacatctgtctggggttcctttagtcttgaatgtcttatgctcaattatttggtgttgagcctctcttccacaagagctcctccatgtttggatagcagttgaagaggtgtgtgggtgggctgttgggagtgaggatggagtgttcagtgcccatttctcattttacattttaaagtcgttcctccaacatagtgtgtattggtctgaagggggtggtgggatgccaaagcctgctcaagttatggacattgtggccaccatgtggcttaaatgattttttctaactaataaagtggaatatatatttc

SEQ ID NO: 85346 - DNA, 1362 bp, Homo sapiens
tgcgctctgcggctgacggcgcttttgtctccggtgagttttgtggcgggaagcttctgcgctggtgcttagtaaccgactttcctccggactcctgcacgacctgctcctacagccggcgatccactcccggctgttcccccggagggtccagaggcctttcagaaggagaaggcagctctgtttctctgcagaggagtagggtcctttcagccatgaagcatgtgttgaacctctacctgttaggtgtggtactgaccctactctccatcttcgttagagtgatggagtccctagagggcttactagagagcccatcgcctgggacctcctggaccaccagaagccaactagccaacacagagcccaccaagggccttccagaccatccatccagaagcatgtgataagacctccttccatactggccatattttggaacactgacctagacatgtccagatgggagtcccattcctagcagacaagctgagcaccgttgtaaccagagaactattactaggccttgaagaacctgtctaactggatgctcattgcctgggcaaggcctgtttaggccggttgcggtggctcatgcctgtaatcctagcactttgggaggctgaggtgggtggatcacctgaggtcaggagttcgagaccagcctcgccaacatggcgaaaccccatctctactaaaaatacaaaagttagctgggtgtggtggcagaggcctgtaatcccagctccttgggaggctgaggcgggagaattgcttgaacccggggacggaggttgcagtgagccgagatcgcactgctgtacccagcctgggccacagtgcaagactccatctcaaaaaaaaaagaaaagaaaaagcctgtttaatgcacaggtgtgagtggattgcttatggctatgagataggttgatctcgcccttaccccggggtctggtgtatgctgtgctttcctcagcagtatggctctgacatctcttagatgtcccaacttcagctgttgggagatggtgatattttcaaccctacttcctaaacatctgtctggggttcctttagtcttgaatgtcttatgctcaattatttggtgttgagcctctcttccacaagagctcctccatgtttggatagcagttgaagaggtgtgtgggtgggctgttgggagtgaggatggagtgttcagtgcccatttctcattttacattttaaagtcgttcctccaacatagtgtgtattggtctgaagggggtggtgggatgccaaagcctgctcaagttatggacattgtggccaccatgtggcttaaatgattttttctaactaataaagtggaatatatatttc

SEQ ID NO: 85347 - DNA, 1458 bp, Homo sapiens
tgcgctctgcggctgacggcgcttttgtctccgggtccagaggcctttcagaaggagaaggcagctctgtttctctgcagaggagtagggtcctttcagccatgaagcatgtgttgaacctctacctgttaggtgtggtactgaccctactctccatcttcgttagagtgatggagtccctagagggcttactagagagcccatcgcctgggacctcctggaccaccagaagccaactagccaacacagagcccaccaagggccttccagaccatccatccagaagcatgtgataagacctccttccatactggccatattttggaacactgacctagacatgtccagatgggagtcccattcctagcagacaagctgagcaccgttgtaaccagagaactattactaggccttgaagaacctgtctaactggatgctcattgcctgggcaaggcctgtttaggccggttgcggtggctcatgcctgtaatcctagcactttgggaggctgaggtgggtggatcacctgaggtcaggagttcgagaccagcctcgccaacatggcgaaaccccatctctactaaaaatacaaaagttagctgggtgtggtggcagaggcctgtaatcccagctccttgggaggctgaggcgggagaattgcttgaacccggggacggaggttgcagtgagccgagatcgcactgctgtacccagcctgggccacagtgcaagactccatctcaaaaaaaaaagaaaagaaaaagcctgtttaatgcacaggtgtgagtggattgcttatggctatgagataggttgatctcgcccttaccccggggtctggtgtatgctgtgctttcctcagcagtatggctctgacatctcttagatgtcccaacttcagctgttgggagatggtgatattttcaaccctacttcctaaacatctgtctggggttcctttagtcttgaatgtcttatgctcaattatttggtgttgagcctctcttccacaagagctcctccatgtttggatagcagttgaagaggtgtgtgggtgggctgttgggagtgaggatggagtgttcagtgcccatttctcattttacattttaaagtcgttcctccaacatagtgtgtattggtctgaagggggtggtgggatgccaaagcctgctcaagttatggacattgtggccaccatgtggcttaaatgattttttctaactaataaagtggaatatatatttcacacacacaccaacgggcgccccacaaaagacccccaggcccacctcagccgacccccctcccgtcaccacgccctaccaggacccctcaaccacccacgacgcccacacgcgcccgcaccgccccggccttgacgccaccgcgcggaccccacccccacaccccgacactccgcccgaccccccccaccccccaccaccaccccacccc

SEQ ID NO: 85348 - DNA, 1190 bp, Homo sapiens
tgcgctctgcggctgacggcgcttttgtctccgggtccagaggcctttcagaaggagaaggcagctctgtttctctgcagaggagtagggtcctttcagccatgaagcatgtgttgaacctctacctgttaggtgtggtactgaccctactctccatcttcgttagagtgatggagtccctagagggcttactagagagcccatcgcctgggacctcctggaccaccagaagccaactagccaacacagagcccaccaagggccttccagaccatccatccagaagcatgtgataagacctccttccatactggccatattttggaacactgacctagacatgtccagatgggagtcccattcctagcagacaagctgagcaccgttgtaaccagagaactattactaggccttgaagaacctgtctaactggatgctcattgcctgggcaaggcctgtttaggccggttgcggtggctcatgcctgtaatcctagcactttgggaggctgaggtgggtggatcacctgaggtcaggagttcgagaccagcctcgccaacatggcgaaaccccatctctactaaaaatacaaaagttagctgggtgtggtggcagaggcctgtaatcccagctccttgggaggctgaggcgggagaattgcttgaacccggggacggaggttgcagtgagccgagatcgcactgctgtacccagcctgggccacagtgcaagactccatctcaaaaaaaaaagaaaagaaaaagcctgtttaatgcacaggtgtgagtggattgcttatggctatgagataggttgatctcgcccttaccccggggtctggtgtatgctgtgctttcctcagcagtatggctctgacatctcttagatgtcccaacttcagctgttgggagatggtgatattttcaaccctacttcctaaacatctgtctggggttcctttagtcttgaatgtcttatgctcaattatttggtgttgagcctctcttccacaagagctcctccatgtttggatagcagttgaagaggtgtgtgggtgggctgttgggagtgaggatggagtgttcagtgcccatttctcattttacattttaaagtcgttcctccaacatagtgtgtattggtctgaagggggtggtgggatctcagctcacaatcactagtgaattcgc

SEQ ID NO: 85349 - DNA, 1278 bp, Homo sapiens
tgcgctctgcggctgacggcgcttttgtctccgggtccagaggcctttcagaaggagaaggcagctctgtttctctgcagaggagtagggtcctttcagccatgaagcatgtgttgaacctctacctgttaggtgtggtactgaccctactctccatcttcgttagagtgatggagtccctagagggcttactagagagcccatcgcctgggacctcctggaccaccagaagccaactagccaacacagagcccaccaagggccttccagaccatccatccagaagcatgtgataagacctccttccatactggccatattttggaacactgacctagacatgtccagatgggagtcccattcctagcagacaagctgagcaccgttgtaaccagagaactattactaggccttgaagaacctgtctaactggatgctcattgcctgggcaaggcctgtttaggccggttgcggtggctcatgcctgtaatcctagcactttgggaggctgaggtgggtggatcacctgaggtcaggagttcgagaccagcctcgccaacatggcgaaaccccatctctactaaaaatacaaaagttagctgggtgtggtggcagaggcctgtaatcccagctccttgggaggctgaggcgggagaattgcttgaacccggggacggaggttgcagtgagccgagatcgcactgctgtacccagcctgggccacagtgcaagactccatctcaaaaaaaaaagaaaagaaaaagcctgtttaatgcacaggtgtgagtggattgcttatggctatgagataggttgatctcgcccttaccccggggtctggtgtatgctgtgctttcctcagcagtatggctctgacatctcttagatgtcccaacttcagctgttgggagatggtgatattttcaaccctacttcctaaacatctgtctggggttcctttagtcttgaatgtcttatgctcaattatttggtgttgagcctctcttccacaagagctcctccatgtttggatagcagttgaagaggtgtgtgggtgggctgttgggagtgaggatggagtgttcagtgcccatttctcattttacattttaaagtcgttcctccaacatagtgtgtattggtctgaagggggtggtgggatgccaaagcctgctcaagttatggacattgtggccaccatgtggcttcccatcccttttgttcgtacctcaataaagtgagtaatataatatttggtaaagaaaagaacaaaaccaa

SEQ ID NO: 85350 - DNA, 1246 bp, Homo sapiens
tgcgctctgcggctgacggcgcttttgtctccgggtccagaggcctttcagaaggagaaggcagctctgtttctctgcagaggagtagggtcctttcagccatgaagcatgtgttgaacctctacctgttaggtgtggtactgaccctactctccatcttcgttagagtgatggagtccctagagggcttactagagagcccatcgcctgggacctcctggaccaccagaagccaactagccaacacagagcccaccaagggccttccagaccatccatccagaagcatgtgataagacctccttccatactggccatattttggaacactgacctagacatgtccagatgggagtcccattcctagcagacaagctgagcaccgttgtaaccagagaactattactaggccttgaagaacctgtctaactggatgctcattgcctgggcaaggcctgtttaggccggttgcggtggctcatgcctgtaatcctagcactttgggaggctgaggtgggtggatcacctgaggtcaggagttcgagaccagcctcgccaacatggcgaaaccccatctctactaaaaatacaaaagttagctgggtgtggtggcagaggcctgtaatcccagctccttgggaggctgaggcgggagaattgcttgaacccggggacggaggttgcagtgagccgagatcgcactgctgtacccagcctgggccacagtgcaagactccatctcaaaaaaaaaagaaaagaaaaagcctgtttaatgcacaggtgtgagtggattgcttatggctatgagataggttgatctcgcccttaccccggggtctggtgtatgctgtgctttcctcagcagtatggctctgacatctcttagatgtcccaacttcagctgttgggagatggtgatattttcaaccctacttcctaaacatctgtctggggttcctttagtcttgaatgtcttatgctcaattatttggtgttgagcctctcttccacaagagctcctccatgtttggatagcagttgaagaggtgtgtgggtgggctgttgggagtgaggatggagtgttcagtgcccatttctcattttacattttaaagtcgttcctccaacatagtgtgtctggtttcaagttaaagtaagtgagtgctcttgggcactgcgcggccgtttctgctgacttgcctggcttacaatcaatgcccaataaatataagaaggccaaaaaaaa

SEQ ID NO: 85351 - DNA, 604 bp, Homo sapiens
ttagaataacaatctgatatgaacggggtgcccagagcctttccttcccctcacatccactactagcacataatgtttccagaagccaatatgcagaacccagagaagaaagtaagtctcactgatctgccttatacaaattcttttaaatatacaatctgtatttactaggcaaatactgggtattacagaggtattacctcaaggttaaaaaaaaaaacggcgctgatgaattcccaagatcacactagctatgccacattcagaagaatgtctaaatataatcataaatccagctttgtatctactgatattcaaggacagtctccacattgtgagtaaggagaaaatcaggacatatactcaagaatataagtcttctcaatatattaatgagtagtgcaatgaacaaaaaaatagaactcaagagagtgtcttccttaggttgtacgaagggcaaagaagttgtgggattataaacagtgctgcatacatagcactactcctgactatgccagagccctcttcagaacagagataagcaacaggggaaaacatagtaagtaaccaattctgaatcaaaaacacacccaatatcaaatag

SEQ ID NO: 85352 - DNA, 298 bp, Homo sapiens
gatataaaaacatctacatcacccagaaagtttcttcatgttcctttgcattcaatcccctcccctacagaccctcggaaaacactgatgtactttacaccacaatagattagttttgtctgttgtagaatttgatataaattcaattacaaaatatgtactcttttgtgtctgacttctttcacacaacatcatgttttcagattgatttgtattgcctgtatcagtaggttacatttaggctgttcacaacttttggttattatgaataaagctactatgaacgtttatgtactgg

SEQ ID NO: 85353 - DNA, 229 bp, Homo sapiens
cttgcttgcaccctcatggaagagtcacatctctccacattatccttacactccctccttgcaggaaaagcttgatcaagactgctgggtctgtcttgatcacgtagacaggcagagcctgtgctgggtttggccctgcaggtgccttgctgtcatcactcctgcccactgttttgctgctaaaatgaacaggacttgtttacacacacacacacacacacacacacac

SEQ ID NO: 85354 - DNA, 407 bp, Homo sapiens
tatatgtaaatcttatgaattctacctcataactgtcttgaattctctcctctttatgccaccgtgaccacctttttcaggccctctcccaacatagaagtcggttgaagccagggaagtggttgtgcttccccaaggtgaacatatgaaaccatggcactaaaagggcatttgtgtgcacaatcctcatttgtggaacttttattagactacgtatgccagggctcaccattatgcattctaattctacatatctggaatgtattttgaaaaatctttccagctgattctgatgtatgtcccaggcaaaaaccactgacaatgcattattcaaacttgtggactatttgggatagcactaacccctctccatacctagcagtggaatggttgggttgtgtggtagc

SEQ ID NO: 85355 - DNA, 733 bp, Homo sapiens
tcacccacccttaaaatataaaatttaaagattaggcagtattactaatggccagtacttataaagtgacatgtaaataggacaagagtttaacaaatgtaaacatctcactaaattttagtacttcacttaccaacccttggatgtttagctaataattgctaattataactatgcatttgtttgcttatactactctggcaggaacaggcctctctcagcttactcagtaggccaagttagagattctgggttgggccctagtttttcagggatgtagtattggctcattggatttaaatcttagggaaaatctggtggagacactttgcctccacctgcagcctgctgtgctggatgtgtagtgagggaatgaagacaggataggcccgagagtaaagtggtctgtttgaatccccagttctgccactcattttttgtaaaatgggaataatgataatatctaagttctggggttattttgaggattaaatgaggtcgcatgtttaaagcatataggatgttgtccgagtgtcagcttttattgttaccattactattcttgaggaaacctagcaggtttacacttcaccaaggaagggcagctattggtttgcctataggagtatgctctctctgctctcagagggcctacaagaaaattttttttctatccaaatgtcacctttgcttttattttctttcctttccatacacggaagaaaaaatagga

SEQ ID NO: 85356 - DNA, 353 bp, Homo sapiens
ctgacatcctgcctctggtttttcctattctcctcataatcctactgtgaagtagacattggggcctttagcatcaccattttcaagttcactgctctgaactcccaggaatgccaccatttatagagaaactcaatgactagcacctacttcaactcagctgttgctgacgagctgactctgctcttctcagccctgctgtgtgagttcccagctgtgtctcacacactagtatcccaaacaccatcggggaagagagtgaagaagcagagtggcagagagaaggccaaagatgataaggaagattgtgaatggtgctttcatcagtatttcatagcagtttgattccaagc

SEQ ID NO: 85357 - DNA, 396 bp, Homo sapiens
gtgataacttgtgactgactccaggtttaggcattcaatttattcttatttagcaactttttatccagctgtcaaaggcattagatctaatcactgccattttctttagagaacagtaacctctgcaaggagatattttttcttcttttcagtgataggaaaagagccaattaagcttcgtcctgcagaggtacaatggcctaacaaacaaaacataaacctggcaactccattaaacttttgcattcgtatccctagaaaaacaaaatagggaaaaatgatgtcagccacttcaggtcccagaggttcactttctttttttaaatgaagagtatgtggggctccctttatttcttctcccttcctatagagctttatttctttagttattctccc

SEQ ID NO: 85358 - DNA, 1952 bp, Homo sapiens
ccccgcttctgcggagcggccctacaaatgtgccgagtgcggcaagtccttcaagggctcctccgggctgcgctaccacctgcgggaccacacgggcgagcggccctaccagtgtggcgagtgcggcaaggccttcaagcgctcctccctgctggccatccaccagcgggtgcacacgggcctgcgggccttcacctgtggccagtgcggcctcaccttcaagtggtcgtcccactaccagtaccacctgcggctgcactctggcgagcggccctacgcctgcggggagtgtggcaaggccttccgcaacacgtcgtgcctgcgtcgccaccgccacgtgcacactggcgagaggccccacgcctgcggtgtctgcggcaagagcttcgcgcagacctccaacctgcggcagcaccagcgcgtgcacacgggcgagcggcccttccgctgcccgctctgccccaagaccttcacccactcctccaacctgctgctgcaccagcgcacgcactcggcggagcgccccttcacctgccccatctgcggtcgcggcttcgttatggccgcctatctgcagcggcacctgaggacgcacgccccggccaacacgcctcccagcaccacagcccctgccgccggcccccagccccctgctccactggctgctgcgcgggccccgccagccacccaagatgtccacgtcctgccccacctccaggccacgctctccctcgaggtggcggggggcacggcccaggccccgagcttggggccagcagcgcccaactctcagacgttcctcctggtgcaaactgcccagggcctccagctgatccccagcagcgtgcagccccctacacctccgccccctcccgcacctcccaagctcatcctgctgccctcctccagtgctggggctgggggcggccgtgcaaggcagggcccgcgggcagtggggaaagcgggccagggggcgggagtggtctggctgccaggccctgggggtctaggggtgcagggagcggccagcgctggggccagcgggacagggcagagcctcatcgttctgcagaatgtggggggtggggaggcagggccacaggaaatgagtggggtgcagctccagcccctccgaccagccccagaagtaaccacggtccagctccagccagcgcaggaggtgaccacagtccagctccagccagcacaggaagtaaccacggtccagctccagccagcacaggaggtgaccacggtccagctccagcccgtggccggccagctctccaattccagtgggggagctgtggctactgaggcacccaacctgctggttgttcagagcggggcagctgaggagttgctcactggcccgggccccggggaggcgggggatggcgaggccagcactggtgtggtccaggatgtcctctttgagacactccagacggacgagggcttgcagagcgtgctggtgctgagcggggccgatggcgaacagactcgactctgcgtacaggaggtagaaacacttcctcctgggctgacggagccgcctgccaccggcccacccggacagaaactcctcatcatccgcagcgccccagccactgagctgctggacagcagcaacactggaggaggcaccgccacgctgcagctcctggccccaccgccgtcaggcccagcctcgggccccgcggggctccccggggctccagcctcccagatggtgcaagtggtccccgcaggagctgggcctggtgttatgacccctcagggcctgccctccatccagattgtccagactctacccgcagtccagctggtgcacacgttttgaggagaggcagtgattcccctcccgccccgcacagagaccccgactcactgccagccggggcggggcagggtgccgcaggctgggcttgctaataaagacccgagtctcc

SEQ ID NO: 85359 - DNA, 1780 bp, Homo sapiens
ccccgcttctgcggagcggccctacaaatgtgccgagtgcggcaagtccttcaagggctcctccgggctgcgctaccacctgcgggaccacacgggcgagcggccctaccagtgtggcgagtgcggcaaggccttcaagcgctcctccctgctggccatccaccagcgggtgcacacgggcctgcgggccttcacctgtggccagtgcggcctcaccttcaagtggtcgtcccactaccagtaccacctgcggctgcactctggcgagcggccctacgcctgcggggagtgtggcaaggccttccgcaacacgtcgtgcctgcgtcgccaccgccacgtgcacactggcgagaggccccacgcctgcggtgtctgcggcaagagcttcgcgcagacctccaacctgcggcagcaccagcgcgtgcacacgggcgagcggcccttccgctgcccgctctgccccaagaccttcacccactcctccaacctgctgctgcacgggccccgccagccacccaagatgtccacgtcctgccccacctccaggccacgctctccctcgaggtggcggggggcacggcccaggccccgagcttggggccagcagcgcccaactctcagacgttcctcctggtgcaaactgcccagggcctccagctgatccccagcagcgtgcagccccctacacctccgccccctcccgcacctcccaagctcatcctgctgccctcctccagtgctggggctgggggcggccgtgcaaggcagggcccgcgggcagtggggaaagcgggccagggggcgggagtggtctggctgccaggccctgggggtctaggggtgcagggagcggccagcgctggggccagcgggacagggcagagcctcatcgttctgcagaatgtggggggtggggaggcagggccacaggaaatgagtggggtgcagctccagcccctccgaccagccccagaagtaaccacggtccagctccagccagcgcaggaggtgaccacagtccagctccagccagcacaggaagtaaccacggtccagctccagccagcacaggaggtgaccacggtccagctccagcccgtggccggccagctctccaattccagtgggggagctgtggctactgaggcacccaacctgctggttgttcagagcggggcagctgaggagttgctcactggcccgggccccggggaggcgggggatggcgaggccagcactggtgtggtccaggatgtcctctttgagacactccagacggacgagggcttgcagagcgtgctggtgctgagcggggccgatggcgaacagactcgactctgcgtacaggaggtagaaacacttcctcctgggctgacggagccgcctgccaccggcccacccggacagaaactcctcatcatccgcagcgccccagccactgagctgctggacagcagcaacactggaggaggcaccgccacgctgcagctcctggccccaccgccgtcaggcccagcctcgggccccgcggggctccccggggctccagcctcccagatggtgcaagtggtccccgcaggagctgggcctggtgttatgacccctcagggcctgccctccatccagattgtccagactctacccgcagtccagctggtgcacacgttttgaggagaggcagtgattcccctcccgccccgcacagagaccccgactcactgccagccggggcggggcagggtgccgcaggctgggcttgctaataaagacccgagtctcc

SEQ ID NO: 85360 - DNA, 487 bp, Homo sapiens
aaaagttggtaatggctgtctccaaaacaaattagctaatcaaatatattcaaagaaatggaaaagtgatttgtgaaactgttttagtgatggttccttgatactataaaaccagttccttttaaaaaaaaaagaaaacttcaagaaagctgaaaacttggtgaacctgtgttttgtagctagaaatggcaattgtagtgataggagtatatcactcaggtggcatataatttgtctgaaaaccaaattagaatcgtgattttaatcacttgtgttttaagtttctgtctcacttactagaatggtcatttgagttactcacagggcatggcatagtaccagcatgaagcatggactgaaaaggaagggaactgataagtagtactaataagaaagagtaaataggaaacagatgattttaataaagtaaagcttttgtaataaattcattttcaaggacagtatgatactactcacaagagttagc

SEQ ID NO: 85361 - DNA, 429 bp, Homo sapiens
ggctcttcagcccatgcagccctcttatttgtgctactagtaaaataatgataatgctattgaatagctggattgttgaccctctggctaatatgatttgatggattttattatatggcattttaatcaaaggataagcttgtctcatttgaaatagatagaaaacctgaaaaagggacagtttaaaggtagcaatcaagtcaaaatagttttcttcttctggaatgtgataaatgtatttagtgagaggtatcttggagagcgtgattttaccacttactcatttgacaaattgctgagcttaggggccaagtcctgtaatatttccctgttgcttcaaggcaggtatactgaaaaaaatcagttattaaatatttgccatatttcctaaataacctattcattctttgcctgataacagcagttttt

SEQ ID NO: 85362 - DNA, 385 bp, Homo sapiens
ctcccttccaacttcttgggcatagactttgcttcagagtgatcccagaaggggttaatccccaattttgactttgagaattccaacaaggattaagcaaccctctactttcctgtggtttggggaaagcctgtaagtggggctttgatggaaataatacaatgaaaaattaataattcaggagataccttcactttgagtgtctcacatctgttttacaaaggaattctcagagtgaacctatagggaaaatccagaagataacaacaataacatatgatctcctaaaaatttctaaattaatcaaacaaatttaaaggcaacaggggaatttgctctctgaaagagcttagtagtgagcttttaaaagagaatctgtaatgaa

SEQ ID NO: 85363 - DNA, 681 bp, Homo sapiens
gatgtgctgcttaggtctccaaagatgcccacctgggtcaaattcagaataatgaactcaggtacatcacccagaggcatttagaatggactctctcttcacctggattatgtgctgagtgttaagtgatttttcaaatatctgggggaaggagtgggaagagatacactctggtcatcctttggtgtggtttgtgggggatacttggttgattcttgtagttaaagtgaagttgcttttctgaaaatgttccctgtcttcaggggacttacccatcccaggggacacatccatcccaggggacacagccagccctttccagggaaatacgatgtttctgagtgagaggtgatttcagtgcagataggaagagctggtgcacaccagcagggttgccttccatgccatcttccagctggtgtgggatagactaagggggcagatttttaagaaccccaccagagttgacatacacacgtgattctcgtgtctgtctctcaaagctctcaatgtctggggctgtgtttgccctcttttcattgatgctgccatgatgcaaaatgtttcttaaacattattcctggttcttagaatatgtgattactgagtattggatttctttcctgaataataactgctcattgtagaaaataagaaaaataaaatacaaaaaagactaca

SEQ ID NO: 85364 - DNA, 729 bp, Homo sapiens
  misc_feature (688)..(688): n is a, c, g, or t
  misc_feature (702)..(702): n is a, c, g, or t
  misc_feature (704)..(704): n is a, c, g, or t
gatgtgctgcttaggtctccaaagatgcccacctgggtcaaattcagaataatgaactcaggtacatcacccagaggcatttagaatggactctctcttcacctggattatgtgctgagtgttaagtgatttttcaaatatctgggggaaggagtgggaagagatacactctggtcatcctttggtgtggtttgtgggggatacttggttgattcttgtagttaaagtgaagttgcttttctgaaaatgttccctgtcttcaggggacttacccatcccaggggacacatccatcccaggggacacagccagccctttccagggaaatacgatgtttctgagtgagaggtgatttcagtgcagataggaagagctggtgcacaccagcagggttgccttccatgccatcttccagctggtgtgggatagactaagggggcagatttttaagaaccccaccagagttgacatacacacgtgattctcgtgtctgtctctcaaagctctcaatgtctggggctgtgtttgccctcttttcattgatgctgccatgatgcaaaatgtttcttaaacattattcctggttcttagaatatgtgattactgagtattggatttctttcctgaataataactgctcattgtagaaaataagaaaaataaaatacaaaaaagactacataaaatnttggggggggcccngncccttcgccctatagtgagtccgat

SEQ ID NO: 85365 - DNA, 1501 bp, Homo sapiens
gatgtgctgcttaggtctccaaagatgcccacctgggtcaaattcagaataatgaactcaggtacatcacccagaggcatttagaatggactctctcttcacctggattatgtgctgagtgttaagtgatttttcaaatatctgggggaaggagtgggaagagatacactctggtcatcctttggtgtggtttgtgggggatacttggttgattcttgtagttaaagtgaagttgcttttctgaaaatgttccctgtcttcaggggacttacccatcccaggggacacatccatcccaggggacacagccagccctttccagggaaatacgatgtttctgagtgagaggtgatttcagtgcagataggaagagctggtgcacaccagcagggttgccttccatgccatcttccagctggtgtgggatagactaagggggcagatttttaagaaccccaccagagttgacatacacacgtgattctcgtgtctgtctctcaaagctctcaatgtctggggctgtgtttgccctcttttcattgatgctgccatgatgcaaaatgtttcttaaacattattcctggttcttagaatatgtgattactgagtattggatttctttcctgaataataactgctcattgtagaaaataagaaaaataaaatacaaaaaagactacaagatttttcataatccagtcactctgaggcatctaccgcgggcccaatccaaatggtcatgacctcaaaacttccccaatgagtgcttgtctctgggttggcagctggggccatgtgagcagtgtacaccacagaaccgcactggtctgcgttgagttgaccctgtgttcctggcagcaagagtgcagggccctgagcccccagagatagcaaagaggcctaaaagtttaatgccagaccttaggggcaggatggagcagggctaaaagatgtctctttgggcctgtctgcctgctttccttccttccttttctttcctttttttttttggtcagttgccatctcaatctaatcatagatgtaagaatgcggaagccagagtaactcactcattaagctacacttgtgtaacagttactgtaaatttcactacagctctgcactgaaatgatttgtgactctgggcactgtgtcttctccatacttgaacttcctcatctacaaaatgaggataagtgataacaccttacctcatggtatattaagggtgacaaagaaattgcaaagtgatttgcaaacatgaagtgtcatatgagttatgtatgttctaattatccctcagaagaccccccgctggaatggaattctcacatcaagtgtctgtgcctcgctgctgaaggataacccagagtgcaaggtcatctttgttgctgaacagggctggacctgtcgcacttaagcacacttaaaggattctattcttcattcaggtcccccagagaaattggctccttatttttctttacctattcctagactt

SEQ ID NO: 85366 - DNA, 493 bp, Homo sapiens
ggcccgctctagaggatcctcacgttgacacttcagtcagcaaagtatggatttctcagtaacataaaaactgttaactctaagaaaaataacttctattggctgggcgcagtggctcacacctgtaatcccagcactttgggaggccgagggggcagatcacctgaggttgggagttcaagaccagcctgaccaacatggagaaacctcatctctattaaaaatacaaaattagccgggcgtggtggcacatgcctgtaaccccagctactcgggagctgaggcaggagaatctcttgaacccagaaggcagaggtgcggtgagccaagatggcgccactgcactccagcctgggcaacaagaacaaaactccgtcaaaaaaaagaaaaagaaaaagaataagaacttatatttctattataaattctaatttaaagaattaatccttatatttctggttttatctttccccatttcttattcaaaagcagg

SEQ ID NO: 85367 - DNA, 630 bp, Homo sapiens
aggaaaggataactttaatctgtttattggaaaaactaattactgtatgaacttcagactattttatattatgtgaaaggttaatttggtttgaaagcctatttttttggtacttctcggcttacttggagattacgtgtctccaaactactaaaaagaactttctacttcagtcagcaaagtatggatttctcagtaacataaaaactgttaactctaagaaaaataacttctattggctgggcgcagtggctcacacctgtaatcccagcactttgggaggccgagggggcagatcacctgaggttgggagttcaagaccagcctgaccaacatggagaaacctcatctctattaaaaatacaaaattagccgggcgtggtggcacatgcctgtaaccccagctactcgggagctgaggcaggagaatctcttgaacccagaaggcagaggtgcggtgagccaagatggcgccactgcactccagcctgggcaacaagaacaaaactccgtcaaaaaaaagaaaaagaaaaagaataagaacttatatttctattataaattctaatttaaagaattaatccttatatttctggttttatctttccccatttcttattcaaaagcagg

SEQ ID NO: 85368 - DNA, 372 bp, Homo sapiens
aacttcctcgcatttgagtttacatgtatgcaacattctttggatagaaagagaaagaatttttgtataagcacaaggtatttcagttctgtcccttaaagaacaaatatcccagaggaaaaagaaatggaattgtgaatctgctgttccctgaggttccctcaggtgtccttctctagctgtgagcacatggtggcactgggtggattctaggatttaaaaatatgtatttctcacctaatattgctctcattagtgaaatcttataatgtacaattcatagtcttttcaagggtactttaacataagcagttctcgtggatgcactggcttaagaacctcactcccacttaagttacagtttcacagtac

SEQ ID NO: 85369 - DNA, 106 bp, Homo sapiens
actttgcccacccatcctttgctgccagcctgaaaatgggtccccccaagagcaaggctgaaaaaatcaagagaagtcccatggacaaggtgctgaggtttgcaag

SEQ ID NO: 85370 - DNA, 705 bp, Homo sapiens
atcacggcacagcgttgggagggaagctttgcaggcaacttgtcctccccctgtggggaaaggctgtgaggtttggagttaatatccatgacatatcctcactattttaaatgtgagctccagaatatactctcctcctccgtaccctttctctatttgtatttgacttaatgatttatatttaacatattggaggtttgatgcttaattttaaaatcaaattaatgtattattaataaataatatgtactcaagatatattattcatatatttgataagtgttacttaaatgactaattgaatgcaatttagtaataagattcattaatattattaagaaataacatttgttaaaaagttatttaatagctggcattccatttctatgaatatggatttaaaatatagacactatttaattgtgaaacactatccatgttttctcacacaatacaatgattaagtattgcatataagcatgttcacatgtattgatcccatccttgtcaccgccagtgtccctggatctttctttactccccctctgcagggaagaagtgatgggtgggggcccaacaacagtccagggagcacaggtagtttctgctcctgactccttcccagttggggaggggagtttggggaaaatagaattatgtaaaattacacacagataccacgatatccatcactctggcctctcc

SEQ ID NO: 85371 - DNA, 1214 bp, Homo sapiens
atggagtctgatgctttgagacacagagccagctggccaggttatagggtgtaaaagtcaacacactgagttcagcatggtttcctgtgatgttctcaaaccatttttttttttttgagatagagttttgctcttcttgcccaggctggagtgaaatggcacggtctcggctcactgcaacctccgcctcccgagttgaagtgattctcctgcttcagcctcccgagtagctgggactacaggcgcccgccaccacgcctggctaatttttttgtatttttagtagagatggggtttcaccgtgttagccaggatggtctcgatctgctgacctcatgatccgcccgcctcttaagaggctagaatcctgtattttactgatcataaagtgttcagacgcccaagctttttcacaatagtcagtgacaaataccttgttcttacagccccagtagggtgcttacaacatgggatacaaacaggccaaatgtagttaaaaattgggcaattaatctcagttccttgttacttaataccaaggaaaggtatgcttgagtcataaatggagcccaaatattaaaacacaagacggaaactttctgaaggactgactcatagacctattaagagttttcccattggctgcccagttagcacctttggtaatggctctaggtgctccccggaaacagttaattaaatggaaatcaccatatatgtatcagagagagcttttggatccatgctttggccttctaaatgcctagttgaattttccataacctgtcctattggaaaagtctgatgttaacatctcagtggtagaaggcatttaatgtttttcaaaaagtatttgtgctatcccacttggttgttacaatcatttctgtgaggtaggtaagagtttgtattctaaatacagagaaactaaggaccacagagatcacagagaaagacatctgcagaaagggagcacagcttcacaccagcgttcatcacaccgccaccaccgactacagctctgggattctggagagcttgctttatttaaaacaagttgagagttttggctcatcataagccattttggaattgcactaactatcctgagagaaatgggtttgtctaatccagaagaatgactttgcaacagggtcctttgttgcagtggtgccaaggcctgggggctgaagttagggctcccgagagagagg

SEQ ID NO: 85372 - DNA, 782 bp, Homo sapiens
gatcttgtccgactccgcgggtgacacgagccggttctctctggactggtggcagcgcgcggccccgaaccgccgccaggccggcacgggggaaggagccggtgggggtagggggtgcggtggggggtggggaccctccggctcttgggggtcccagtccccgccggctgctgagcgggtggggtggtggaggagctgcagagatgtccggccagagcctgacggaccgaatcactgccgcccagcacagtgtcaccggctctgccgtatccaagacagtatgcaaggccacgacccacgagatcatggggcccaagaaaaagcacctggactacttaattcagtgcacaaatgagatgaatgtgaacatcccacagttggcagacagtttatttgaaagaactactaatagtagttgggtggtggtcttcaaatctctcattacaactcatcatttgatggtgtatggaaatgagcgttttattcagtatttggcttcaagaaacacgttgtttaacttaagcaattttttggataaaagtggattgcaaggatatgacatgtctacatttattaggcggtatagtagatatttaaatgagaaagcagtttcatacagacaagttgcatttgatttcacaaaagtgaagagaggggctgatggagttatgagaacaatgaacacagaaaaactcctaaaaactgtaccaattattcagaatcaaatggatgcacttcttgattttaatgtgagttatgcttttgtaatttaagattttaaa

SEQ ID NO: 85373 - DNA, 2077 bp, Homo sapiens
  misc_feature (1973)..(1973): n is a, c, g, or t
  misc_feature (2018)..(2018): n is a, c, g, or t
  misc_feature (2056)..(2056): n is a, c, g, or t
  misc_feature (2073)..(2073): n is a, c, g, or t
gatcttgtccgactccgcgggtgacacgagccggttctctctggactggtggcagcgcgcggccccgaaccgccgccaggccggcacgggggaaggagccggtgggggtagggggtgcggtggggggtggggaccctccggctcttgggggtcccagtccccgccggctgctgagcgggtggggtggtggaggagctgcagagatgtccggccagagcctgacggaccgaatcactgccgcccagcacagtgtcaccggctctgccgtatccaagacagtatgcaaggccacgacccacgagatcatggggcccaagaaaaagcacctggactggctgatggagttatgagaacaatgaacacagaaaaactcctaaaaactgtaccaattattcagaatcaaatggatgcacttcttgattttaatgttaatagcaatgaacttacaaatggggtaataaatgctgccttcatgctcctgttcaaagatgccattagactgtttgcagcatacaatgaaggaattattaatttgttggaaaaatattttgatatgaaaaagaaccaatgcaaagaaggtcttgacatctataagaagttcctaactaggatgacaagaatctcagagttcctcaaagttgcagagcaagttggaattgacagaggtgatataccagacctttcacaggcccctagcagtcttcttgatgctttggaacaacatttagcttccttggaaggaaagaaaatcaaagattctacagctgcaagcagggcaactacactttccaatgcagtgtcttccctggcaagcactggtctatctctgaccaaagtggatgaaagggaaaagcaggcagcattagaggaagaacaggcacgtttgaaagctttaaaggaacagcgcctaaaagaacttgcaaagaaacctcatacctctttaacaactgcagcctctcctgtatccacctcagcaggagggataatgactgcaccagccattgacatattttctacccctagttcttctaacagcacatcaaagctgcccaatgatctgcttgatttgcagcagccaacttttcacccatctgtacatcctatgtcaactgcttctcaggtagcaagtacatggggagatcctttctctgctactgtagatgctgttgatgatgccattccaagcttaaatcctttcctcacaaaaagtagtggtgatgttcacctttccatttcttcagatgtatctacttttactactaggacacctactcatgaaatgtttgttggattcactccttctccagttgcacagccacacccttcagctggccttaatgttgactttgaatctgtgtttggaaataaatctacaaatgttattgtagattctgggggctttgatgaactaggtggacttctcaaaccaacagtggcctctcagaaccagaaccttcctgttgccaaactcccacctagcaagttagtatctgatgacttggattcatctttagccaaccttgtgggcaatcttggcatcggaaatggaaccactaagaatgatgtaaattggagtcaaccaggtgaaaagaagttaactgggggatctaactgcgaaccaaaggttgcaccaacaaccgcttggaatgctgcaacaatggcaccccctgtaatggcctatcctgctactacaccaacaggcatgataggatatggaattcctccacaaatgggaagtgttcctgtaatgacgcaaccaaccttaatatacagccagcctgtcatgagacctccaaacccctttggccctgtatcaggagcacagatacagtttatgtaacttgatggaagaaaatggaattactccaaaaagacaagtgctcaagcagcaaaatccttacttccagcaaaatccaaactgctgtctcttaaatctcttaaactctcttcttccattaggatgctacaagtanctcagtgaaggcccatgaagggaattggggactagtttatagggngaacgtattcattacagtttataaaggccaggattggnttggattttaggattangttc

SEQ ID NO: 85374 - DNA, 2399 bp, Homo sapiens
  misc_feature (2295)..(2295): n is a, c, g, or t
  misc_feature (2340)..(2340): n is a, c, g, or t
  misc_feature (2378)..(2378): n is a, c, g, or t
  misc_feature (2395)..(2395): n is a, c, g, or t
gatcttgtccgactccgcgggtgacacgagccggttctctctggactggtggcagcgcgcggccccgaaccgccgccaggccggcacgggggaaggagccggtgggggtagggggtgcggtggggggtggggaccctccggctcttgggggtcccagtccccgccggctgctgagcgggtggggtggtggaggagctgcagagatgtccggccagagcctgacggaccgaatcactgccgcccagcacagtgtcaccggctctgccgtatccaagacagtatgcaaggccacgacccacgagatcatggggcccaagaaaaagcacctggactacttaattcagtgcacaaatgagatgaatgtgaacatcccacagttggcagacagtttatttgaaagaactactaatagtagttgggtggtggtcttcaaatctctcattacaactcatcatttgatggtgtatggaaatgagcgttttattcagtatttggcttcaagaaacacgttgtttaacttaagcaattttttggataaaagtggattgcaaggatatgacatgtctacatttattaggcggtatagtagatatttaaatgagaaagcagtttcatacagacaagttgcatttgatttcacaaaagtgaagagaggggctgatggagttatgagaacaatgaacacagaaaaactcctaaaaactgtaccaattattcagaatcaaatggatgcacttcttgattttaatgttaatagcaatgaacttacaaatggggtaataaatgctgccttcatgctcctgttcaaagatgccattagactgtttgcagcatacaatgaaggaattattaatttgttggaaaaatattttgatatgaaaaagaaccaatgcaaagaaggtcttgacatctataagaagttcctaactaggatgacaagaatctcagagttcctcaaagttgcagagcaagttggaattgacagaggtgatataccagacctttcacaggcccctagcagtcttcttgatgctttggaacaacatttagcttccttggaaggaaagaaaatcaaagattctacagctgcaagcagggcaactacactttccaatgcagtgtcttccctggcaagcactggtctatctctgaccaaagtggatgaaagggaaaagcaggcagcattagaggaagaacaggcacgtttgaaagctttaaaggaacagcgcctaaaagaacttgcaaagaaacctcatacctctttaacaactgcagcctctcctgtatccacctcagcaggagggataatgactgcaccagccattgacatattttctacccctagttcttctaacagcacatcaaagctgcccaatgatctgcttgatttgcagcagccaacttttcacccatctgtacatcctatgtcaactgcttctcaggtagcaagtacatggggagatcctttctctgctactgtagatgctgttgatgatgccattccaagcttaaatcctttcctcacaaaaagtagtggtgatgttcacctttccatttcttcagatgtatctacttttactactaggacacctactcatgaaatgtttgttggattcactccttctccagttgcacagccacacccttcagctggccttaatgttgactttgaatctgtgtttggaaataaatctacaaatgttattgtagattctgggggctttgatgaactaggtggacttctcaaaccaacagtggcctctcagaaccagaaccttcctgttgccaaactcccacctagcaagttagtatctgatgacttggattcatctttagccaaccttgtgggcaatcttggcatcggaaatggaaccactaagaatgatgtaaattggagtcaaccaggtgaaaagaagttaactgggggatctaactgcgaaccaaaggttgcaccaacaaccgcttggaatgctgcaacaatggcaccccctgtaatggcctatcctgctactacaccaacaggcatgataggatatggaattcctccacaaatgggaagtgttcctgtaatgacgcaaccaaccttaatatacagccagcctgtcatgagacctccaaacccctttggccctgtatcaggagcacagatacagtttatgtaacttgatggaagaaaatggaattactccaaaaagacaagtgctcaagcagcaaaatccttacttccagcaaaatccaaactgctgtctcttaaatctcttaaactctcttcttccattaggatgctacaagtanctcagtgaaggcccatgaagggaattggggactagtttatagggngaacgtattcattacagtttataaaggccaggattggnttggattttaggattangttc

SEQ ID NO: 85375 - DNA, 1183 bp, Homo sapiens
gatcttgtccgactccgcgggtgacacgagccggttctctctggactggtggcagcgcgcggccccgaaccgccgccaggccggcacgggggaaggagccggtgggggtagggggtgcggtggggggtggggaccctccggctcttgggggtcccagtccccgccggctgctgagcgggtggggtggtggaggagctgcagagatgtccggccagagcctgacggaccgaatcactgccgcccagcacagtgtcaccggctctgccgtatccaagacagtatgcaaggccacgacccacgagatcatggggcccaagaaaaagcacctggactacttaattcagtgcacaaatgagatgaatgtgaacatcccacagttggcagacagtttatttgaaagaactactaatagtagttgggtggtggtcttcaaatctctcattacaactcatcatttgatggtgtatggaaatgagcgttttattcagtatttggcttcaagaaacacgttgtttaacttaagcaattttttggataaaagtggattgcaaggatatgacatgtctacatttattaggcggtatagtagatatttaaatgagaaagcagtttcatacagacaagttgcatttgatttcacaaaagtgaagagaggggctgatggagttatgagaacaatgaacacagaaaaactcctaaaaactgtaccaattattcagaatcaaatggatgcacttcttgattttaatgttaatagcaatgaacttacaaatggggtaataaatgctgccttcatgctcctgttcaaagatgccattagactgtttgcagcatacaatgaaggaattattaatttgttggaaaaatattttgatatgaaaaagaaccaatgcaaagaaggtcttgacatctataagaagttcctaactaggatgacaagaatctcagagttcctcaaagttgcagagcaagttggaattgacagaggtgatataccagacctttcacaggtaagtttatcgttaaaataccaatccactatctgttgtgtacaagttgtgaagagtattaagataagtaacatatagcccccattgtcaaagggatcaatgcagttttggaccagttttaacattttgatgtattcctgaagattgttctaacactatgaccaggtaaaatg

SEQ ID NO: 85376 - DNA, 681 bp, Homo sapiens
gcacacatggacataaacatggggacaacagacactgtaaactactagacggagggggaagtgggcgcgggttgaaaaactacctattgggtactgtgcacactgcctaggtgcaacatacacatggaacaaacctgcgcatgtaccccctgtatctgaaataaaagttgaaaattttttttaaaaagcttaaaataatatgttctcagttatattttaccaatttaaacatggctaatgggaaaagtacattgccaactcagacatttagttggtgatattaatcgaaagcatttagttgatgatattaataaaaattatcagaatgagctggatcattctgttggggttttttggtgccttgcgggtaatttttccatgtattgctctttatctcattattgccactcccaaaccaccccccaacccccaccaactgctaaagctgaacaatggacaaagaaagccttcaagtaatccagacagaggagactctacattttaggaggcatggtctctgttgattgaagacagtacaaaatatgtcctcagcctctgctttaattaaaaggtacttactatcaatcacttgaacctaggaggcggaggtggcagtgagccaagattgtgccattgcactccagcctgggcaacaagagcaaaactccatctcaaaaaaaa

SEQ ID NO: 85377 - DNA, 267 bp, Homo sapiens
ataggtagggaggcatttgtgaacttttattcctgatatcttgccaattctgtttgaggaagaccacaaattaggacagtactcttggaacacaaaactagacagtttgttattctttttggttataggtagaataattactattcagtttctttatacaattatagtttgctatgcaagccaatatgaatattaatcaacttacattcattaggaaaataagaaacaatatgttgtgaccagtaaaaacgggcccagagcaaagat

SEQ ID NO: 85378 - DNA, 277 bp, Homo sapiens
catgttggtcaggctggtcttgaactctcgacctcaggctatctgcctgcctcggccccccaaagtgctgggattacaggcatgagccaccgtgcccagttgatgtccactctttaaatccaaaggatgtttgcttgactctcagctgcatttggcctgtgacatcccctgatccactgtcagccgctttcttgatgtctgtgatgaccattctgtttgtttgtttgtggcagagtttcgctctgttgcccaggctggagtgcggtggtgcgatctt

SEQ ID NO: 85379 - DNA, 532 bp, Homo sapiens
ccaagggcagataaggctccgctgtgccggaagagtgggtgtgagccctcagagagggctgacccaattagatggcaaagtgaagacagacaaagagctccaaaactctccagagatttcaagtgaagacagagaaagagctccaaaactctccagagatttctagctttaacaaatgagtagatgagacgtgttgaccataataggtaggagacacagcttcagtgagggagatgtgtcctcggctctgttttgatgtggaacagctcggagcccacacctagtgttaggtctgcagctcagggggacagctcaggtgtatatctatatcacctgccaatgcacagatgtgggcataggtgagttcagccagtgcacctgggcaggtagaaggaactgtcctctagacatgcacttaatatcatgcctacctgagaggagacctcacttgcctaaggggacacagagcaaggaaagatttaagctagggcaagagagtactgaggcgaaatctgggaagacttccaagagg

SEQ ID NO: 85380 - DNA, 209 bp, Homo sapiens
tgattcttaacattgaaacaaacgttaagtatttctaatgatccatttatatttctaatttaattgtgatcttttaataaccctatttatgatctgttgttgtctgtctgctgcttttattgtttatttaaaatcaaatatgttttacaaatgttttttcagacaagattctgtaacatcatgtaaagcttttttgtacattcttggtg

SEQ ID NO: 85381 - DNA, 431 bp, Homo sapiens
actggacacagcagtagggtggacgagtcaggttataaatgaccctgtctcctttgttctatatactcatggggcacaactactggcgagtgtaccctttctgcagaaagtgtaaaaatggccttgctgaggaaattaaatttatgttcaagtactatttctttacggcaccggggaacaagcatttcaaacacgtacttgctgcagactctgccctctggaatggctgcgatcctgtctcaaatggatttgagcagaaaaggggaagtgactggcagaaaagcccagagatagatctgtgtttaggtaaggttgtttgtccagagatagaactgtgtttagatagggttgcttgtagggccagggatgacagcgtcaagccctgcctctttttactcttggctctctgctttcttctctgttggcttcct

SEQ ID NO: 85382 - DNA, 870 bp, Homo sapiens
tggtcttgagctcgtgacatcgtgatctgcctgcctcagccacctcggcctcccaaagtgctcggattacaggcgtgagccaccgtgcccggcctctagtgcctgttattgcatgatacttactcttttcctgactgtgtgaaagagtaatgataatgcttcaattatcattatctttttgtaaattgaattaattgtcttttaaggatgttgtaatattaactagtatatccccaaattaacagactgtccaggaacagtaaacatgccagaaagtttttgttgattaaattaacatagtagcctagaaaaacaatgattcttagctttaccttggagaggtgccttaccttgatttgactgtttttccttggagagtaaaggctagctttttctgatttgggtcaaagtatgagttctgctctaacattttcaagcaatgtccttctggaaaagtcattatggatggttgttatagttaaataaaataatgagagtagaagagcttagttagctttccttctttaaaccaatcactggcaattaagagtgttactgattttcagaccattcaagactcaaaccttgagtttacaggttgatgaaacccttgaagcccaagcaatttggtggatactaacacctcaaaaaatccgacattcttccatgcaagaaagtagagtttggaaagctggtcatgtgttgattggagaacagtcactttttatagaggttgatgtctctttgtgccttagttttctgtttttcctatttctgtcattgcagattaaagcctatacttctttagaaagaaaggatattattcgatcacgatctgattcaaactttgcttggatctttgtctctcca

SEQ ID NO: 85383 - DNA, 798 bp, Homo sapiens
ttgacttttaccactaacttccactccattgccttgcctgtctttggagcaaaatgccttaaaataatcgcttatcttttgctgtctacaatctacctcttcccactctctcctaaccccattccagggaggccgctggctctccaccttcatccgagttgcctgagttgccctcggcagggtcacctgacctctcagttgttatatctgctggttatgtctgtgtcctgcgacagcgttttgatgctgttggccactctctccgtccttggcatggcctccagcacagcactctcctctggcgcccctcctgccgggccagtcccccttctctctgtcctttgctagttccttctcttttcattcttttcttagtatcaccatcttaatgttattagctgtcctttcaaactaattttttttttttactaagtcagcttccttagtggttatattccatttttctgttttttctttcttattttggtaattaatgtttgaatctgttaggtttagatttacctgcaagcaaaagaaagctaaaacattagtggcgtaaatgaagtataaagtgttttatctcatgggtcagtctagaggtagccatccaggtggcagtgaccctgacgccttctgcctcattcctccacagcatgatgtgacctcccttcctcagggtgcctcacaggccagcatagcttcagcttccagccagcaagagggagaaaagggaggaaggagaaggcctgcccttctccttcaggatatttactggaagttggacagcacttccactta

SEQ ID NO: 85384 - DNA, 885 bp, Homo sapiens
cgccctctgtgacttcaggggcttggggccgacaccccgcgggcctcggtgccagcctcccgcttacccggtcagcccctgggccgagtacccctgggagagaaagcgctaaattcccccaacactcccgtgatgggggcacagggagcgccgtgggacacctgaggaaactgaggcccaagtgttaattaacttgccctgatcacctagcacgtggagccacgacttgctcaagccctgcctgattccagccccggcctttgttcattcagtaaatgtggaaggcgcaagggtaactcgaggcctgcggagggaacgagatgagggaggccgcaagagtcaccgcagagaagagggattggctgtcttggaccctccgagggcctcggggaaggactgcaggagagcggattcttgatggggcttcacaggatgcgcaggagctctccaggctacagagcgcatttcaggaactggactgggatgtacagaggcaccatggtgggaaacagctgggccttcctgcaaagaggggagaggctcttggaggtgcagggcttgcgttttctcaacccagactgcctctgagaacagggcagggggtgtgaagagctgatgccctggccctccccactggctagctttccggggactaaggactaaggctgggccaggattctggggttctaggggctctgcctccacacgccagtgcctgtctgttgagttcacttctctctaaaatctcattttacaccacgacccagtacaaaccactcagaaaaatgtttcattaaaagttcggcatactacatgcatgcactctaatattttcatgtagtctattatttctctaaaaactaaaatgctgatcatgacccacag

SEQ ID NO: 85385 - DNA, 1228 bp, Homo sapiens
ggcctccctaagtgctaggattacaggtgtgagccactgcgcctggccatgttatatactctttgtgactttttaatattctctagctcttttttagacacttgcggcttaccactttgtatatgatgagatactttgaaattataatttgagcttaagtgtcttgtctgtcataagaaggttgtactaccatttatatggatttggttggttttaatcttactgtacatgaaaatgtgtttacctttagtgactgagctttttaaaggttggcagttttgaatgtagctggacaaaaatcctagaacacatcaatatcatttcgcatgacaatgttctggacctctggcacctttgaaaatactaacttaccatatagtctcttttcatgtgctgaatttacaaaatttgtctgaagaggatagcagaatgtacattgcatattttcctgaggttggcacattagacttgatggctttgtgtgtctgtctttaggaatgcatttgcatgtcttgagtgtctggaaaagataaaaactctgccatcgtatgtttaaatttgctgtttagaaagtgtttatccattgccttaatgttaaacaagttatacagtctttcagctttgaaatcatatgttacataatactttgtcagttgatcataatcataaataattatgtttcatgtcaaaaagatcttaaaaatcccagccatctaaatatgtttcccaactccattaagtaaggtaaaataatatttgtatttatgttcagatgttgaagctgtcattctcgaataaaactacactttagaaatggcttcttagttataagtagtttggcctattgttacagtttgaatatactttgattctatttatgtgtcataagtgttcttggaaaagtcctcagaataggtaattgtatatattaagttaggtttttcatattgatttaaaatgcactcccttcaaattttagatagtaattgggaaccttcaaagaagcattgtatctttttttttaatgtggtctatccatagttaaatctcccatactgccctcagaacttagagaagtagtaacatgcaatctttttgaagtgcaagtaaagtcaaattatataatttgttcccatttcattagaaattttcattgcccttaagactttcaactagcttattgtaggagtgttaattttttcttctattgaagaacaatcctgccaaa

SEQ ID NO: 85386 - DNA, 2754 bp, Homo sapiens
cacacacacacatacacagaatcctcagataacaggaggcaataaatccaacagcacatccacgttcagagaacagtgtccctgctgtcttgctaacagctgccaatacctcactgagtgcctcacaccaacatgggctccaagtgagtttccttcgtctgggcagactccctcccctcttccataaaggctgcaggagacctgtagctgtcacaggaccttccctaagagcccgcaggggaagactgccccagtccggccatcaccatgctccggaccattctggatgctccccagcggttgctgaaggaggggagagcgtcccggcagctggtgctggtggtggtattcgtcgctttgctcctggacaacatgctgtttactgtggtggtgccaattgtgcccaccttcctatatgacatggagttcaaagaagtcaactcttctctgcacctcggccatgccggaagttccccacatgccctcgcctctcctgccttttccaccatcttctccttcttcaacaacaacaccgtggctgttgaagaaagcgtacctagtggaatagcatggatgaatgacactgccagcaccatcccacctccagccactgaagccatctcagctcataaaaacaactgcttgcaaggcacaggtttcttggaggaagagattacccgggtcggggttctgtttgcttcaaaggctgtgatgcaacttctggtcaacccattcgtgggccctctcaccaacaggattggatatcatatccccatgtttgctggctttgttatcatgtttctctccacagttatgtttgctttttctgggacctatactctactctttgtggcccgaacccttcaaggcattggatcttcattttcatctgttgcaggtcttggaatgctggccagtgtctacactgatgaccatgagagaggacgagccatgggaactgctctggggggcctggccttggggttgctggtgggagctccctttggaagtgtaatgtacgagtttgttgggaagtctgcacccttcctcatcctggccttcctggcactactggatggagcactccagctttgcatcctacagccttccaaagtctctcctgagagtgccaaggggactcccctctttatgcttctcaaagacccttacatcctggtggctgcagggtccatctgctttgccaacatgggggtggccatcctggagcccacactgcccatctggatgatgcagaccatgtgctcccccaagtggcagctgggtctagctttcttgcctgccagtgtgtcctacctcattggcaccaacctctttggtgtgttggccaacaagatgggtcggtggctgtgttccctaatcgggatgctggtagtaggtaccagcttgctctgtgttcctctggctcacaatatttttggtctcattggccccaatgcagggcttggccttgccataggcatggtggattcttctatgatgcccatcatggggcacctggtggatctacgccacacctcggtgtatgggagtgtctacgccatcgctgatgtggctttttgcatgggctttgctataggtccatccaccggtggtgccattgtaaaggccatcggttttccctggctcatggtcatcactggggtcatcaacatcgtctatgctccactctgctactacctgcggagccccccggcaaaggaagagaagcttgctattctgagtcaggactgccccatggagacccggatgtatgcaacccagaagcccacgaaggaatttcctctgggggaggacagtgatgaggagcctgaccatgaggagtagcagcagaaggtgctccttgaattcatgatgcctcagtgaccacctctttccctgggaccagatcaccatggctgagcccacggctcagtgggcttcacatacctctgcctgggaatcttctttcctcccctcccatggacactgtccctgatactcttctcacctgtgtaacttgtagctcttcctctatgccttggtgccgcagtggcccatcttttatgggaagacagagtgatgcaccttcccgctgctgtgaggttgattaaacttgagctgtgacgggttctgcaaggggtgactcattgcatagaggtggtagtgagtaatgtgcccctgaaaccagtggggtgactgacaagcctctttaatctgttgcctgattttctctggcatagtcccaacagatcggaagagtgttaccctcttttcctcaacgtgttctttcccgggttttcccagccgagttgagaaaatgttctcagcattgtcttgctgccaaatgccagcttgaagagttttgttttgttttttttccatttattttttttttttaataaagtgagtgatttttctgtggctaaatctagagctgctaaaagggctttaccctcagtgaaaagtgtcttctattttcattatctttcagaaacaggagcccatttctcttctgctggagttattgacattctcctgacctcccctgtgtgttcctaccttttctgaacctcttagactcttagaaataaaagtagaagaaagacagaaaaaataactgattagacccaagatttcatgggaagaagttaaaagaaactgccttgaaatccctcctgattgtagatttcctaataggaggggtgtaatgtgacattgttcatacttgctaataaatacattattgcctaattc

SEQ ID NO: 85387 - DNA, 2862 bp, Homo sapiens
cacacacacacatacacagaatcctcagataacaggaggcaataaatccaacagcacatccacgttcagagaacagtgtccctgctgtcttgctaacagctgccaatacctcactgagtgcctcacaccaacatgggctccaagatgaaggcatctttctgatcaggggtttgtagctcaaacaaaagaatgagcgtgcttctagaaccacagagcaagggaacatggtagaggataagctggcaagttgaaaagcgtgggatttcatccaagtttgacactaactgtgcaaccccaaacaaatctcctaaccttcagaggctcggatttcttgtctatgagatgaagtgagtttccttcgtctgggcagactccctcccctcttccataaaggctgcaggagacctgtagctgtcacaggaccttccctaagagcccgcaggggaagactgccccagtccggccatcaccatgctccggaccattctggatgctccccagcggttgctgaaggaggggagagcgtcccggcagctggtgctggtggtggtattcgtcgctttgctcctggacaacatgctgtttactgtggtggtgccaattgtgcccaccttcctatatgacatggagttcaaagaagtcaactcttctctgcacctcggccatgccggaagttccccacatgccctcgcctctcctgccttttccaccatcttctccttcttcaacaacaacaccgtggctgttgaagaaagcgtacctagtggaatagcatggatgaatgacactgccagcaccatcccacctccagccactgaagccatctcagctcataaaaacaactgcttgcaaggcacaggtttcttggaggaagagattacccgggtcggggttctgtttgcttcaaaggctgtgatgcaacttctggtcaacccattcgtgggccctctcaccaacaggattggatatcatatccccatgtttgctggctttgttatcatgtttctctccacagttatgtttgctttttctgggacctatactctactctttgtggcccgaacccttcaaggcattggatcttcattttcatctgttgcaggtcttggaatgctggccagtgtctacactgatgaccatgagagaggacgagccatgggaactgctctggggggcctggccttggggttgctggtgggagctccctttggaagtgtaatgtacgagtttgttgggaagtctgcacccttcctcatcctggccttcctggcactactggatggagcactccagctttgcatcctacagccttccaaagtctctcctgagagtgccaaggggactcccctctttatgcttctcaaagacccttacatcctggtggctgcaggtctagctttcttgcctgccagtgtgtcctacctcattggcaccaacctctttggtgtgttggccaacaagatgggtcggtggctgtgttccctaatcgggatgctggtagtaggtaccagcttgctctgtgttcctctggctcacaatatttttggtctcattggccccaatgcagggcttggccttgccataggcatggtggattcttctatgatgcccatcatggggcacctggtggatctacgccacacctcggtgtatgggagtgtctacgccatcgctgatgtggctttttgcatgggctttgctataggtccatccaccggtggtgccattgtaaaggccatcggttttccctggctcatggtcatcactggggtcatcaacatcgtctatgctccactctgctactacctgcggagccccccggcaaaggaagagaagcttgctattctgagtcaggactgccccatggagacccggatgtatgcaacccagaagcccacgaaggaatttcctctgggggaggacagtgatgaggagcctgaccatgaggagtagcagcagaaggtgctccttgaattcatgatgcctcagtgaccacctctttccctgggaccagatcaccatggctgagcccacggctcagtgggcttcacatacctctgcctgggaatcttctttcctcccctcccatggacactgtccctgatactcttctcacctgtgtaacttgtagctcttcctctatgccttggtgccgcagtggcccatcttttatgggaagacagagtgatgcaccttcccgctgctgtgaggttgattaaacttgagctgtgacgggttctgcaaggggtgactcattgcatagaggtggtagtgagtaatgtgcccctgaaaccagtggggtgactgacaagcctctttaatctgttgcctgattttctctggcatagtcccaacagatcggaagagtgttaccctcttttcctcaacgtgttctttcccgggttttcccagccgagttgagaaaatgttctcagcattgtcttgctgccaaatgccagcttgaagagttttgttttgttttttttccatttattttttttttttaataaagtgagtgatttttctgtggctaaatctagagctgctaaaagggctttaccctcagtgaaaagtgtcttctattttcattatctttcagaaacaggagcccatttctcttctgctggagttattgacattctcctgacctcccctgtgtgttcctaccttttctgaacctcttagactcttagaaataaaagtagaagaaagacagaaaaaataactgattagacccaagatttcatgggaagaagttaaaagaaactgccttgaaatccctcctgattgtagatttcctaataggaggggtgtaatgtgacattgttcatacttgctaataaatacattattgcctaattc

SEQ ID NO: 85388 - DNA, 2856 bp, Homo sapiens
cacacacacacatacacagaatcctcagataacaggaggcaataaatccaacagcacatccacgttcagagaacagtgtccctgctgtcttgctaacagctgccaatacctcactgagtgcctcacaccaacatgggctccaagtgagtttccttcgtctgggcagactccctcccctcttccataaaggctgcaggagacctgtagctgtcacaggaccttccctaagagcccgcaggggaagactgccccagtccggccatcaccatgctccggaccattctggatgctccccagcggttgctgaaggaggggagagcgtcccggcagctggtgctggtggtggtattcgtcgctttgctcctggacaacatgctgtttactgtggtggtgccaattgtgcccaccttcctatatgacatggagttcaaagaagtcaactcttctctgcacctcggccatgccggaagttccccacatgccctcgcctctcctgccttttccaccatcttctccttcttcaacaacaacaccgtggctgttgaagaaagcgtacctagtggaatagcatggatgaatgacactgccagcaccatcccacctccagccactgaagccatctcagctcataaaaacaactgcttgcaaggcacaggtttcttggaggaagagattacccgggtcggggttctgtttgcttcaaaggctgtgatgcaacttctggtcaacccattcgtgggccctctcaccaacaggattggatatcatatccccatgtttgctggctttgttatcatgtttctctccacagttatgtttgctttttctgggacctatactctactctttgtggcccgaacccttcaaggcattggatcttcattttcatctgttgcaggtcttggaatgctggccagtgtctacactgatgaccatgagagaggacgagccatgggaactgctctggggggcctggccttggggttgctggtgggagctccctttggaagtgtaatgtacgagtttgttgggaagtctgcacccttcctcatcctggccttcctggcactactggatggagcactccagctttgcatcctacagccttccaaagtctctcctgagagtgccaaggggactcccctctttatgcttctcaaagacccttacatcctggtggctgcagggtccatctgctttgccaacatgggggtggccatcctggagcccacactgcccatctggatgatgcagaccatgtgctcccccaagtggcagctgggtctagctttcttgcctgccagtgtgtcctacctcattggcaccaacctctttggtgtgttggccaacaagatgggtcggtggctgtgttccctaatcgggatgctggtagtaggtaccagcttgctctgtctaccaagttagaagtctaaatgaaacctttcagtgatgtccataatggaaaacagaggcaactttattccatgaagaatgagaccaggagtgtatgtttaggttcctctggctcacaatatttttggtctcattggccccaatgcagggcttggccttgccataggcatggtggattcttctatgatgcccatcatggggcacctggtggatctacgccacacctcggtgtatgggagtgtctacgccatcgctgatgtggctttttgcatgggctttgctataggtccatccaccggtggtgccattgtaaaggccatcggttttccctggctcatggtcatcactggggtcatcaacatcgtctatgctccactctgctactacctgcggagccccccggcaaaggaagagaagcttgctattctgagtcaggactgccccatggagacccggatgtatgcaacccagaagcccacgaaggaatttcctctgggggaggacagtgatgaggagcctgaccatgaggagtagcagcagaaggtgctccttgaattcatgatgcctcagtgaccacctctttccctgggaccagatcaccatggctgagcccacggctcagtgggcttcacatacctctgcctgggaatcttctttcctcccctcccatggacactgtccctgatactcttctcacctgtgtaacttgtagctcttcctctatgccttggtgccgcagtggcccatcttttatgggaagacagagtgatgcaccttcccgctgctgtgaggttgattaaacttgagctgtgacgggttctgcaaggggtgactcattgcatagaggtggtagtgagtaatgtgcccctgaaaccagtggggtgactgacaagcctctttaatctgttgcctgattttctctggcatagtcccaacagatcggaagagtgttaccctcttttcctcaacgtgttctttcccgggttttcccagccgagttgagaaaatgttctcagcattgtcttgctgccaaatgccagcttgaagagttttgttttgttttttttccatttattttttttttttaataaagtgagtgatttttctgtggctaaatctagagctgctaaaagggctttaccctcagtgaaaagtgtcttctattttcattatctttcagaaacaggagcccatttctcttctgctggagttattgacattctcctgacctcccctgtgtgttcctaccttttctgaacctcttagactcttagaaataaaagtagaagaaagacagaaaaaataactgattagacccaagatttcatgggaagaagttaaaagaaactgccttgaaatccctcctgattgtagatttcctaataggaggggtgtaatgtgacattgttcatacttgctaataaatacattattgcctaattc

SEQ ID NO: 85389 - DNA, 5639 bp, Homo sapiens
caacaggcacctggctgcagccaggaaggaccgcacgccctttcgcgcaggagagtggaaggagggagctgtttgccagcaccgaggtcttgcggcacaggcaacgcttgacctgagtcttgcagaatgagtaagagtttgggcacgcgatttgtatttattttactgtgaatctctggccttatatcagaaaaaaaaaaattgtgccaccctcggcacagagaacgttggtggcgtcgtaagcgcccttaagcttctttccatcgccaaggagtaggggtcagggaagaggacagcgggaacaggatttgagagccgggaacccctggctcggcacgggagagggcaggagaggacctaagcgcggggctcgccgtctgctggggacccgagcccgcctgtggccctcggggaacagaagacgcgccctcagcgaccctgaagagtcagctaagctctctgcgggctaaggagacggtgaaggaaccgggactaactggggtaggggttagaaggcagcccgcgagtgggctacgaggggagctgggctcggcagttggggaacccgagggggcaagcgggcggggagcaggagaggggcggagctccggggccggggccggggccgcagcggccgcccagagggtctgcgggggctgctgtggccggacccgaaggcgggcgccgggagcgcagcgagccagacgcgcctctccaagaccgtgaccttggcatagggagcggggctgcgcgcagtcctgagatcagaccagagctcatcctcgtggagacccacggccgaggggcggagctgcctctgtgcgagggagccctggccgcggcgcagaaggcatcacaggaggcctctgcatgatgtggcttccaaagactcaaggaccacccacattacaagtctggattgaggaaggcagaaatggagattcaaacaccacgtcttctattattttattaatcaatctgtagacatgtgtccccactgcagggagtgaactgctccaagggagaaacttctgggagcctccaaactcctagctgtctcatcccttgccctggagagacggcagaaccatggcattttatagctgctgctgggtcctcttggcactcacctggcacacctctgcctacgggccagaccagcgagcccaaaagaagggggacattatccttggggggctctttcctattcattttggagtagcagctaaagatcaagatctcaaatcaaggccggagtctgtggaatgtatcaggtataatttccgtgggtttcgctggttacaggctatgatatttgccatagaggagataaacagcagcccagcccttcttcccaacttgacgctgggatacaggatatttgacacttgcaacaccgtttctaaggccttggaagccaccctgagttttgttgctcaaaacaaaattgattctttgaaccttgatgagttctgcaactgctcagagcacattccctctacgattgctgtggtgggagcaactggctcaggcgtctccacggcagtggcaaatctgctggggctcttctacattccccaggtcagttatgcctcctccagcagactcctcagcaacaagaatcaattcaagtctttcctccgaaccatccccaatgatgagcaccaggccactgccatggcagacatcatcgagtatttccgctggaactgggtgggcacaattgcagctgatgacgactatgggcggccggggattgagaaattccgagaggaagctgaggaaagggatatctgcatcgacttcagtgaactcatctcccagtactctgatgaggaagagatccagcatgtggtagaggtgattcaaaattccacggccaaagtcatcgtggttttctccagtggcccagatcttgagcccctcatcaaggagattgtccggcgcaatatcacgggcaagatctggctggccagcgaggcctgggccagctcctccctgatcgccatgcctcagtacttccacgtggttggcggcaccattggattcgctctgaaggctgggcagatcccaggcttccgggaattcctgaagaaggtccatcccaggaagtctgtccacaatggttttgccaaggagttttgggaagaaacatttaactgccacctccaagaaggtgcaaaaggacctttacctgtggacacctttctgagaggtcacgaagaaagtggcgacaggtttagcaacagctcgacagccttccgacccctctgtacaggggatgagaacatcagcagtgtcgagaccccttacatagattacacgcatttacggatatcctacaatgtgtacttagcagtctactccattgcccacgccttgcaagatatatatacctgcttacctgggagagggctcttcaccaatggctcctgtgcagacatcaagaaagttgaggcgtggcaggtcctgaagcacctacggcatctaaactttacaaacaatatgggggagcaggtgacctttgatgagtgtggtgacctggtggggaactattccatcatcaactggcacctctccccagaggatggctccatcgtgtttaaggaagtcgggtattacaacgtctatgccaagaagggagaaagactcttcatcaacgaggagaaaatcctgtggagtgggttctccagggaggtgcccttctccaactgcagccgagactgcctggcagggaccaggaaagggatcattgagggggagcccacctgctgctttgagtgtgtggagtgtcctgatggggagtatagtgatgagacagatgccagtgcctgtaacaagtgcccagatgacttctggtccaatgagaaccacacctcctgcattgccaaggagatcgagtttctgtcgtggacggagccctttgggatcgcactcaccctctttgccgtgctgggcattttcctgacagcctttgtgctgggtgtgtttatcaagttccgcaacacacccattgtcaaggccaccaaccgagagctctcctacctcctcctcttctccctgctctgctgcttctccagctccctgttcttcatcggggagccccaggactggacgtgccgcctgcgccagccggcctttggcatcagcttcgtgctctgcatctcatgcatcctggtgaaaaccaaccgtgtcctcctggtgtttgaggccaagatccccaccagcttccaccgcaagtggtgggggctcaacctgcagttcctgctggttttcctctgcaccttcatgcagattgtcatctgtgtgatctggctctacaccgcgcccccctcaagctaccgcaaccaggagctggaggatgagatcatcttcatcacgtgccacgagggctccctcatggccctgggcttcctgatcggctacacctgcctgctggctgccatctgcttcttctttgccttcaagtcccggaagctgccggagaacttcaatgaagccaagttcatcaccttcagcatgctcatcttcttcatcgtctggatctccttcattccagcctatgccagcacctatggcaagtttgtctctgccgtagaggtgattgccatcctggcagccagctttggcttgctggcgtgcatcttcttcaacaagatctacatcattctcttcaagccatcccgcaacaccatcgaggaggtgcgttgcagcaccgcagctcacgctttcaaggtggctgcccgggccacgctgcgccgcagcaacgtctcccgcaagcggtccagcagccttggaggctccacgggatccaccccctcctcctccatcagcagcaagagcaacagcgaagacccattcccacagcccgagaggcagaagcagcagcagccgctggccctaacccagcaagagcagcagcagcagcccctgaccctcccacagcagcaacgatctcagcagcagcccagatgcaagcagaaggtcatctttggcagcggcacggtcaccttctcactgagctttgatgagcctcagaagaacgccatggcccacaggaattctacgcaccagaactccctggaggcccagaaaagcagcgatacgctgacccgacaccagccattactcccgctgcagtgcggggaaacggacttagatctgaccgtccaggaaacaggtctgcaaggacctgtgggtggagaccagcggccagaggtggaggaccctgaagagttgtccccagcacttgtagtgtccagttcacagagctttgtcatcagtggtggaggcagcactgttacagaaaacgtagtgaattcataaaatggaaggagaagactgggctagggagaatgcagagaggtttcttggggtcccagggatgaggaatcgccccagactcctttcctctgaggaagaagggataatagacacatcaaatgccccgaatttagtcacaccatcttaaatgacagtgaattgacccatgttccctttaaaattaaaaaaaagaagagccttgtgtttctgtggttgcatttgtcaaagcattgagatctccacggtcagatttgctgttcacccacatctaatgtctcttcctctgttctatcccacccaacagctcagagatgaaactatggctttaaactaccctccagagtgtgcagactgatgggacatcaaatttgccaccactagagctgagagtctgaaagacagaatgtcaccagtcctgcccaatgccttgacaacagactgaattttaaatgttcacaacataaggagaatgtatctcctcctatttatgaaaaccatatgatattttgtctcctacctgctgctgctattatgtaacatccagaaggtttgcacccctcctataccatatgtctggttctgtccaggacatgatactgatgccatgtttagattccaggatcacaagaatcacctcaaattgttaggaagggactgcataaaccaatgagctgtatctgtaattaatattcctatatgtagctttatccttaggaaaatgcttctgttgtaatagtccatggacaatataaactgaaaaatgtcagtctggtttatataaggcagtattattgagctctatttccccaccccactatcctcactcccataagctaagccttatgtgagccccttcagggactcaagggtccagaagtccctcccatctctaccccaaagaattcctgaagccagatccaccctatccctgtacagagtaagttctcaattattggcctgctaatagctgctagggtaggaaagcgtggttccaagaaagatccaccctcaaatgtcagagctatgttccctccagcagtggtattaatactgccggtcacccaggctctggagccagagagacagaccggggttcaagccatggcttcgtcatttgcaagctgagtgactgtaggcagggaaccttaacctctctaagccacagcttcttcatctttaaaataaggataataatcattccttcccctcagagctcttatgtggattaaacgagataatgtatataaagtactttagcctggtacctagcacacaataagcattcaataaatattagttaatattaaaaaaaaaaa

SEQ ID NO: 85390 - DNA, 4069 bp, Homo sapiens
caacaggcacctggctgcagccaggaaggaccgcacgccctttcgcgcaggagagtggaaggagggagctgtttgccagcaccgaggtcttgcggcacaggcaacgcttgacctgagtcttgcagaatgagtaagagtttgggcacgcgatttgtatttattttactgtgaatctctggccttatatcagaaaaaaaaaaattgtgccaccctcggcacagagaacgttggtggcgtcgtaagcgcccttaagcttctttccatcgccaaggagtaggggtcagggaagaggacagcgggaacaggatttgagagccgggaacccctggctcggcacgggagagggcaggagaggacctaagcgcggggctcgccgtctgctggggacccgagcccgcctgtggccctcggggaacagaagacgcgccctcagcgaccctgaagagtcagctaagctctctgcgggctaaggagacggtgaaggaaccgggactaactggggtaggggttagaaggcagcccgcgagtgggctacgaggggagctgggctcggcagttggggaacccgagggggcaagcgggcggggagcaggagaggggcggagctccggggccggggccggggccgcagcggccgcccagagggtctgcgggggctgctgtggccggacccgaaggcgggcgccgggagcgcagcgagccagacgcgcctctccaagaccgtgaccttggcatagggagcggggctgcgcgcagtcctgagatcagaccagagctcatcctcgtggagacccacggccgaggggcggagctgcctctgtgcgagggagccctggccgcggcgcagaaggcatcacaggaggcctctgcatgatgtggcttccaaagactcaaggaccacccacattacaagtctggattgaggaaggcagaaatggagattcaaacaccacgtcttctattattttattaatcaatctgtagacatgtgtccccactgcagggagtgaactgctccaagggagaaacttctgggagcctccaaactcctagctgtctcatcccttgccctggagagacggcagaaccatggcattttatagctgctgctgggtcctcttggcactcacctggcacacctctgcctacgggccagaccagcgagcccaaaagaagggggacattatccttggggggctctttcctattcattttggagtagcagctaaagatcaagatctcaaatcaaggccggagtctgtggaatgtatcaggtataatttccgtgggtttcgctggttacaggctatgatatttgccatagaggagataaacagcagcccagcccttcttcccaacttgacgctgggatacaggatatttgacacttgcaacaccgtttctaaggccttggaagccaccctgagttttgttgctcaaaacaaaattgattctttgaaccttgatgagttctgcaactgctcagagcacattccctctacgattgctgtggtgggagcaactggctcaggcgtctccacggcagtggcaaatctgctggggctcttctacattccccaggtcagttatgcctcctccagcagactcctcagcaacaagaatcaattcaagtctttcctccgaaccatccccaatgatgagcaccaggccactgccatggcagacatcatcgagtatttccgctggaactgggtgggcacaattgcagctgatgacgactatgggcggccggggattgagaaattccgagaggaagctgaggaaagggatatctgcatcgacttcagtgaactcatctcccagtactctgatgaggaagagatccagcatgtggtagaggtgattcaaaattccacggccaaagtcatcgtggttttctccagtggcccagatcttgagcccctcatcaaggagattgtccggcgcaatatcacgggcaagatctggctggccagcgaggcctgggccagctcctccctgatcgccatgcctcagtacttccacgtggttggcggcaccattggattcgctctgaaggctgggcagatcccaggcttccgggaattcctgaagaaggtccatcccaggaagtctgtccacaatggttttgccaaggagttttgggaagaaacatttaactgccacctccaagaaggtgcaaaaggacctttacctgtggacacctttctgagaggtcacgaagaaagtggcgacaggtttagcaacagctcgacagccttccgacccctctgtacaggggatgagaacatcagcagtgtcgagaccccttacatagattacacgcatttacggatatcctacaatgtgtacttagcagtctgaccctcccacagcagcaacgatctcagcagcagcccagatgcaagcagaaggtcatctttggcagcggcacggtcaccttctcactgagctttgatgagcctcagaagaacgccatggcccacaggaattctacgcaccagaactccctggaggcccagaaaagcagcgatacgctgacccgacaccagccattactcccgctgcagtgcggggaaacggacttagatctgaccgtccaggaaacaggtctgcaaggacctgtgggtggagaccagcggccagaggtggaggaccctgaagagttgtccccagcacttgtagtgtccagttcacagagctttgtcatcagtggtggaggcagcactgttacagaaaacgtagtgaattcataaaatggaaggagaagactgggctagggagaatgcagagaggtttcttggggtcccagggatgaggaatcgccccagactcctttcctctgaggaagaagggataatagacacatcaaatgccccgaatttagtcacaccatcttaaatgacagtgaattgacccatgttccctttaaaattaaaaaaaagaagagccttgtgtttctgtggttgcatttgtcaaagcattgagatctccacggtcagatttgctgttcacccacatctaatgtctcttcctctgttctatcccacccaacagctcagagatgaaactatggctttaaactaccctccagagtgtgcagactgatgggacatcaaatttgccaccactagagctgagagtctgaaagacagaatgtcaccagtcctgcccaatgccttgacaacagactgaattttaaatgttcacaacataaggagaatgtatctcctcctatttatgaaaaccatatgatattttgtctcctacctgctgctgctattatgtaacatccagaaggtttgcacccctcctataccatatgtctggttctgtccaggacatgatactgatgccatgtttagattccaggatcacaagaatcacctcaaattgttaggaagggactgcataaaccaatgagctgtatctgtaattaatattcctatatgtagctttatccttaggaaaatgcttctgttgtaatagtccatggacaatataaactgaaaaatgtcagtctggtttatataaggcagtattattgagctctatttccccaccccactatcctcactcccataagctaagccttatgtgagccccttcagggactcaagggtccagaagtccctcccatctctaccccaaagaattcctgaagccagatccaccctatccctgtacagagtaagttctcaattattggcctgctaatagctgctagggtaggaaagcgtggttccaagaaagatccaccctcaaatgtcagagctatgttccctccagcagtggtattaatactgccggtcacccaggctctggagccagagagacagaccggggttcaagccatggcttcgtcatttgcaagctgagtgactgtaggcagggaaccttaacctctctaagccacagcttcttcatctttaaaataaggataataatcattccttcccctcagagctcttatgtggattaaacgagataatgtatataaagtactttagcctggtacctagcacacaataagcattcaataaatattagttaatattaaaaaaaaaaa

SEQ ID NO: 85391 - DNA, 1833 bp, Homo sapiens
caacaggcacctggctgcagccaggaaggaccgcacgccctttcgcgcaggagagtggaaggagggagctgtttgccagcaccgaggtcttgcggcacaggcaacgcttgacctgagtcttgcagaatgagtaagagtttgggcacgcgatttgtatttattttactgtgaatctctggccttatatcagaaaaaaaaaaattgtgccaccctcggcacagagaacgttggtggcgtcgtaagcgcccttaagcttctttccatcgccaaggagtaggggtcagggaagaggacagcgggaacaggatttgagagccgggaacccctggctcggcacgggagagggcaggagaggacctaagcgcggggctcgccgtctgctggggacccgagcccgcctgtggccctcggggaacagaagacgcgccctcagcgaccctgaagagtcagctaagctctctgcgggctaaggagacggtgaaggaaccgggactaactggggtaggggttagaaggcagcccgcgagtgggctacgaggggagctgggctcggcagttggggaacccgagggggcaagcgggcggggagcaggagaggggcggagctccggggccggggccggggccgcagcggccgcccagagggtctgcgggggctgctgtggccggacccgaaggcgggcgccgggagcgcagcgagccagacgcgcctctccaagaccgtgaccttggcatagggagcggggctgcgcgcagtcctgagatcagaccagagctcatcctcgtggagacccacggccgaggggcggagctgcctctgtgcgagggagccctggccgcggcgcagaaggcatcacaggaggcctctgcatgatgtggcttccaaagactcaaggaccacccacattacaagtctggattgaggaaggcagaaatggagattcaaacaccacgtcttctattattttattaatcaatctgtagacatgtgtccccactgcagggagtgaactgctccaagggagaaacttctgggagcctccaaactcctagctgtctcatcccttgccctggagagacggcagaaccatggcattttatagctgctgctgggtcctcttggcactcacctggcacacctctgcctacgggccagaccagcgagcccaaaagaagggggacattatccttggggggctctttcctattcattttggagtagcagctaaagatcaagatctcaaatcaaggccggagtctgtggaatgtatcaggtataatttccgtgggtttcgctggttacaggctatgatatttgccatagaggagataaacagcagcccagcccttcttcccaacttgacgctgggatacaggatatttgacacttgcaacaccgtttctaaggccttggaagccaccctgagttttgttgctcaaaacaaaattgattctttgaaccttgatgagttctgcaactgctcagagcacattccctctacgattgctgtggtgggagcaactggctcaggcgtctccacggcagtggcaaatctgctggggctcttctacattccccaggtactcaagccttctcagacggggcactgggagcaggatcagaagaagcaggcttgggggtgccatgcccaatagccatacggtttaccatattcccatctctggcacaaaagacctatgatttagttgatatgctgtatcatgaccatttgggatttctgaaactccagtgtccacaatatcaatgataccttcactatgcttccaaaattcttttaaatgtaccttgcataaaactgtgtctttttttaa

SEQ ID NO: 85392 - DNA, 693 bp, Homo sapiens
caacaggcacctggctgcagccaggaaggaccgcacgccctttcgcgcaggagagtggaaggagggagctgtttgccagcaccgaggtcttgcggcacaggcaacgcttgacctgagtcttgcagaatgagtaagagtttgggcacgcgatttgtatttattttactgtgaatctctggccttatatcagaaaaaaaaaaattgtgccaccctcggcacagagaacgttggtggcgtcgtaagcgcccttaagcttcctcccatctctaccccaaagaattcctgaagccagatccaccctatccctgtacagagtaagttctcaattattggcctgctaatagctgctagggtaggaaagcgtggttccaagaaagatccaccctcaaatgtcagagctatgttccctccagcagtggtattaatactgccggtcacccaggctctggagccagagagacagaccggggttcaagccatggcttcgtcatttgcaagctgagtgactgtaggcagggaaccttaacctctctaagccacagcttcttcatctttaaaataaggataataatcattccttcccctcagagctcttatgtggattaaacgagataatgtatataaagtactttagcctggtacctagcacacaataagcattcaataaatattagttaatattaaaaaaaaaaa

SEQ ID NO: 85393 - DNA, 1107 bp, Homo sapiens
caacaggcacctggctgcagccaggaaggaccgcacgccctttcgcgcaggagagtggaaggagggagctgtttgccagcaccgaggtcttgcggcacaggcaacgcttgacctgagtcttgcagaatgagtaagagtttgggcacgcgatttgtatttattttactgtgaatctctggccttatatcagaaaaaaaaaaattgtgccaccctcggcacagagaacgttggtggcgtcgtaagcgcccttaagcttctttccatcgccaaggagtaggggtcagggaagaggacagcgggaacaggatttgagagccgggaacccctggctcggcacgggagagggcaggagaggacctaagcgcggggctcgccgtctgctggggacccgagcccgcctgtggccctcggggaacagaagacgcgccctcagcgaccctgaagagtcagctaagctctctgcgggctaaggagacggtgaaggaaccgggactaactggggtaggggttagaaggcagcccgcgagtgggctacgaggggagctgggctcggcagttggggaacccgagggggcaagcgggcggggagcaggagaggggcggagctccggggccggggccggggccgcagcggccgcccagagggtctgcgggggctgctgtggccggacccgaaggcgggcgccgggagcgcagcgagccagacgcgcctctccaagaccgtgaccttggcatagggagcggggctgcgcgcagtcctgagatcagaccagagctcatcctcgtggagacccacggccgaggggcggagctgcctctgtgcgagggagccctggccgcggcgcaggtaggaccggggaacccaaggagggcgggaggaaagcgcccctggtgggggaggggccgtggcggggtctgggggccaagggctccgggccgaacgaggggcacacgccggagcagctccagcctgggagcattgggcgtgaacgtgggggaaagtagggaccagattacaggatcaaggctttccccggctcagaactggattgttcagtgcccctagaaggggagcgggtcgcccacgcgaatgaacgggagcgcgca

SEQ ID NO: 85394 - DNA, 4922 bp, Homo sapiens
caacaggcacctggctgcagccaggaaggaccgcacgccctttcgcgcaggagagtggaaggagggagctgtttgccagcaccgaggtcttgcggcacaggcaacgcttgacctgagtcttgcagaatgaaaggcatcacaggaggcctctgcatgatgtggcttccaaagactcaaggaccacccacattacaagtctggattgaggaaggcagaaatggagattcaaacaccacgtcttctattattttattaatcaatctgtagacatgtgtccccactgcagggagtgaactgctccaagggagaaacttctgggagcctccaaactcctagctgtctcatcccttgccctggagagacggcagaaccatggcattttatagctgctgctgggtcctcttggcactcacctggcacacctctgcctacgggccagaccagcgagcccaaaagaagggggacattatccttggggggctctttcctattcattttggagtagcagctaaagatcaagatctcaaatcaaggccggagtctgtggaatgtatcaggtataatttccgtgggtttcgctggttacaggctatgatatttgccatagaggagataaacagcagcccagcccttcttcccaacttgacgctgggatacaggatatttgacacttgcaacaccgtttctaaggccttggaagccaccctgagttttgttgctcaaaacaaaattgattctttgaaccttgatgagttctgcaactgctcagagcacattccctctacgattgctgtggtgggagcaactggctcaggcgtctccacggcagtggcaaatctgctggggctcttctacattccccaggtcagttatgcctcctccagcagactcctcagcaacaagaatcaattcaagtctttcctccgaaccatccccaatgatgagcaccaggccactgccatggcagacatcatcgagtatttccgctggaactgggtgggcacaattgcagctgatgacgactatgggcggccggggattgagaaattccgagaggaagctgaggaaagggatatctgcatcgacttcagtgaactcatctcccagtactctgatgaggaagagatccagcatgtggtagaggtgattcaaaattccacggccaaagtcatcgtggttttctccagtggcccagatcttgagcccctcatcaaggagattgtccggcgcaatatcacgggcaagatctggctggccagcgaggcctgggccagctcctccctgatcgccatgcctcagtacttccacgtggttggcggcaccattggattcgctctgaaggctgggcagatcccaggcttccgggaattcctgaagaaggtccatcccaggaagtctgtccacaatggttttgccaaggagttttgggaagaaacatttaactgccacctccaagaaggtgcaaaaggacctttacctgtggacacctttctgagaggtcacgaagaaagtggcgacaggtttagcaacagctcgacagccttccgacccctctgtacaggggatgagaacatcagcagtgtcgagaccccttacatagattacacgcatttacggatatcctacaatgtgtacttagcagtctactccattgcccacgccttgcaagatatatatacctgcttacctgggagagggctcttcaccaatggctcctgtgcagacatcaagaaagttgaggcgtggcaggtcctgaagcacctacggcatctaaactttacaaacaatatgggggagcaggtgacctttgatgagtgtggtgacctggtggggaactattccatcatcaactggcacctctccccagaggatggctccatcgtgtttaaggaagtcgggtattacaacgtctatgccaagaagggagaaagactcttcatcaacgaggagaaaatcctgtggagtgggttctccagggaggtgcccttctccaactgcagccgagactgcctggcagggaccaggaaagggatcattgagggggagcccacctgctgctttgagtgtgtggagtgtcctgatggggagtatagtgatgagacagatgccagtgcctgtaacaagtgcccagatgacttctggtccaatgagaaccacacctcctgcattgccaaggagatcgagtttctgtcgtggacggagccctttgggatcgcactcaccctctttgccgtgctgggcattttcctgacagcctttgtgctgggtgtgtttatcaagttccgcaacacacccattgtcaaggccaccaaccgagagctctcctacctcctcctcttctccctgctctgctgcttctccagctccctgttcttcatcggggagccccaggactggacgtgccgcctgcgccagccggcctttggcatcagcttcgtgctctgcatctcatgcatcctggtgaaaaccaaccgtgtcctcctggtgtttgaggccaagatccccaccagcttccaccgcaagtggtgggggctcaacctgcagttcctgctggttttcctctgcaccttcatgcagattgtcatctgtgtgatctggctctacaccgcgcccccctcaagctaccgcaaccaggagctggaggatgagatcatcttcatcacgtgccacgagggctccctcatggccctgggcttcctgatcggctacacctgcctgctggctgccatctgcttcttctttgccttcaagtcccggaagctgccggagaacttcaatgaagccaagttcatcaccttcagcatgctcatcttcttcatcgtctggatctccttcattccagcctatgccagcacctatggcaagtttgtctctgccgtagaggtgattgccatcctggcagccagctttggcttgctggcgtgcatcttcttcaacaagatctacatcattctcttcaagccatcccgcaacaccatcgaggaggtgcgttgcagcaccgcagctcacgctttcaaggtggctgcccgggccacgctgcgccgcagcaacgtctcccgcaagcggtccagcagccttggaggctccacgggatccaccccctcctcctccatcagcagcaagagcaacagcgaagacccattcccacagcccgagaggcagaagcagcagcagccgctggccctaacccagcaagagcagcagcagcagcccctgaccctcccacagcagcaacgatctcagcagcagcccagatgcaagcagaaggtcatctttggcagcggcacggtcaccttctcactgagctttgatgagcctcagaagaacgccatggcccacaggaattctacgcaccagaactccctggaggcccagaaaagcagcgatacgctgacccgacaccagccattactcccgctgcagtgcggggaaacggacttagatctgaccgtccaggaaacaggtctgcaaggacctgtgggtggagaccagcggccagaggtggaggaccctgaagagttgtccccagcacttgtagtgtccagttcacagagctttgtcatcagtggtggaggcagcactgttacagaaaacgtagtgaattcataaaatggaaggagaagactgggctagggagaatgcagagaggtttcttggggtcccagggatgaggaatcgccccagactcctttcctctgaggaagaagggataatagacacatcaaatgccccgaatttagtcacaccatcttaaatgacagtgaattgacccatgttccctttaaaattaaaaaaaagaagagccttgtgtttctgtggttgcatttgtcaaagcattgagatctccacggtcagatttgctgttcacccacatctaatgtctcttcctctgttctatcccacccaacagctcagagatgaaactatggctttaaactaccctccagagtgtgcagactgatgggacatcaaatttgccaccactagagctgagagtctgaaagacagaatgtcaccagtcctgcccaatgccttgacaacagactgaattttaaatgttcacaacataaggagaatgtatctcctcctatttatgaaaaccatatgatattttgtctcctacctgctgctgctattatgtaacatccagaaggtttgcacccctcctataccatatgtctggttctgtccaggacatgatactgatgccatgtttagattccaggatcacaagaatcacctcaaattgttaggaagggactgcataaaccaatgagctgtatctgtaattaatattcctatatgtagctttatccttaggaaaatgcttctgttgtaatagtccatggacaatataaactgaaaaatgtcagtctggtttatataaggcagtattattgagctctatttccccaccccactatcctcactcccataagctaagccttatgtgagccccttcagggactcaagggtccagaagtccctcccatctctaccccaaagaattcctgaagccagatccaccctatccctgtacagagtaagttctcaattattggcctgctaatagctgctagggtaggaaagcgtggttccaagaaagatccaccctcaaatgtcagagctatgttccctccagcagtggtattaatactgccggtcacccaggctctggagccagagagacagaccggggttcaagccatggcttcgtcatttgcaagctgagtgactgtaggcagggaaccttaacctctctaagccacagcttcttcatctttaaaataaggataataatcattccttcccctcagagctcttatgtggattaaacgagataatgtatataaagtactttagcctggtacctagcacacaataagcattcaataaatattagttaatattaaaaaaaaaaa

SEQ ID NO: 85395 - DNA, 5669 bp, Homo sapiens
caacaggcacctggctgcagccaggaaggaccgcacgccctttcgcgcaggagagtggaaggagggagctgtttgccagcaccgaggtcttgcggcacaggcaacgcttgacctgagtcttgcagaatgagtaagagtttgggcacgcgatttgtatttattttactgtgaatctctggccttatatcagaaaaaaaaaaattgtgccaccctcggcacagagaacgttggtggcgtcgtaagcgcccttaagcttctttccatcgccaaggagtaggggtcagggaagaggacagcgggaacaggatttgagagccgggaacccctggctcggcacgggagagggcaggagaggacctaagcgcggggctcgccgtctgctggggacccgagcccgcctgtggccctcggggaacagaagacgcgccctcagcgaccctgaagagtcagctaagctctctgcgggctaaggagacggtgaaggaaccgggactaactggggtaggggttagaaggcagcccgcgagtgggctacgaggggagctgggctcggcagttggggaacccgagggggcaagcgggcggggagcaggagaggggcggagctccggggccggggccggggccgcagcggccgcccagagggtctgcgggggctgctgtggccggacccgaaggcgggcgccgggagcgcagcgagccagacgcgcctctccaagaccgtgaccttggcatagggagcggggctgcgcgcagtcctgagatcagaccagagctcatcctcgtggagacccacggccgaggggcggagctgcctctgtgcgagggagccctggccgcggcgcagaaggcatcacaggaggcctctgcatgatgtggcttccaaagactcaaggaccacccacattacaagtctggattgaggaaggcagaaatggagattcaaacaccacgtcttctattattttattaatcaatctgtagacatgtgtccccactgcagggagtgaactgctccaagggagaaacttctgggagcctccaaactcctagctgtctcatcccttgccctggagagacggcagaaccatggcattttatagctgctgctgggtcctcttggcactcacctggcacacctctgcctacgggccagaccagcgagcccaaaagaagggggacattatccttggggggctctttcctattcattttggagtagcagctaaagatcaagatctcaaatcaaggccggagtctgtggaatgtatcaggtataatttccgtgggtttcgctggttacaggctatgatatttgccatagaggagataaacagcagcccagcccttcttcccaacttgacgctgggatacaggatatttgacacttgcaacaccgtttctaaggccttggaagccaccctgagttttgttgctcaaaacaaaattgattctttgaaccttgatgagttctgcaactgctcagagcacattccctctacgattgctgtggtgggagcaactggctcaggcgtctccacggcagtggcaaatctgctggggctcttctacattccccaggtcagttatgcctcctccagcagactcctcagcaacaagaatcaattcaagtctttcctccgaaccatccccaatgatgagcaccaggccactgccatggcagacatcatcgagtatttccgctggaactgggtgggcacaattgcagctgatgacgactatgggcggccggggattgagaaattccgagaggaagctgaggaaagggatatctgcatcgacttcagtgaactcatctcccagtactctgatgaggaagagatccagcatgtggtagaggtgattcaaaattccacggccaaagtcatcgtggttttctccagtggcccagatcttgagcccctcatcaaggagattgtccggcgcaatatcacgggcaagatctggctggccagcgaggcctgggccagctcctccctgatcgccatgcctcagtacttccacgtggttggcggcaccattggattcgctctgaaggctgggcagatcccaggcttccgggaattcctgaagaaggtccatcccaggaagtctgtccacaatggttttgccaaggagttttgggaagaaacatttaactgccacctccaagaaggtgcaaaaggacctttacctgtggacacctttctgagaggtcacgaagaaagtggcgacaggtttagcaacagctcgacagccttccgacccctctgtacaggggatgagaacatcagcagtgtcgagaccccttacatagattacacgcatttacggatatcctacaatgtgtacttagcagtctactccattgcccacgccttgcaagatatatatacctgcttacctgggagagggctcttcaccaatggctcctgtgcagacatcaagaaagttgaggcgtggcaggtcctgaagcacctacggcatctaaactttacaaacaatatgggggagcaggtgacctttgatgagtgtggtgacctggtggggaactattccatcatcaactggcacctctccccagaggatggctccatcgtgtttaaggaagtcgggtattacaacgtctatgccaagaagggagaaagactcttcatcaacgaggagaaaatcctgtggagtgggttctccagggagccactcacctttgtgctgtctgtcctccaggtgcccttctccaactgcagccgagactgcctggcagggaccaggaaagggatcattgagggggagcccacctgctgctttgagtgtgtggagtgtcctgatggggagtatagtgatgagacagatgccagtgcctgtaacaagtgcccagatgacttctggtccaatgagaaccacacctcctgcattgccaaggagatcgagtttctgtcgtggacggagccctttgggatcgcactcaccctctttgccgtgctgggcattttcctgacagcctttgtgctgggtgtgtttatcaagttccgcaacacacccattgtcaaggccaccaaccgagagctctcctacctcctcctcttctccctgctctgctgcttctccagctccctgttcttcatcggggagccccaggactggacgtgccgcctgcgccagccggcctttggcatcagcttcgtgctctgcatctcatgcatcctggtgaaaaccaaccgtgtcctcctggtgtttgaggccaagatccccaccagcttccaccgcaagtggtgggggctcaacctgcagttcctgctggttttcctctgcaccttcatgcagattgtcatctgtgtgatctggctctacaccgcgcccccctcaagctaccgcaaccaggagctggaggatgagatcatcttcatcacgtgccacgagggctccctcatggccctgggcttcctgatcggctacacctgcctgctggctgccatctgcttcttctttgccttcaagtcccggaagctgccggagaacttcaatgaagccaagttcatcaccttcagcatgctcatcttcttcatcgtctggatctccttcattccagcctatgccagcacctatggcaagtttgtctctgccgtagaggtgattgccatcctggcagccagctttggcttgctggcgtgcatcttcttcaacaagatctacatcattctcttcaagccatcccgcaacaccatcgaggaggtgcgttgcagcaccgcagctcacgctttcaaggtggctgcccgggccacgctgcgccgcagcaacgtctcccgcaagcggtccagcagccttggaggctccacgggatccaccccctcctcctccatcagcagcaagagcaacagcgaagacccattcccacagcccgagaggcagaagcagcagcagccgctggccctaacccagcaagagcagcagcagcagcccctgaccctcccacagcagcaacgatctcagcagcagcccagatgcaagcagaaggtcatctttggcagcggcacggtcaccttctcactgagctttgatgagcctcagaagaacgccatggcccacaggaattctacgcaccagaactccctggaggcccagaaaagcagcgatacgctgacccgacaccagccattactcccgctgcagtgcggggaaacggacttagatctgaccgtccaggaaacaggtctgcaaggacctgtgggtggagaccagcggccagaggtggaggaccctgaagagttgtccccagcacttgtagtgtccagttcacagagctttgtcatcagtggtggaggcagcactgttacagaaaacgtagtgaattcataaaatggaaggagaagactgggctagggagaatgcagagaggtttcttggggtcccagggatgaggaatcgccccagactcctttcctctgaggaagaagggataatagacacatcaaatgccccgaatttagtcacaccatcttaaatgacagtgaattgacccatgttccctttaaaattaaaaaaaagaagagccttgtgtttctgtggttgcatttgtcaaagcattgagatctccacggtcagatttgctgttcacccacatctaatgtctcttcctctgttctatcccacccaacagctcagagatgaaactatggctttaaactaccctccagagtgtgcagactgatgggacatcaaatttgccaccactagagctgagagtctgaaagacagaatgtcaccagtcctgcccaatgccttgacaacagactgaattttaaatgttcacaacataaggagaatgtatctcctcctatttatgaaaaccatatgatattttgtctcctacctgctgctgctattatgtaacatccagaaggtttgcacccctcctataccatatgtctggttctgtccaggacatgatactgatgccatgtttagattccaggatcacaagaatcacctcaaattgttaggaagggactgcataaaccaatgagctgtatctgtaattaatattcctatatgtagctttatccttaggaaaatgcttctgttgtaatagtccatggacaatataaactgaaaaatgtcagtctggtttatataaggcagtattattgagctctatttccccaccccactatcctcactcccataagctaagccttatgtgagccccttcagggactcaagggtccagaagtccctcccatctctaccccaaagaattcctgaagccagatccaccctatccctgtacagagtaagttctcaattattggcctgctaatagctgctagggtaggaaagcgtggttccaagaaagatccaccctcaaatgtcagagctatgttccctccagcagtggtattaatactgccggtcacccaggctctggagccagagagacagaccggggttcaagccatggcttcgtcatttgcaagctgagtgactgtaggcagggaaccttaacctctctaagccacagcttcttcatctttaaaataaggataataatcattccttcccctcagagctcttatgtggattaaacgagataatgtatataaagtactttagcctggtacctagcacacaataagcattcaataaatattagttaatattaaaaaaaaaaa

SEQ ID NO: 85396 - DNA, 502 bp, Homo sapiens
cttttattagtaaagataccttcttttacggactccactttatggactcccttaggcccaatgtcgaagcccccatcgctgggtcaatagtacttgccccagtactcttgaaactaggcggctatggtataatatgcctcatcagcgattgctccatcgctgatgaggcataagtggtatcagttttcatttttctaattgtttaaactgtgttttataccagtgtttgcaagtaattgggtgttagcttgagatggttaaaggtggtttggggagggacttcgttgtaatggttttgctgtaaaaaatgtttccaactccgctgaaatgttgctgaaaagcatggtgctggtaacagttcaacaatccgtggctgctcattcttgcctactttactctcccactgaagcaggttagcgttgaaggtggtatggaaaagcctgcatgcctgttcaggggggaagtttattttgagttgtgctgatgacaagaccccacgggt

SEQ ID NO: 85397 - DNA, 264 bp, Homo sapiens
agacaatcaaaggtggttttttttttttaacttttgcttaattcaggtatatattacacattctaagtgtatggtttaatgagtttagcctagtagaaggtacactcctcccctccttcgctcgctcaacctcttttgttcagtatgtgtaacttgaagctaatttgtactactggatatctgactggagccacagatacagaatctgtattgttcttactgaaacacagcatggaattaacattaaacttaaataaaacaaac

SEQ ID NO: 85398 - DNA, 692 bp, Homo sapiens
agaagcacggtgtccatgcagtctggccagcaggttgtcgatacgagcatacttggtggcatgctcaatcacatactgtatctggcatagatgtgaagcttacatcttcagaagtaaaccccctatctgtcgcttctactatatgtcattggctctacaatatcgtcttatcactcatccgtgactcttcaacctacgccatgatacaccggtgcgtgtatcatcacggggcatccatacttatactcgaacttgtcgggcattcgttcttactgatctccgtcttttttgtagttacttgctggaaccaccgtagcgaaacctcattccagcagctaacactggcgagtccaaggttttctattataaaattgtaggttctatactagaagggaaaatgtaagattgaaagttggtccttttagaaccataactttgttctatgtaggttttcaacttttatttaagaataattgttcaatgttagaaggatagttaatattggaatgaaaaggtggttgggctattatgaaaatgtattagcttttgcttatttatattcttttgtttttgtgagacctatcccattcccctcccccaaacggcatacatttcacagtgcttagtgttatatatagacattttattttatgattaataaactgtcatgccattccttggaaccacttgct

SEQ ID NO: 85399 - DNA, 377 bp, Homo sapiens
tactactactaaattcgcggccgcgtcgttcaacaatccgtggctgctcattcttgcctactttactctcccactgaagcaggttagcgttgaaggtggtatggaaaagcctgcatgcctgttcaattcttttgtttcttctccttccccctccccctacctccttcccctcactcctcccctccttcgctcgctcaacctcttttgttcagtatgtgtaacttgaagctaatttgtactactggatatctgactggagccacagatacagaatctgtattgttcttactgaaacacagcatggaattaacattaaacttaaataaaacaaacctaaattaaaaatgccaaaaaaaaaagtcgacgcggccgcgaat

SEQ ID NO: 85400 - DNA, 710 bp, Homo sapiens
tttctcaagtgattttagtctcttcaccctgtggtaagaggattgtttcatatacgaatccataggtaggaaatacatgttctccctgcctgttcccctctctccaaaatgtagatacactgggcaaagaaacatagccaaggaatcctttttcccctaatatctgtatgtctttcaagaggatattacttccttctcagagtagaagggaggaggagtagacagattgttgcttagagtgaagtttacacgaagtaagaccaaagtccggctcctgtatcattgttttcctttgtcctgctctgttggtttatttttcttgtaatgttgctttcatatgattgttctccctccctttttccttgcaatatagattcctaaaggaaaacccaactcttcctttcctaaaaactctactttgtaagtcacgttcatggcacagtgaattccgctttcagttttggttcttcactaatcatgcctgcgtatgatcgtcctgttgcttacagactctgcctgttccaccttccagggcgctgacctaagccttttccggcctgctcctcctgcctactgtggttggatgtgatgtatatgacagtgacatttttatgccaaagttacttggaacttctggcacatctcatggttgcttacaagcgagttgtgttctagtgtttgtgttaatgatactttggcagtgatttgct

SEQ ID NO: 85401 - DNA, 375 bp, Homo sapiens
ttcagggaaatatggcgggtgggggcggtggcttttccccggaggccccgtgtggggcggcggccgtggagtctcacaaaggaggacctttgagagcgatgggcttcctcaggcctgaggctcggaatgctggtctgtacttcgtgggggatcttaacctattccaggcgctcggctgaggctgggttttttgagttatgaaggttgaagatcctgttgctttctttttttccgttttaaataaatgggtttatgtagaaatattagtaggtcctctttgttcgttgttcttttgcccctaatgggttctccagtcctttttcagaacttcatcgaatgtccattgtgtctgtccagtcattgtcaggaagttta

SEQ ID NO: 85402 - DNA, 2271 bp, Homo sapiens
tatgcgaaacgagataatggtggaccagtgaataacgtagcaggatgatgtggagctgacagttgaagaaagaaacctcctatctgttgcatatagaatgtgattggagctagaagagcctcctggagaataatcagcagcattgaatagaaagaagaaaacaaggatcgacaagacatcgctctgcatgcttcgggactttcgcgtcagctgtgcgtgatagaggcgccgccatttttgctgcccggacgcggagcgagaggctgagagagtcggagacactatccgcttccatccgtcgcgcagaccctgccggagccgctgccgctatggatgatcgagaggatctggtgtaccaggcgaagctggccgagcaggctgagcgatacgacgaaatggtggagtcaatgaagaaagtagcagggatggatgtggagctgacagttgaagaaagaaacctcctatctgttgcatataagaatgtgattggagctagaagagcctcctggagaataatcagcagcattgaacagaaagaagaaaacaagggaggagaagacaagctaaaaatgattcgggaatatcggcaaatggttgagactgagctaaagttaatctgttgtgacattctggatgtactggacaaacacctcattccagcagctaacactggcgagtccaaggttttctattataaaatgaaaggggactaccacaggtatctggcagaatttgccacaggaaacgacaggaaggaggctgcggagaacagcctagtggcttataaagctgctagtgatattgcaatgacagaacttccaccaacgcatcctattcgcttaggtcttgctctcaatttttccgtattctactacgaaattcttaattcccctgaccgtgcctgcaggttggcaaaagcagcttttgatgatgcaattgcagaactggatacgctgagtgaagaaagctataaggactctacacttatcatgcagttgttacgtgataatctgacactatggacttcagacatgcagggtgacggtgaagagcagaataaagaagcgctgcaggacgtggaagacgaaaatcagtgagacataagccaacaagagaaaccatctctgaccaccccctcctccccatcccaccctttggaaactccccattgtcactgagaaccaccaaatctgacttttacatttggtctcagaatttaggttcctgccctgttggttttttttttttttttttaaacagttttcaaaagttcttaaaggcaagagtgaatttctgtggattttactggtcccagcttttaggttctttaagacactaacaggactacatagaggctttttcagcattactgtgtcgtctccgtgccagatgtggcaagatcaccattagcaaatggaaattacatttgaaagccattagacttataggtgatgcaagcatctaagagagaggttaatcacactatagaggcataagtggtatcagttttcatttttctaattgtttaaactgtgttttataccagtgtttgcaagtaattgggtgttagcttgagatggttaaaggtggtttggggagggacttcgttgtaatggttttgctgtaaaaaatgtttccaactccgctgaaatgttgctgaaaagcatggtgctggtaacagttcaacaatccgtggctgctcattcttgcctactttactctcccactgaagcaggttagcgttgaaggtggtatggaaaagcctgcatgcctgttcaattcttttgtttcttctccttccccctccccctacctccttcccctcactcctcccctccttcgctcgctcaacctcttttgttcagtatgtgtaacttgaagctaatttgtactactggatatctgactggagccacagatacagaatctgtattgttcttactgaaacacagcatggaattaacattaaacttaaataaaacaaacctaaattaaaaatgccaaatatcgcgcctccatcctttatacttctaaaataaaatctctagtccaaacacactgacagtattatgtttgcctgaatgtgaaacattcctccttttttcttccataaataatttgtttgcttcccaaagatgtatgttttggaaaaaaattgcctgtagtctggttgtgaagaacactgagtcagttgatggtgtgtcttgtcctccagaccaggcagcaacatggtatttattttaatcattaaagtacaacatgagtagtaca

SEQ ID NO: 85403 - DNA, 2200 bp, Homo sapiens
tatgcgaaacgagataatggtggaccagtgaataacgtagcaggatgatgtggagctgacagttgaagaaagaaacctcctatctgttgcatatagaatgtgattggagctagaagagcctcctggagaataatcagcagcattgaatagaaagaagaaaacaaggatcgacaagacatcgctctgcatgcttcgggactttcgcgtcagctgtgcgtgatagaggcgccgccatttttgctgcccggacgcggagcgagaggctgagagagtcggagacactatccgcttccatccgtcgcgcagaccctgccggagccgctgccgctatggatgatcgagaggatctggtgtaccaggcgaagctggccgagcaggctgagcgatacgacgaaatggtggagtcaatgaagaaagtagcagggatggatgtggagctgacagttgaagaaagaaacctcctatctgttgcatataagaatgtgattggagctagaagagcctcctggagaataatcagcagcattgaacagaaagaagaaaacaagggaggagaagacaagctaaaaatgattcgggaatatcggcaaatggttgagactgagctaaagttaatctgttgtgacattctggatgtactggacaaacacctcattccagcagctaacactggcgagtccaaggttttctattataaaatgaaaggggactaccacaggtatctggcagaatttgccacaggaaacgacaggaaggaggctgcggagaacagcctagtggcttataaagctgctagtgatattgcaatgacagaacttccaccaacgcatcctattcgcttaggtcttgctctcaatttttccgtattctactacgaaattcttaattcccctgaccgtgcctgcaggttggcaaaagcagcttttgatgatgcaattgcagaactggatacgctgagtgaagaaagctataaggactctacacttatcatgcagttgttacgtgataatctgacactatggacttcagacatgcagggtgacggtgaagagcagaataaagaagcgctgcaggacgtggaagacgaaaatcagtgagacataagccaacaagagaaaccatctctgaccaccccctcctccccatcccaccctttggaaactccccattgtcactgagaaccaccaaatctgacttttacatttggtctcagaatttaggttcctgccctgttggttttttttttttttttttaaacagttttcaaaagttcttaaaggcaagagtgaatttctgtggattttactggtcccagcttttaggttctttaagacactaacaggactacatagaggctttttcagcattactgtgtcgtctccgtgccagatgtggcaagatcaccattagcaaatggaaattacatttgaaagccattagacttataggtgatgcaagcatctaagagagaggttaatcacactatagaggcataagtggtatcagttttcatttttctaattgtttaaactgtgttttataccagtgtttgcaagtaattgggtgttagcttgagatggttaaaggtggtttggggagggacttcgttgtaatggttttgctgtaaaaaatgtttccaactccgctgaaatgttgctgaaaagcatggtgctggtaacagttcaacaatccgtggctgctcattcttgcctactttactctcccactgaagcaggttagcgttgaaggtggtatggaaaagcctgcatgcctgttcaattcttttgtttcttctccttccccctccccctacctccttcccctcactcctcccctccttcgctcgctcaacctcttttgttcagtatgtgtaacttgaagctaatttgtactactggatatctgactggagccacagatacagaatctgtattgttcttactgaaacacagcatggaattaacattaaacttaaataaaacaaacctaaattaaaaatgccaaaaaacacaaataacacacaaaacaaacacgaatcaccaccctctaccgcaaacgtagcctcacaacaacccaaccgacctatcaccgctcccacagccactcacatccccacccaccctaatccacaccactcaactaccgcatacatgtactactgtaagacgtaacacctatccacacaaacttagagaccgga

SEQ ID NO: 85404 - DNA, 2097 bp, Homo sapiens
ggccagggctgggtgaccccggcccccggggagatgttaacggaggataatgcgtcgaaacctccagcggccgttcacggagcgagaggctgagagagtcggagacactatccgcttccatccgtcgcgcagaccctgccggagccgctgccgctatggatgatcgagaggatctggtgtaccaggcgaagctggccgagcaggctgagcgatacgacgaaatggtggagtcaatgaagaaagtagcagggatggatgtggagctgacagttgaagaaagaaacctcctatctgttgcatataagaatgtgattggagctagaagagcctcctggagaataatcagcagcattgaacagaaagaagaaaacaagggaggagaagacaagctaaaaatgattcgggaatatcggcaaatggttgagactgagctaaagttaatctgttgtgacattctggatgtactggacaaacacctcattccagcagctaacactggcgagtccaaggttttctattataaaatgaaaggggactaccacaggtatctggcagaatttgccacaggaaacgacaggaaggaggctgcggagaacagcctagtggcttataaagctgctagtgatattgcaatgacagaacttccaccaacgcatcctattcgcttaggtcttgctctcaatttttccgtattctactacgaaattcttaattcccctgaccgtgcctgcaggttggcaaaagcagcttttgatgatgcaattgcagaactggatacgctgagtgaagaaagctataaggactctacacttatcatgcagttgttacgtgataatctgacactatggacttcagacatgcagggtgacggtgaagagcagaataaagaagcgctgcaggacgtggaagacgaaaatcagtgagacataagccaacaagagaaaccatctctgaccaccccctcctccccatcccaccctttggaaactccccattgtcactgagaaccaccaaatctgacttttacatttggtctcagaatttaggttcctgccctgttggttttttttttttttttttaaacagttttcaaaagttcttaaaggcaagagtgaatttctgtggattttactggtcccagcttttaggttctttaagacactaacaggactacatagaggctttttcagcattactgtgtcgtctccgtgccagatgtggcaagatcaccattagcaaatggaaattacatttgaaagccattagacttataggtgatgcaagcatctaagagagaggttaatcacactatagaggcataagtggtatcagttttcatttttctaattgtttaaactgtgttttataccagtgtttgcaagtaattgggtgttagcttgagatggttaaaggtggtttggggagggacttcgttgtaatggttttgctgtaaaaaatgtttccaactccgctgaaatgttgctgaaaagcatggtgctggtaacagttcaacaatccgtggctgctcattcttgcctactttactctcccactgaagcaggttagcgttgaaggtggtatggaaaagcctgcatgcctgttcaattcttttgtttcttctccttccccctccccctacctccttcccctcactcctcccctccttcgctcgctcaacctcttttgttcagtatgtgtaacttgaagctaatttgtactactggatatctgactggagccacagatacagaatctgtattgttcttactgaaacacagcatggaattaacattaaacttaaataaaacaaacctaaattaaaaatgccaaatatcgcgcctccatcctttatacttctaaaataaaatctctagtccaaacacactgacagtattatgtttgcctgaatgtgaaacattcctccttttttcttccataaataatttgtttgcttcccaaagatgtatgttttggaaaaaaattgcctgtagtctggttgtgaagaacactgagtcagttgatggtgtgtcttgtcctccagaccaggcagcaacatggtatttattttaatcattaaagtacaacatgagtagtaca

SEQ ID NO: 85405 - DNA, 2045 bp, Homo sapiens
cggtacccgactgcatcaacgccgcgggagcgagaggctgagagagtcggagacactatccgcttccatccgtcgcgcagaccctgccggagccgctgccgctatggatgatcgagaggatctggtgtaccaggcgaagctggccgagcaggctgagcgatacgacgaaatggtggagtcaatgaagaaagtagcagggatggatgtggagctgacagttgaagaaagaaacctcctatctgttgcatataagaatgtgattggagctagaagagcctcctggagaataatcagcagcattgaacagaaagaagaaaacaagggaggagaagacaagctaaaaatgattcgggaatatcggcaaatggttgagactgagctaaagttaatctgttgtgacattctggatgtactggacaaacacctcattccagcagctaacactggcgagtccaaggttttctattataaaatgaaaggggactaccacaggtatctggcagaatttgccacaggaaacgacaggaaggaggctgcggagaacagcctagtggcttataaagctgctagtgatattgcaatgacagaacttccaccaacgcatcctattcgcttaggtcttgctctcaatttttccgtattctactacgaaattcttaattcccctgaccgtgcctgcaggttggcaaaagcagcttttgatgatgcaattgcagaactggatacgctgagtgaagaaagctataaggactctacacttatcatgcagttgttacgtgataatctgacactatggacttcagacatgcagggtgacggtgaagagcagaataaagaagcgctgcaggacgtggaagacgaaaatcagtgagacataagccaacaagagaaaccatctctgaccaccccctcctccccatcccaccctttggaaactccccattgtcactgagaaccaccaaatctgacttttacatttggtctcagaatttaggttcctgccctgttggttttttttttttttttttaaacagttttcaaaagttcttaaaggcaagagtgaatttctgtggattttactggtcccagcttttaggttctttaagacactaacaggactacatagaggctttttcagcattactgtgtcgtctccgtgccagatgtggcaagatcaccattagcaaatggaaattacatttgaaagccattagacttataggtgatgcaagcatctaagagagaggttaatcacactatagaggcataagtggtatcagttttcatttttctaattgtttaaactgtgttttataccagtgtttgcaagtaattgggtgttagcttgagatggttaaaggtggtttggggagggacttcgttgtaatggttttgctgtaaaaaatgtttccaactccgctgaaatgttgctgaaaagcatggtgctggtaacagttcaacaatccgtggctgctcattcttgcctactttactctcccactgaagcaggttagcgttgaaggtggtatggaaaagcctgcatgcctgttcaattcttttgtttcttctccttccccctccccctacctccttcccctcactcctcccctccttcgctcgctcaacctcttttgttcagtatgtgtaacttgaagctaatttgtactactggatatctgactggagccacagatacagaatctgtattgttcttactgaaacacagcatggaattaacattaaacttaaataaaacaaacctaaattaaaaatgccaaatatcgcgcctccatcctttatacttctaaaataaaatctctagtccaaacacactgacagtattatgtttgcctgaatgtgaaacattcctccttttttcttccataaataatttgtttgcttcccaaagatgtatgttttggaaaaaaattgcctgtagtctggttgtgaagaacactgagtcagttgatggtgtgtcttgtcctccagaccaggcagcaacatggtatttattttaatcattaaagtacaacatgagtagtaca

SEQ ID NO: 85406 - DNA, 2064 bp, Homo sapiens
agcggaggtggaggggtgggctggcgtgatgtccgtcttccgctgggagcgagaggctgagagagtcggagacactatccgcttccatccgtcgcgcagaccctgccggagccgctgccgctatggatgatcgagaggatctggtgtaccaggcgaagctggccgagcaggctgagcgatacgacgaaatggtggagtcaatgaagaaagtagcagggatggatgtggagctgacagttgaagaaagaaacctcctatctgttgcatataagaatgtgattggagctagaagagcctcctggagaataatcagcagcattgaacagaaagaagaaaacaagggaggagaagacaagctaaaaatgattcgggaatatcggcaaatggttgagactgagctaaagttaatctgttgtgacattctggatgtactggacaaacacctcattccagcagctaacactggcgagtccaaggttttctattataaaatgaaaggggactaccacaggtatctggcagaatttgccacaggaaacgacaggaaggaggctgcggagaacagcctagtggcttataaagctgctagtgatattgcaatgacagaacttccaccaacgcatcctattcgcttaggtcttgctctcaatttttccgtattctactacgaaattcttaattcccctgaccgtgcctgcaggttggcaaaagcagcttttgatgatgcaattgcagaactggatacgctgagtgaagaaagctataaggactctacacttatcatgcagttgttacgtgataatctgacactatggacttcagacatgcagggtgacggtgaagagcagaataaagaagcgctgcaggacgtggaagacgaaaatcagtgagacataagccaacaagagaaaccatctctgaccaccccctcctccccatcccaccctttggaaactccccattgtcactgagaaccaccaaatctgacttttacatttggtctcagaatttaggttcctgccctgttggttttttttttttttttttaaacagttttcaaaagttcttaaaggcaagagtgaatttctgtggattttactggtcccagcttttaggttctttaagacactaacaggactacatagaggctttttcagcattactgtgtcgtctccgtgccagatgtggcaagatcaccattagcaaatggaaattacatttgaaagccattagacttataggtgatgcaagcatctaagagagaggttaatcacactatagaggcataagtggtatcagttttcatttttctaattgtttaaactgtgttttataccagtgtttgcaagtaattgggtgttagcttgagatggttaaaggtggtttggggagggacttcgttgtaatggttttgctgtaaaaaatgtttccaactccgctgaaatgttgctgaaaagcatggtgctggtaacagttcaacaatccgtggctgctcattcttgcctactttactctcccactgaagcaggttagcgttgaaggtggtatggaaaagcctgcatgcctgttcaattcttttgtttcttctccttccccctccccctacctccttcccctcactcctcccctccttcgctcgctcaacctcttttgttcagtatgtgtaacttgaagctaatttgtactactggatatctgactggagccacagatacagaatctgtattgttcttactgaaacacagcatggaattaacattaaacttaaataaaacaaacctaaattaaaaatgccaaatatcgcgcctccatcctttatacttctaaaataaaatctctagtccaaacacactgacagtattatgtttgcctgaatgtgaaacattcctccttttttcttccataaataatttgtttgcttcccaaagatgtatgttttggaaaaaaattgcctgtagtctggttgtgaagaacactgagtcagttgatggtgtgtcttgtcctccagaccaggcagcaacatggtatttattttaatcattaaagtacaacatgagtagtaca

SEQ ID NO: 85407 - DNA, 2481 bp, Homo sapiens
  misc_feature (1990)..(1990): n is a, c, g, or t
  misc_feature (2252)..(2252): n is a, c, g, or t
tatgcgaaacgagataatggtggaccagtgaataacgtagcaggatgatgtggagctgacagttgaagaaagaaacctcctatctgttgcatatagaatgtgattggagctagaagagcctcctggagaataatcagcagcattgaatagaaagaagaaaacaaggatcgacaagacatcgctctgcatgcttcgggactttcgcgtcagctgtgcgtgatagaggcgccgccatttttgctgcccggacgcggagcgagaggctgagagagtcggagacactatccgcttccatccgtcgcgcagaccctgccggagccgctgccgctatggatgatcgagaggatctggtgtaccaggcgaagctggccgagcaggctgagcgatacgacgaaatggtggagtcaatgaagaaagtagcagggatggatgtggagctgacagttgaagaaagaaacctcctatctgttgcatataagaatgtgattggagctagaagagcctcctggagaataatcagcagcattgaacagaaagaagaaaacaagggaggagaagacaagctaaaaatgattcgggaatatcggcaaatggttgagactgagctaaagttaatctgttgtgacattctggatgtactggacaaacacctcattccagcagctaacactggcgagtccaaggttttctattataaaatgaaaggggactaccacaggtatctggcagaatttgccacaggaaacgacaggaaggaggctgcggagaacagcctagtggcttataaagctgctagtgatattgcaatgacagaacttccaccaacgcatcctattcgcttaggtcttgctctcaatttttccgtattctactacgaaattcttaattcccctgaccgtgcctgcaggttggcaaaagcagcttttgatgatgcaattgcagaactggatacgctgagtgaagaaagctataaggactctacacttatcatgcagttgttacgtgataatctgacactatggacttcagacatgcagggtgacggtgaagagcagaataaagaagcgctgcaggacgtggaagacgaaaatcagtgagacataagccaacaagagaaaccatctctgaccaccccctcctccccatcccaccctttggaaactccccattgtcactgagaaccaccaaatctgacttttacatttggtctcagaatttaggttcctgccctgttggttttttttttttttttttaaacagttttcaaaagttcttaaaggcaagagtgaatttctgtggattttactggtcccagcttttaggttctttaagacactaacaggactacatagaggctttttcagcattactgtgtcgtctccgtgccagatgtggcaagatcaccattagcaaatggaaattacatttgaaagccattagacttataggtgatgcaagcatctaagagagaggttaatcacactatagaggcataagtggtatcagttttcatttttctaattgtttaaactgtgttttataccagtgtttgcaagtaattgggtgttagcttgagatggttaaaggtggtttggggagggacttcgttgtaatggttttgctgtaaaaaatgtttccaactccgctgaaatgttgctgaaaagcatggtgctggtaacagttcaacaatccgtggctgctcattcttgcctactttactctcccactgaagcaggttagcgttgaaggtggtatggaaaagcctgcatgcctgttcaattcttttgtttcttctccttccccctccccctacctccttcccctcactcctcccctccttcgctcgctcaacctcttttgttcagtatgtgtaacttgaagctaatttgtactactggatatctgactggagccacagatacagaatctgtattgttcttactgaaacacagcatggaattaacattaaacttaaataaaacaaacaaanaaaaaaacaaaaaacaaaaaaaaaatattttgggccgcaccgcgccctgggaagagttttaaacaccattgttttggggccgcgggccccaaaggtaaggtgacacatgtggacataaatgtgtacctaaagaagaacccgggccactacaaaacggtcgtaggcgatcatatccacaaataaaaaaacagggcgggggggagaaaccggcaggtttttgcaaacaactcaccaagtgggggtctcaggaagggcacaaccncggcagtcacacagacaggagattccaaaggagcgtaggaaattaaaaattaccccgacggctcgtgggaagagagaaccagacgaagcaaaaacgaagcacaaccaagcaaacaacaagacgaagcaaagaagagagaagcaaccagagtctagcagccgagaccaaccaagagcaaaaagagaaataaaccagacacagaaaatcacagaacgtatcgtcggtggag

SEQ ID NO: 85408 - DNA, 2030 bp, Homo sapiens
tatgcgaaacgagataatggtggaccagtgaataacgtagcaggatgatgtggagctgacagttgaagaaagaaacctcctatctgttgcatatagaatgtgattggagctagaagagcctcctggagaataatcagcagcattgaatagaaagaagaaaacaaggatcgacaagacatcgctctgcatgcttcgggactttcgcgtcagctgtgcgtgatagaggcgccgccatttttgctgcccggacgcggagcgagaggctgagagagtcggagacactatccgcttccatccgtcgcgcagaccctgccggagccgctgccgctatggatgatcgagaggatctggtgtaccaggcgaagctggccgagcaggctgagcgatacgacgaaatggtggagtcaatgaagaaagtagcagggatggatgtggagctgacagttgaagaaagaaacctcctatctgttgcatataagaatgtgattggagctagaagagcctcctggagaataatcagcagcattgaacagaaagaagaaaacaagggaggagaagacaagctaaaaatgattcgggaatatcggcaaatggttgagactgagctaaagttaatctgttgtgacattctggatgtactggacaaacacctcattccagcagctaacactggcgagtccaaggttttctattataaaatgaaaggggactaccacaggtatctggcagaatttgccacaggaaacgacaggaaggaggctgcggagaacagcctagtggcttataaagctgctagtgatattgcaatgacagaacttccaccaacgcatcctattcgcttaggtcttgctctcaatttttccgtattctactacgaaattcttaattcccctgaccgtgcctgcaggttggcaaaagcagcttttgatgatgcaattgcagaactggatacgctgagtgaagaaagctataaggactctacacttatcatgcagttgttacgtgataatctgacactatggacttcagacatgcagggtgacggtgaagagcagaataaagaagcgctgcaggacgtggaagacgaaaatcagtgagacataagccaacaagagaaaccatctctgaccaccccctcctccccatcccaccctttggaaactccccattgtcactgagaaccaccaaatctgacttttacatttggtctcagaatttaggttcctgccctgttggttttttttttttttttttaaacagttttcaaaagttcttaaaggcaagagtgaatttctgtggattttactggtcccagcttttaggttctttaagacactaacaggactacatagaggctttttcagcattactgtgtcgtctccgtgccagatgtggcaagatcaccattagcaaatggaaattacatttgaaagccattagacttataggtgatgcaagcatctaagagagaggttaatcacactatagaggcataagtggtatcagttttcatttttctaattgtttaaactgtgttttataccagtgtttgcaagtaattgggtgttagcttgagatggttaaaggtggtttggggagggacttcgttgtaatggttttgctgtaaaaaatgtttccaactccgctgaaatgttgctgaaaagcatggtgctggtaacagttcaacaatccgtggctgctcattcttgcctactttactctcccactgaagcaggttagcgttgaaggtggtatggaaaagcctgcatgcctgttcaattcttttgtttcttctccttccccctccccctacctccttcccctcactcctcccctccttcgctcgctcaacctcttttgttcagtatgtgtaacttgaagctaatttgtactactggatatctgactggagccacagatacagaatctgtattgttcttactgaaacacaggtggggagcacacaggtggggatgagcacacaggagcacacaggtggggatgagcacacaggtggggatgagcacaca

SEQ ID NO: 85409 - DNA, 1858 bp, Homo sapiens
tatgcgaaacgagataatggtggaccagtgaataacgtagcaggatgatgtggagctgacagttgaagaaagaaacctcctatctgttgcatatagaatgtgattggagctagaagagcctcctggagaataatcagcagcattgaatagaaagaagaaaacaaggatcgacaagacatcgctctgcatgcttcgggactttcgcgtcagctgtgcgtgatagaggcgccgccatttttgctgcccggacgcggagcgagaggctgagagagtcggagacactatccgcttccatccgtcgcgcagaccctgccggagccgctgccgctatggatgatcgagaggatctggtgtaccaggcgaagctggccgagcaggctgagcgatacgacgaaatggtggagtcaatgaagaaagtagcagggatggatgtggagctgacagttgaagaaagaaacctcctatctgttgcatataagaatgtgattggagctagaagagcctcctggagaataatcagcagcattgaacagaaagaagaaaacaagggaggagaagacaagctaaaaatgattcgggaatatcggcaaatggttgagactgagctaaagttaatctgttgtgacattctggatgtactggacaaacacctcattccagcagctaacactggcgagtccaaggttttctattataaaatgaaaggggactaccacaggtatctggcagaatttgccacaggaaacgacaggaaggaggctgcggagaacagcctagtggcttataaagctgctagtgatattgcaatgacagaacttccaccaacgcatcctattcgcttaggtcttgctctcaatttttccgtattctactacgaaattcttaattcccctgaccgtgcctgcaggttggcaaaagcagcttttgatgatgcaattgcagaactggatacgctgagtgaagaaagctataaggactctacacttatcatgcagttgttacgtgataatctgacactatggacttcagacatgcagggtgacggtgaagagcagaataaagaagcgctgcaggacgtggaagacgaaaatcagtgagacataagccaacaagagaaaccatctctgaccaccccctcctccccatcccaccctttggaaactccccattgtcactgagaaccaccaaatctgacttttacatttggtctcagaatttaggttcctgccctgttggttttttttttttttttttaaacagttttcaaaagttcttaaaggcaagagtgaatttctgtggattttactggtcccagcttttaggttctttaagacactaacaggactacatagaggctttttcagcattactgtgtcgtctccgtgccagatgtggcaagatcaccattagcaaatggaaattacatttgaaagccattagacttataggtgatgcaagcatctaagagagaggttaatcacactatagaggcataagtggtatcagttttcatttttctaattgtttaaactgtgttttataccagtgtttgcaagtaattgggtgttagcttgagatggttaaaggtggtttggggagggacttcgttgtaatggttttgctgtaaaaaatgtttccaactccgctgaaatgttgctgaaaagcatggtgctggtaacagttcaacaatccgtggctgctcattcttgcctactttactctcccactgaagcaggttagcgttgaaggtggtatggaaaagcctgcatgcctgttcaattcttttgtttcttctccttccccctccccctacctccttcccctagcactccagcgtgctgaaacagggatcctcaga

SEQ ID NO: 85410 - DNA, 2314 bp, Homo sapiens
tatgcgaaacgagataatggtggaccagtgaataacgtagcaggatgatgtggagctgacagttgaagaaagaaacctcctatctgttgcatatagaatgtgattggagctagaagagcctcctggagaataatcagcagcattgaatagaaagaagaaaacaaggatcgacaagacatcgctctgcatgcttcgggactttcgcgtcagctgtgcgtgatagaggcgccgccatttttgctgcccggacgcggagcgagaggctgagagagtcggagacactatccgcttccatccgtcgcgcagaccctgccggagccgctgccgctatggatgatcgagaggatctggtgtaccaggcgaagctggccgagcaggctgagcgatacgacgaaatggtggagtcaatgaagaaagtagcagggatggatgtggagctgacagttgaagaaagaaacctcctatctgttgcatataagaatgtgattggagctagaagagcctcctggagaataatcagcagcattgaacagaaagaagaaaacaagggaggagaagacaagctaaaaatgattcgggaatatcggcaaatggttgagactgagctaaagttaatctgttgtgacattctggatgtactggacaaacacctcattccagcagctaacactggcgagtccaaggttttctattataaaatgaaaggggactaccacaggtatctggcagaatttgccacaggaaacgacaggaaggaggctgcggagaacagcctagtggcttataaagctgctagtgatattgcaatgacagaacttccaccaacgcatcctattcgcttaggtcttgctctcaatttttccgtattctactacgaaattcttaattcccctgaccgtgcctgcaggttggcaaaagcagcttttgatgatgcaattgcagaactggatacgctgagtgaagaaagctataaggactctacacttatcatgcagttgttacgtgataatctgacactatggacttcagacatgcagggtgacgattcctaaaggaaaacccaactcttcctttcctaaaaactctagtgaagagcagaataaagaagcgctgcaggacgtggaagacgaaaatcagtgagacataagccaacaagagaaaccatctctgaccaccccctcctccccatcccaccctttggaaactccccattgtcactgagaaccaccaaatctgacttttacatttggtctcagaatttaggttcctgccctgttggttttttttttttttttttaaacagttttcaaaagttcttaaaggcaagagtgaatttctgtggattttactggtcccagcttttaggttctttaagacactaacaggactacatagaggctttttcagcattactgtgtcgtctccgtgccagatgtggcaagatcaccattagcaaatggaaattacatttgaaagccattagacttataggtgatgcaagcatctaagagagaggttaatcacactatagaggcataagtggtatcagttttcatttttctaattgtttaaactgtgttttataccagtgtttgcaagtaattgggtgttagcttgagatggttaaaggtggtttggggagggacttcgttgtaatggttttgctgtaaaaaatgtttccaactccgctgaaatgttgctgaaaagcatggtgctggtaacagttcaacaatccgtggctgctcattcttgcctactttactctcccactgaagcaggttagcgttgaaggtggtatggaaaagcctgcatgcctgttcaattcttttgtttcttctccttccccctccccctacctccttcccctcactcctcccctccttcgctcgctcaacctcttttgttcagtatgtgtaacttgaagctaatttgtactactggatatctgactggagccacagatacagaatctgtattgttcttactgaaacacagcatggaattaacattaaacttaaataaaacaaacctaaattaaaaatgccaaatatcgcgcctccatcctttatacttctaaaataaaatctctagtccaaacacactgacagtattatgtttgcctgaatgtgaaacattcctccttttttcttccataaataatttgtttgcttcccaaagatgtatgttttggaaaaaaattgcctgtagtctggttgtgaagaacactgagtcagttgatggtgtgtcttgtcctccagaccaggcagcaacatggtatttattttaatcattaaagtacaacatgagtagtaca

SEQ ID NO: 85411 - DNA, 2173 bp, Homo sapiens
tatgcgaaacgagataatggtggaccagtgaataacgtagcaggatgatgtggagctgacagttgaagaaagaaacctcctatctgttgcatatagaatgtgattggagctagaagagcctcctggagaataatcagcagcattgaatagaaagaagaaaacaaggatcgacaagacatcgctctgcatgcttcgggactttcgcgtcagctgtgcgtgatagaggcgccgccatttttgctgcccggacgcggagcgagaggctgagagagtcggagacactatccgcttccatccgtcgcgcagaccctgccggagccgctgccgctatggatgatcgagaggatctggtgtaccaggcgaagctggccgagcaggctgagcgatacgacgaaatggtggagtcaatgaagaaagtagcagggatggatgtggagctgacagttgaagaaagaaacctcctatctgttgcatataagaatgtgattggagctagaagagcctcctggagaataatcagcagcattgaacagaaagaagaaaacaagggaggagaagacaagctaaaaatgattcgggaatatcggcaaatggttgagactgagctaaagttaatctgttgtgacattctggatgtactggacaaacacctcattccagcagctaacactggcgagtccaaggttttctattataaaatgaaaggggactaccacaggtatctggcagaatttgccacaggaaacgacaggaaggaggctgcggagaacagcctagtggcttataaagctgctagtgatattgcaatgacagaacttccaccaacgcatcctattcgcttaggtcttgctctcaatttttccgtattctactacgaaattcttaattcccctgaccgtgcctgcaggttggcaaaagcagcttttgatgatgcaattgcagaactggatacgctgagtgaagaaagctataaggactctacacttatcatgcagttgttacgtgataatctgacactatggacttcagacatgcagggtgacggtgaagagcagaataaagaagcgctgcaggacgtggaagacgaaaatcagtgagacataagccaacaagagaaaccatctctgaccaccccctcctccccatcccaccctttggaaactccccattgtcactgagaaccaccaaatctgacttttacatttggtctcagaatttaggttcctgccctgttggttttttttttttttttttaaacagttttcaaaagttcttaaaggcaagagtgaatttctgtggattttactggtcccagcttttaggttctttaagacactaacaggactacatagaggctttttcagcattactgtgtcgtctccgtgccagatgtggcaagatcaccattagcaaatggaaattacatttgaaagccattagacttataggtgatgcaagcatctaagagagaggttaatcacactatagaggcataagtggtatcagttttcatttttctaattgtttaaactgtgttttataccagtgtttgcaagtaattgggtgttagcttgagatggttaaaggtggtttggggagggacttcgttgtaatggttttgctgtaaaaaatgtttccaactccgctgaaatgttgctgaaaagcatggtgctggtaacagttcaacaatccgtggctgctcattcttgcctactttactctcccacactcctcccctccttcgctcgctcaacctcttttgttcagtatgtgtaacttgaagctaatttgtactactggatatctgactggagccacagatacagaatctgtattgttcttactgaaacacagcatggaattaacattaaacttaaataaaacaaacctaaattaaaaatgccaaatatcgcgcctccatcctttatacttctaaaataaaatctctagtccaaacacactgacagtattatgtttgcctgaatgtgaaacattcctccttttttcttccataaataatttgtttgcttcccaaagatgtatgttttggaaaaaaattgcctgtagtctggttgtgaagaacactgagtcagttgatggtgtgtcttgtcctccagaccaggcagcaacatggtatttattttaatcattaaagtacaacatgagtagtaca

SEQ ID NO: 85412 - DNA, 1888 bp, Homo sapiens
tatgcgaaacgagataatggtggaccagtgaataacgtagcaggatgatgtggagctgacagttgaagaaagaaacctcctatctgttgcatatagaatgtgattggagctagaagagcctcctggagaataatcagcagcattgaatagaaagaagaaaacaaggatcgacaagacatcgctctgcatgcttcgggactttcgcgtcagctgtgcgtgatagaggcgccgccatttttgctgcccggacgcggagcgagaggctgagagagtcggagacactatccgcttccatccgtcgcgcagaccctgccggagccgctgccgctatggatgatcgagaggatctggtgtaccaggcgaagctggccgagcaggctgagcgatacgacgaaatggtggagtcaatgaagaaagtagcagggatggatgtggagctgacagttgaagaaagaaacctcctatctgttgcatataagaatgtgattggagctagaagagcctcctggagaataatcagcagcattgaacagaaagaagaaaacaagggaggagaagacaagctaaaaatgattcgggaatatcggcaaatggttgagactgagctaaagttaatctgttgtgacattctggatgtactggacaaacacctcattccagcagctaacactggcgagtccaaggttttctattataaaatgaaaggggactaccacaggtatctggcagaatttgccacaggaaacgacaggaaggaggctgcggagaacagcctagtggcttataaagctgctagtgatattgcaatgacagaacttccaccaacgcatcctattcgcttaggtcttgctctcaatttttccgtattctactacgaaattcttaattcccctgaccgtgcctgcaggttggcaaaagcagcttttgatgatgcaattgcagaactggatacgctgagtgaagaaagctataaggactctacacttatcatgcagttgttacgtgataatctgacactatggacttcagacatgcagggtgacggtgaagagcagaataaagaagcgctgcaggacgtggaagacgaaaatcagtgagacataagccaacaagagaaaccatctctgaccaccccctcctccccatcccaccctttggaaactccccattgtcactgagaaccaccaaatctgacttttacatttggtctcagaatttaggttcctgccctgttggttttttttttttttttttaaacagttttcaaaagttcttaaaggcaagagtgaatttctgtggattttactggtcccagcttttaggttctttaagacactaacaggactacatagaggctttttcagcattactgtgtcgtctccgtgccagatgtggcaagatcaccattagcaaatggaaattacatttgaaagccattagacttataggtgatgcaagcatctaagagagaggttaatcacactatagaggcataagtggtatcagttttcatttttctaattgtttaaactgtgttttataccagtgtttgcaagtaattgggtgttagcttgagatggttaaaggtggtttggggagggacttcgttgtaatggttttgctgtaaaaaatgtttccaactccgctgaaatgttgctgaaaagcatggtgctggtaacagttcaacaatccgtggctgctcattcttgcctactttactctcccacactcctcccctccttcgctcgctcaacctcttttgttcagtatgtgtaacttgaagctaatttgtactactggatatctgactggagccacagatacagaatctgtattgttcttactgaaacacagcatggaattaacattaaacttaaataaaacaaac

SEQ ID NO: 85413 - DNA, 1754 bp, Homo sapiens
tatgcgaaacgagataatggtggaccagtgaataacgtagcaggatgatgtggagctgacagttgaagaaagaaacctcctatctgttgcatatagaatgtgattggagctagaagagcctcctggagaataatcagcagcattgaatagaaagaagaaaacaaggatcgacaagacatcgctctgcatgcttcgggactttcgcgtcagctgtgcgtgatagaggcgccgccatttttgctgcccggacgcggagcgagaggctgagagagtcggagacactatccgcttccatccgtcgcgcagaccctgccggagccgctgccgctatggatgatcgagaggatctggtgtaccaggcgaagctggccgagcaggctgagcgatacgacgaaatggtggagtcaatgaagaaagtagcagggatggatgtggagctgacagttgaagaaagaaacctcctatctgttgcatataagaatgtgattggagctagaagagcctcctggagaataatcagcagcattgaacagaaagaagaaaacaagggaggagaagacaagctaaaaatgattcgggaatatcggcaaatggttgagactgagctaaagttaatctgttgtgacattctggatgtactggacaaacacctcattccagcagctaacactggcgagtccaaggttttctattataaaatgaaaggggactaccacaggtatctggcagaatttgccacaggaaacgacaggaaggaggctgcggagaacagcctagtggcttataaagctgctagtgatattgcaatgacagaacttccaccaacgcatcctattcgcttaggtcttgctctcaatttttccgtattctactacgaaattcttaattcccctgaccgtgcctgcaggttggcaaaagcagcttttgatgatgcaattgcagaactggatacgctgagtgaagaaagctataaggactctacacttatcatgcagttgttacgtgataatctgacactatggacttcagacatgcagggtgacggtgaagagcagaataaagaagcgctgcaggacgtggaagacgaaaatcagtgagacataagccaacaagagaaaccatctctgaccaccccctcctccccatcccaccctttggaaactccccattgtcactgagaaccaccaaatctgacttttacatttggtctcagaatttaggttcctgccctgttggttttttttttttttttttaaacagttttcaaaagttcttaaaggcaagagtgaatttctgtggattttactggtcccagcttttaggttctttaagacactaacaggactacatagaggctttttcagcattactgtgtcgtctccgtgccagatgtggcaagatcaccattagcaaatggaaattacatttgaaagccattagacttataggtgatgcaagcatctaagagagaggttaatcacactatagaggcataagtggtatcagttttcatttttctaattgtttaaactgtgttttataccagtgtttgcaagtaattgggtgttagcttgagatggttaaaggtggtttggggagggacttcgttgtaatggttttgctgtaaaaaatgtttccaactccgctgaaatgttgctgaaaagcatggtgctggtaacagttcaacaatccgtggctgctcattcttgcctactttactctcccatgtcaacgtggggatactctagaggcga

SEQ ID NO: 85414 - DNA, 1995 bp, Homo sapiens
taccattcgagctcgcacccaagcttaatagacctgccggagccgctgccgctatggatgatcgagaggatctggtgtaccaggcgaagctggccgagcaggctgagcgatacgacgaaatggtggagtcaatgaagaaagtagcagggatggatgtggagctgacagttgaagaaagaaacctcctatctgttgcatataagaatgtgattggagctagaagagcctcctggagaataatcagcagcattgaacagaaagaagaaaacaagggaggagaagacaagctaaaaatgattcgggaatatcggcaaatggttgagactgagctaaagttaatctgttgtgacattctggatgtactggacaaacacctcattccagcagctaacactggcgagtccaaggttttctattataaaatgaaaggggactaccacaggtatctggcagaatttgccacaggaaacgacaggaaggaggctgcggagaacagcctagtggcttataaagctgctagtgatattgcaatgacagaacttccaccaacgcatcctattcgcttaggtcttgctctcaatttttccgtattctactacgaaattcttaattcccctgaccgtgcctgcaggttggcaaaagcagcttttgatgatgcaattgcagaactggatacgctgagtgaagaaagctataaggactctacacttatcatgcagttgttacgtgataatctgacactatggacttcagacatgcagggtgacggtgaagagcagaataaagaagcgctgcaggacgtggaagacgaaaatcagtgagacataagccaacaagagaaaccatctctgaccaccccctcctccccatcccaccctttggaaactccccattgtcactgagaaccaccaaatctgacttttacatttggtctcagaatttaggttcctgccctgttggttttttttttttttttttaaacagttttcaaaagttcttaaaggcaagagtgaatttctgtggattttactggtcccagcttttaggttctttaagacactaacaggactacatagaggctttttcagcattactgtgtcgtctccgtgccagatgtggcaagatcaccattagcaaatggaaattacatttgaaagccattagacttataggtgatgcaagcatctaagagagaggttaatcacactatagaggcataagtggtatcagttttcatttttctaattgtttaaactgtgttttataccagtgtttgcaagtaattgggtgttagcttgagatggttaaaggtggtttggggagggacttcgttgtaatggttttgctgtaaaaaatgtttccaactccgctgaaatgttgctgaaaagcatggtgctggtaacagttcaacaatccgtggctgctcattcttgcctactttactctcccactgaagcaggttagcgttgaaggtggtatggaaaagcctgcatgcctgttcaattcttttgtttcttctccttccccctccccctacctccttcccctcactcctcccctccttcgctcgctcaacctcttttgttcagtatgtgtaacttgaagctaatttgtactactggatatctgactggagccacagatacagaatctgtattgttcttactgaaacacagcatggaattaacattaaacttaaataaaacaaacctaaattaaaaatgccaaatatcgcgcctccatcctttatacttctaaaataaaatctctagtccaaacacactgacagtattatgtttgcctgaatgtgaaacattcctccttttttcttccataaataatttgtttgcttcccaaagatgtatgttttggaaaaaaattgcctgtagtctggttgtgaagaacactgagtcagttgatggtgtgtcttgtcctccagaccaggcagcaacatggtatttattttaatcattaaagtacaacatgagtagtaca

SEQ ID NO: 85415 - DNA, 2302 bp, Homo sapiens
tatgcgaaacgagataatggtggaccagtgaataacgtagcaggatgatgtggagctgacagttgaagaaagaaacctcctatctgttgcatatagaatgtgattggagctagaagagcctcctggagaataatcagcagcattgaatagaaagaagaaaacaaggatcgacaagacatcgctctgcatgcttcgggactttcgcgtcagctgtgcgtgatagaggcgccgccatttttgctgcccggacgcggagcgagaggctgagagagtcggagacactatccgcttccatccgtcgcgcagaccctgccggagccgctgccgctatggatgatcgagaggatctggtgtaccaggcgaagctggccgagcaggctgagcgatacgacgtgctctggaactgaacccgcagtatcttccaaaatggtggagtcaatgaagaaagtagcagggatggatgtggagctgacagttgaagaaagaaacctcctatctgttgcatataagaatgtgattggagctagaagagcctcctggagaataatcagcagcattgaacagaaagaagaaaacaagggaggagaagacaagctaaaaatgattcgggaatatcggcaaatggttgagactgagctaaagttaatctgttgtgacattctggatgtactggacaaacacctcattccagcagctaacactggcgagtccaaggttttctattataaaatgaaaggggactaccacaggtatctggcagaatttgccacaggaaacgacaggaaggaggctgcggagaacagcctagtggcttataaagctgctagtgatattgcaatgacagaacttccaccaacgcatcctattcgcttaggtcttgctctcaatttttccgtattctactacgaaattcttaattcccctgaccgtgcctgcaggttggcaaaagcagcttttgatgatgcaattgcagaactggatacgctgagtgaagaaagctataaggactctacacttatcatgcagttgttacgtgataatctgacactatggacttcagacatgcagggtgacggtgaagagcagaataaagaagcgctgcaggacgtggaagacgaaaatcagtgagacataagccaacaagagaaaccatctctgaccaccccctcctccccatcccaccctttggaaactccccattgtcactgagaaccaccaaatctgacttttacatttggtctcagaatttaggttcctgccctgttggttttttttttttttttttaaacagttttcaaaagttcttaaaggcaagagtgaatttctgtggattttactggtcccagcttttaggttctttaagacactaacaggactacatagaggctttttcagcattactgtgtcgtctccgtgccagatgtggcaagatcaccattagcaaatggaaattacatttgaaagccattagacttataggtgatgcaagcatctaagagagaggttaatcacactatagaggcataagtggtatcagttttcatttttctaattgtttaaactgtgttttataccagtgtttgcaagtaattgggtgttagcttgagatggttaaaggtggtttggggagggacttcgttgtaatggttttgctgtaaaaaatgtttccaactccgctgaaatgttgctgaaaagcatggtgctggtaacagttcaacaatccgtggctgctcattcttgcctactttactctcccactgaagcaggttagcgttgaaggtggtatggaaaagcctgcatgcctgttcaattcttttgtttcttctccttccccctccccctacctccttcccctcactcctcccctccttcgctcgctcaacctcttttgttcagtatgtgtaacttgaagctaatttgtactactggatatctgactggagccacagatacagaatctgtattgttcttactgaaacacagcatggaattaacattaaacttaaataaaacaaacctaaattaaaaatgccaaatatcgcgcctccatcctttatacttctaaaataaaatctctagtccaaacacactgacagtattatgtttgcctgaatgtgaaacattcctccttttttcttccataaataatttgtttgcttcccaaagatgtatgttttggaaaaaaattgcctgtagtctggttgtgaagaacactgagtcagttgatggtgtgtcttgtcctccagaccaggcagcaacatggtatttattttaatcattaaagtacaacatgagtagtaca

SEQ ID NO: 85416 - DNA, 1529 bp, Homo sapiens
tatgcgaaacgagataatggtggaccagtgaataacgtagcaggatgatgtggagctgacagttgaagaaagaaacctcctatctgttgcatatagaatgtgattggagctagaagagcctcctggagaataatcagcagcattgaatagaaagaagaaaacaaggatcgacaagacatcgctctgcatgcttcgggactttcgcgtcagctgtgcgtgatagaggcgccgccatttttgctgcccggacgcggagcgagaggctgagagagtcggagacactatccgcttccatccgtcgcgcagaccctgccggagccgctgccgctatggatgatcgagaggatctggtgtaccaggcgaagctggccgagcaggctgagcgatacgacgaaatggtggagtcaatgaagaaagtagcagggatggatgtggagctgacagttgaagaaagaaacctcctatctgttgcatataagaatgtgattggagctagaagagcctcctggagaataatcagcagcattgaacagaaagaagaaaacaagggaggagaagacaagctaaaaatgattcgggaatatcggcaaatggttgagactgagctaaagttaatctgttgtgacattctggatgtactggacaaacacctcattccagcagctaacactggcgagtccaaggttttctattataaaatgaaaggggactaccacaggtatctggcagaatttgccacaggaaacgacaggaaggaggctgcggagaacagcctagtggcttataaagctgctagtgatattgcaatgacagaacttccaccaacgcatcctattcgcttaggtcttgctctcaatttttccgtattctactacgaaattcttaattcccctgaccgtgcctgcaggttggcaaaagcagcttttgatgatgcaattgcagaactggatacgctgagtgaagaaagctataaggactctacacttatcatgcagttgttacgtgataatctgacactatggacttcagacatgcagggtgacggtgaagagcagaataaagaagcgctgcaggacgtggaagacgaaaatcagtgagacataagccaacaagagaaaccatctctgaccaccccctcctccccatcccaccctttggaaactccccattgtcactgagaaccaccaaatctgacttttacatttggtctcagaatttaggttcctgccctgttggttttttttttttttttttaaacagttttcaaaagttcttaaaggcaagagtgaatttctgtggattttactggtcccagcttttaggttctttaagacactaacaggactacatagaggctttttcagcattactgtgtcgtctccgtgccagatgtggcaagatcaccattagcaaatggaaattacatttgaaagccattagacttataggtgatgcaagcatctaagagagaggttaatcacactatagaggcataagtggtatcagcctctacctgcacgacaacacat

SEQ ID NO: 85417 - DNA, 1876 bp, Homo sapiens
ggccgcccgtggcaggtatcttccacagggatggatgtggagctgacagttgaagaaagaaacctcctatctgttgcatataagaatgtgattggagctagaagagcctcctggagaataatcagcagcattgaacagaaagaagaaaacaagggaggagaagacaagctaaaaatgattcgggaatatcggcaaatggttgagactgagctaaagttaatctgttgtgacattctggatgtactggacaaacacctcattccagcagctaacactggcgagtccaaggttttctattataaaatgaaaggggactaccacaggtatctggcagaatttgccacaggaaacgacaggaaggaggctgcggagaacagcctagtggcttataaagctgctagtgatattgcaatgacagaacttccaccaacgcatcctattcgcttaggtcttgctctcaatttttccgtattctactacgaaattcttaattcccctgaccgtgcctgcaggttggcaaaagcagcttttgatgatgcaattgcagaactggatacgctgagtgaagaaagctataaggactctacacttatcatgcagttgttacgtgataatctgacactatggacttcagacatgcagggtgacggtgaagagcagaataaagaagcgctgcaggacgtggaagacgaaaatcagtgagacataagccaacaagagaaaccatctctgaccaccccctcctccccatcccaccctttggaaactccccattgtcactgagaaccaccaaatctgacttttacatttggtctcagaatttaggttcctgccctgttggttttttttttttttttttaaacagttttcaaaagttcttaaaggcaagagtgaatttctgtggattttactggtcccagcttttaggttctttaagacactaacaggactacatagaggctttttcagcattactgtgtcgtctccgtgccagatgtggcaagatcaccattagcaaatggaaattacatttgaaagccattagacttataggtgatgcaagcatctaagagagaggttaatcacactatagaggcataagtggtatcagttttcatttttctaattgtttaaactgtgttttataccagtgtttgcaagtaattgggtgttagcttgagatggttaaaggtggtttggggagggacttcgttgtaatggttttgctgtaaaaaatgtttccaactccgctgaaatgttgctgaaaagcatggtgctggtaacagttcaacaatccgtggctgctcattcttgcctactttactctcccactgaagcaggttagcgttgaaggtggtatggaaaagcctgcatgcctgttcaattcttttgtttcttctccttccccctccccctacctccttcccctcactcctcccctccttcgctcgctcaacctcttttgttcagtatgtgtaacttgaagctaatttgtactactggatatctgactggagccacagatacagaatctgtattgttcttactgaaacacagcatggaattaacattaaacttaaataaaacaaacctaaattaaaaatgccaaatatcgcgcctccatcctttatacttctaaaataaaatctctagtccaaacacactgacagtattatgtttgcctgaatgtgaaacattcctccttttttcttccataaataatttgtttgcttcccaaagatgtatgttttggaaaaaaattgcctgtagtctggttgtgaagaacactgagtcagttgatggtgtgtcttgtcctccagaccaggcagcaacatggtatttattttaatcattaaagtacaacatgagtagtaca

SEQ ID NO: 85418 - DNA, 2243 bp, Homo sapiens
tatgcgaaacgagataatggtggaccagtgaataacgtagcaggatgatgtggagctgacagttgaagaaagaaacctcctatctgttgcatatagaatgtgattggagctagaagagcctcctggagaataatcagcagcattgaatagaaagaagaaaacaaggatcgacaagacatcgctctgcatgcttcgggactttcgcgtcagctgtgcgtgatagaggcgccgccatttttgctgcccggacgcggagcgagaggctgagagagtcggagacactatccgcttccatccgtcgcgcagaccctgccggagccgctgccgctatggatgatcgagaggatctggtgtaccaggcgaagctggccgagcaggctgagcgatacgacgaaatggtggagtcaatgaagaaagtagcagggatggatgtggagctgacagttgaagaaagaaacctcctatctgttgcatataagaatgtgattggagctagaagagcctcctggagaataatcagcagcattgaacagaaagaagaaaacaagggaggagaagacaagctaaaaatgattcgggaatatcggcaaatggttgagactgagctaaagttaatctgttgtgacattctggatgtactggacaaacacctcattccagcagctaacactggaaaggggactaccacaggtatctggcagaatttgccacaggaaacgacaggaaggaggctgcggagaacagcctagtggcttataaagctgctagtgatattgcaatgacagaacttccaccaacgcatcctattcgcttaggtcttgctctcaatttttccgtattctactacgaaattcttaattcccctgaccgtgcctgcaggttggcaaaagcagcttttgatgatgcaattgcagaactggatacgctgagtgaagaaagctataaggactctacacttatcatgcagttgttacgtgataatctgacactatggacttcagacatgcagggtgacggtgaagagcagaataaagaagcgctgcaggacgtggaagacgaaaatcagtgagacataagccaacaagagaaaccatctctgaccaccccctcctccccatcccaccctttggaaactccccattgtcactgagaaccaccaaatctgacttttacatttggtctcagaatttaggttcctgccctgttggttttttttttttttttttaaacagttttcaaaagttcttaaaggcaagagtgaatttctgtggattttactggtcccagcttttaggttctttaagacactaacaggactacatagaggctttttcagcattactgtgtcgtctccgtgccagatgtggcaagatcaccattagcaaatggaaattacatttgaaagccattagacttataggtgatgcaagcatctaagagagaggttaatcacactatagaggcataagtggtatcagttttcatttttctaattgtttaaactgtgttttataccagtgtttgcaagtaattgggtgttagcttgagatggttaaaggtggtttggggagggacttcgttgtaatggttttgctgtaaaaaatgtttccaactccgctgaaatgttgctgaaaagcatggtgctggtaacagttcaacaatccgtggctgctcattcttgcctactttactctcccactgaagcaggttagcgttgaaggtggtatggaaaagcctgcatgcctgttcaattcttttgtttcttctccttccccctccccctacctccttcccctcactcctcccctccttcgctcgctcaacctcttttgttcagtatgtgtaacttgaagctaatttgtactactggatatctgactggagccacagatacagaatctgtattgttcttactgaaacacagcatggaattaacattaaacttaaataaaacaaacctaaattaaaaatgccaaatatcgcgcctccatcctttatacttctaaaataaaatctctagtccaaacacactgacagtattatgtttgcctgaatgtgaaacattcctccttttttcttccataaataatttgtttgcttcccaaagatgtatgttttggaaaaaaattgcctgtagtctggttgtgaagaacactgagtcagttgatggtgtgtcttgtcctccagaccaggcagcaacatggtatttattttaatcattaaagtacaacatgagtagtaca

SEQ ID NO: 85419 - DNA, 1806 bp, Homo sapiens
ctggggtaatttcactgctgatgggcaagagtggaatcaagaaaactagttaggaggctactgctgtaattgaagggagagatgacagtgtgcagtctggaatagggtgatttggggatatgctttgagttgagactgagctaaagttaatctgttgtgacattctggatgtactggacaaacacctcattccagcagctaacactggcgagtccaaggttttctattataaaatgaaaggggactaccacaggtatctggcagaatttgccacaggaaacgacaggaaggaggctgcggagaacagcctagtggcttataaagctgctagtgatattgcaatgacagaacttccaccaacgcatcctattcgcttaggtcttgctctcaatttttccgtattctactacgaaattcttaattcccctgaccgtgcctgcaggttggcaaaagcagcttttgatgatgcaattgcagaactggatacgctgagtgaagaaagctataaggactctacacttatcatgcagttgttacgtgataatctgacactatggacttcagacatgcagggtgacggtgaagagcagaataaagaagcgctgcaggacgtggaagacgaaaatcagtgagacataagccaacaagagaaaccatctctgaccaccccctcctccccatcccaccctttggaaactccccattgtcactgagaaccaccaaatctgacttttacatttggtctcagaatttaggttcctgccctgttggttttttttttttttttttaaacagttttcaaaagttcttaaaggcaagagtgaatttctgtggattttactggtcccagcttttaggttctttaagacactaacaggactacatagaggctttttcagcattactgtgtcgtctccgtgccagatgtggcaagatcaccattagcaaatggaaattacatttgaaagccattagacttataggtgatgcaagcatctaagagagaggttaatcacactatagaggcataagtggtatcagttttcatttttctaattgtttaaactgtgttttataccagtgtttgcaagtaattgggtgttagcttgagatggttaaaggtggtttggggagggacttcgttgtaatggttttgctgtaaaaaatgtttccaactccgctgaaatgttgctgaaaagcatggtgctggtaacagttcaacaatccgtggctgctcattcttgcctactttactctcccactgaagcaggttagcgttgaaggtggtatggaaaagcctgcatgcctgttcaattcttttgtttcttctccttccccctccccctacctccttcccctcactcctcccctccttcgctcgctcaacctcttttgttcagtatgtgtaacttgaagctaatttgtactactggatatctgactggagccacagatacagaatctgtattgttcttactgaaacacagcatggaattaacattaaacttaaataaaacaaacctaaattaaaaatgccaaatatcgcgcctccatcctttatacttctaaaataaaatctctagtccaaacacactgacagtattatgtttgcctgaatgtgaaacattcctccttttttcttccataaataatttgtttgcttcccaaagatgtatgttttggaaaaaaattgcctgtagtctggttgtgaagaacactgagtcagttgatggtgtgtcttgtcctccagaccaggcagcaacatggtatttattttaatcattaaagtacaacatgagtagtaca

SEQ ID NO: 85420 - DNA, 2222 bp, Homo sapiens
tatgcgaaacgagataatggtggaccagtgaataacgtagcaggatgatgtggagctgacagttgaagaaagaaacctcctatctgttgcatatagaatgtgattggagctagaagagcctcctggagaataatcagcagcattgaatagaaagaagaaaacaaggatcgacaagacatcgctctgcatgcttcgggactttcgcgtcagctgtgcgtgatagaggcgccgccatttttgctgcccggacgcggagcgagaggctgagagagtcggagacactatccgcttccatccgtcgcgcagaccctgccggagccgctgccgctatggatgatcgagaggatctggtgtaccaggcgaagctggccgagcaggctgagcgatacgacgaaatggtggagtcaatgaagaaagtagcagggatggatgtggagctgacagttgaagaaagaaacctcctatctgttgcatataagaatgtgattggagctagaagagcctcctggagaataatcagcagcattgaacagaaagaagaaaacaagggaggagaagacaagctaaaaatgattcgggaatatcggcaaatggttgagactgagctaaagttaatctgttgtgacattctggatgtactggacaaacacctcattccagcagctaacactggcgagtccaaggttttctattataaaataggaaggaggctgcggagaacagcctagtggcttataaagctgctagtgatattgcaatgacagaacttccaccaacgcatcctattcgcttaggtcttgctctcaatttttccgtattctactacgaaattcttaattcccctgaccgtgcctgcaggttggcaaaagcagcttttgatgatgcaattgcagaactggatacgctgagtgaagaaagctataaggactctacacttatcatgcagttgttacgtgataatctgacactatggacttcagacatgcagggtgacggtgaagagcagaataaagaagcgctgcaggacgtggaagacgaaaatcagtgagacataagccaacaagagaaaccatctctgaccaccccctcctccccatcccaccctttggaaactccccattgtcactgagaaccaccaaatctgacttttacatttggtctcagaatttaggttcctgccctgttggttttttttttttttttttaaacagttttcaaaagttcttaaaggcaagagtgaatttctgtggattttactggtcccagcttttaggttctttaagacactaacaggactacatagaggctttttcagcattactgtgtcgtctccgtgccagatgtggcaagatcaccattagcaaatggaaattacatttgaaagccattagacttataggtgatgcaagcatctaagagagaggttaatcacactatagaggcataagtggtatcagttttcatttttctaattgtttaaactgtgttttataccagtgtttgcaagtaattgggtgttagcttgagatggttaaaggtggtttggggagggacttcgttgtaatggttttgctgtaaaaaatgtttccaactccgctgaaatgttgctgaaaagcatggtgctggtaacagttcaacaatccgtggctgctcattcttgcctactttactctcccactgaagcaggttagcgttgaaggtggtatggaaaagcctgcatgcctgttcaattcttttgtttcttctccttccccctccccctacctccttcccctcactcctcccctccttcgctcgctcaacctcttttgttcagtatgtgtaacttgaagctaatttgtactactggatatctgactggagccacagatacagaatctgtattgttcttactgaaacacagcatggaattaacattaaacttaaataaaacaaacctaaattaaaaatgccaaatatcgcgcctccatcctttatacttctaaaataaaatctctagtccaaacacactgacagtattatgtttgcctgaatgtgaaacattcctccttttttcttccataaataatttgtttgcttcccaaagatgtatgttttggaaaaaaattgcctgtagtctggttgtgaagaacactgagtcagttgatggtgtgtcttgtcctccagaccaggcagcaacatggtatttattttaatcattaaagtacaacatgagtagtaca

SEQ ID NO: 85421 - DNA, 1593 bp, Homo sapiens
tgacgagcttggtatgacgagcgaaaggggactaccacaggtatctggcagaatttgccacaggaaacgacaggaaggaggctgcggagaacagcctagtggcttataaagctgctagtgatattgcaatgacagaacttccaccaacgcatcctattcgcttaggtcttgctctcaatttttccgtattctactacgaaattcttaattcccctgaccgtgcctgcaggttggcaaaagcagcttttgatgatgcaattgcagaactggatacgctgagtgaagaaagctataaggactctacacttatcatgcagttgttacgtgataatctgacactatggacttcagacatgcagggtgacggtgaagagcagaataaagaagcgctgcaggacgtggaagacgaaaatcagtgagacataagccaacaagagaaaccatctctgaccaccccctcctccccatcccaccctttggaaactccccattgtcactgagaaccaccaaatctgacttttacatttggtctcagaatttaggttcctgccctgttggttttttttttttttttttaaacagttttcaaaagttcttaaaggcaagagtgaatttctgtggattttactggtcccagcttttaggttctttaagacactaacaggactacatagaggctttttcagcattactgtgtcgtctccgtgccagatgtggcaagatcaccattagcaaatggaaattacatttgaaagccattagacttataggtgatgcaagcatctaagagagaggttaatcacactatagaggcataagtggtatcagttttcatttttctaattgtttaaactgtgttttataccagtgtttgcaagtaattgggtgttagcttgagatggttaaaggtggtttggggagggacttcgttgtaatggttttgctgtaaaaaatgtttccaactccgctgaaatgttgctgaaaagcatggtgctggtaacagttcaacaatccgtggctgctcattcttgcctactttactctcccactgaagcaggttagcgttgaaggtggtatggaaaagcctgcatgcctgttcaattcttttgtttcttctccttccccctccccctacctccttcccctcactcctcccctccttcgctcgctcaacctcttttgttcagtatgtgtaacttgaagctaatttgtactactggatatctgactggagccacagatacagaatctgtattgttcttactgaaacacagcatggaattaacattaaacttaaataaaacaaacctaaattaaaaatgccaaatatcgcgcctccatcctttatacttctaaaataaaatctctagtccaaacacactgacagtattatgtttgcctgaatgtgaaacattcctccttttttcttccataaataatttgtttgcttcccaaagatgtatgttttggaaaaaaattgcctgtagtctggttgtgaagaacactgagtcagttgatggtgtgtcttgtcctccagaccaggcagcaacatggtatttattttaatcattaaagtacaacatgagtagtaca

SEQ ID NO: 85422 - DNA, 1302 bp, Homo sapiens
tatgcgaaacgagataatggtggaccagtgaataacgtagcaggatgatgtggagctgacagttgaagaaagaaacctcctatctgttgcatatagaatgtgattggagctagaagagcctcctggagaataatcagcagcattgaatagaaagaagaaaacaaggatcgacaagacatcgctctgcatgcttcgggactttcgcgtcagctgtgcgtgatagaggcgccgccatttttgctgcccggacgcggagcgagaggctgagagagtcggagacactatccgcttccatccgtcgcgcagaccctgccggagccgctgccgctatggatgatcgagaggatctggtgtaccaggcgaagctggccgagcaggctgagcgatacgacgaaatggtggagtcaatgaagaaagtagcagggatggatgtggagctgacagttgaagaaagaaacctcctatctgttgcatataagaatgtgattggagctagaagagcctcctggagaataatcagcagcattgaacagaaagaagaaaacaagggaggagaagacaagctaaaaatgattcgggaatatcggcaaatggttgagactgagctaaagttaatctgttgtgacattctggatgtactggacaaacacctcattccagcagctaacactggcgagtccaaggttttctattataaaatgaaaggggactaccacaggtatctggcagaatttgccacaggaaacgacaggaaggaggctgcggagaacagcctagtggcttataaagctgctagtgatattgcaatgacagaacttccaccaacgcatcctattcgcttaggtcttgctctcaatttttccgtattctactacgaaattcttaattcccctgaccgtgcctgcaggttggcaaaagcagcttttgatgatgcaattgcagaactggatacgctgagtgaagaaagctataaggactctacacttatcatgcagttgttacgtgataatctgacactatggacttcagacatgcagggtgacggtgaagagcagaataaagaagcgctgcaggacgtggaagacgaaaatcagtgagacataagccaacaagagaaaccatctctgaccaccccctcctcactcctcccctccttcgctcgctcaacctcttttgttcagtatgtgtaacttgaagctaatttgtactactggatatctgactggagccacagatacagaatctgtattgttcttactgaaacacagcatggaattaacattaaacttaaataaaacaaac

SEQ ID NO: 85423 - DNA, 1652 bp, Homo sapiens
  misc_feature (1622)..(1622): n is a, c, g, or t
tatgcgaaacgagataatggtggaccagtgaataacgtagcaggatgatgtggagctgacagttgaagaaagaaacctcctatctgttgcatatagaatgtgattggagctagaagagcctcctggagaataatcagcagcattgaatagaaagaagaaaacaaggatcgacaagacatcgctctgcatgcttcgggactttcgcgtcagctgtgcgtgatagaggcgccgccatttttgctgcccggacgcggagcgagaggctgagagagtcggagacactatccgcttccatccgtcgcgcagaccctgccggagccgctgccgctatggatgatcgagaggatctggtgtaccaggcgaagctggccgagcaggctgagcgatacgacgaaatggtggagtcaatgaagaaagtagcagggatggatgtggagctgacagttgaagaaagaaacctcctatctgttgcatataagaatgtgattggagctagaagagcctcctggagaataatcagcagcattgaacagaaagaagaaaacaagggaggagaagacaagctaaaaatgattcgggaatatcggcaaatggttgagactgagctaaagttaatctgttgtgacattctggatgtactggacaaacacctcattccagcagctaacactggcgagtccaaggttttctattataaaatgaaaggggactaccacaggtatctggcagaatttgccacaggaaacgacaggaaggaggctgcggagaacagcctagtggcttataaagctgctagtgatattgcaatgacagaacttccaccaacgcatcctattcgcttaggtcttgctctcaatttttccgtattctactacgaaattcttaattcccctgaccgtgcctgcaggttggcaaaagcagcttttgatgatgcaattgcagaactggatacgctgagtgaagaaagctataaggactctacacttatcatgcagttgttacgtgataatctgacactatggacttcagacatgcagggtgacggtgaagagcagaataaagaagcgctgcaggacgtggaagacgaaaatcagtgagacataagccaacaagagaaaccatctctgaccaccccctccttaggattggagctagaagagcctcctggagaataatcagcagcattgaacagaaagaagaaaacaagggaggagaagacaagctaaaaatgattcgggaatatcggcagccatttgagaactgcactagctgacatcactaaaacattatcagctaaagccaaaaccaaataaaggcccagagcaacatcctggctctctaaaacctgtccaaaatcattaagtgaaaggcagtaaatgcaggactgtggatcatgtcactgcagctgacaatgattaacaataggagacatgcaacccccattaaggttaaaagtccaaaactagtcacacgcatctctttatgggggaaaagtgagactattatgcattcttggtaggtttgcaaccttgcactgaagagcacccattgcatttctttcatctttcagaaagcaccggtatctgttccaagggcctaacagtacggaaatacattctggnatcacacctctgaaaccaagactgttctca

SEQ ID NO: 85424 - DNA, 1414 bp, Homo sapiens
ggacgcgtgggtcgacccacgcgtccgcggacgcgttggggtgcctgcaggttggcaaaagcagcttttgatgatgcaattgcagaactggatacgctgagtgaagaaagctataaggactctacacttatcatgcagttgttacgtgataatctgacactatggacttcagacatgcagggtgacggtgaagagcagaataaagaagcgctgcaggacgtggaagacgaaaatcagtgagacataagccaacaagagaaaccatctctgaccaccccctcctccccatcccaccctttggaaactccccattgtcactgagaaccaccaaatctgacttttacatttggtctcagaatttaggttcctgccctgttggttttttttttttttttttaaacagttttcaaaagttcttaaaggcaagagtgaatttctgtggattttactggtcccagcttttaggttctttaagacactaacaggactacatagaggctttttcagcattactgtgtcgtctccgtgccagatgtggcaagatcaccattagcaaatggaaattacatttgaaagccattagacttataggtgatgcaagcatctaagagagaggttaatcacactatagaggcataagtggtatcagttttcatttttctaattgtttaaactgtgttttataccagtgtttgcaagtaattgggtgttagcttgagatggttaaaggtggtttggggagggacttcgttgtaatggttttgctgtaaaaaatgtttccaactccgctgaaatgttgctgaaaagcatggtgctggtaacagttcaacaatccgtggctgctcattcttgcctactttactctcccactgaagcaggttagcgttgaaggtggtatggaaaagcctgcatgcctgttcaattcttttgtttcttctccttccccctccccctacctccttcccctcactcctcccctccttcgctcgctcaacctcttttgttcagtatgtgtaacttgaagctaatttgtactactggatatctgactggagccacagatacagaatctgtattgttcttactgaaacacagcatggaattaacattaaacttaaataaaacaaacctaaattaaaaatgccaaatatcgcgcctccatcctttatacttctaaaataaaatctctagtccaaacacactgacagtattatgtttgcctgaatgtgaaacattcctccttttttcttccataaataatttgtttgcttcccaaagatgtatgttttggaaaaaaattgcctgtagtctggttgtgaagaacactgagtcagttgatggtgtgtcttgtcctccagaccaggcagcaacatggtatttattttaatcattaaagtacaacatgagtagtaca

SEQ ID NO: 85425 - DNA, 1348 bp, Homo sapiens
cccacgcgtccgccacgcgtcgccacgcgtccggaggaagaaagctataaggactctacacttatcatgcagttgttacgtgataatctgacactatggacttcagacatgcagggtgacggtgaagagcagaataaagaagcgctgcaggacgtggaagacgaaaatcagtgagacataagccaacaagagaaaccatctctgaccaccccctcctccccatcccaccctttggaaactccccattgtcactgagaaccaccaaatctgacttttacatttggtctcagaatttaggttcctgccctgttggttttttttttttttttttaaacagttttcaaaagttcttaaaggcaagagtgaatttctgtggattttactggtcccagcttttaggttctttaagacactaacaggactacatagaggctttttcagcattactgtgtcgtctccgtgccagatgtggcaagatcaccattagcaaatggaaattacatttgaaagccattagacttataggtgatgcaagcatctaagagagaggttaatcacactatagaggcataagtggtatcagttttcatttttctaattgtttaaactgtgttttataccagtgtttgcaagtaattgggtgttagcttgagatggttaaaggtggtttggggagggacttcgttgtaatggttttgctgtaaaaaatgtttccaactccgctgaaatgttgctgaaaagcatggtgctggtaacagttcaacaatccgtggctgctcattcttgcctactttactctcccactgaagcaggttagcgttgaaggtggtatggaaaagcctgcatgcctgttcaattcttttgtttcttctccttccccctccccctacctccttcccctcactcctcccctccttcgctcgctcaacctcttttgttcagtatgtgtaacttgaagctaatttgtactactggatatctgactggagccacagatacagaatctgtattgttcttactgaaacacagcatggaattaacattaaacttaaataaaacaaacctaaattaaaaatgccaaatatcgcgcctccatcctttatacttctaaaataaaatctctagtccaaacacactgacagtattatgtttgcctgaatgtgaaacattcctccttttttcttccataaataatttgtttgcttcccaaagatgtatgttttggaaaaaaattgcctgtagtctggttgtgaagaacactgagtcagttgatggtgtgtcttgtcctccagaccaggcagcaacatggtatttattttaatcattaaagtacaacatgagtagtaca

SEQ ID NO: 85426 - DNA, 1413 bp, Homo sapiens
agcggaggtggaggggtgggctggcgtgatgtccgtcttccgctgggagcgagaggctgagagagtcggagacactatccgcttccatccgtcgcgcagaccctgccggagccgctgccgctatggatgatcgagaggatctggtgtaccaggcgaagctggccgagcaggctgagcgatacgacggtgaagagcagaataaagaagcgctgcaggacgtggaagacgaaaatcagtgagacataagccaacaagagaaaccatctctgaccaccccctcctccccatcccaccctttggaaactccccattgtcactgagaaccaccaaatctgacttttacatttggtctcagaatttaggttcctgccctgttggttttttttttttttttttaaacagttttcaaaagttcttaaaggcaagagtgaatttctgtggattttactggtcccagcttttaggttctttaagacactaacaggactacatagaggctttttcagcattactgtgtcgtctccgtgccagatgtggcaagatcaccattagcaaatggaaattacatttgaaagccattagacttataggtgatgcaagcatctaagagagaggttaatcacactatagaggcataagtggtatcagttttcatttttctaattgtttaaactgtgttttataccagtgtttgcaagtaattgggtgttagcttgagatggttaaaggtggtttggggagggacttcgttgtaatggttttgctgtaaaaaatgtttccaactccgctgaaatgttgctgaaaagcatggtgctggtaacagttcaacaatccgtggctgctcattcttgcctactttactctcccactgaagcaggttagcgttgaaggtggtatggaaaagcctgcatgcctgttcaattcttttgtttcttctccttccccctccccctacctccttcccctcactcctcccctccttcgctcgctcaacctcttttgttcagtatgtgtaacttgaagctaatttgtactactggatatctgactggagccacagatacagaatctgtattgttcttactgaaacacagcatggaattaacattaaacttaaataaaacaaacctaaattaaaaatgccaaatatcgcgcctccatcctttatacttctaaaataaaatctctagtccaaacacactgacagtattatgtttgcctgaatgtgaaacattcctccttttttcttccataaataatttgtttgcttcccaaagatgtatgttttggaaaaaaattgcctgtagtctggttgtgaagaacactgagtcagttgatggtgtgtcttgtcctccagaccaggcagcaacatggtatttattttaatcattaaagtacaacatgagtagtaca

SEQ ID NO: 85427 - DNA, 1068 bp, Homo sapiens
tatgcgaaacgagataatggtggaccagtgaataacgtagcaggatgatgtggagctgacagttgaagaaagaaacctcctatctgttgcatatagaatgtgattggagctagaagagcctcctggagaataatcagcagcattgaatagaaagaagaaaacaaggatcgacaagacatcgctctgcatgcttcgggactttcgcgtcagctgtgcgtgatagaggcgccgccatttttgctgcccggacgcggagcgagaggctgagagagtcggagacactatccgcttccatccgtcgcgcagaccctgccggagccgctgccgctatggatgatcgagaggatctggtgtaccaggcgaagctggccgagcaggctgagcgatacgacgaaatggtggagtcaatgaagaaagtagcagggatggatgtggagctgacagttgaagaaagaaacctcctatctgttgcatataagaatgtgattggagctagaagagcctcctggagaataatcagcagcattgaacagaaagaagaaaacaagggaggagaagacaagctaaaaatgattcgggaatatcggcaaatggttgagactgagctaaagttaatctgttgtgacattctggatgtactggacaaacacctcattccagcagctaacactggcgagtccaaggttttctattataaaatgaaaggggactaccacaggtatctggcagaatttgccacaggaaacgacaggaaggaggctgcggagaacagcctagtggcttataaagctgctagtgatattgcaatgacagaacttccaccaacgcatcctattcgcttaggtcttgctctcaatttttccgtattctactacgaaattcttaattcccctgaccgtgcctgcaggttggcaaaagcagcttttgatgatgcaattgcagaactggatacgctgagtgaagaaagctataaggactctacacttatcatgcagttgttacgtgataatctgacactatggacttcagacatgcagggtgacgggtaagcaagcacggagtgaaaca

SEQ ID NO: 85428 - DNA, 1115 bp, Homo sapiens
tatgcgaaacgagataatggtggaccagtgaataacgtagcaggatgatgtggagctgacagttgaagaaagaaacctcctatctgttgcatatagaatgtgattggagctagaagagcctcctggagaataatcagcagcattgaatagaaagaagaaaacaaggatcgacaagacatcgctctgcatgcttcgggactttcgcgtcagctgtgcgtgatagaggcgccgccatttttgctgcccggacgcggagcgagaggctgagagagtcggagacactatccgcttccatccgtcgcgcagaccctgccggagccgctgccgctatggatgatcgagaggatctggtgtaccaggcgaagctggccgagcaggctgagcgatacgacgaaatggtggagtcaatgaagaaagtagcagggatggatgtggagctgacagttgaagaaagaaacctcctatctgttgcatataagaatgtgattggagctagaagagcctcctggagaataatcagcagcattgaacagaaagaagaaaacaagggaggagaagacaagctaaaaatgattcgggaatatcggcaaatggttgagactgagctaaagttaatctgttgtgacattctggatgtactggacaaacacctcattccagcagctaacactggcgagtccaaggttttctattataaaatgaaaggggactaccacaggtatctggcagaatttgccacaggaaacgacaggaaggaggctgcggagaacagcctagtggcttataaagctgctagtgatattgcaatgacagaacttccaccaacgcatcctattcgcttaggtcttgctctcaatttttccgtattctactacgaaattcttaattcccctgaccgtgcctgcaggttggcaaaagcagcttttgatgatgcaattgcagaactggatacgctgagtgaagaaagctataaggactctacacttatcatgcagttgttacgtgataatctgacactatggacttcagacatgcagggtgacgccgatgaatagcgaggtgccgatgaataagcgaggtgccgatgaatagcgagtgccgataatagcggtccg

SEQ ID NO: 85429 - DNA, 906 bp, Homo sapiens
tagtgatctagaggatccctcataggtcgcagggatcaccattagcaaatggaaattacatttgaaagccattagacttataggtgatgcaagcatctaagagagaggttaatcacactatagaggcataagtggtatcagttttcatttttctaattgtttaaactgtgttttataccagtgtttgcaagtaattgggtgttagcttgagatggttaaaggtggtttggggagggacttcgttgtaatggttttgctgtaaaaaatgtttccaactccgctgaaatgttgctgaaaagcatggtgctggtaacagttcaacaatccgtggctgctcattcttgcctactttactctcccactgaagcaggttagcgttgaaggtggtatggaaaagcctgcatgcctgttcaattcttttgtttcttctccttccccctccccctacctccttcccctcactcctcccctccttcgctcgctcaacctcttttgttcagtatgtgtaacttgaagctaatttgtactactggatatctgactggagccacagatacagaatctgtattgttcttactgaaacacagcatggaattaacattaaacttaaataaaacaaacctaaattaaaaatgccaaatatcgcgcctccatcctttatacttctaaaataaaatctctagtccaaacacactgacagtattatgtttgcctgaatgtgaaacattcctccttttttcttccataaataatttgtttgcttcccaaagatgtatgttttggaaaaaaattgcctgtagtctggttgtgaagaacactgagtcagttgatggtgtgtcttgtcctccagaccaggcagcaacatggtatttattttaatcattaaagtacaacatgagtagtaca

SEQ ID NO: 85430 - DNA, 948 bp, Homo sapiens
cttttattagtaaagataccttcttttacggactccactttatggactcccttaggcccaatgtcgaagcccccatcgctgggtcaatagtacttgccccagtactcttgaaactaggcggctatggtataatatgcctcatcagcgattgctccatcgctgatgaggcataagtggtatcagttttcatttttctaattgtttaaactgtgttttataccagtgtttgcaagtaattgggtgttagcttgagatggttaaaggtggtttggggagggacttcgttgtaatggttttgctgtaaaaaatgtttccaactccgctgaaatgttgctgaaaagcatggtgctggtaacagttcaacaatccgtggctgctcattcttgcctactttactctcccactgaagcaggttagcgttgaaggtggtatggaaaagcctgcatgcctgttcaattcttttgtttcttctccttccccctccccctacctccttcccctcactcctcccctccttcgctcgctcaacctcttttgttcagtatgtgtaacttgaagctaatttgtactactggatatctgactggagccacagatacagaatctgtattgttcttactgaaacacagcatggaattaacattaaacttaaataaaacaaacctaaattaaaaatgccaaatatcgcgcctccatcctttatacttctaaaataaaatctctagtccaaacacactgacagtattatgtttgcctgaatgtgaaacattcctccttttttcttccataaataatttgtttgcttcccaaagatgtatgttttggaaaaaaattgcctgtagtctggttgtgaagaacactgagtcagttgatggtgtgtcttgtcctccagaccaggcagcaacatggtatttattttaatcattaaagtacaacatgagtagtaca

SEQ ID NO: 85431 - DNA, 1240 bp, Homo sapiens
tatgcgaaacgagataatggtggaccagtgaataacgtagcaggatgatgtggagctgacagttgaagaaagaaacctcctatctgttgcatatagaatgtgattggagctagaagagcctcctggagaataatcagcagcattgaatagaaagaagaaaacaaggatcgacaagacatcgctctgcatgcttcgggactttcgcgtcagctgtgcgtgatagaggcgccgccatttttgctgcccggacgcggagcgagaggctgagagagtcggagacactatccgcttccatccgtcgcgcagaccctgccggagccgctgccgctatggatgatcgagaggatctggtgtaccaggcgaagctggccgagcaggctgagcgatacgacgaaatggtggagtcaatgaagaaagtagcagggatggatgtggagctgacagttgaagaaagaaacctcctatctgttgcatataagaatgtgattggagctagaagagcctcctggagaataatcagcagcattgaacagaaagaagaaaacaagggaggagaagacaagctaaaaatgattcgggaatatcggcaaatgtaaaaaatgtttccaactccgctgaaatgttgctgaaaagcatggtgctggtaacagttcaacaatccgtggctgctcattcttgcctactttactctcccactgaagcaggttagcgttgaaggtggtatggaaaagcctgcatgcctgttcaattcttttgtttcttctccttccccctccccctacctccttcccctcactcctcccctccttcgctcgctcaacctcttttgttcagtatgtgtaacttgaagctaatttgtactactggatatctgactggagccacagatacagaatctgtattgttcttactgaaacacagcatggaattaacattaaacttaaataaaacaaacctaaattaaaaatgccaaatatcgcgcctccatcctttatacttctaaaataaaatctctagtccaaacacactgacagtattatgtttgcctgaatgtgaaacattcctccttttttcttccataaataatttgtttgcttcccaaagatgtatgttttggaaaaaaattgcctgtagtctggttgtgaagaacactgagtcagttgatggtgtgtcttgtcctccagaccaggcagcaacatggtatttattttaatcattaaagtacaacatgagtagtaca

SEQ ID NO: 85432 - DNA, 1168 bp, Homo sapiens
tatgcgaaacgagataatggtggaccagtgaataacgtagcaggatgatgtggagctgacagttgaagaaagaaacctcctatctgttgcatatagaatgtgattggagctagaagagcctcctggagaataatcagcagcattgaatagaaagaagaaaacaaggatcgacaagacatcgctctgcatgcttcgggactttcgcgtcagctgtgcgtgatagaggcgccgccatttttgctgcccggacgcggagcgagaggctgagagagtcggagacactatccgcttccatccgtcgcgcagaccctgccggagccgctgccgctatggatgatcgagaggatctggtgtaccaggcgaagctggccgagcaggctgagcgatacgacgaaatggtggagtcaatgaagaaagtagcagggatggatgtggagctgacagttgaagaaagaaacctcctatctgttgcatataagaatgtgattggagctagaagagcctcctggagaataatcagcagcattgaacagaaagaagaaaacaagggaggagaagacaagctaaaaatgattcgggaatatcggcaaatggttgagactgagctaaagttaatctgttgtgacattctggatgtactggacaaacacctcattccagcagctaacactggcgagtccaaggttttctattataaaatgaaaggggactaccacaggtatctggcagaatttgccacaggaaacgacaggaaggaggctgcggagaacagcctagtggcttataaagctgctagtgatattgcaatgacagaacttccaccaacgcatcctattcgcttaggtcttgctctcaatttttccgtattctactacgaaattcttaattcccctgaccgtgcctgcaggtaagttgtggggaagaacagcagcgctcagcgtgaaagttaaggggggcgctgtttgggttttccgtgttgtttcttgggcctgtctttgtagacttggctgcatagtaattcttttggctcttactgaaactactttggatagtattaaaacagacctgtctcaacccactagcatagcagtcagcataattattttgatgtgggatatttttgttgctggtagatgcggtgtttggggatccttagagtcacctcgcg

SEQ ID NO: 85433 - DNA, 1020 bp, Homo sapiens
tatgcgaaacgagataatggtggaccagtgaataacgtagcaggatgatgtggagctgacagttgaagaaagaaacctcctatctgttgcatatagaatgtgattggagctagaagagcctcctggagaataatcagcagcattgaatagaaagaagaaaacaaggatcgacaagacatcgctctgcatgcttcgggactttcgcgtcagctgtgcgtgatagaggcgccgccatttttgctgcccggacgcggagcgagaggctgagagagtcggagacactatccgcttccatccgtcgcgcagaccctgccggagccgctgccgctatggatgatcgagaggatctggtgtaccaggcgaagctggccgagcaggctgagcgatacgacgaaatggtggagtcaatgaagaaagtagcagggatggatgtggagctgacagttgaagaaagaaacctcctatctgttgcatataagaatgtgattggagctagaagagcctcctggagaataatcagcagcattgaacagaaagaagaaaacaagggaggagaagacaagctaaaaatgattcgggaatatcggcaaatggttgagactgagctaaagttaatctgttgtgacattctggatgtactggacaaacacctcattccagcagctaacactggcgagtccaaggttttctattataaaattgtaggttctatactagaagggaaaatgtaagattgaaagttggtccttttagaaccataactttgttctatgtaggttttcaacttttatttaagaataattgttcaatgttagaaggatagttaatattggaatgaaaaggtggttgggctattatgaaaatgtattagcttttgcttatttatattcttttgtttttgtgagacctatcccattcccctcccccaaacggcatacatttcacagtgcttagtgttatatatagacattttattttatgattaataaactgtcatgccattccttggaaccacttgct

SEQ ID NO: 85434 - DNA, 1040 bp, Homo sapiens
tatgcgaaacgagataatggtggaccagtgaataacgtagcaggatgatgtggagctgacagttgaagaaagaaacctcctatctgttgcatatagaatgtgattggagctagaagagcctcctggagaataatcagcagcattgaatagaaagaagaaaacaaggatcgacaagacatcgctctgcatgcttcgggactttcgcgtcagctgtgcgtgatagaggcgccgccatttttgctgcccggacgcggagcgagaggctgagagagtcggagacactatccgcttccatccgtcgcgcagaccctgccggagccgctgccgctatggatgatcgagaggatctggtgtaccaggcgaagctggccgagcaggctgagcgatacgacgaaatggtggagtcaatgaagaaagtagcagggatggatgtggagctgacagttgaagaaagaaacctcctatctgttgcatataagaatgtgattggagctagaagagcctcctggagaataatcagcagcattgaacagaaagaagaaaacaagggaggagaagacaagctaaaaatgattcgggaatatcggcaaatgcactcctcccctccttcgctcgctcaacctcttttgttcagtatgtgtaacttgaagctaatttgtactactggatatctgactggagccacagatacagaatctgtattgttcttactgaaacacagcatggaattaacattaaacttaaataaaacaaacctaaattaaaaatgccaaatatcgcgcctccatcctttatacttctaaaataaaatctctagtccaaacacactgacagtattatgtttgcctgaatgtgaaacattcctccttttttcttccataaataatttgtttgcttcccaaagatgtatgttttggaaaaaaattgcctgtagtctggttgtgaagaacactgagtcagttgatggtgtgtcttgtcctccagaccaggcagcaacatggtatttattttaatcattaaagtacaacatgagtagtaca

SEQ ID NO: 85435 - DNA, 755 bp, Homo sapiens
tatgcgaaacgagataatggtggaccagtgaataacgtagcaggatgatgtggagctgacagttgaagaaagaaacctcctatctgttgcatatagaatgtgattggagctagaagagcctcctggagaataatcagcagcattgaatagaaagaagaaaacaaggatcgacaagacatcgctctgcatgcttcgggactttcgcgtcagctgtgcgtgatagaggcgccgccatttttgctgcccggacgcggagcgagaggctgagagagtcggagacactatccgcttccatccgtcgcgcagaccctgccggagccgctgccgctatggatgatcgagaggatctggtgtaccaggcgaagctggccgagcaggctgagcgatacgacgaaatggtggagtcaatgaagaaagtagcagggatggatgtggagctgacagttgaagaaagaaacctcctatctgttgcatataagaatgtgattggagctagaagagcctcctggagaataatcagcagcattgaacagaaagaagaaaacaagggaggagaagacaagctaaaaatgattcgggaatatcggcaaatgcactcctcccctccttcgctcgctcaacctcttttgttcagtatgtgtaacttgaagctaatttgtactactggatatctgactggagccacagatacagaatctgtattgttcttactgaaacacagcatggaattaacattaaacttaaataaaacaaac

SEQ ID NO: 85436 - DNA, 643 bp, Homo sapiens
  misc_feature (595)..(595): n is a, c, g, or t
  misc_feature (597)..(597): n is a, c, g, or t
tatgcgaaacgagataatggtggaccagtgaataacgtagcaggatgatgtggagctgacagttgaagaaagaaacctcctatctgttgcatatagaatgtgattggagctagaagagcctcctggagaataatcagcagcattgaatagaaagaagaaaacaaggatcgacaagacatcgctctgcatgcttcgggactttcgcgtcagctgtgcgtgatagaggcgccgccatttttgctgcccggacgcggagcgagaggctgagagagtcggagacactatccgcttccatccgtcgcgcagaccctgccggagccgctgccgctatggatgatcgagaggatctggtgtaccaggcgaagctggccgagcaggctgagcgatacgacgaaatggtggagtcaatgaagaaagtagcagggatggatgtggagctgacagttgaagaaagaaacctcctatctgttgcatataagaatgtgattggagctagaagagcctcctggagaataatcagcagcattgaacagaaagaagaaaacaagggaggagaagacaagctaaaaatgattcgggaatatcggcaaatgcncngtcagaggtgggaactcggacagaggtgagaactcggtcagaggtg

SEQ ID NO: 85437 - DNA, 671 bp, Homo sapiens
taaatggcttcctgtcaatctgcagagcgggagagcgatggagagacagcaagatgaacagagagagggagtggttctgttctcggagagagagagagcgagagagagagagaaaacgtgtgtgattctaatatcgggcaatcagggaaaacatttatctccgcccgctttgagtgaggcatgcggcttcccgcctacttcccgtcgtatcttcctcttcattgcactcctcccctccttcgctcgctcaacctcttttgttcagtatgtgtaacttgaagctaatttgtactactggatatctgactggagccacagatacagaatctgtattgttcttactgaaacacagcatggaattaacattaaacttaaataaaacaaacctaaattaaaaatgccaaatatcgcgcctccatcctttatacttctaaaataaaatctctagtccaaacacactgacagtattatgtttgcctgaatgtgaaacattcctccttttttcttccataaataatttgtttgcttcccaaagatgtatgttttggaaaaaaattgcctgtagtctggttgtgaagaacactgagtcagttgatggtgtgtcttgtcctccagaccaggcagcaacatggtatttattttaatcattaaagtacaacatgagtagtaca

SEQ ID NO: 85438 - DNA, 573 bp, Homo sapiens
cctccagtggtagcctccagagcatgtgtgcacgtggtgtcagtgtgccggggccggccagacacagcctaatgctggaggtgcacgagggtgctcaacaccccccaggattaaaaatgaaggcaacactcctcccctccttcgctcgctcaacctcttttgttcagtatgtgtaacttgaagctaatttgtactactggatatctgactggagccacagatacagaatctgtattgttcttactgaaacacagcatggaattaacattaaacttaaataaaacaaacctaaattaaaaatgccaaatatcgcgcctccatcctttatacttctaaaataaaatctctagtccaaacacactgacagtattatgtttgcctgaatgtgaaacattcctccttttttcttccataaataatttgtttgcttcccaaagatgtatgttttggaaaaaaattgcctgtagtctggttgtgaagaacactgagtcagttgatggtgtgtcttgtcctccagaccaggcagcaacatggtatttattttaatcattaaagtacaacatgagtagtaca

SEQ ID NO: 85439 - DNA, 844 bp, Homo sapiens
agcggaggtggaggggtgggctggcgtgatgtccgtcttccgctgggagcgagaggctgagagagtcggagacactatccgcttccatccgtcgcgcagaccctgccggagccgctgccgctatggatgatcgagaggatctggtgtaccaggcgaagctggccgagcaggctgagcgatacgacgtgctctggaactgaacccgcagtatcttccaaaatggtggagtcaatgaagaaagtagcagggatggatgtggagctgacagttgaagaaagaaacctcctatctgttgcatataagaatgtgattggagctagaagagcctcctggagaataatcagcagcattgaacagaaagaagaaaacaagggaggagaagacaagctaaaaatgattcgggaatatcggcaaatggttgagactgagctaaagttaatctgttgtgacattctggatgtactggacaaacacctcattccagcagctaacactggcgagtccaaggttttctattataaaattgtaggttctatactagaagggaaaatgtaagattgaaagttggtccttttagaaccataactttgttctatgtaggttttcaacttttatttaagaataattgttcaatgttagaaggatagttaatattggaatgaaaaggtggttgggctattatgaaaatgtattagcttttgcttatttatattcttttgtttttgtgagacctatcccattcccctcccccaaacggcatacatttcacagtgcttagtgttatatatagacattttattttatgattaataaactgtcatgccattccttggaaccacttgct

SEQ ID NO: 85440 - DNA, 823 bp, Homo sapiens
tatgcgaaacgagataatggtggaccagtgaataacgtagcaggatgatgtggagctgacagttgaagaaagaaacctcctatctgttgcatatagaatgtgattggagctagaagagcctcctggagaataatcagcagcattgaatagaaagaagaaaacaaggatcgacaagacatcgctctgcatgcttcgggactttcgcgtcagctgtgcgtgatagaggcgccgccatttttgctgcccggacgcggagcgagaggctgagagagtcggagacactatccgcttccatccgtcgcgcagaccctgccggagccgctgccgctatggatgatcgagaggatctggtgtaccaggcgaagctggccgagcaggctgagcgatacgacgaaatgtcggagccaatgaaggccgcagggatgcatgcgcagcccgcagatccagacagtaacctcctatctgccgcatatacgaccgcgcccgcagctcgcttacgcctctccagacctctcactagccttctaccgcaagctgcccaccaggtcgcaccagcccccctcctccacgaccgtcccctatcaacatccgctttgagtctcaacctactcgttcaacccgccctcacatcgccgcccccctcctcacaccccactccatcctccaccttccccatccccatccccaccgcttgctctttctctccgccatagctgctctcccttcggtccttctcctcactgctctactccgctctctcacccgccttcacttcctgcctaccactcccatcccgtctctccgctgccacttctcattctcc

SEQ ID NO: 85441 - DNA, 2051 bp, Homo sapiens
tatgcgaaacgagataatggtggaccagtgaataacgtagcaggatgatgtggagctgacagttgaagaaagaaacctcctatctgttgcatatagaatgtgattggagctagaagagcctcctggagaataatcagcagcattgaatagaaagaagaaaacaaggatcgacaagacatcgctctgcatgcttcgggactttcgcgtcagctgtgcgtgatagaggcgccgccatttttgctgcccggacgcggagcgagaggctgagagagtcggagacactatccgcttccatccgtcgcgcagaccctgccggagccgctgccgctatggatgatcgagaggatctggtgtaccaggcgaagctggccgagcaggctgagcgatacgacgaaatggtggagtcaatgaagaaagtagcagggatggatgtggagctgacagttgaagaaagaaacctcctatctgttgcatataagaatgtgattggagctagaagagcctcctggagaataatcagcagcattgaacagaaagaagaaaacaagggaggagaagacaagctaaaaatgattcgggaatatcggcaaatggttgagactgagctaaagttaatctgttgtgacattctggatgtactggacaaacacctcattccagcagctaacactggcgagtccaaggttttctattataaaatgaaaggggactaccacaggtatctggcagaatttgccacaggaaacgacaggaaggaggctgcggagaacagcctagtggcttataaagctgctagtgatattgcaatgacagaacttccaccaacgcatcctattcgcttaggtcttgctctcaatttttccgtattctactacgaaattcttaattcccctgaccgtgcctgcaggttggcaaaagcagcttttgatgatgcaattgcagaactggatacgctgagtgaagaaagctataaggactctacacttatcatgcagttgttacgtgataatctgacactatggacttcagacatgcagggtgacggtgaagagcagaataaagaagcgctgcaggacgtggaagacgaaaatcagtgagacataagccaacaagagaaaccatctctgaccaccccctcctccccatcccaccctttggaaactccccattgtcactgagaaccaccaaatctgacttttacatttggtctcagaatttaggttcctgccctgttggttttttttttttttttttaaacagttttcaaaagttcttaaaggcaagagtgaatttctgtggattttactggtcccagcttttaggttctttaagacactaacaggactacatagaggctttttcagcattactgtgtcgtctccgtgccagatgtggcaagatcaccattagcaaatggaaattacatttgaaagccattagacttataggtgatgcaagcatctaagagagaggttaatcacactatagaggcataagtggtatcagttttcatttttctaattgtttaaactgtgttttataccagtgtttgcaagtaattgggtgttagcttgagatggttaaaggtggtttggggagggacttcgttgtaatggttttgctgtaaaaaatgtttccaactccgctgaaatgttgctgaaaagcatggtgctggtaacagttcaacaatccgtggctgctcattcttgcctactttactctcccactgaagcaggttagcgttgaaggtggtatggaaaagcctgcatgcctgttcaattcttttgtttcttctccttccccctccccctacctccttcccctcactcctcccctccttcgctcgctcaacctcttttgttcagtatgtgtaacttgaagctaatttgtactactggatatctgactggagccacagatacagaatctgtattgttcttactgaaacacagcatggaattaacattaaacttaaataaaacaaacctaaattaaaaatgccaaagagaaaagaaccaaaaaaaaagggggggccggtcaaggagaatccg

SEQ ID NO: 85442 - DNA, 1986 bp, Homo sapiens
tatgcgaaacgagataatggtggaccagtgaataacgtagcaggatgatgtggagctgacagttgaagaaagaaacctcctatctgttgcatatagaatgtgattggagctagaagagcctcctggagaataatcagcagcattgaatagaaagaagaaaacaaggatcgacaagacatcgctctgcatgcttcgggactttcgcgtcagctgtgcgtgatagaggcgccgccatttttgctgcccggacgcggagcgagaggctgagagagtcggagacactatccgcttccatccgtcgcgcagaccctgccggagccgctgccgctatggatgatcgagaggatctggtgtaccaggcgaagctggccgagcaggctgagcgatacgacgaaatggtggagtcaatgaagaaagtagcagggatggatgtggagctgacagttgaagaaagaaacctcctatctgttgcatataagaatgtgattggagctagaagagcctcctggagaataatcagcagcattgaacagaaagaagaaaacaagggaggagaagacaagctaaaaatgattcgggaatatcggcaaatggttgagactgagctaaagttaatctgttgtgacattctggatgtactggacaaacacctcattccagcagctaacactggcgagtccaaggttttctattataaaatgaaaggggactaccacaggtatctggcagaatttgccacaggaaacgacaggaaggaggctgcggagaacagcctagtggcttataaagctgctagtgatattgcaatgacagaacttccaccaacgcatcctattcgcttaggtcttgctctcaatttttccgtattctactacgaaattcttaattcccctgaccgtgcctgcaggttggcaaaagcagcttttgatgatgcaattgcagaactggatacgctgagtgaagaaagctataaggactctacacttatcatgcagttgttacgtgataatctgacactatggacttcagacatgcagggtgacggtgaagagcagaataaagaagcgctgcaggacgtggaagacgaaaatcagtgagacataagccaacaagagaaaccatctctgaccaccccctcctccccatcccaccctttggaaactccccattgtcactgagaaccaccaaatctgacttttacatttggtctcagaatttaggttcctgccctgttggttttttttttttttttttaaacagttttcaaaagttcttaaaggcaagagtgaatttctgtggattttactggtcccagcttttaggttctttaagacactaacaggactacatagaggctttttcagcattactgtgtcgtctccgtgccagatgtggcaagatcaccattagcaaatggaaattacatttgaaagccattagacttataggtgatgcaagcatctaagagagaggttaatcacactatagaggcataagtggtatcagttttcatttttctaattgtttaaactgtgttttataccagtgtttgcaagtaattgggtgttagcttgagatggttaaaggtggtttggggagggacttcgttgtaatggttttgctgtaaaaaatgtttccaactccgctgaaatgttgctgaaaagcatggtgctggtaacagttcaacaatccgtggctgctcattcttgcctactttactctcccactgaagcaggttagcgttgaaggtggtatggaaaagcctgcatgcctgttcaattcttttgtttcttctccttccccctccccctacctccttcccctcactcctcccctccttcgctcgctcaacctcttttgttcagtatgtgtaacttgaagctaatttgtactactggatatctgactggagccacagatacagaatctgtattgttcttactgaaacacagcatggaattaacattaaacttaaataaaacaaac

SEQ ID NO: 85443 - DNA, 2243 bp, Homo sapiens
tatgcgaaacgagataatggtggaccagtgaataacgtagcaggatgatgtggagctgacagttgaagaaagaaacctcctatctgttgcatatagaatgtgattggagctagaagagcctcctggagaataatcagcagcattgaatagaaagaagaaaacaaggatcgacaagacatcgctctgcatgcttcgggactttcgcgtcagctgtgcgtgatagaggcgccgccatttttgctgcccggacgcggagcgagaggctgagagagtcggagacactatccgcttccatccgtcgcgcagaccctgccggagccgctgccgctatggatgatcgagaggatctggtgtaccaggcgaagctggccgagcaggctgagcgatacgacgaaatggtggagtcaatgaagaaagtagcagggatggatgtggagctgacagttgaagaaagaaacctcctatctgttgcatataagaatgtgattggagctagaagagcctcctggagaataatcagcagcattgaacagaaagaagaaaacaagggaggagaagacaagctaaaaatgattcgggaatatcggcaaatggttgagactgagctaaagttaatctgttgtgacattctggatgtactggacaaacacctcattccagcagctaacactggcgagtccaaggttttctattataaaatgaaaggggactaccacaggtatctggcagaatttgccacaggaaacgacaggaaggaggctgcggagaacagcctagtggcttataaagctgctagtgatattgcaatgacagaacttccaccaacgcatcctattcgcttaggtcttgctctcaatttttccgtattctactacgaaattcttaattcccctgaccgtgcctgcaggttggcaaaagcagcttttgatgatgcaattgcagaactggatacgctgagtgaagaaagctataaggactctacacttatcatgcagttgttacgtgataatctgacactatggacttcagacatgcagggtgacggtgaagagcagaataaagaagcgctgcaggacgtggaagacgaaaatcagtgagacataagccaacaagagaaaccatctctgaccaccccctcctccccatcccaccctttggaaactccccattgtcactgagaaccaccaaatctgacttttacatttggtctcagaatttaggttcctgccctgttggttttttttttttttttttaaacagttttcaaaagttcttaaaggcaagagtgaatttctgtggattttactggtcccagcttttaggttctttaagacactaacaggactacatagaggctttttcagcattactgtgtcgtctccgtgccagatgtggcaagatcaccattagcaaatggaaattacatttgaaagccattagacttataggtgatgcaagcatctaagagagaggttaatcacactatagaggcataagtggtatcagttttcatttttctaattgtttaaactgtgttttataccagtgtttgcaagtaattgggtgttagcttgagatggttaaaggtggtttggggagggacttcgttgtaatggttttgctggttgctgaaaagcatggtgctggtaacagttcaacaatccgtggctgctcattcttgcctactttactctcccactgaagcaggttagcgttgaaggtggtatggaaaagcctgcatgcctgttcaattcttttgtttcttctccttccccctccccctacctccttcccctcactcctcccctccttcgctcgctcaacctcttttgttcagtatgtgtaacttgaagctaatttgtactactggatatctgactggagccacagatacagaatctgtattgttcttactgaaacacagcatggaattaacattaaacttaaataaaacaaacctaaattaaaaatgccaaatatcgcgcctccatcctttatacttctaaaataaaatctctagtccaaacacactgacagtattatgtttgcctgaatgtgaaacattcctccttttttcttccataaataatttgtttgcttcccaaagatgtatgttttggaaaaaaattgcctgtagtctggttgtgaagaacactgagtcagttgatggtgtgtcttgtcctccagaccaggcagcaacatggtatttattttaatcattaaagtacaacatgagtagtaca

SEQ ID NO: 85444 - DNA, 1803 bp, Homo sapiens
tatgcgaaacgagataatggtggaccagtgaataacgtagcaggatgatgtggagctgacagttgaagaaagaaacctcctatctgttgcatatagaatgtgattggagctagaagagcctcctggagaataatcagcagcattgaatagaaagaagaaaacaaggatcgacaagacatcgctctgcatgcttcgggactttcgcgtcagctgtgcgtgatagaggcgccgccatttttgctgcccggacgcggagcgagaggctgagagagtcggagacactatccgcttccatccgtcgcgcagaccctgccggagccgctgccgctatggatgatcgagaggatctggtgtaccaggcgaagctggccgagcaggctgagcgatacgacgaaatggtggagtcaatgaagaaagtagcagggatggatgtggagctgacagttgaagaaagaaacctcctatctgttgcatataagaatgtgattggagctagaagagcctcctggagaataatcagcagcattgaacagaaagaagaaaacaagggaggagaagacaagctaaaaatgattcgggaatatcggcaaatggttgagactgagctaaagttaatctgttgtgacattctggatgtactggacaaacacctcattccagcagctaacactggcgagtccaaggttttctattataaaatgaaaggggactaccacaggtatctggcagaatttgccacaggaaacgacaggaaggaggctgcggagaacagcctagtggcttataaagctgctagtgatattgcaatgacagaacttccaccaacgcatcctattcgcttaggtcttgctctcaatttttccgtattctactacgaaattcttaattcccctgaccgtgcctgcaggttggcaaaagcagcttttgatgatgcaattgcagaactggatacgctgagtgaagaaagctataaggactctacacttatcatgcagttgttacgtgataatctgacactatggacttcagacatgcagggtgacggtgaagagcagaataaagaagcgctgcaggacgtggaagacgaaaatcagtgagacataagccaacaagagaaaccatctctgaccaccccctcctccccatcccaccctttggaaactccccattgtcactgagaaccaccaaatctgacttttacatttggtctcagaatttaggttcctgccctgttggttttttttttttttttttaaacagttttcaaaagttcttaaaggcaagagtgaatttctgtggattttactggtcccagcttttaggttctttaagacactaacaggactacatagaggctttttcagcattactgtgtcgtctccgtgccagatgtggcaagatcaccattagcaaatggaaattacatttgaaagccattagacttataggtgatgcaagcatctaagagagaggttaatcacactatagaggcataagtggtatcagttttcatttttctaattgtttaaactgtgttttataccagtgtttgcaagtaattgggtgttagcttgagatggttaaaggtggtttggggagggacttcgttgtaatggttttgctgtaaaaaatgtttccaactccgctgaaatgttgctgaaaagcatggtgctggtaacagttcaacaatccgtggctgctcattcttgcctactttactctcccactgaagcaggttagcgttgaaggtggtatggaaaagcctgcatgcctgttcaatcagcgatgcaagatccgctagac

SEQ ID NO: 85445 - DNA, 2068 bp, Homo sapiens
agcggaggtggaggggtgggctggcgtgatgtccgtcttccgctgggagcgagaggctgagagagtcggagacactatccgcttccatccgtcgcgcagaccctgccggagccgctgccgctatggatgatcgagaggatctggtgtaccaggcgaagctggccgagcaggctgagcgatacgacgtgctctggaactgaacccgcagtatcttccaaaatggtggagtcaatgaagaaagtagcagggatggatgtggagctgacagttgaagaaagaaacctcctatctgttgcatataagaatgtgattggagctagaagagcctcctggagaataatcagcagcattgaacagaaagaagaaaacaagggaggagaagacaagctaaaaatgattcgggaatatcggcaaatgtgtgacattctggatgtactggacaaacacctcattccagcagctaacactggcgagtccaaggttttctattataaaatgaaaggggactaccacaggtatctggcagaatttgccacaggaaacgacaggaaggaggctgcggagaacagcctagtggcttataaagctgctagtgatattgcaatgacagaacttccaccaacgcatcctattcgcttaggtcttgctctcaatttttccgtattctactacgaaattcttaattcccctgaccgtgcctgcaggttggcaaaagcagcttttgatgatgcaattgcagaactggatacgctgagtgaagaaagctataaggactctacacttatcatgcagttgttacgtgataatctgacactatggacttcagacatgcagggtgacggtgaagagcagaataaagaagcgctgcaggacgtggaagacgaaaatcagtgagacataagccaacaagagaaaccatctctgaccaccccctcctccccatcccaccctttggaaactccccattgtcactgagaaccaccaaatctgacttttacatttggtctcagaatttaggttcctgccctgttggttttttttttttttttttaaacagttttcaaaagttcttaaaggcaagagtgaatttctgtggattttactggtcccagcttttaggttctttaagacactaacaggactacatagaggctttttcagcattactgtgtcgtctccgtgccagatgtggcaagatcaccattagcaaatggaaattacatttgaaagccattagacttataggtgatgcaagcatctaagagagaggttaatcacactatagaggcataagtggtatcagttttcatttttctaattgtttaaactgtgttttataccagtgtttgcaagtaattgggtgttagcttgagatggttaaaggtggtttggggagggacttcgttgtaatggttttgctgtaaaaaatgtttccaactccgctgaaatgttgctgaaaagcatggtgctggtaacagttcaacaatccgtggctgctcattcttgcctactttactctcccactgaagcaggttagcgttgaaggtggtatggaaaagcctgcatgcctgttcaattcttttgtttcttctccttccccctccccctacctccttcccctcactcctcccctccttcgctcgctcaacctcttttgttcagtatgtgtaacttgaagctaatttgtactactggatatctgactggagccacagatacagaatctgtattgttcttactgaaacacagcatggaattaacattaaacttaaataaaacaaacctaaattaaaaatgccaaatatcgcgcctccatcctttatacttctaaaataaaatctctagtccaaacacactgacagtattatgtttgcctgaatgtgaaacattcctccttttttcttccataaataatttgtttgcttcccaaagatgtatgttttggaaaaaaattgcctgtagtctggttgtgaagaacactgagtcagttgatggtgtgtcttgtcctccagaccaggcagcaacatggtatttattttaatcattaaagtacaacatgagtagtaca

SEQ ID NO: 85446 - DNA, 2134 bp, Homo sapiens
tatgcgaaacgagataatggtggaccagtgaataacgtagcaggatgatgtggagctgacagttgaagaaagaaacctcctatctgttgcatatagaatgtgattggagctagaagagcctcctggagaataatcagcagcattgaatagaaagaagaaaacaaggatcgacaagacatcgctctgcatgcttcgggactttcgcgtcagctgtgcgtgatagaggcgccgccatttttgctgcccggacgcggagcgagaggctgagagagtcggagacactatccgcttccatccgtcgcgcagaccctgccggagccgctgccgctatggatgatcgagaggatctggtgtaccaggcgaagctggccgagcaggctgagcgatacgacgaaatggtggagtcaatgaagaaagtagcagggatggatgtggagctgacagttgaagaaagaaacctcctatctgttgcatataagaatgtgattggagctagaagagcctcctggagaataatcagcagcattgaacagaaagaagaaaacaagggaggagaagacaagctaaaaatgattcgggaatatcggcaaatggttgagactgagctaaagttaatctgttgtgacattctggatgtactggacaaacacctcattccagcagctaacactggcgagtccaaggttttctattataaaatgaaaggggactaccacaggtatctggcagaatttgccacaggaaacgacaggaaggaggctgcggagaacagcctagtggcttataaagctgctagtgatattgcaatgacagaacttccaccaacgcatcctattcgcttaggtcttgctctcaatttttccgtattctactacgaaattcttaattcccctgaccgtgcctgcaggtgaagagcagaataaagaagcgctgcaggacgtggaagacgaaaatcagtgagacataagccaacaagagaaaccatctctgaccaccccctcctccccatcccaccctttggaaactccccattgtcactgagaaccaccaaatctgacttttacatttggtctcagaatttaggttcctgccctgttggttttttttttttttttttaaacagttttcaaaagttcttaaaggcaagagtgaatttctgtggattttactggtcccagcttttaggttctttaagacactaacaggactacatagaggctttttcagcattactgtgtcgtctccgtgccagatgtggcaagatcaccattagcaaatggaaattacatttgaaagccattagacttataggtgatgcaagcatctaagagagaggttaatcacactatagaggcataagtggtatcagttttcatttttctaattgtttaaactgtgttttataccagtgtttgcaagtaattgggtgttagcttgagatggttaaaggtggtttggggagggacttcgttgtaatggttttgctgtaaaaaatgtttccaactccgctgaaatgttgctgaaaagcatggtgctggtaacagttcaacaatccgtggctgctcattcttgcctactttactctcccactgaagcaggttagcgttgaaggtggtatggaaaagcctgcatgcctgttcaattcttttgtttcttctccttccccctccccctacctccttcccctcactcctcccctccttcgctcgctcaacctcttttgttcagtatgtgtaacttgaagctaatttgtactactggatatctgactggagccacagatacagaatctgtattgttcttactgaaacacagcatggaattaacattaaacttaaataaaacaaacctaaattaaaaatgccaaatatcgcgcctccatcctttatacttctaaaataaaatctctagtccaaacacactgacagtattatgtttgcctgaatgtgaaacattcctccttttttcttccataaataatttgtttgcttcccaaagatgtatgttttggaaaaaaattgcctgtagtctggttgtgaagaacactgagtcagttgatggtgtgtcttgtcctccagaccaggcagcaacatggtatttattttaatcattaaagtacaacatgagtagtaca

SEQ ID NO: 85447 - DNA, 1734 bp, Homo sapiens
actaatgatacgggaatatcagcgcagagtgcatggaaactgagtctaaaggagtcattcacgtaggtgaccttctggatgttcgtgtacaaacagctcagttccagcagtcatctagcagctaggcgcaagttccatatgtttttctgattgctatagatttgaaaggggactaccacaggtatctggcagaatttgccacaggaaacgacaggaaggaggctgcggagaacagcctagtggcttataaagctgctagtgatattgcaatgacagaacttccaccaacgcatcctattcgcttaggtcttgctctcaatttttccgtattctactacgaaattcttaattcccctgaccgtgcctgcaggttggcaaaagcagcttttgatgatgcaattgcagaactggatacgctgagtgaagaaagctataaggactctacacttatcatgcagttgttacgtgataatctgacactatggacttcagacatgcagggtgacggtgaagagcagaataaagaagcgctgcaggacgtggaagacgaaaatcagtgagacataagccaacaagagaaaccatctctgaccaccccctcctccccatcccaccctttggaaactccccattgtcactgagaaccaccaaatctgacttttacatttggtctcagaatttaggttcctgccctgttggttttttttttttttttttaaacagttttcaaaagttcttaaaggcaagagtgaatttctgtggattttactggtcccagcttttaggttctttaagacactaacaggactacatagaggctttttcagcattactgtgtcgtctccgtgccagatgtggcaagatcaccattagcaaatggaaattacatttgaaagccattagacttataggtgatgcaagcatctaagagagaggttaatcacactatagaggcataagtggtatcagttttcatttttctaattgtttaaactgtgttttataccagtgtttgcaagtaattgggtgttagcttgagatggttaaaggtggtttggggagggacttcgttgtaatggttttgctgtaaaaaatgtttccaactccgctgaaatgttgctgaaaagcatggtgctggtaacagttcaacaatccgtggctgctcattcttgcctactttactctcccactgaagcaggttagcgttgaaggtggtatggaaaagcctgcatgcctgttcaattcttttgtttcttctccttccccctccccctacctccttcccctcactcctcccctccttcgctcgctcaacctcttttgttcagtatgtgtaacttgaagctaatttgtactactggatatctgactggagccacagatacagaatctgtattgttcttactgaaacacagcatggaattaacattaaacttaaataaaacaaacctaaattaaaaatgccaaatatcgcgcctccatcctttatacttctaaaataaaatctctagtccaaacacactgacagtattatgtttgcctgaatgtgaaacattcctccttttttcttccataaataatttgtttgcttcccaaagatgtatgttttggaaaaaaattgcctgtagtctggttgtgaagaacactgagtcagttgatggtgtgtcttgtcctccagaccaggcagcaacatggtatttattttaatcattaaagtacaacatgagtagtaca

SEQ ID NO: 85448 - DNA, 1587 bp, Homo sapiens
tatgcgaaacgagataatggtggaccagtgaataacgtagcaggatgatgtggagctgacagttgaagaaagaaacctcctatctgttgcatatagaatgtgattggagctagaagagcctcctggagaataatcagcagcattgaatagaaagaagaaaacaaggatcgacaagacatcgctctgcatgcttcgggactttcgcgtcagctgtgcgtgatagaggcgccgccatttttgctgcccggacgcggagcgagaggctgagagagtcggagacactatccgcttccatccgtcgcgcagaccctgccggagccgctgccgctatggatgatcgagaggatctggtgtaccaggcgaagctggccgagcaggctgagcgatacgacgaaatggtggagtcaatgaagaaagtagcagggatggatgtggagctgacagttgaagaaagaaacctcctatctgttgcatataagaatgtgattggagctagaagagcctcctggagaataatcagcagcattgaacagaaagaagaaaacaagggaggagaagacaagctaaaaatgattcgggaatatcggcaaatggttgagactgagctaaagttaatctgttgtgacattctggatgtactggacaaacacctcattccagcagctaacactggcgagtccaaggttttctattataaaatgaaaggggactaccacaggtatctggcagaatttgccacaggaaacgacaggaaggaggctgcggagaacagcctagtggcttataaagctgctagtgatattgcaatgacagaacttccaccaacgcatcctattcgcttaggtcttgctctcaatttttccgtattctactacgaaattcttaattcccctgaccgtgcctgcaggttggcaaaagcagcttttgatgatgcaattgcagaactggatacgctgagtgaagaaagctataaggactctacacttatcatgcagttgttacgtgataatctgacactatggacttcagacatgcagggtgacggtgaagagcagaataaagaagcgctgcaggacgtggaagacgaaaatcagtgagacataagccaacaagagaaaccatctctgaccaccccctcctcactcctcccctccttcgctcgctcaacctcttttgttcagtatgtgtaacttgaagctaatttgtactactggatatctgactggagccacagatacagaatctgtattgttcttactgaaacacagcatggaattaacattaaacttaaataaaacaaacctaaattaaaaatgccaaatatcgcgcctccatcctttatacttctaaaataaaatctctagtccaaacacactgacagtattatgtttgcctgaatgtgaaacattcctccttttttcttccataaataatttgtttgcttcccaaagatgtatgttttggaaaaaaattgcctgtagtctggttgtgaagaacactgagtcagttgatggtgtgtcttgtcctccagaccaggcagcaacatggtatttattttaatcattaaagtacaacatgagtagtaca

SEQ ID NO: 85449 - DNA, 1657 bp, Homo sapiens
agtccactgataccatacgatagaatcacggggcactacacggtagagtgttctgtgataataggtcgaagcgaaaggaatgcgcagggaacgagctagctgagatgacatcaggcctacttcgagccctaataaaagacatggcctacgggagggataagccgatgagctgaagatatccaactacacgatgtcctatctcgacgtgttcagtcatcggctctcaatctaaccccgaatctcattacctaagaacgtatctttcaatatccaccgtgcaccggtgcgtgcaggttggcaaaagcagcttttgatgatgcaattgcagaactggatacgctgagtgaagaaagctataaggactctacacttatcatgcagttgttacgtgataatctgacactatggacttcagacatgcagggtgacggtgaagagcagaataaagaagcgctgcaggacgtggaagacgaaaatcagtgagacataagccaacaagagaaaccatctctgaccaccccctcctccccatcccaccctttggaaactccccattgtcactgagaaccaccaaatctgacttttacatttggtctcagaatttaggttcctgccctgttggttttttttttttttttttaaacagttttcaaaagttcttaaaggcaagagtgaatttctgtggattttactggtcccagcttttaggttctttaagacactaacaggactacatagaggctttttcagcattactgtgtcgtctccgtgccagatgtggcaagatcaccattagcaaatggaaattacatttgaaagccattagacttataggtgatgcaagcatctaagagagaggttaatcacactatagaggcataagtggtatcagttttcatttttctaattgtttaaactgtgttttataccagtgtttgcaagtaattgggtgttagcttgagatggttaaaggtggtttggggagggacttcgttgtaatggttttgctgtaaaaaatgtttccaactccgctgaaatgttgctgaaaagcatggtgctggtaacagttcaacaatccgtggctgctcattcttgcctactttactctcccactgaagcaggttagcgttgaaggtggtatggaaaagcctgcatgcctgttcaattcttttgtttcttctccttccccctccccctacctccttcccctcactcctcccctccttcgctcgctcaacctcttttgttcagtatgtgtaacttgaagctaatttgtactactggatatctgactggagccacagatacagaatctgtattgttcttactgaaacacagcatggaattaacattaaacttaaataaaacaaacctaaattaaaaatgccaaatatcgcgcctccatcctttatacttctaaaataaaatctctagtccaaacacactgacagtattatgtttgcctgaatgtgaaacattcctccttttttcttccataaataatttgtttgcttcccaaagatgtatgttttggaaaaaaattgcctgtagtctggttgtgaagaacactgagtcagttgatggtgtgtcttgtcctccagaccaggcagcaacatggtatttattttaatcattaaagtacaacatgagtagtaca

SEQ ID NO: 85450 - DNA, 1496 bp, Homo sapiens
aagaactctcaccgttgaagtgtcagtagaaacaattagaaacccccagcagcaagaatccctaaagcatgccacaaggattattgatgaggtggtcaataagtttctggatgatttgggaaatgccaagagtcatttaatgtcgctctacagtgcatgttcatctgaggacccacgcgtccgggaagaaagctataaggactctacacttatcatgcagttgttacgtgataatctgacactatggacttcagacatgcagggtgacggtgaagagcagaataaagaagcgctgcaggacgtggaagacgaaaatcagtgagacataagccaacaagagaaaccatctctgaccaccccctcctccccatcccaccctttggaaactccccattgtcactgagaaccaccaaatctgacttttacatttggtctcagaatttaggttcctgccctgttggttttttttttttttttttaaacagttttcaaaagttcttaaaggcaagagtgaatttctgtggattttactggtcccagcttttaggttctttaagacactaacaggactacatagaggctttttcagcattactgtgtcgtctccgtgccagatgtggcaagatcaccattagcaaatggaaattacatttgaaagccattagacttataggtgatgcaagcatctaagagagaggttaatcacactatagaggcataagtggtatcagttttcatttttctaattgtttaaactgtgttttataccagtgtttgcaagtaattgggtgttagcttgagatggttaaaggtggtttggggagggacttcgttgtaatggttttgctgtaaaaaatgtttccaactccgctgaaatgttgctgaaaagcatggtgctggtaacagttcaacaatccgtggctgctcattcttgcctactttactctcccactgaagcaggttagcgttgaaggtggtatggaaaagcctgcatgcctgttcaattcttttgtttcttctccttccccctccccctacctccttcccctcactcctcccctccttcgctcgctcaacctcttttgttcagtatgtgtaacttgaagctaatttgtactactggatatctgactggagccacagatacagaatctgtattgttcttactgaaacacagcatggaattaacattaaacttaaataaaacaaacctaaattaaaaatgccaaatatcgcgcctccatcctttatacttctaaaataaaatctctagtccaaacacactgacagtattatgtttgcctgaatgtgaaacattcctccttttttcttccataaataatttgtttgcttcccaaagatgtatgttttggaaaaaaattgcctgtagtctggttgtgaagaacactgagtcagttgatggtgtgtcttgtcctccagaccaggcagcaacatggtatttattttaatcattaaagtacaacatgagtagtaca

SEQ ID NO: 85451 - DNA, 1221 bp, Homo sapiens
tatgcgaaacgagataatggtggaccagtgaataacgtagcaggatgatgtggagctgacagttgaagaaagaaacctcctatctgttgcatatagaatgtgattggagctagaagagcctcctggagaataatcagcagcattgaatagaaagaagaaaacaaggatcgacaagacatcgctctgcatgcttcgggactttcgcgtcagctgtgcgtgatagaggcgccgccatttttgctgcccggacgcggagcgagaggctgagagagtcggagacactatccgcttccatccgtcgcgcagaccctgccggagccgctgccgctatggatgatcgagaggatctggtgtaccaggcgaagctggccgagcaggctgagcgatacgacgaaatggtggagtcaatgaagaaagtagcagggatggatgtggagctgacagttgaagaaagaaacctcctatctgttgcatataagaatgtgattggagctagaagagcctcctggagaataatcagcagcattgaacagaaagaagaaaacaagggaggagaagacaagctaaaaatgattcgggaatatcggcaaatggttgagactgagctaaagttaatctgttgtgacattctggatgtactggacaaacacctcattccagcagctaacactggcgagtccaaggttttctattataaaatgaaaggggactaccacaggtatctggcagaatttgccacaggaaacgacaggaaggaggctgcggagaacagcctagtggcttataaagctgctagtgatattgcaatgacagaacttccaccaacgcatcctattcgcttaggtcttgctctcaatttttccgtattctactacgaaattcttaattcccctgaccgtgcctgcaggttggcaaaagcagcttttgatgatgcaattgcagaactggatacgctgagtgaagaaagctataaggactctacacttatcatgcagttgttacgtgataatctgacactatggacttcagacatgcagggtgacggaagagcagaataaagaacgtgagactggaaacaaatagtgggaatagccacagggactcttttccacgcctttctcacacttggggatcctcggttggagacccctgtttttggtgaaaaaggggccgggtgttttacggtcataggaaatgctgcccgctttctaagagaggttg

SEQ ID NO: 85452 - DNA, 989 bp, Homo sapiens
tatgcgaaacgagataatggtggaccagtgaataacgtagcaggatgatgtggagctgacagttgaagaaagaaacctcctatctgttgcatatagaatgtgattggagctagaagagcctcctggagaataatcagcagcattgaatagaaagaagaaaacaaggatcgacaagacatcgctctgcatgcttcgggactttcgcgtcagctgtgcgtgatagaggcgccgccatttttgctgcccggacgcggagcgagaggctgagagagtcggagacactatccgcttccatccgtcgcgcagaccctgccggagccgctgccgctatggatgatcgagaggatctggtgtaccaggcgaagctggccgagcaggctgagcgatacgacgaaatggtggagtcaatgaagaaagtagcagggatggatgtggagctgacagttgaagaaagaaacctcctatctgttgcatataagaatgtgattggagctagaagagcctcctggagaataatcagcagcattgaacagaaagaagaaaacaagggaggagaagacaagctaaaaatgattcgggaatatcggcaaatggttgagactgagctaaagttaatctgttgtgacattctggatgtactggacaaacacctcattccagcagctaacactggcgagtccaaggttttctattataaaatgaaaggggactaccacaggtatctggcagaatttgccacaggaaacgacaggaaggaggctgcggagaacagcctagtggcttataaagctgctagtgatattgcaatgacagaacttccaccaacgcatcctattcgcttaggtcttgctctcaatttttccgtattctactacgaaattcttaattcccctgaccgtgcctgcaggttggcaaaagcagcttttgatgatgcaattgcagaactggatacgctgagtctgaaatgtgacgggatccgctagagtcgc

SEQ ID NO: 85453 - DNA, 1618 bp, Homo sapiens
tatgcgaaacgagataatggtggaccagtgaataacgtagcaggatgatgtggagctgacagttgaagaaagaaacctcctatctgttgcatatagaatgtgattggagctagaagagcctcctggagaataatcagcagcattgaatagaaagaagaaaacaaggatcgacaagacatcgctctgcatgcttcgggactttcgcgtcagctgtgcgtgatagaggcgccgccatttttgctgcccggacgcggagcgagaggctgagagagtcggagacactatccgcttccatccgtcgcgcagaccctgccggagccgctgccgctatggatgatcgagaggatctggtgtaccaggcgaagctggccgagcaggctgagcgatacgacgtgctctggaactgaacccgcagtatcttccaaaatggtggagtcaatgaagaaagtagcagggatggatgtggagctgacagttgaagaaagaaacctcctatctgttgcatataagaatgtgattggagctagaagagcctcctggagaataatcagcagcattgaacagaaagaagaaaacaagggaggagaagacaagctaaaaatgattcgggaatatcggcaaatggttgagactgagctaaagttaatctgttgtgacattctggatgtactggacaaacacctcattccagcagctaacactggcgagtccaaggttttctattataaaatgaaaggggactaccacaggtatctggcagaatttgccacaggaaacgacaggaaggaggctgcggagaacagcctagtggcttataaagctgctagtgatattgcaatgacagaacttccaccaacgcatcctattcgcttaggtcttgctctcaatttttccgtattctactacgaaattcttaattcccctgaccgtgcctgcaggttggcaaaagcagcttttgatgatgcaattgcagaactggatacgctgagtgaagaaagctataaggactctacacttatcatgcagttgttacgtgataatctgacactatggacttcagacatgcagggtgacggtgaagagcagaataaagaagcgctgcaggacgtggaagacgaaaatcagtgagacataagccaacaagagaaaccatctctgaccaccccctcctcactcctcccctccttcgctcgctcaacctcttttgttcagtatgtgtaacttgaagctaatttgtactactggatatctgactggagccacagatacagaatctgtattgttcttactgaaacacagcatggaattaacattaaacttaaataaaacaaacctaaattaaaaatgccaaatatcgcgcctccatcctttatacttctaaaataaaatctctagtccaaacacactgacagtattatgtttgcctgaatgtgaaacattcctccttttttcttccataaataatttgtttgcttcccaaagatgtatgttttggaaaaaaattgcctgtagtctggttgtgaagaacactgagtcagttgatggtgtgtcttgtcctccagaccaggcagcaacatggtatttattttaatcattaaagtacaacatgagtagtaca

SEQ ID NO: 85454 - DNA, 830 bp, Homo sapiens
tatgcgaaacgagataatggtggaccagtgaataacgtagcaggatgatgtggagctgacagttgaagaaagaaacctcctatctgttgcatatagaatgtgattggagctagaagagcctcctggagaataatcagcagcattgaatagaaagaagaaaacaaggatcgacaagacatcgctctgcatgcttcgggactttcgcgtcagctgtgcgtgatagaggcgccgccatttttgctgcccggacgcggagcgagaggctgagagagtcggagacactatccgcttccatccgtcgcgcagaccctgccggagccgctgccgctatggatgatcgagaggatctggtgtaccaggcgaagctggccgagcaggctgagcgatacgacgaaatggtggagtcaatgaagaaagtagcagggatggatgtggagctgacagttgaagaaagaaacctcctatctgttgcatataagaatgtgattggagctagaagagcctcctggagaataatcagcagcattgaacagaaagaagaaaacaagggaggagaagacaagctaaaaatgattcgggaatatcggcaaatggttgagactgagctaaagttaatctgttgtgacattctggatgtactggacaaacacctcattccagcagctaacactggcgagtccaaggttttctattataaaatataagaggactaccacaggataacgccaggggggtcaagtcacgacaggaaggaaggagcggagaacagcatagtggatgataacagtgcgacgtgataagtcggctaccgagacagagtaatgagatgc

SEQ ID NO: 85455 - DNA, 632 bp, Homo sapiens
  misc_feature (632)..(632): n is a, c, g, or t
tatgcgaaacgagataatggtggaccagtgaataacgtagcaggatgatgtggagctgacagttgaagaaagaaacctcctatctgttgcatatagaatgtgattggagctagaagagcctcctggagaataatcagcagcattgaatagaaagaagaaaacaaggatcgacaagacatcgctctgcatgcttcgggactttcgcgtcagctgtgcgtgatagaggcgccgccatttttgctgcccggacgcggagcgagaggctgagagagtcggagacactatccgcttccatccgtcgcgcagaccctgccggagccgctgccgctatggatgatcgagaggatctggtgtaccaggcgaagctggccgagcaggctgagcgatacgacgaaatggtggagtcaatgaagaaagtagcagggatggatgtggagctgacagttgaagaaagaaacctcctatctgttgcatataagaatgtgattggagctagaagagcctcctggagaataatcagcagcattgaacagaaagaagaaaacaagggaggagaagacaagctaaaaatgattcgggaatatcggcaaatggctatgtgacattctggatgtactggaccacctcttccn

SEQ ID NO: 85456 - DNA, 692 bp, Homo sapiens
agcggaggtggaggggtgggctggcgtgatgtccgtcttccgctgggagcgagaggctgagagagtcggagacactatccgcttccatccgtcgcgcagaccctgccggagccgctgccgctatggatgatcgagaggatctggtgtaccaggcgaagctggccgagcaggctgagcgatacgacgacttaaaacaggagatctcgaagttcctgtaacctttctctggctccatcacccgtgggttctgatggatagaaccaggaggccacgactctgagagttcgagcctttgtagagcccgagcctccgtccccccgtttgtaaaaacgatgactttacagtttgtgcgcaccgtgatgacaaatgggaagacctgttgaaataaagttatttccaatagtgttcagtaactgtattttggttgactctgcaggctcggaatgctggtctgtacttcgtgggggatcttaacctattccaggcgctcggctgaggctgggttttttgagttatgaaggttgaagatcctgttgctttctttttttccgttttaaataaatgggtttatgtagaaatattagtaggtcctctttgttcgttgttcttttgcccctaatgggttctccagtcctttttcagaacttcatcgaatgtccattgtgtctgtccagtcattgtcaggaagttta

SEQ ID NO: 85457 - DNA, 247 bp, Homo sapiens
agcggaggtggaggggtgggctggcgtgatgtccgtcttccgctgggagcgagaggctgagagagtcggagacactatccgcttccatccgtcgcgcagaccctgccggagccgctgccgctatggatgatcgagaggatctggtgtaccaggcgaagctggccgagcaggctgagcgatacgacggtgagttgggggggcaacggggggctggaattctcggaccctctgccgccgcccacagagg

SEQ ID NO: 85458 - DNA, 568 bp, Homo sapiens
ggagtaaaggggccccaaaagcggcagaaggggatgtgcccacccaaacttggaattcaccgtgggcaagtactagactggtccttgctgactatgtcaagaaatcttttgactactgttaggttcttagctattcctgtagcagcctctgcaatccttagcatcatagtctttactccagtgatttcaagggagagcagttcctacccaaacctccagcaactctgcaccctgcattactgagagctgcatggtctcctgtgttctgactgcaggccttaactccaccttgggactgaccactcagccttgaggctgaggcttacacattttgattctcaatgcatttatctataaaatggaatctgttaggaaaaacctgaactgttactcctgtacagtgctttggttggacctgcatctaaaagactccttccaaatgaagactgtatttggagtccagcttttcctctgctcaaggagtttcataacgattacagagtctttgtgggacaatatagatagataatttatgttcaaatatacaaatggaagccctgttagggag

SEQ ID NO: 85459 - DNA, 436 bp, Homo sapiens
tttgtattttttgtaggacggggttttgccatgtttcccaggctggtctcaaactcctgagctcaggcaatcacctgcctcagcctccaaaagtgctggaattacaagcatgagccactgtgcccagcctaatttgtttaaaatgcatttaaatgtggctgattaacaacatgagtttatctttatttcatgaacctgagtgcataagcaaactggagggtataaaagacaatagaggagaatatagaagcagacatgagatgtcaagtttttggtggtgagaaaatagaagagtggtgactgacttagcagagcctgcagaaaagtatactggcacaaggatgttcctgggaagacagaggccttggagacagtgggcattatggaagaaagagggctgaaaatggggattcattgaaattctaatgtcagatcc

SEQ ID NO: 85460 - DNA, 648 bp, Homo sapiens
tgtacagaagggcctcaggacttggcaatttagggaggaaatcaaagaaagggaggagtcagagttctgtagaaactggctggctcgcatctgtaatcccagcacttcgggaggccaaggcaggcggatcatgaggtcaggagttcgagaccagcctggccaatatggtgaaaccccgtctctactaaaaatacaaaaattagcaggcatgcgtgcccgcctgtagtcctggctgctagggaggctgaggcagaagaatcacttgaacctgggaggtggaggttgcagtgagccaaaatcgtgccactgcactccagcctgggtgacaaagcgagactctgtctcaaaaaaaacaaaaacaaaaacaaaacaaaacaaaacaaaagcgcagttctgtagcaactaaaataaggagtgtagaagaaaggctggatgcagaaatttatttctagtgtatttatttctagtgtatttgcatataaatgttttaaaagaagactagaatatatggctatggggccgagggaaacctttgtttggacatgaaaaaaaatccaaaatctatttatagagctgtcaaattagcggaatgtgcaactttctgagaataactgtacaataatatactattctaatagtgtggggtag

SEQ ID NO: 85461 - DNA, 1006 bp, Homo sapiens
ccctggagcgcagtcactttacaaccaccttcctccccaaatgccagcatggacaaattagatccagaagccctgcacacagccatcctcagggagaaagcacagttggctgggccttgattcacgaagggggcctgccccatgccacggcggtccctcctggcacccgcctcctgataaccctcgtgctgtgtcgataccacagatcctgttccgggccaaagacctggatcccgagcccaggagccacatcgtgcgagggaaccacacgcagtcggccctgctggcaggcctgcgcaagttcgtgctctacgagctccaggtgctggcgttcacccgcatcgggaacggggtccccagcacgcccctcatcctggagcgcaccaaagacgatgccccaggcccaccagtgaggctcgtgttccccgaagtgagactcacctccgtgcggatagtgtggcaacctccggaggagcccaacggcatcatcctggggtaccagattgcctaccgcctggccagcagcagcccccacaccttcaccaccgtggaggtcggcgccacagtgaggcagttcacagccaccgacctggccccggagtccgcatacatcttcaggctgtccgccaagacgaggcagggctggggggagccactggaggccaccgtcatcaccaccgagaagagagagcggccggcaccccccagagagctcctggtgccccaggcagaagtgaccgcacgcagcctccggctccagtgggtcccgggcagcgacggggcctcccccatccggtacttcaccatgcaggtgcgagagctgcctcggggtgagtggcagacctactcctcgtccatcagccatgaggcgacagcatgcgtcgttgacagactgaggcccttcacctcctacaagctgcgcctgaaagccaccaacgacattggggacagtgacttcagttcagagacagaggcggtgaccacgctgcaggatggtgagcaaccc

SEQ ID NO: 85462 - DNA, 800 bp, Homo sapiens
ggacctgaaaaatagaatccattgacttgagcattagggagtcattgacattgttcacttatattatggatcaaatgttaaataggtattaattttttaaatatcagcagtggtaagatttttaggtcttataaaagagcatgcaaatccatgtcaaaacatttaagataaagaaaatttggcatttaaaaagaccctccttatataataagaaaatgtagttttgaaaggtgcttttatgtaatatcagtttcccagggctgccttaacaaagtactacaaactgggtggcttaaaacagcagatatgtgttgcctcgcagttctggaggccagaagtctgaagtcatggtgttggcagagccatgctccctctgaagggacctgggaaggatctgtcccaggtctctctcctaacttctggtagtctcaggcattccatggcttgtaaatgtatcactggagtcctttgtcttcataccatctttctgtgtgtaattgtgtccacatttcctctttttataaggacaccagtcgtaatgggttagaacccaccctaagtattccttttaacttgattacctctctaaagaccctgtttccaaataagattacattctgagtcactgggagttaggacttcaacatatctttttgggggaacaaaattcagcccgtatcggtgcttcagtttgacagctacacatcataccaagaaaacccttcagttgtttatagtgtctagtctcctaaattatttctctagagactcttgctgaatcctagatttttaatgatatg

SEQ ID NO: 85463 - DNA, 455 bp, Homo sapiens
tcaccgtgttagccaggatgcataacacctcctttgaagtagacacaaccattgttctcagttcacagattagaaaactgagacttaagtgcgtcactgtctagtgcagttctaccctcacgacaaagccatgtttcttccccgtgaatgaagagaaaggcaaatttacagtatttgcctttcgggactcattggtattctctcttgaaacacttcttactgcataattcagagttctcggcagcgtatccatctcttagaaagggctcttcctgggaaggctggaaagaaaggctctcttctaacgaggccggtgtctccagcactccactaaatatgaagaggtacttgcttgatttttacaaaatcagctttgtgagaggatgagtggtccagcccctcgcccagctgtgtgagtcctgagcacctgcgcttcagagtaaggctgttggacc

SEQ ID NO: 85464 - DNA, 218 bp, Homo sapiens
catttttatttgtcctcaatcaaccctctgatagtcctgaaacagatgcttttaaatgggaactgcggctcagtattttttacaaatatgcacaataaaagagaaacagtttcaaattacttgtgatatttaaaaaaaaaataagtcagcaactaacagaagaaggtttccactgacattcaagagtagcaaaccatcccaagattaacagtttgtgc

SEQ ID NO: 85465 - DNA, 547 bp, Homo sapiens
atactggcatttgtgtcgttttggatgagtactcaagaccaaactcctcttctgtaaagtggggtaataatctctaccctgcttgcacatgggattctttcaaggagcaaactgaggtctcgcatgggagacagctgagcaacctgcaaggttgtgggaaggaggaggggtggtctgagccaccacgctgtcccagtgtgtcaaggagcttgatagcctctttccacacctcgattccttccactccaagggacagtaacttaatcacctgatttgtaactttgggaataataaactgggcatgcacttacctgatgccctcagctataatagttcacacaagaggagaaaaacagatagccctatagaatgctacaggagatttcaatcttctttagctgaaactccctgacttcccatcatgtctgagaatttggcaaatataaacccagctgtgtgtttagggatctttgagtttctaaatcatcacactatccctacacagctttgctggaggttttgcaggtttccctttccccggtagagt

SEQ ID NO: 85466 - DNA, 375 bp, Homo sapiens
tgattacttcctcattcctttgatatactacctcaggtaacctcctaagaaacagggtatggggatatattttcaaattcctgcatagctggaaatgtcttaattctatcctcacacttaactgatagtttggctaagtacagaattctaagtaatttgttttagccaattgctttaggtgagcagacaaaaagttggcaattaaacttggggatccttaaaggtcagaatgtggaagaccttcttcctgtgtagcaccaactctgcactagctgtctttgttttgtttattacagacggttcattcaatgtttttttgtttgtttgtttgtttttttgagacagagtttcactcttgctgcccaggctggagtg

SEQ ID NO: 85467 - DNA, 341 bp, Homo sapiens
agagcttccctcggctgctggctgcaaggtggtggaactcggtttattgcctggttggcccctctgcaggatacacactgcgtggtgctggttggaatactgttctaatgaagtcaccatctgggtccactggttggtcccctgtcgtgacaattgccttcatcctgtccaatcagccacctcacaaaccttggccagggatcccatggagagtctgactacagagaaatttaaagatatttgtcttcttgtctgtggcctaagcagcctgaatttcatactatggtaatactgacagaatcacctgtttatggagtggtgaatgaacctgtttatagtaa

SEQ ID NO: 85468 - DNA, 1739 bp, Homo sapiens
tgagccaggtgtgggatatagtctcgtggtgcgccgtttcttaagccggtctgaaaagcgcaatattcgggtgggagtgacccgattttccagggactttataattgatggcttatcagtggagagaaatcatgttcttgttagaataaatcttgttggtgggccattggaacggattttgcctccgaggttactcgaaaagagtgataatccatatccttggccaatgttttcatcatatccattgccaaactgctatctgtcagacattacaagaaatgctggtataaaacaagacaatgatcttgacaagcttttattatgcctcaaaatatctgataaacaaactgaatggatagaaaactgccaaagacaattttgcaaaatgatgaaagccaaacctgatataatcagtggagaggtgctcccaatttttaggtttttcctgtgtgagataccatcgagagtataaaatgaaccttaatagaattacttgaaaaatttgtgcttcatctcactgaaagcccatctgaatgctacttcccttcagtggagtatacagctactgatgcaaatgtgaagaatgaaagtctttcatctgtgcagcagcttggcattaaaatgactgtcaggtatggcaaattcctcagtctcttaaaagatggtgcagaaaatgatcttacctgggttttaaagcattgtgagagattcctgaaacagcagcaaacttccataaaatcttctcttctctgcctgcaagggaattatgctggccatgactggtttgtatcttctctgttcatgataatgttgggagacaaagaaaaaacattccaatttcttcatcaattctccaggcttctgacttctgcttttctttggttgccaaggctacatatttctagttaccttcctaatgacactgtagaatctggcatccatccagtatatttttgcagcacccattatattgaaatgctactgaaggctgagttgcctcttgtgttttcagcttttcacatgtctggttttgcaccatcacagatttgcctgcaatggataacccagtgtttttggaattacttagattggatagaaatctgccattatattgctacttgtgttttccttggtcctgattatcaagtgtatatctgtatagctgtattcaaacatttacagcaagacattctacagcacactcagactcaagatctgcaagttttcctaaaagaagaagcactgcatgggtttcgagtgagtgattattttgaatacatggaaattttggaacaaaactaccgaacagtgctgctgagagacatgcggaacattagactgcagagcacatagatcatgagacacacggtttaaatttaggttttatttatttttaaacacagcaggggggcttgatgtttttctgtgtctgtaacaacatttactttgtgaatatacatattgtaaatactgagaagtataacgatatatttaagtaggtatgagctcaatttgtgaattcatttttgtaaatttgttgttttgtaaggttattatagaatcagatctagcttacttttagttcttattcatgtttaagagttagtcctggccaggcgcggtggctcactgcctgtaatcccagcactttggtaggctaaggcaggaggattgcttgaggccaggagttaaagaccagcctgggcaataaagcgagaccctgcctctgcaaaaaaaaa

SEQ ID NO: 85469 - DNA, 457 bp, Homo sapiens
catttactttgtgaatatacatattgtaaatactgagaagtataacgatatatttaagtaggtatgagctcaatttgtgaattcatttttgtaaatttgttgttttgtaaggttattatagaatcagatctagcttacttttagttcttattcatgtttaagagttagtcctggccaggcgcggtggctcactgcctgtaatcccagcactttgggagtctgaggtgggcggatcacgaggtcaagagatcgagaccatcctggccaaaatggtgaaacctcgtctctgctaacaatactgaaattagctgggtgcagtgatgcgcctgtagtccctgctacttgggaggctgaggcaggagaatcgcttgaacccgggaggcggaggttgcagtgagccaagattgtgcccctgtactccagccaggccacagagtgagactctgtctcaaaaaaa

SEQ ID NO: 85470 - DNA, 302 bp, Homo sapiens
  misc_feature (7)..(7): n is a, c, g, or t
agcaggnggagactgccacctcagcgaggggagctgcccgctcaggcccttgaccgcgtacttcccgcagcagggtacagccgctctcttccgctgctgcttctatggttgaccaaggcgtacatatgttctagttaccttcctaatgacactgtagaatctggcatccatccagtatatttttgcagcacccattatattgaaatgctactgaaggctgagttgcctcttgtgttttcagcttttcacatgtctggttttgcaccatcacaggtaatccataagggagtagcatttctcca

SEQ ID NO: 85471 - DNA, 1022 bp, Homo sapiens
tgagccaggtgtgggatatagtctcgtggtgcgccgtttcttaagccggtctgaaaagcgcaatattcgggtgggagtgacccgattttccagggactttataattgatggcttatcagtggagagaaatcatgttcttgttagaataaatcttgttggtgggccattggaacggattttgcctccgaggttactcgaaaagagtgataatccatatccttggccaatgttttcatcatatccattgccaaactgctatctgtcagacattacaagaaatgctggtataaaacaagacaatgatcttgacaagcttttattatgcctcaaaatatctgataaacaaactgaatggatagaaaactgccaaagacaattttgcaaaatgatgaaagccaaacctgatataatcagtggagaggtgctcccaatttttaggtttttcctgtgtgagataccatcgagagtataaaatgaaccttaatagaattacttgaaaaatttgtgcttcatctcactgaaagcccatctgaatgctacttcccttcagtggagtatacagctactgatgcaaatgtgaagaatgaaagtctttcatctgtgcagcagcttggcattaaaatgactgtcaggtatggcaaattcctcagtctcttaaaagatggtgcagaaaatgatcttacctgggttttaaagcattgtgagagattcctgaaacagcagcaaacttccataaaatcttctcttctctgcctgcaagggaattatgctggccatgactggtttgtatcttctctgttcatgataatgttgggagacaaagaaaaaacattccaatttcttcatcaattctccaggcttctgacttctgcttttctttggttgccaaggctacatatttctgtaagacttcaatctgtttttaaaggagggtttgaaattttaagaacattatacttacattcactggggcataattttatttgtgaaggactttgtaataaattatactcatttttcta

SEQ ID NO: 85472 - DNA, 391 bp, Homo sapiens
agctggtgggggcagcccggtgtggactgcagactgcctgctagcttcttccttttcttcccaacgcgtaagaagcaatccttgagtagagacatgtaatagatgctcagacctggctggacatggtggtttatgtctgtaatcccagaactttgggaggctgaggcaaagccatgagttcaagaccagcctgggcaacatagtgagaccctgtcagtgcccccccaccccccaaaaaaaaaaattacccaggtgtggtggggcatgtctgtagtcctagctacacaagaggctgagatgggaagattgcttgagaccaggagtttgaggctacagtgagctgattgcaccactgcactccagcctaggtggcagagtgagaccctgtcta

SEQ ID NO: 85473 - DNA, 272 bp, Homo sapiens
gttcccctctcttgcctgttttcttttttatttatttcttttataaaattattaaccaatgtctagaattaagcaagcaattttcactttttgccgaagagctgattataaaaatacttatttttaatttaagttacatttcctttaaaatattagttaaaaaattcaaacagtttttaaaagggcttttctctttctttctttctttgttttttttttctttctttctctttctttctctctctttcttttttctttctttcttgtcgacc

SEQ ID NO: 85474 - DNA, 668 bp, Homo sapiens
gcattttttttccccatatgagctttaaaattagcttgtctggttcttgaggggaaattggtacttttatcaagatcaagttaaataaatagattaataagaacaggcttaatcatacggaggcttctatccaaaaacatggctatatgtcttttttttgagatggggtctcactctgtcacccaggctgaagtgcagtggtgcattcttggctcactgaaacctctgcctcccgagtagctgggattacaggctcccaccaccatgcccagctaatttttgtatttttagtagagacggggtttcaccatgttggccaggctggtcatgaacggttatgtgtttttccatttgttccaatggtctttgtatgtctcagttttcaaatttttaccatttatgtctcgcatatttttaaaggtttgtctcttggatgttttaagtgggattcttctcctgctatactttgtaactagttgtgtatagaaaagctattgatttcagctatcttgttgaattatcatgggggaatatcttttatttgactcttttgatatacctggaaaaatattgtttggctacttaatttttacacttattcttgtttaaatgctctgaaatatccagaatattaaatatggtgggagtaaaattgcttgtctgaatcc

SEQ ID NO: 85475 - DNA, 498 bp, Homo sapiens
ctattcatacctacccagactaacaagtagcaggcagatgataaatatatttttaggtggttaggtgatgaaacacctcctccaaatgaaggcataaacaacaatgcatggggatccaagaaacagtgactccaacccaagagagcagtgaacaaatccacaggacagcagctaagtaggaggcctaaacatcacctggggcagatggggcgagagagcagagagcttgggaaagaagtctctgaggagaaagaatgaggcaataagtcagatgcgtatttgcggacctcagaaaaatttgagtacataggaaacaatagatgaaggatagaaataatccattcagattctctcctttgcatgatgaccacattaaacttacagagtaagaaatgtcattctagatttgattctactgtttgtctttgcagtgagctatgtttttttataacatgtagaagtgaaataaacttgtcacaaaaatgcaaaatgtgtcac

SEQ ID NO: 85476 - DNA, 103 bp, Homo sapiens
aaagacagtctcaggacaacttatcatcaagactaaataaataaatgctccccccaacaaccccccagcctgaggaagtaagttccctccttttttgcggggg

SEQ ID NO: 85477 - DNA, 414 bp, Homo sapiens
atttttaaaaaatgattagtaaattaggaacagaagggaaaagccttaattttattacaaaaaaaaaaaatagaacaaacattattctgaattaactaatgttagaagctttccctttaaagtcagaaactggccttgcagctggtctgcctgagacctctagtgccaaccccaataccccacgaagtttaatttccactcacgaaattccactttcgttttcattataaaatgaaaaagccctcacaaaccatgaaaaacttgccagatttcaagcacaattgtgcactggtaaaaaggaactgccctcagatgatacagcaaacattatctgttaaaacagatgataaaaaaaatcttcagttttcctgaaagaaagtagaaataggcaatatctctgatactaaagaggta

SEQ ID NO: 85478 - DNA, 603 bp, Homo sapiens
tgaaggactggtcaggggccctaaactcttatctaatatttctggagaaataaatggcaccaaatgcaaacatcctttggaatactcatatagaattcctgactagtcatcttctaaatccacccttctaacttaaggtcctaatcttctcttccactactttagaatttctagagcctctattttactccacgagaactacaattctgtagtgatctccatggattgcaaattagactaaatggatgtctaaatatttggaaaagtgttttttttgtttgtttgtttgtttttcatgaaaccgaggaggacactgtctcctcaaatccattgctctgggtctccacacctgtaaaggaataattaggggtaaaacattggcattctgattctgtcctgctgaggtcaccattctttacataacttttaatacagcaagacaaaccaaaaaacgacaaaaaaccaagtgtagtttgattgatctgctaaggatttttcttttgtttattgtttatgacatatatgtattttgtattagtcagcttatgctgccagaacaaaataccatagatttgatggctttacaggaatttgtttctcaca

SEQ ID NO: 85479 - DNA, 641 bp, Homo sapiens
tccagatcagccagcattactaacctgtcactggatagatctggttctcctatggtaccttcatatgagacatctgtcagtccccaggctaaccgaacatatgttaggacagagaccactgaggatgaacgcaaaattcttctggacagtgtgcagttaaaagacctgtggaaaaaaatctgccatcacagcagtggaatggagtttcaggatcaccgctactggttgagaacgcatcccaactgcattgtaggaaaggaattagtcaactggctaatccgaaatgggcatattgccacaagggcacaagctatagcaattggacaagcaatggttgatggacgttggctggattgtgttagtcatcacgaccagcttttcagagatgagtatgcgctgtatagaccactgcaggtacttttcagtgtttactgccaattagaatgtagcaagcttattttatagtctttcttcatcagtgggaataaaaagtagtttattagaagatgatttttctaacattttttcctgctgtttgaggaaagttaaaactttttttacttggtaggcagcagtgatgaaaaagctgccattagaatcaaacattttattgtttactttaaatttgatcagacaataaa

SEQ ID NO: 85480 - DNA, 475 bp, Homo sapiens
ttacttatccaagggccatttgaaattctaactctgattagaactgaaaaaaaatattttaaggttgtgtcttatctggtacttaactattctgactgacttttaaaacttttcatttttgtgggtcttgattcagggcacaagctatagcaattggacaagcaatggttgatggacgttggctggattgtgttagtcatcacgaccagcttttcagagatgagtatgcgctgtatagaccactgcaggtacttttcagtgtttactgccaattagaatgtagcaagcttattttatagtctttcttcatcagtgggaataaaaagtagtttattagaagatgatttttctaacattttttcctgctgtttgaggaaagttaaaactttttttacttggtaggcagcagtgatgaaaaagctgccattagaatcaaacattttattgtttactttaaatttgatcagacaataaa

SEQ ID NO: 85481 - DNA, 514 bp, Homo sapiens
aattgtgtgagttagctaccataaagaaatccaagttaggtttccttttatgagtctaaaaatcacaggaaaacatctgaaaaggtatatagcatttttctcaagggtaactacttgctgttaatgtgattgcaggacagtgtgcagttaaaagacctgtggaaaaaaatctgccatcacagcagtggaatggagtttcaggatcaccgctactggttgagaacgcatcccaactgcattgtaggaaaggaattagtcaactggctaatccgaaatgggcatattgccacaaggtattctgatcttagaaggtttcaatattatttgtttattttgaatgagaaaacatatttgaagatagtaagagttacagatttctttgtagagttagggtgctctttgttttatgtaattgatggtttagggtgctaattacttaaccctcctccaatctgagttttaaccagcagagaacagatgcaaggagtacaaggagccaaataggatcttaatt

SEQ ID NO: 85482 - DNA, 496 bp, Homo sapiens
tcgtttcgtcctttacttatccaagggccatttgaaattctaactctgattagaactgaaaaaaaatattttaaggttgtgtcttatctggtacttaactattctgactgacttttaaaacttttcatttttgtgggtcttgattcagggcacaagctatagcaattggacaagcaatggttgatggacgttggctggattgtgttagtcatcacgaccagcttttcagagatgagtatgcgctgtatagaccactgcaggtacttttcagtgtttactgccaattagaatgtagcaagcttattttatagtctttcttcatcagtgggaataaaaagtagtttattagaagatgatttttctaacattttttcctgctgtttgaggaaagttaaaactttttttacttggtaggcagcagtgatgaaaaagctgccattagaatcaaacattttattgtttactttaaatttgatcagacaataaaaaaggaaaa

SEQ ID NO: 85483 - DNA, 921 bp, Homo sapiens
ctactgttcttactgattcagctcagtttccttccttccttccttccttccttccttccttccttccttccttccttccattctttcgttctttctttctttctaatgtaggccactgtcatctcttttctggattacttaacatacttccttatttgctttctgtggtgctagtttactttgccaatgaattcttatactgtagctggagtaaatgtcttagaataaaatcgactctttaaaatgaatcattgcatgatttttaaacatgtcttttactgtctgcctctcactgtacattctattccaattgaatcttgatttccttagttccttaattatgttctctcattctaggccctcctcatatgcctaactgcctgctctaccttttccctgttttcttgattattgtgctacttctacaaagcctttctgaatttagacatcatattctctgagaaatcttatctttaggcctgattattagttgctccttgtgtgctgtgttgtagttataattgcctgtaaatgtgtacaagagaccataagctctttgagagaatcatgtctgtctggttggttgatgtatcggtggtgaaatttcaagcattatactgctttgaaaatgtcagagaaaaatttagcatgcttttcatagtagaaaaatttaaataccattatttgactttcaagattctgaattttatatagtgttagtgattttttaacatttaaattttcgaaagaaaaatatgcgatatcatcattcatatggttaatttaactcagctatgtggagacatataagaggagtctcatgtttacagatgagttgtccgagtttgttacctagtggtaaaatcatgtttttacatggtcatataagaaatgtaagttcagtttttaataataccagac

SEQ ID NO: 85484 - DNA, 457 bp, Homo sapiens
acctaccaaattgcagccaaaaaaagaaaacatggaatgtggagttcaaaagtttcttagacaacttcctctcagacttggttcagaaaaggataataggatgctctacttttactttgctttttagattctttgtgaaataagataggatatagaataaatgtctaaacttataatgccctgcaaggctgaggcatctctgctggctgtagcttcagttgtccagttacagccttcttgcccatttaactcttacctttgcttcagatcctgttcttaactctgagttgctctgctcattcccaagcttacctttgttggagatgctttttccaattaatacatttatggagcacttactgtgtgtcagattcaggcacaagggatgctgtttttcttttctatgctaactctgccttcttgcatcccaacctcagctggatttctggagctcctt

SEQ ID NO: 85485 - DNA, 841 bp, Homo sapiens
atgtctgaaggattgtttctagactttcctgttccatttgtctatttgatattctaatgcaaacactacagtgtctaacttactataataagccttgacatctagtaatgtaattccaccaactttattcttctttatgatcatcttgcctacttttgtctctttgcgtatcgctaaataatttagaatgagggtgtcaaattccacaataaacttgctagtgttttataaagaaagcattagagctacagattaattttggaagaattaacatcttggctatattgactcatcaaatccattaatatgaattagtcttccatttatggttgtttgaaacatttttttccaataatgttttagggttttctctgtagtagagtttctaaatttttattggatgcattactagttatttgatgccatcgtaaatggtattattttaaatgtactacttttaaactacctattgttgtcatatggaaatacaattgaggaaggtagacatcaacaagacggtaaaagaaaaagccttgaatcctccttccccctctaaacactaaattaacaataatagatggatacatttcctttgtgacaaacttagatactagttgagagggtcctgcaccctgagtgagtgagaaaccatctacattgaagctggaagaaaaatttgacacactctttaaacataatctctactcctgccacggtgtcataaaaccaggattaaacgctccatctccaaggttctccattcagagggagaaaaaggaactacttggtcaatgtagcagttttttgatggtatgttcaaaggacatccttctctcttccc

SEQ ID NO: 85486 - DNA, 788 bp, Homo sapiens
gaagggaggcctccaggaggaggagcattggaagagattctggagagtgaggagcagaatttccactgaagtacctctggttgaaaaggagaacagagacttttttcacagccacaggacaaaatttgttcagaattaaatgctgaaaaaggaggctggagtgccgtggcacaattatggttcaccagcctcaacctcctgggatcaagcaatcgtctcacctcagcctcctgagtagctggactgcaggtgagtaccactatgcctggctaatttttgtatttgttgtagagatggggtcttgctatgttgctcaggcaggtcttgaattcttgggctcaagcgatcctccttcccaggcctctcgaagtgctaggataataagggtgagtcactacacctggccctttgctcagttttttttttttttttttttcttttggagacagagtctagctctgtcgcctaggctggagtgcagtggcgcgatctcggctcactgcaacctccgcctcccatgttcaagtgattcttctgcctcagcctcctgagtagctgggactacagtcacgtgccaccatgcccagctgtatttttattagaggcgggtttctccatgttggccaggctggtcttgaactcctgacctcaggtgatccgcctgcctcagccttccaaagtgctgcgattacagacatgagccaccgcacctggcccccttgcttattttctacgttgttgtttgtagtcctgttattgagaagtctgggattcttgtatattcttaa

SEQ ID NO: 85487 - DNA, 377 bp, Homo sapiens
gaccctgtttcaaaaagtaaaatataaagaatttcataataatcttacattagtgccaaaaaaggttttatattgcacaaaacaactggatttaatgggctcagcttatcagtcaaatgacatgcttgctcctgaaacattttttttgcatagttcctcttatccccagatcacccctgtccagggtggaagcactcatttctcagatctggaagtgttggcagccaactctcagctgtgtccgtctcttcaggactgtcctcagttgaagagagtcatctgaccagagtcacatccagcaattgctccatgtgagggtacaaaaccccagccctataggcccaatttgggacaactccacgggcccacagcagctc

SEQ ID NO: 85488 - DNA, 522 bp, Homo sapiens
aggtacagatctggaagtgatcagtacataggtggtgactgaagttgaagatgtggctcaaattgccagagggtgagatgagaacctttgtttaagaggcaaagtatgaaaccaatcaaaaaagtagagggagaataaaggttttgcaaaagtaaattaaagggctccatggagaggagctcagagagactaagattaagtattatttaaagaggtaggagaaaagcagtgtctgagaagtggtgtcagagaagccaggagaatagagtttcataaaagagcagtgccaaccaaagtcagtatggaaaagattcactgggaggcaggggaagaggaccacgggtgaacacggcgagggcatttcaaggaagaactgggagcaaaatcaaactacaccatccattgtggaattaatgagagatttaagaagtgaaaacaggccaggcgtggtggctcacgcctgtaatcccagcactttgggatgatgaggcgggcggatcacgaggtcaggaattcaagacc

SEQ ID NO: 85489 - DNA, 158 bp, Homo sapiens
actctagagatccccaaacaccgcaatctgtcccctcactcgctgtcgttctcttctctgggctggtctctgaaagctggccgggcagtgtcatgggcagggggctggttgatgttgggtgtcagagcaggaagatctcagtaaagaggcgatgtttg

SEQ ID NO: 85490 - DNA, 488 bp, Homo sapiens
gcggattgctggtcttgaactcctgacctcagttgatccgcctgcctcggcctcccaaagtacagggattacaggcatgagtcaccacacctggcctggtcatttacatttttgccagaatgaaagataagcaaaagttacacatgcacacatatacatacatgcgtgtgtagagattataggtatatgtgtatgggcatgtatgtatataccatttgtattgtcctccattttaactccttattttgcccatatttttgttgtctctcctaagttattttttggagacgggatcttgctctgtcacacaggctggtatacatgggtgagatcatagctcactgtagccttgaactcctgggctcaaaagatcctcccatcttagtttctctcaagtagctaggactacaggcacacagcatctcaagatcctggcctcaggtgaatcgcttgaccccaggaggtggaggttgcagtgagccgagatc

SEQ ID NO: 85491 - DNA, 422 bp, Homo sapiens
cattcagtatccaattaaaagacaaagattatcaaaccacagaaaaacaactacatgttgcttatgagactgacctaaaacatagggagctttaaaagtaaaaggatagaaaaaagacaccatgtaaacatcaagagaaaacgatgttaatgttaatcagttatccctatgtatttcatatgtattgctgtaatgcttgccaaatgccggttttctaattccactgttttttctacacttactggaattcccttatccatttatttctcctttattcacttatttatgtcagtataaactcatagattcctattttatttcatgggttataactcattattgctcaaaatatccatgttttagacttgttaattaacttccgtgtgtatgtgtgacaattccaatatttaatgccaattcag

SEQ ID NO: 85492 - DNA, 699 bp, Homo sapiens
cgcggggagtcgaggctttgcgcctgtgcttcggaccgtagcgccaggcctgagcctttgaagcaggaggaggggaggagagagtggggctcctctatcgggaccccctccccatgtggatctgcccaggcggcggcggcggcggcggcggcggcggcggcggcggcggcggcggcggcggcggcggcgaccgagaagatgcccgccctgcgccgctctgctgtgggcgctgctggcgctctggctgtgctgcgcgacccccgcgcatgcattgcagtgtcgagatggctatgaaccctgtgtaaatgaaggaatgtgtgttacctaccacaatggcacaggatactgcaaatgtccagaaggcttcttgggggaatattgtcaacatcgagacccctgtgagaagaaccgctgccagaatggtgggacttgtgtggcccaggccatgctggggaaagccacgtgccgatgtgcctcagggtttacaggagaggactgccagtactcgacatctcatccatgctttgtgtctcgaccttgcctgaatggcggcacatgccatatgctcagccgggatacctatgagtgcacctgtcaagtcgggtttacaggtaaggagtgccaatggaccgatgcctgcctgtctcatccctgtgcaaatggaagtacctgtaccactgtggccaaacagttctcctg

SEQ ID NO: 85493 - DNA, 865 bp, Homo sapiens
atatagtattatggtccaaataagaaaaatataatgtattactctagtgtgaacagtgcaattccagcaacgacatggtattaaactgaaattatctgcagttagtttctttgaagaacatagttggaagttgtaatttacaagttttgctacaaattggaatcacctgcagatttgtaatgtataatgaaactggcttctatctgctgacattctgattaaacttttgagttcgtaaatgtaaattgggctctatgggtttaaaagatcctcggttaattcttaagtgtagtagagtttaagaaatactagattaaaaatttgggaactgagtttactcggatacagataattctcaggaaactctgtataataccaaaagtgaaaggggctatgatgtgaaatggcatcatttataccattatagcattgttaccctccattaatattaaaaactgttataataacaaaaggtattttttgttgttgtgagttattgaatccctactatgtacattgtattgtgctaagtgttttacatgtaaaatttaactgactcttctaagtaattatacatattatctgcttttaatttttcttaaattgaaaaaatcagctaaaatgattatgatgggccccaccatcatggaatttttttgaaatcatttatttctattaatcccaaaatataatggtaacaaattttccccacacatcatttcaatttttatggactattgatttttctaaatgttaattaaaagctcaaaacttgactaaccccttggcacttccatttctcactcatttgcctgttgtgatcgtgttttggttttctattctcatcaacatcttttctactcca

SEQ ID NO: 85494 - DNA, 1072 bp, Homo sapiens
  misc_feature (75)..(75): n is a, c, g, or t
  misc_feature (220)..(220): n is a, c, g, or t
  misc_feature (239)..(239): n is a, c, g, or t
  misc_feature (371)..(371): n is a, c, g, or t
  misc_feature (494)..(494): n is a, c, g, or t
  misc_feature (687)..(687): n is a, c, g, or t
  misc_feature (777)..(777): n is a, c, g, or t
  misc_feature (881)..(882): n is a, c, g, or t
  misc_feature (885)..(885): n is a, c, g, or t
  misc_feature (899)..(899): n is a, c, g, or t
  misc_feature (934)..(934): n is a, c, g, or t
  misc_feature (957)..(957): n is a, c, g, or t
  misc_feature (979)..(979): n is a, c, g, or t
  misc_feature (995)..(995): n is a, c, g, or t
  misc_feature (999)..(999): n is a, c, g, or t
  misc_feature (1010)..(1010): n is a, c, g, or t
  misc_feature (1025)..(1025): n is a, c, g, or t
  misc_feature (1040)..(1040): n is a, c, g, or t
  misc_feature (1043)..(1043): n is a, c, g, or t
  misc_feature (1048)..(1048): n is a, c, g, or t
  misc_feature (1050)..(1050): n is a, c, g, or t
ctctctgtttaggactcaggaggagctttcaaaggaatgggctttgtctgtcagtcacatgccaagcgaccccgncctgtcagctgtcactctctaatttagaacactgtctatggccattggctgaggccccatctattgtccatcaccacaaaattccccaaatgaaatattcatcacagcagatccatcctgaaccagaaggaagagaacacaaagnagatattctaagcaccaangccttaccaatggatcgttgtcttgtagtggatacttttcttggtttgctttttgtggggatcaatcacattgctttaaaatagaactgatttatttaaacacaaaatatctttgttggaaaatgctcattntgctacacaacaatcttctgggttcactgaacgccctctaatttcctctactgtctggatttggaaaaaaactgaaaagcatgttatatgtttgtcctctttcctcacagaaagcaaagatgnactagaggacatgcaagcccactcctataggacaggtccgtcctgctcagcacccacactcagtggaggtctcagacgacctgggctattagctgacagagctaccaggtgaaatggcaagtaatgctaccctgggctatctcacgagaaacagctgctagacatggtccagacttggatagacccaggaggntttgctcatttctacagagtaagtaaagcagagatagcagccaggtgtgccatgaacaggcctggccctaaagtatgtatcctgggcagnaacaccaatgaaagcctgacccacagttcccatcccaccctgggttctgtgcccctgcacaagcatcctgcaaatgtgggcgggaacatcggtgcaaacatcanntantcagtgcacacccntgaaaacagctgcccctttggcccagtgtgcacantggcctagatatggagagaggancaggcaggcctgggcaggaggnttttggctgtttgggnaggnaacaaggggtnctgggagcccagagnagattacaagtgggnagntggantntgtgcatcatagcttttcactc

SEQ ID NO: 85495 - DNA, 498 bp, Homo sapiens
atgtaaagggttaactctgcagaagtaattgacattggccccatgccttagcagcagactgatcagctcatagttgcccatcctgagggctatctggaggcagttaaccgggtcttgattaggcagagctccagcactcagaagcagcttgactgaagagaggtcactgtttgatacagcaaaatacaaagctgacttcctgtggtcatcgtagtgtttgttaattctctgatccagcatgaagttcacatcaaatccagcctggatgaggagttccaggcactgaggatgtgctcctgctgctgcacagtgaactggactgatcccactctgcttaatggcagcaagatccgtaactggaatcagtatctttagagctctgagaaagaatttcaaaatgcatttcaacattgtttttaagatgtagcactaacttgtttattattgttttatagcaatactagatagtatcagtattcagggggcatttagaacccc

SEQ ID NO: 85496 - DNA, 305 bp, Homo sapiens
tgttttatcccagattcatctgctcttacctcgagtctgggatcttaactctgcttgcttcttagttcagccatagctaataaggcaacgcattgcttacagtagccccagcagcatgtctctctggctgctacttggcgtcctgctctcagtacccccagcagtgcaggggccacaggcgtggaagtctcagaacttctgcctacctcctcctagccttgcctcccctagtacagcacctgccaccaatttttattttatttttaacaacatcatctattttttgccacttgcaggaggtccca

SEQ ID NO: 85497 - DNA, 154 bp, Homo sapiens
acacagagtcaaaggggattattttaaagctttaagatttaatgactgccctgttgggtttcagggacctgtaacccctttcttttagccaattcctcccttctggaatgggaatgcttacccaaagcctgtaccctcactgtatcttggaagt

SEQ ID NO: 85498 - DNA, 609 bp, Homo sapiens
ttgaaatgtgtgttcctcagagcctctgggttctgcaggggactgcccagtgagtggaggcctggtagattgttctagacactgctttacttaggtcagcactgccttcaaccaccatgttcaacctgacatctaagaagatggcatttggggagagaggagagctgctgctttaaaaaagaagttcgaaaatcttgtgaatagagaatttatagtctattttaaagatcagctgaatggaccccatcatgcctggttaccttctcacagataaacaaatactggaccagggaaaggagctgggaaaaaaaaaactctttgaattcaacgatacagtaattgaaacattttcatcagtttcccttctacctccatttggatgatggatgaactttttaaattacagattgcggtgtttgcaaacaccgcaatctcaaacaccgcaatctcaaacaccgcaatctcaaacaccgcaatctcaaacaccgcaatctcaaacaccgcaatctcaaacaccgcaatctcaaacaccgcaatctcggctcactgcgacctcggcctcctggattcaagttcagcctcccaggtagctgagattataggggtgtg

SEQ ID NO: 85499 - DNA, 221 bp, Homo sapiens
taatatatctgaaaatctggaaaaagtctgtgatttttaataagttgacgacatcagaattaactggaggtgtaaaatcttaatagacctccctccagaataaacttatttaaaaaaataagactggccaggcatggtggctcacgcctgtaatctcagcatccacctgcctcagcctcccaaagtgctgggattacaggcatgagcgattgcacctggct

SEQ ID NO: 85500 - DNA, 448 bp, Homo sapiens
tacaggtgtgcccccctatgccaagttaatttttaaaaattattttgtagagacagggtctcattatgttgctcagggaggtcttgaactcccagtctcaggtgatcctcccaccttggcctcccaaagtgctaggattacagttgtgagccactgtgcccagaaagagttgctttttgaaagaaggagcccaaattccttcttaggcttctttgtgtttccattctagtagatagagctggccatctagtaatagctcagcaaatgtttattgagtaaattaatgaacactaatttaaagataattgaacaattagtaggtaatgaatgatctgtaaattagcaacttataataaattacaaattatttagctaatcagtaaataattaaacttcaatagagataatgataaaatattcagtaagtaaacacatggccagaataaaa

SEQ ID NO: 85501 - DNA, 1423 bp, Homo sapiens
gaattccgtccacaccagtgcacagagacgtgtcctccttttacttcttttaacagccgcttaatgttttatcctagcaggaaccctaccatgggccatttaaagtgtttcaaatcttagggggctgagcctggtggctcacacctgtaatctcagcactttgggaggctgaggcaggaggattgcttgaggttgggagttcaagaccagtctgggcaacatggcaaaaactcatttcttaaaaaaaaaaaaaattagaccgggcttggccggaactgaattggtagaggtaaaaggggaacggaggaccttaagctctggccacttcggcccagcgaacccactttatttttgtccaaggaaaagctgcaggggggaggattctttttaggaagtctactctgccggcccctgatttttgggttggatgcttgagagctttgtttcccttgttccgagagtggcccagctgggtctgaatcgactccctcccctttcgaccccccctcctcattttccagcccggagaaataggggagtgggggcccaagaacgagaagacgagaacgcgtcgccctgcgctatgtcagaatggggcgggtgtgaggggaacagctctcttgcgatcagctcaggagtatgagcctcccggaggacggcatgagttctggacacttcaggagtcctcagctagtgacatggtcgatatggataaactcataaacaacttggaggtccaacttaattcagaaggtggctcaatgcaggtattcaagcaggtcactgcttctgttcggaacagagatccccctgagatagaatacagaagtaatatgacttctccaacactcctggatgccaaccccatggagaacccagcactgtttaatgacatcaagattgagcccccagaagaacttttggctagtgatttcagcctgccccaagtggaaccagttgacctctcctttcacaagcccaaggctcctctccagcctgctagcatgctacaagctccaatacgtccccccaagccacagtcttctccccagacccttgtggtgtccacgtcaacatctgacatgagcacttcagcaaacattcctactgttctgaccccaggctctgtcctgacctcctctcagagcactggtagccagcagatcttacatgtcattcacactatcccctcagtcagtctgccaaataagatgggtggcctgaagaccatcccagtggtagtgcagtctctgcccatggtgtatactactttgcctgcagatgggggccctgcagccattacagtcccactcattggaggagatggtaaaaatgctggatcaggagcacaaaggccaaggtggatgttctcacatctggactaatcctagaatttgattttaggacagccaggagctattca

SEQ ID NO: 85502 - DNA, 524 bp, Homo sapiens
ccaaatacttgttccccaccttatcaccacccccaagtttcttctctatagaaattttgaaggtttcactggatctaggagactgttgaccacctgattgagtttttaggaattagaaacatcaggggttgataataaggaatatttgacagcttctcccaacataggtggaaaggaaggttgtatcaagcacctactaggtggtaggtatacgtttcatctcattgacttatttctgtttaggagcacaaaggccaaggtggatgttctcacatctggactaatcctagaatttgattttaggacagccaggagctattcagtgagttcaattcaacacacacacacacacacacacgttgaaactaacttttcagctgaccctgtcctggtagctggagatagaaagatgaatcatacccagaccacatcctagagacactctcatttgataccactcatagtggtatcagaactcttcatactactcttactttaaaggcatttctgttccctgctatgca

SEQ ID NO: 85503 - DNA, 461 bp, Homo sapiens
gtagaggtaaaaggggaacggaggaccttaagctctggccacttcggcccagcgaacccactttatttttgtccaaggaaaagctgcaggggggaggattctttttaggaagtctactctgccggcccctgatttttgggttggatgcttgagagctttgtttcccttgttccgagagtggcccagctgggtctgaatcgactccctcccctttcgaccccccctcctcattttccagcccggagaaataggggagtgggggcccaagaacgagaagacgagaacgcgtcgccctgcgctatgtcagaatggggcgggtgtgaggggaacagctctcttgcgatcagctcaggagtatgagcctcccggaggacggcatgagttctggacacttcaggagtcctcagctagtgacatggtcggtaagtgactctgggactaatacccacccactcccacct

SEQ ID NO: 85504 - DNA, 2468 bp, Homo sapiens
gaattccgtccacaccagtgcacagagacgtgtcctccttttacttcttttaacagccgcttaatgttttatcctagcaggaaccctaccatgggccatttaaagtgtttcaaatcttagggggctgagcctggtggctcacacctgtaatctcagcactttgggaggctgaggcaggaggattgcttgaggttgggagttcaagaccagtctgggcaacatggcaaaaactcatttcttaaaaaaaaaaaaaattagaccgggcttggccggaactgaattggtagaggtaaaaggggaacggaggaccttaagctctggccacttcggcccagcgaacccactttatttttgtccaaggaaaagctgcaggggggaggattctttttaggaagtctactctgccggcccctgatttttgggttggatgcttgagagctttgtttcccttgttccgagagtggcccagctgggtctgaatcgactccctcccctttcgaccccccctcctcattttccagcccggagaaataggggagtgggggcccaagaacgagaagacgagaacgcgtcgccctgcgctatgtcagaatggggcgggtgtgaggggaacagctctcttgcgatcagctcaggagtatgagcctcccggaggacggcatgagttctggacacttcaggagtcctcagctagtgacatggtcgatatggataaactcataaacaacttggaggtccaacttaattcagaaggtggctcaatgcaggtattcaagcaggtcactgcttctgttcggaacagagatccccctgagatagaatacagaagtaatatgacttctccaacactcctggatgccaaccccatggagaacccagcactgtttaatgacatcaagattgagcccccagaagaacttttggctagtgatttcagcctgccccaagtggaaccagttgacctctcctttcacaagcccaaggctcctctccagcctgctagcatgctacaagctccaatacgtccccccaagccacagtcttctccccagacccttgtggtgtccacgtcaacatctgacatgagcacttcagcaaacattcctactgttctgaccccaggctctgtcctgacctcctctcagagcactggtagccagcagatcttacatgtcattcacactatcccctcagtcagtctgccaaataagatgggtggcctgaagaccatcccagtggtagtgcagtctctgcccatggtgtatactactttgcctgcagatgggggccctgcagccattacagtcccactcattggaggagatggtaaaaatgctggatcagtgaaagttgaccccacctccatgtctccactggaaattccaagtgacagtgaggagagtacaattgagagtggatcctcagccttgcagagtctgcagggactacagcaagaaccagcagcaatggcccaaatgcagggaggagagtcgcttgacttgaagagaagacggattcaccaatgtgactttgcaggatgcagcaaagtgtacaccaaaagctctcacctgaaagctcaccgcagaatccatacaggagagaagccttataaatgcacctgggatggctgctcctggaaatttgctcgctcagatgagctcactcgccatttccgcaagcacacaggcatcaagccttttcggtgcacagactgcaaccgcagcttttctcgttctgaccacctgtccctgcatcgccgtcgccatgacaccatgtgagccgcacaggtcacactagagaagctgcgctggtatctttcctggtcgtgtgctgaggttgggacaattttttcctctttgacttcagcttgcatatggggttgaagcagcccactgagccaagttgaggagactggaggaaaagagagctggtctcccgtggggctcttcatattctaccttcacggaattccagtgtggcacccatggctgccttcccatccccccctgctctgaaataggacatttttcctacagtaacaaaacaggaatcaaactcaaggctgtgaacaaacatacgctgctttattctttccaatttttctcttgttttctagaactcttatccatatgtttttaaaataagtacctaaaagtggtttgatagtgtcctaaacgacttttttaacttcctaaatggaaagagcataacaagtagttgattggtaagatttacagggatttggtttctgagtttgaggcacattcccagtgaataagctgagtcccataccacactcaaaaggttttaataaatctaatcctatttcttcttaaagtttggttttcagacagtgctggtgcttctgcttcttaagttcatcaagggaatgaggagttcttgtccttctcctcctcttttttttcttttccactttctccttcaggattaaagattttgcggaattc

SEQ ID NO: 85505 - DNA, 796 bp, Homo sapiens
aaatttcagaaactaaacttggtccgaaagacacagtaacgcacattaataatactatctgtcatcctgttcttatcctgttacatttttcaggttacataagtttcattaactgaaactatactcagatcaactaaatttctttcttattatctctgtgttctgggccctcacacactattagtatgaattgaatactaaacacatttaacatttaattgaatcatctaaaatgtcatcataatatgagatctagctcaagtgactgggttaagcatctcatttccttatgtccttatgctgtcagatgaaaaaaaattcagctgcaggagagtgaagtgaaatgtgcaggatgaaaggcataaataaagatgaagatgactgccatgatatcctgctaacaccaagtactgtcctggaggcggaaaagcaggtatcagatggctctctagcatgcaatcttcacttatttctacattttattctctaaaagcattcatattgaggcccagtgctctagaaatgtacattgaattaacagaatgcctgtatgattttactttgtgcatgataatgtttttctacttaagtaaaaagtgtgatttgttttactgttttctcagagggaattaaactctcttttcttttctttttttttctttttttgttgttgagacagtcttgctgtcacccaggctgaggtacagtggtgtgatctcagctcactgccaccttcaccttcacctcccgggttcaaattattctcccaattagcttcaattgtaggcatgtgcta

SEQ ID NO: 85506 - DNA, 775 bp, Homo sapiens
ggacttattcctaggccaagaatcaggcagccatagggcaaagtaaaaagtatttttagccagagccacagaagggataaagggaaggaagactagagcttggccactctccggacaactccagctgccctcgatggagcggtcatccacaacgaagtattactgagaaagtagatgtggggtttttttgttttttgttttttgtttttttgattttgagacagaatcttgctctgttgctcaggctggatcactcaggcgatctcagctcactgcaacctctgcttcccagattcaagcaattctcctgcctcagcctcccgagtagctgggattacaggcgcccaccaccacgcctggctcatttttgtatttttagtagagacagggttttaccatgttggccaggccggtaataagatgaactttatactttttttttttttttttggagacagagtcccattctggtccacctaggtgcaggggcccgatgatgggctcactggcagcctggacctccggggctcaagtggatcctccacctcaagcctctcggggtatctggggattacgggtttgcaccaccacccttagctaatttggggattaaatggtaaagatggggtttcgccatgtggccccggcgggtcgggaactcctaggatcaagtgatctcccacctgtggagtccccaggtgcggggattacgggcatgagccactgcttggggccagaacttatactttattaaccagtatgctgatgataggga

SEQ ID NO: 85507 - DNA, 630 bp, Homo sapiens
gtacattcctgtggccaagagtcccttagttgcctaaaggcaggcaggcaaactttcaaagggccgagcttcttgagattagtctctttcactggaatatttttagttttgctaaaaatcacagtaacattgctcacttagtttatcaatttatcatttaatgtgagacgtacttttaacaagatatttaacttataagatttttctagttccttctttgcctaattctgaaaatgtatatgcttccattgctttggaattatgagaggtgtatatggctttgactgggaggtaagagcactgccttagcctttgctgccatggtgcagcatagaacacacacgactaggagtcaggagattgggtatgcacaccagctttgccacaaacccagctatggggaacttggataggacctagctttgctgaactatgaggtctttttctacaaaataggagaaactataataacattgtcacagattgttctgagtattaagagataacatgcaggaaagtgtttgtgacatgtacaggattatttagtaaatatgtatagatcattgttgatgtacctgcattactcaattgttacttcgctcaataaacttgcttattgttttcaatgtc

SEQ ID NO: 85508 - DNA, 420 bp, Homo sapiens
ctgagattgtgccactgaagtccaacctgggagacagagtgagactcagtctcaaaaaataaaaaataaaaaataattttgttaaaaagataaaatagaaatcgtagatgaattcttggaactgggattaatcaggctattatcgagtaagcgcgtggatggtgctaggatattcgcaatgaactgatcacgaatttggattgtggggtctggcctctgaagacaagatacttaatagagaggactgatagaatggagaggtaatggaggcattaaggaaggcttaagacaacacgcactgctttctgttgtcccttcagtcaggtcactgttcaaatagctctctagacaggctcttccttatcattctacttaaaatagcccccaatcactctgtgtccctttagcctgcttcctctt

SEQ ID NO: 85509 - DNA, 799 bp, Homo sapiens
aataggcgaggaaacaaaggttgaaggagattcagtgacttgctcaaagtcagaccgtgagtgtgttgagttgcgtggtcttgaacataggcctgcttgcctccagagcccatgtctcagcctccacttcagtgcctgcagaggcaggctgtgaaagtctggcttgctggctaagacgattgttccctctcttttaatgtttcaaggacaacatcccttgccgaatcctcttctttcaacctgcctcatggtgttacccaactttttgttaaattgggactagtgggtctgatgttgacaggttttctgagtcttggttctagggttcaccttcctttttatccagccaatcagtaatccagaagtcttcaaataaaatctttatgtgcccaaccacgtgtgaagagggagaagattcatctcgtttctcaaaagatccaggtttatttgtgagcccaggtagtgcctgcgaatcctttagtttggagaaacactttggggactggaacaggaacaatcacagctggctggaggaacgtggggtaatgggccttgagctgtccctttaaggatgagtaggagttgggaaggtggagggcataacatatgagcaaaattattgtctcacttaatggtgaatgggacatcttttgcctattctccccatcctccaagataattcctgggttagagttggctctcgggtaggagaggcagtatggggaattcattcatgcaaaatcaagattattgaaaactaattaattggatcccaaagacaagatgatgaaactactca

SEQ ID NO: 85510 - DNA, 419 bp, Homo sapiens
catacctgtaatcccagcactttgagaggctgaggcgagaagatcgcttgaatccaggagcttaagaccagcctgggcaacacagtgagaccccagctctacaaaaaataaataatgagctgcatgtggtggtgtgcacctgtgatcctagctccgtgggaggctgaggtgggaggattgcttgatcccaggaggttaaggctacagtgagctgtgattgtgccactgcactccagcccaggcgatagggggagaccctctctcaaaaagaagaaaagtctttcttgaattcactatacagcaagtttttttttctttaacatctactttatacagaaatttgtatttattcagggttagttccaaatcacttctaggtataatttcatttatccttatcctgcaataggggccaaaaa

SEQ ID NO: 85511 - DNA, 386 bp, Homo sapiens
tgaacggacaagccatgtagccaagccttagtgcgagccaagccgcagagctgtgcctgatctggggaaggacagaagctttgaaccgaaatgagattgctgtttggaaattttgaagttttgaaatgaagtttaagatgtgcttagctttaattgctgaaaataaaaattattcttgtaagacaacataatcagaaagcttaaagggtctgcccgagctgtcaccatgctagggagcaattcagaaggacatattcaaaaggcagtggtacaaggaggataaagccacgtctgacgtgcacccatggaacttatattcatgtccagtatacctgcttgtgtatttgcctctatgcataacgtttccttacatacccgcttatcgg

SEQ ID NO: 85512 - DNA, 499 bp, Homo sapiens
  misc_feature (454)..(454): n is a, c, g, or t
  misc_feature (466)..(466): n is a, c, g, or t
  misc_feature (487)..(487): n is a, c, g, or t
  misc_feature (492)..(492): n is a, c, g, or t
agcctgatctactgccttcacctgggcttctctcaccactggcttcatctcctcctctactcaccctgcccacccacacagctttgtccaaaggcatcagcacagtgtgacttttgctggaacaggttttgtttgggaagccagaaatagaggcaaaagccaggcaaagctcatggggctcaggccccttcagaagccactggctcccagtgctgtctctgctgctctccaactttgaggaattgggagtctctcgagagactgtggggttggcatgatggctcacacctgtaatcccagcacattgggaggccgagtcaggtggatcatgaggtcaggagatcgaggccatcctggactaacatggtgaaaccctgtctccactaaagatacaaaaaattagccgggtgtggtggcgggcgcctgtagtctcagctgcttgggaagctgaggncaggagaatggncgtgaacccaggaggcagagncttgncagtgag

SEQ ID NO: 85513 - DNA, 491 bp, Homo sapiens
agggagagaatgagggagggaggggaaggaaagggaaggaaagaaagaaagaaaaggaaaaactacgttaacatagacctaccaaataaaaagaaacaaatgcatactctgaaatttacaagatacttgtgtctccaataaaaatggctcagcatgagcttaaggagctagactaagaattccaggctcccagatgtttcaaacgtccaaagtagaaacattaaatattgtaacactttaaatggaagtgaagattttccatttaacattagaaattaagtagagtgataaaacaatttaaggaatctttttgttgctgttctccttctaacaaaactatatactccaatattgggcaatttggaacataaacctccaaagattaaggattcttctgccttacatatgcactgacactctcctggaaccatacaccagacagctaccaatcccaagaatgcaaagttcctcctcccattcttgaatgcact

SEQ ID NO: 85514 - DNA, 4752 bp, Homo sapiens
  misc_feature (1188)..(1188): n is a, c, g, or t
  misc_feature (1539)..(1539): n is a, c, g, or t
  misc_feature (3048)..(3048): n is a, c, g, or t
  misc_feature (3080)..(3080): n is a, c, g, or t
  misc_feature (3499)..(3499): n is a, c, g, or t
  misc_feature (3651)..(3651): n is a, c, g, or t
  misc_feature (4489)..(4489): n is a, c, g, or t
  misc_feature (4568)..(4568): n is a, c, g, or t
  misc_feature (4693)..(4693): n is a, c, g, or t
tcagcctcctgagtagctgggattgcaggtgtgtgccaccacatccggctaattttttgtatttttggtagagatggggttttcccatgttggccaggccggtctcgaactcctgacctcgtgatctgcccacgttggcctccaaagtgctaggattataagtgtgagccaccacaccaggcccgtttcatccctgcctcagcctgcatgccaagctccctgggtgcccgcccacaggtgtcaccctttaaggagaaagtggcctggggctggaaacaggactttgtagggaaggacagcgcgtgtgagaaaaggcctgttgatgggcacgccagggtttaatggacggctctttgaagtcatgggctgagccagaaggaattgtcatgatgtcagtctcatttccagatggggaaagggagacccaggctgcggtgacccactgaggcacaggatcagtgagaacccagccctggctttgcccagacctctcaagggcacttcgtgggaccattgccggccgttgtggcatctgtccctggccttgcccccatccgtctctgcacagcccaggtgggtccgagccagccccaggtctccagggtcccagcccagcctctagaagagccagcagcagggctggaagggagagcacatgctgggccttggggctgccttggacctcaggccgttgacaaggaaaagcggagagttgggaaaaaaggacaaatagctgagcgccagccgcagtccgggggacgggagcctcgtgcgactctcggagtgctggccagattggcagaggggaggagagaggaaaaactcaggctctgaggaaaaacctctccagcccagcgcgtggcctggcattaacccactgcagccccaggaagtggttccaccccaggcagccaacaaggcggtgcctgaactatgtctgtggatgacggagccacgacctgtccctcagggctcagcgctgcggctatgtccagggacccctggccgtgcccacgtcggggcttcccgttccttacctgccatgagaatgagatgtccagggacctccctgctccagctgggacctgtggggctttgtctgttgtcccgagcaccttggagatgtcatttctaacattttaacccaggaatccccccaccaagggacagagtgcaaggacatgatcnaacagaaaaagttctggtacaagatcaaccccgtggggtggtgagtgctgcagccccgggcctcacatcctgccgtccctgtgggagattggagcggtcccagtgcccaccgctgattctctggctccagcaacccctccaggtggatccgtcccacgcagcctggcctgaaacactgcccagccactgggtccagtaagacagagcctcgagtcattctgccgagaggatccagaaacacagactttttctggggtcctggaggcttctggcccatggggagcccctgggtcccagcgatccagccctgatgtgctgagggtgcagggcccagctgcagagcagaggagngtggcccccagggaccagcagcacgaaaggcacactgaggcacactggcaggcctgggctgcagagagcctgaaggtcatggggtagctgatggaagcaggaagaccccatacagcagcgaccactgaggctggtgctgcactttctcagggaattgagtgtgggctcccaccatcccggccactggcttcctccaaagcctcctcctcttacatcagcaaaccttctgttcggtgaccccctcagtgaccctctgtgcttgccttcgtggtcttcctcatggaggatttcgggtcagcgtgggggtcagaggtcatttcccataccccctcaaaggtacttcttgctgtggtccccacactctgacaccctcttctgaaatgaacacttttttgttgttgttgttgagacagagtcttgctctgtcgcccaggctggagtgcagtggcacaatcttagctcactgcaacctccacctcccaggttcaagcgattttcatgcctcagcttcccgagtagctgggattacaggcatgtgccaccaagcccagctaatttttgtatttttagtagagatgaggtttcaccatgttggccaggctggtctcgaacttctgacctcaagtgattcgcccgcctcggcctcccaaagtgctgggattacaagcatgagccactgcgcccggccacaaacactttttttttttaaacaagtgaaaacaagtttattaacaaagttaagaaataaagaatggctattccatagggagagcagcctgaataaacactttttttgttgttgttgaggcagagcctcactctgtcgcccaggcaggagtgcagtggtgcgacctcagctctcagctccctgcaccgtccacctcctgggttcaagcgcttcttccccaagtagctgggactataggcacacaccaccatgcccggctaatttttctctttttagtagagacaggatttcgccatgtgggtcgggctggtctcgaactcctggtctcaagtgatccgccctcctcggccttccaaaatgctaggattacaggcatgagccgccgtgcctggccacaaacatattttaaatttgaacaataaaggaactggaccaggaagtgtggagttggggagaccctgctctcgccaggtgccttcccggcaggttgtctctgcctccccttgcaccccttgaatggcgggctccctctcccatagcccctgccaggctggataaccaacttcattcttatacccgtccgaatctgccccctgttaatggcacccaccagtccttgtccaaacctcgaagctcaggacctcacagagcaccacgtcctcttctgtgtcatatgcagctggatctcagtaaatggcaatgtcttctctacccgggactgaacaaaacccattcctcctatgaaagccgataagacctgggggcagagcagcccgccttctgtccccgcggctttaggggacaccggccacccaccctcngcttcttcccccacttcttggagaatgtctgngatgtgggtgaagactggcagagaaaagctggtgtaaccttctgcaggggtttcgagcaattctgaatctcagctggtgaggaggccaaaacctgctctgcctagcagactggtcatgtctccctttcccttcccttccctttcccttcccttccctttccttgtccttcctttttccttcccttttcctttcctttctttttctttcagagtttcgctcttgttgcccatgctggagtgcagtggtgtgatcatagctcactgcagccttgaactcctaggctcatttctatttatttatttatttagagatggagtctcgctctgtcgcccaggctggagtgcagtggcacgatctctgctcattgcagcctctgcctcccgattcaagtgattctcctgtctcagcctcccgagtngctgggattacaggcgtctgccaccacgccgggctaaatttttgtatttttagtagagtcagggtttcaccatgttggccaggctggtctcgaactcctgacctcaggtgatccacccttcttggcctcccaaagtgctggaactacaggcntgagccactgcacccagccttctttttaaatatacattttttgagacagggccttgctctgtggcccagggctggggtgcagtggcatgatcatggctcactgtagtctccacctcccaggctcaagccatcctcctacctcaacctcctgagtagctgagaccacaggtgcctgccactatgcctggctaaatttatattttgtggagacagggtcttgctgtgttgcccaggcttgtctcaaactcctgggctcaagcaatccccctgccttgacctcccaaagtgctgggattacaggcctgagctgccgtgcctggcctggtcacatcttgaatggaatcgggctccgtattgtccagatacctcccatattaaaaaagaactggggccggcagcagtcacacttcccagcccttccctgagcttgggtctggtgggagtgtggagacagcaacagggtccctgtgtgtgcagtctggctgcaagactcaggggtgtgcgtgtgtgcacctgtgtgtgcacctgtgtgtgcacgggtgcaagggcatctgtgtgtcgttttcttacaggaaggcgtgggccaatgaccagctggaagtgcaggttcatgtgtcctcagacagtggctggtgcctcacgctggcttctggctgtgaccagggtagcagagagagcaaagaggtcctttcctcaggtgggtggagtggggcttgagcacagtccacatgcagagatgagtgtggactcggaagaccctgacccccttgtatcagtgtgtaggggaggtctcaaggtcattgccctacagaaaccaggctgggtgcggtggctcacncctgtcatcccagcactttgggaggctgaggcgggtggatcacctgcggtcaggagttcgagaccagcctggccaacanggtgaagaccccgtctctactaaaaatacaaaagtaagctgggtgtggtggcacatgcccgtaatcccagctactcaagaggctgaggcaggaaaatcgcttgaacccgagagttggaggttgcngtgagccgagattgcgccattgcactccagcctgggcgacagagtgagacgccatctgg

SEQ ID NO: 85515 - DNA, 2036 bp, Homo sapiens
  misc_feature (950)..(950): n is a, c, g, or t
  misc_feature (1301)..(1301): n is a, c, g, or t
cacacacacatcgggatatttttcttgtttccttcttccagagggtgtaggagttgtgttccaagtttgttcctgcaaaccctccgatgaggccagctgcattcatcggggcctggatggccgcacctctctctccccgccctgtctcctgcactcagtctcatttccagatggggaaagggagacccaggctgcggtgacccactgaggcacaggatcagtgagaacccagccctggctttgcccagacctctcaagggcacttcgtgggaccattgccggccgttgtggcatctgtccctggccttgcccccatccgtctctgcacagcccaggtgggtccgagccagccccaggtctccagggtcccagcccagcctctagaagagccagcagcagggctggaagggagagcacatgctgggccttggggctgccttggacctcaggccgttgacaaggaaaagcggagagttgggaaaaaaggacaaatagctgagcgccagccgcagtccgggggacgggagcctcgtgcgactctcggagtgctggccagattggcagaggggaggagagaggaaaaactcaggctctgaggaaaaacctctccagcccagcgcgtggcctggcattaacccactgcagccccaggaagtggttccaccccaggcagccaacaaggcggtgcctgaactatgtctgtggatgacggagccacgacctgtccctcagggctcagcgctgcggctatgtccagggacccctggccgtgcccacgtcggggcttcccgttccttacctgccatgagaatgagatgtccagggacctccctgctccagctgggacctgtggggctttgtctgttgtcccgagcaccttggagatgtcatttctaacattttaacccaggaatccccccaccaagggacagagtgcaaggacatgatcnaacagaaaaagttctggtacaagatcaaccccgtggggtggtgagtgctgcagccccgggcctcacatcctgccgtccctgtgggagattggagcggtcccagtgcccaccgctgattctctggctccagcaacccctccaggtggatccgtcccacgcagcctggcctgaaacactgcccagccactgggtccagtaagacagagcctcgagtcattctgccgagaggatccagaaacacagactttttctggggtcctggaggcttctggcccatggggagcccctgggtcccagcgatccagccctgatgtgctgagggtgcagggcccagctgcagagcagaggagngtggcccccagggaccagcagcacgaaaggcacactgaggcacactggcaggcctgggctgcagagagcctgaaggtcatggggtagctgatggaagcaggaagaccccatacagcagcgaccactgaggctggtgctgcactttctcagggaattgagtgtgggctcccaccatcccggccactggcttcctccaaagcctcctcctcttacatcagcaaaccttctgttcggtgaccccctcagtgaccctctgtgcttgccttcgtggtcttcctcatggaggatttcgggtcagcgtgggggtcagaggtcatttcccataccccctcaaaggtacttcttgctgtggtccccacactctgacaccctcttctgaaatgaacacttttttgttgttgttgttgagacagagtcttgctctgtcgcccaggctggagtgcagtggcacaatcttagctcactgcaacctccacctcccaggttcaagcgattttcatgcctcagcttcctgtttgaagtcaagtcagaggtaaaccggtcagttacagaagcaggatttctaggatttctaactccagctgttcccatactgtctagtttaaattatggctgttaaggccgggcgggtgactcgggcaggtaatcccagaactttgggaggcccagacagaaggatcgcttgaggtcaggaatttgagacctggccagcatggtgaaaaccctgtctctatt

SEQ ID NO: 85516 - DNA, 2600 bp, Homo sapiens
  misc_feature (950)..(950): n is a, c, g, or t
  misc_feature (1301)..(1301): n is a, c, g, or t
  misc_feature (2416)..(2416): n is a, c, g, or t
  misc_feature (2541)..(2541): n is a, c, g, or t
cacacacacatcgggatatttttcttgtttccttcttccagagggtgtaggagttgtgttccaagtttgttcctgcaaaccctccgatgaggccagctgcattcatcggggcctggatggccgcacctctctctccccgccctgtctcctgcactcagtctcatttccagatggggaaagggagacccaggctgcggtgacccactgaggcacaggatcagtgagaacccagccctggctttgcccagacctctcaagggcacttcgtgggaccattgccggccgttgtggcatctgtccctggccttgcccccatccgtctctgcacagcccaggtgggtccgagccagccccaggtctccagggtcccagcccagcctctagaagagccagcagcagggctggaagggagagcacatgctgggccttggggctgccttggacctcaggccgttgacaaggaaaagcggagagttgggaaaaaaggacaaatagctgagcgccagccgcagtccgggggacgggagcctcgtgcgactctcggagtgctggccagattggcagaggggaggagagaggaaaaactcaggctctgaggaaaaacctctccagcccagcgcgtggcctggcattaacccactgcagccccaggaagtggttccaccccaggcagccaacaaggcggtgcctgaactatgtctgtggatgacggagccacgacctgtccctcagggctcagcgctgcggctatgtccagggacccctggccgtgcccacgtcggggcttcccgttccttacctgccatgagaatgagatgtccagggacctccctgctccagctgggacctgtggggctttgtctgttgtcccgagcaccttggagatgtcatttctaacattttaacccaggaatccccccaccaagggacagagtgcaaggacatgatcnaacagaaaaagttctggtacaagatcaaccccgtggggtggtgagtgctgcagccccgggcctcacatcctgccgtccctgtgggagattggagcggtcccagtgcccaccgctgattctctggctccagcaacccctccaggtggatccgtcccacgcagcctggcctgaaacactgcccagccactgggtccagtaagacagagcctcgagtcattctgccgagaggatccagaaacacagactttttctggggtcctggaggcttctggcccatggggagcccctgggtcccagcgatccagccctgatgtgctgagggtgcagggcccagctgcagagcagaggagngtggcccccagggaccagcagcacgaaaggcacactgaggcacactggcaggcctgggctgcagagagcctgaaggtcatggggtagctgatggaagcaggaagaccccatacagcagcgaccactgaggctggtgctgcactttctcagggaattgagtgtgggctcccaccatcccggccactggcttcctccaaagcctcctcctcttacatcagcaaaccttctgttcggtgaccccctcagtgaccctctgtgcttgccttcgtggtcttcctcatggaggatttcgggtcagcgtgggggtcagaggtcatttcccataccccctcaaaggtacttcttgctgtggtccccacactctgacaccctcttctgaaatgaacacttttttgttgttgttgttgagacagagtcttgctctgtcgcccaggctggagtgcagtggcacaatcttagctcactgcaacctccacctcccaggttcaagcgattttcatgcctcagcttcccgagtagctgggattacaggcatgtgccaccaagcccagctaatttttgtatttttagtagagatgaggtttcaccatgttggccaggctggtctcgaacttctgacctcaagtgattcgcccgcctcggcctcccaaagtgctgggattacaagcatgagccactgcgcccggccacaaacactttttttttttaaacaagtgaaaacaagtttattaacaaagttaagaaataaagaatggctattccatagggagagcagcctgaataaacactttttttgttgttgttgaggcagagcctcactctgtcgcccaggcaggagtgcagtggtgcgacctcagctctcagctccctgcaccgtccacctcctgggttcaagcgcttcttccccaagtagctgggactataggcacacaccaccatgcccggctaatttttctctttttagtagagacaggatttcgccatgtgggtcgggctggtctcgaactcctggtctcaagtgatccgccctcctcggcctgtcatcccagcactttgggaggctgaggcgggtggatcacctgcggtcaggagttcgagaccagcctggccaacanggtgaagaccccgtctctactaaaaatacaaaagtaagctgggtgtggtggcacatgcccgtaatcccagctactcaagaggctgaggcaggaaaatcgcttgaacccgagagttggaggttgcngtgagccgagattgcgccattgcactccagcctgggcgacagagtgagacgccatctgg

SEQ ID NO: 85517 - DNA, 3014 bp, Homo sapiens
  misc_feature (2971)..(2971): n is a, c, g, or t
cgtttgcggagcccgcggcggcgtttcctggggcaacagcaatggcggcctcgctgtccgagcggctcttctcgctggagctgctggtggactgggtgcgtttggaagcccggctgctgccgtcccccgctgccgcagtggagcaggaggaggaagaggaggaaaaggagcagggggaggcctcgtcgccgcgcggtctgtgccccgccgtggccttccgcctgctggacttccccacgctgttggtttaccctcctgacggccccggcgctcccgccgccgaaccgtggcccggtgtcatccgcttcggtcgcggcaagtcctgcctcttccgcctgcagcctgctaccctgcactgccggctcctgcggaccccgcttgccaccttgctgctgcagctgccccctgggcgcccgacgcccaccccacagctcctgggggcctgcgacatttcgctggccaccgcagcgcacagggtcgtggggccggccgcctccggatgctcccaccgtcaccggggacgtttccccctgcataatcgagtgggcgagcggactggggacattgcactggcctaccgcctgactgacctgggaagccgcctgctgagccaacttgagcggcccctcaccttcacccgcacaggaggaggagcggaggtcagtccccaaacccagcaggaaagacagcagctgcagcagccagcctcacagccaagcccaaaagaggctgataagccgctgggggagttagaaatcccagaggcacagaaggatttgaaggaaatggttaaaagtaaggccgaatgtgataatgtgggttctgtggagaatggcaaaaccaattctgttgttacatgttcaggtgctggcaatgggagaaatgttagctccctaaatgaggaagtcacagaattggacatggagaccaatatattttgccctcctcctttgtattacactaacttgacccaagaaaaaccgccccctgcacaggctaaaatcaccattgagcctcaaatgaatgcacctgaggaaatggatgatgcttctcctgaaaaaaagcgtgtaaatcccccagcacacaggagttgtctaaagcatccaagttctgcagcacacgaacatcctccaatgcttgtaaatcctccacatattcagaatataggagcaactaatcaaacatgtcaaactgaacaaaatcgaattaatacaataaggcagttgcctttgttaaatgctttgttagttgagttgtccttgttatatgaccaacctgtgacaagtcctgctcatatacatcctcacctagcctggttatataggactgaggataagaagtcacccgaatcttctgccaaatccacatgccggtctgaagccaagaaggataagcgttctgtggggggatgtgaaaagtcagtgagtcttcagtataaaaagaaccaaattgaaaactataaggaagataaatattctgaaaagagcagtggtgccctccataaaagagttccaaaagggaggctactttatggcttaacaaatacactaagactacgtttaaagctgacaaatcctgatatgttggtggtacatgaaaaaagagaactatatagaaaaagacaatcacaaatgttgggtacaaaattcagaattccgtcatccaaagttaaactattaagctctgcagaacaaagtcagaagccacaactgcctgaagataagtatttagattcagatgcatctttcactgaaaatagtgatacctcaagacaaatcagtggagtttttgatgagcccagcacaagtaaagaaactaaactgaaatatgcaactgaaaaaaagacagttgattgtagtaaaaatagaatcaataatgtttcattggaagaagttgtgagtcctgcaaattccattattccagaaaggcttacccctacaaatattctgggaggaaatgtggaaatgaaaatccaaagtccatgtgttttccaacaggatgctgttgttgacagaattgtagataaggaaatagatattagacaggtcaaaaccacagataatgacattcttatggctgatataagtgacaagagaacaggtaaaaatagttgctatgaaaacatctcagaactgaagtattcagatgatttgtctagcccttgctattctgaagatttctgtaccagtgaggacaccagcagaagtttcaaagctcatgatagcagttcaaggacagaaaatccaaaacatagtcaatatacaagcaagtctagtgacacaggagtgtccaaaaagaaaaatagtagtgacaggagttctatccttagcccacctttttcagccgggtcacctgtacactcatacagaaaatttcatatttcaaagactcaggataaaagtttggaggaagcatctagtatctctgctagtgatttatcttcaacacattggactgaacaaaaagaaaaccagatagatcaaaatagtatgcacaattctgaaattacaaagagagctcaagacatctctgttaaaacaagaagtagttggaaatctttagaaaaaagccagtcaccacaaacatcccaggtgagttcttacctgccttcaaatgtgtccgaacttaatgtcctggatagcagtacatcagatcactttgaagaaggcaatgatgatgttggttcactaaatatttccaagcaatgcaaagatatttgtgaattagtaataaataaacttccaggatacacaatgtaaaaatacatgcttttaaaaaactttcaaggacctatgtgtactgttagtgaaaaaaattttaaagctgttttagttcatgaattatgtgaataattttttaaagaaatatgaattaacgttattcctttgatgtttaaatggtattttaccattaaatctgataatattggtgtgtggactcacatacccagatataaatcttcattgtttgntcgtaaggataagggtatgtttttctgggggaaagaaaaaaaa

SEQ ID NO: 85518 - DNA, 4938 bp, Homo sapiens
cgtttgcggagcccgcggcggcgtttcctggggcaacagcaatggcggcctcgctgtccgagcggctcttctcgctggagctgctggtggactgggtgcgtttggaagcccggctgctgccgtcccccgctgccgcagtggagcaggaggaggaagaggaggaaaaggagcagggggaggcctcgtcgccgcgcggtctgtgccccgccgtggccttccgcctgctggacttccccacgctgttggtttaccctcctgacggccccggcgctcccgccgccgaaccgtggcccggtgtcatccgcttcggtcgcggcaagtcctgcctcttccgcctgcagcctgctaccctgcactgccggctcctgcggaccccgcttgccaccttgctgctgcagctgccccctgggcgcccgacgcccaccccacagctcctgggggcctgcgacatttcgctggccaccgcagcgcacagggtcgtggggccggccgcctccggatgctcccaccgtcaccggggacgtttccccctgcataatcgagtgggcgagcggactggggacattgcactggcctaccgcctgactgacctgggaagccgcctgctgagccaacttgagcggcccctcaccttcacccgcacaggaggaggagcggaggtcagtccccaaacccagcaggaaagacagcagctgcagcagccagcctcacagccaagcccaaaagaggctgataagccgctgggggagttagaaatcccagaggcacagaaggatttgaaggaaatggttaaaagtaaggccgaatgtgataatgtgggttctgtggagaatggcaaaaccaattctgttgttacatgttcaggtgctggcaatgggagaaatgttagctccctaaatgaggaagtcacagaattggacatggagaccaatatattttgccctcctcctttgtattacactaacttgacccaagaaaaaccgccccctgcacaggctaaaatcaccattgagcctcaaatgaatgcacctgaggaaatggatgatgcttctcctgaaaaaaagcgtgtaaatcccccagcacacaggagttgtctaaagcatccaagttctgcagcacacgaacatcctccaatgcttgtaaatcctccacatattcagaatataggagcaactaatcaaacatgtcaaactgaacaaaatcgaattaatacaataaggcagttgcctttgttaaatgctttgttagttgagttgtccttgttatatgaccaacctgtgacaagtcctgctcatatacatcctcacctagcctggttatataggactgaggataagaagtcacccgaatcttctgccaaatccacatgccggtctgaagccaagaaggataagcgttctgtggggggatgtgaaaagtcagtgagtcttcagtataaaaagaaccaaattgaaaactataaggaagataaatattctgaaaagagcagtggtgccctccataaaagagttccaaaagggaggctactttatggcttaacaaatacactaagactacgtttaaagctgacaaatcctgatatgttggtggtacatgaaaaaagagaactatatagaaaaagacaatcacaaatgttgggtacaaaattcagaattccgtcatccaaagttaaactattaagctctgcagaacaaagtcagaagccacaactgcctgaagataagtatttagattcagatgcatctttcactgaaaatagtgatacctcaagacaaatcagtggagtttttgatgagcccagcacaagtaaagaaactaaactgaaatatgcaactgaaaaaaagacagttgattgtagtaaaaatagaatcaataatgtttcattggaagaagttgtgagtcctgcaaattccattattccagaaaggcttacccctacaaatattctgggaggaaatgtggaaatgaaaatccaaagtccatgtgttttccaacaggatgctgttgttgacagaattgtagataaggaaatagatattagacaggtcaaaaccacagataatgacattcttatggctgatataagtgacaagagaacaggtaaaaatagttgctatgaaaacatctcagaactgaagtattcagatgatttgtctagcccttgctattctgaagatttctgtaccagtgaggacaccagcagaagtttcaaagctcatgatagcagttcaaggacagaaaatccaaaacatagtcaatatacaagcaagtctagtgacacaggagtgtccaaaaagaaaaatagtagtgacaggagttctatccttagcccacctttttcagccgggtcacctgtacactcatacagaaaatttcatatttcaaagactcaggataaaagtttggaggaagcatctagtatctctgctagtgatttatcttcaacacattggactgaacaaaaagaaaaccagatagatcaaaatagtatgcacaattctgaaattacaaagagagctcaagacatctctgttaaaacaagaagtagttggaaatctttagaaaaaagccagtcaccacaaacatcccaggtgagttcttacctgccttcaaatgtgtccgaacttaatgtcctggatagcagtacatcagatcactttgaagaaggcaatgatgatgttggttcactaaatatttccaagcaatgcaaagatatttgtgaattagtaataaataaacttccaggatacacaatgtaaaaatacatgcttttaaaaaactttcaaggacctatgtgtactgttagtgaaaaaaattttaaagctgttttagttcatgaattatgtgaataattttttaaagaaatatgaattaacgttattcctttgatgtttaaatggtattttaccattaaatctgataatattgattattaaatcatataaacagatttctttttaaattgtttaatcataagaataaaagtgtgtctttctaaattgtctctcttaaagtgtctagtctacagtattgatcattctaaagctgacttcatgcacaccactgaaaaagaaggctagttagtaaggacagcctcaaattttaattggaacaaattatttaacaaatatagaagacttactgtgttagatgcagaaaggtgcagaatctatttatgatagagccctgctgttttaaaagcttacagttgtatgtagataagaagtcttccttgacatatacatatcccatatccccaataggtgaagttgcttttatatgctctcatagtgccctgcaccttttgtttataagccacaatttgtgtgattacttgattaaagtttatcttccactaggcttcagttgtgtgatgggatcatatttgttttacacatcagtgcatttttgtatttagcacaattcctggcatgtggctgcagtgcaataaaaacatttgttgaaaaaaacgaagcccaggcatttaaaatacctaatgggagggtttagaattaagcagcaaaaataagcagattccctaaaataaacctgcagaaaatccttattggaaatatatttgactgtaatatttctgttttgcttggtataaatagccttcaggtgttctctgaaatatttggaaagggaaacttaagaaggtatcttttatacagtttctgatataggagttcagtttcttgtcatttcagtttgttcaatggttatttttagtgtatggaactttgtttttatgaaatccagtgataatttataatttattccattggttttatatttagactttattctgtgttcaaatatttacatatattttcttctagctgtgttatactttaatttttagactttttaatatatctaacgtttttgaatgtatgaagtgaggttctaatttcctttctttaaaggtaattaattatataggtattctgaatgatcataatactagaatatagatagatggtaaaaagagagaagaggatgttacattttggggagcaatatgaataaaagagtgatgggaatgagcctgatatatttatgggacaatttaaaatattatcttgaatagaatgatccactcatgctacagagtggtagaaaggacatttgttgagtaaggaaaatgccagattacagagagcctcaaatgctaagtataataatagaattctaagcaataggaataacagattattttaggttataaatgagcactagtaagtagtcatgacattttgaatattttaaattattgaaaataataagcagagaaattatatcagttaaagttttgagatatgaaaggtttctgtggctagtggctatgatcttaatttttctaaaatataaagcatatagtataacatttcacaaaatcaaaatattgtaatgccaggtattgtaactagatgtttaatgatgtgaactgtgtaaattgtttaatagcaatttgtcattactatggaagagacaataaaaatataagcaatatcagaatcatcaaagaaataattccttataaaccaacgttttatttggtagagagtaagtcattgtctgtggtaagaataggtaaaatgattaatttagcaagtctaaggtacaacaagaccaaaaaactaatgcactttaaattacaaagctgagtagctgaatccgcttctctttgagttaatccatgaatacttatttctagaattgtgataattgtttcttctagtctaattctagtgaaaatatctgttttcatgtatttagtccttcctattacattctacaaattctactccatgttttaattctacaatctataagcttattttaaaagaattttgtaatagatactattcatggagccttatttatctccttagttgcttaaaattattgaaacatgaaatagtatttcaagtc

SEQ ID NO: 85519 - DNA, 415 bp, Homo sapiens
gtctctcaagattattttcttttcccccaaattctagagtgtgtccgcacactgttcctcatggtacccactgtatgtttccatgtctgtgggtccacaggatgctccgcggccaagcctccctgggctcctctgatctgtggccgtttctcatgcttccttgtttttggcgactttttgaggaccgttggggtcggttattttgtaggatgtgcctctgttggaatttgtctcctgactagactggggtcacaggttttggggagggaggacatggaggtgaagtccttctcatcacatcctgtccaggccagcactgtcaggaggactcagtgcttaatgctgatgcaggtcacctggctgaggtgtgctcttcagcattttccacagtcaagtgactctttcagctttcatc

SEQ ID NO: 85520 - DNA, 3361 bp, Homo sapiens
cacaccttcggcagcaggagggcggcagcttctcgcaggcggcagggcgggcggccaggatcatgtccaccaccacatgccaagtggtggcgttcctcctgtccatcctggggctggccggctgcatcgcggccaccgggatggacatgtggagcacccaggacctgtacgacaaccccgtcacctccgtgttccagtacgaagggctctggaggagctgcgtgaggcagagttcaggcttcaccgaatgcaggccctatttcaccatcctgggacttccagccatgctgcaggcagtgcgagccctgatgatcgtaggcatcgtcctgggtgccattggcctcctggtatccatctttgccctgaaatgcatccgcattggcagcatggaggactctgccaaagccaacatgacactgacctccgggatcatgttcattgtctcaggtctttgtgcaattgctggagtgtctgtgtttgccaacatgctggtgactaacttctggatgtccacagctaacatgtacaccggcatgggtgggatggtgcagactgttcagaccaggtacacatttggtgcggctctgttcgtgggctgggtcgctggaggcctcacactaattgggggtgtgatgatgtgcatcgcctgccggggcctggcaccagaagaaaccaactacaaagccgtttcttatcatgcctcaggccacagtgttgcctacaagcctggaggcttcaaggccagcactggctttgggtccaacaccaaaaacaagaagatatacgatggaggtgcccgcacagaggacgaggtacaatcttatccttccaagcacgactatgtgtaatgctctaagacctctcagcacgggcggaagaaactcccggagagctcacccaaaaaacaaggagatcccatctagatttcttcttgcttttgactcacagctggaagttagaaaagcctcgatttcatctttggagaggccaaatggtcttagcctcagtctctgtctctaaatattccaccataaaacagctgagttatttatgaattagaggctatagctcacattttcaatcctctatttctttttttaaatataactttctactctgatgagagaatgtggttttaatctctctctcacattttgatgatttagacagactccccctcttcctcctagtcaataaacccattgatgatctatttcccagcttatccccaagaaaacttttgaaaggaaagagtagacccaaagatgttattttctgctgtttgaattttgtctccccacccccaacttggctagtaataaacacttactgaagaagaagcaataagagaaagatatttgtaatctctccagcccatgatctcggttttcttacactgtgatcttaaaagttaccaaaccaaagtcattttcagtttgaggcaaccaaacctttctactgctgttgacatcttcttattacagcaacaccattctaggagtttcctgagctctccactggagtcctctttctgtcgcgggtcagaaattgtccctagatgaatgagaaaattatttttttaatttaagtcctaaatatagttaaaataaataatgttttagtaaaatgatacactatctctgtgaaatagcctcacccctacatgtggatagaaggaaatgaaaaaataattgctttgacattgtctatatggtactttgtaaagtcatgcttaagtacaaattccatgaaaagctcactgatcctaattctttccctttgaggtctctatggctctgattgtacatgatagtaagtgtaagccatgtaaaaagtaaataatgtctgggcacagtggctcacacctgtaatcctagcactttgggaggctgaggaggaaggatcacttgagcccagaagttcgagactagcctgggcaacatggagaagccctgtctctacaaaatacagagagaaaaaatcagccagtcatggtggcatacacctgtagtcccagcattccgggaggctgaggtgggaggatcacttgagcccagggaggttggggctgcagtgagccatgatcacaccactgcactccagccaggtgacatagcgagatcctgtctaaaaaaataaaaaataaataatggaacacagcaagtcctaggaagtaggttaaaactaattctttaaaaaaaaaaaaaagttgagcctgaattaaatgtaatgtttccaagtgacaggtatccacatttgcatggttacaagccactgccagttggcagtagcactttcctggcactgtggtcggttttgttttgttttgctttgtttagagacggggtctcactttccaggctggcctcaaactcctgcactcaagcaattcttctaccctggcctcccaagtagctggaattacaggtgtgcgccatcacaactagctggtggtcagttttgttactctgagagctgttcacttctctgaattcacctagagtggttggaccatcagatgtttgggcaaaactgaaagctctttgcaaccacacaccttccctgagcttacatcactgcccttttgagcagaaagtctaaattccttccaagacagtagaattccatcccagtaccaaagccagataggccccctaggaaactgaggtaagagcagtctctaaaaactacccacagcagcattggtgcaggggaacttggccattaggttattatttgagaggaaagtcctcacatcaatagtacatatgaaagtgacctccaaggggattggtgaatactcataaggatcttcaggctgaacagactatgtctggggaaagaacggattatgccccattaaataacaagttgtgttcaagagtcagagcagtgagctcagaggcccttctcactgagacagcaacatttaaaccaaaccagaggaagtatttgtggaactcactgcctcagtttgggtaaaggatgagcagacaagtcaactaaagaaaaaagaaaagcaaggaggagggttgagcaatctagagcatggagtttgttaagtgctctctggatttgagttgaagagcatccatttgagttgaaggccacagggcacaatgagctctcccttctaccaccagaaagtccctggtcaggtctcaggtagtgcggtgtggctcagctgggtttttaattagcgcattctctatccaacatttaattgtttgaaagcctccatatagttagattgtgctttgtaattttgttgttgttgctctatcttattgtatatgcattgagtattaacctgaatgttttgttacttaaatattaaaaacactgttatcctacagttgaa

SEQ ID NO: 85521 - DNA, 3276 bp, Homo sapiens
aaactctgctgtaacttcctaaattgaactggtgtggggacagctggattccagtgtggttctgctactgaccagccctgtgacctccagcaggttgtttgccctctctgtgcctctatcacctcatccatgaaatgagcagcttgaggcaatgggctgaacgtaggtaccctccagctcacaaattctatgatcctttgacgtaacaatgttcccctggacattgtttctggttcagctgtatttttattgattgaaagagggaactcattagttaccgaggatttggggatacctctctccaccatccaaaaatgtccatttggaatcacaattattttattctcaggagattttgttctcggctcagcaaagctctaaaacagtgcaagaacttctgttccactgcagaggcagtaaaaccagtgtaccaaaaactaaggttactaactatcctggtttgccccggactgatgggtttccagggacactggactttcagtgccaagactgagacagtttatggtaaataggaggttggtcctactaacaaagacatctacaatcatggaatgtttatttttctttcagctacaaagccgtttcttatcatgcctcaggccacagtgttgcctacaagcctggaggcttcaaggccagcactggctttgggtccaacaccaaaaacaagaagatatacgatggaggtgcccgcacagaggacgaggtacaatcttatccttccaagcacgactatgtgtaatgctctaagacctctcagcacgggcggaagaaactcccggagagctcacccaaaaaacaaggagatcccatctagatttcttcttgcttttgactcacagctggaagttagaaaagcctcgatttcatctttggagaggccaaatggtcttagcctcagtctctgtctctaaatattccaccataaaacagctgagttatttatgaattagaggctatagctcacattttcaatcctctatttctttttttaaatataactttctactctgatgagagaatgtggttttaatctctctctcacattttgatgatttagacagactccccctcttcctcctagtcaataaacccattgatgatctatttcccagcttatccccaagaaaacttttgaaaggaaagagtagacccaaagatgttattttctgctgtttgaattttgtctccccacccccaacttggctagtaataaacacttactgaagaagaagcaataagagaaagatatttgtaatctctccagcccatgatctcggttttcttacactgtgatcttaaaagttaccaaaccaaagtcattttcagtttgaggcaaccaaacctttctactgctgttgacatcttcttattacagcaacaccattctaggagtttcctgagctctccactggagtcctctttctgtcgcgggtcagaaattgtccctagatgaatgagaaaattatttttttaatttaagtcctaaatatagttaaaataaataatgttttagtaaaatgatacactatctctgtgaaatagcctcacccctacatgtggatagaaggaaatgaaaaaataattgctttgacattgtctatatggtactttgtaaagtcatgcttaagtacaaattccatgaaaagctcactgatcctaattctttccctttgaggtctctatggctctgattgtacatgatagtaagtgtaagccatgtaaaaagtaaataatgtctgggcacagtggctcacacctgtaatcctagcactttgggaggctgaggaggaaggatcacttgagcccagaagttcgagactagcctgggcaacatggagaagccctgtctctacaaaatacagagagaaaaaatcagccagtcatggtggcatacacctgtagtcccagcattccgggaggctgaggtgggaggatcacttgagcccagggaggttggggctgcagtgagccatgatcacaccactgcactccagccaggtgacatagcgagatcctgtctaaaaaaataaaaaataaataatggaacacagcaagtcctaggaagtaggttaaaactaattctttaaaaaaaaaaaaaagttgagcctgaattaaatgtaatgtttccaagtgacaggtatccacatttgcatggttacaagccactgccagttggcagtagcactttcctggcactgtggtcggttttgttttgttttgctttgtttagagacggggtctcactttccaggctggcctcaaactcctgcactcaagcaattcttctaccctggcctcccaagtagctggaattacaggtgtgcgccatcacaactagctggtggtcagttttgttactctgagagctgttcacttctctgaattcacctagagtggttggaccatcagatgtttgggcaaaactgaaagctctttgcaaccacacaccttccctgagcttacatcactgcccttttgagcagaaagtctaaattccttccaagacagtagaattccatcccagtaccaaagccagataggccccctaggaaactgaggtaagagcagtctctaaaaactacccacagcagcattggtgcaggggaacttggccattaggttattatttgagaggaaagtcctcacatcaatagtacatatgaaagtgacctccaaggggattggtgaatactcataaggatcttcaggctgaacagactatgtctggggaaagaacggattatgccccattaaataacaagttgtgttcaagagtcagagcagtgagctcagaggcccttctcactgagacagcaacatttaaaccaaaccagaggaagtatttgtggaactcactgcctcagtttgggtaaaggatgagcagacaagtcaactaaagaaaaaagaaaagcaaggaggagggttgagcaatctagagcatggagtttgttaagtgctctctggatttgagttgaagagcatccatttgagttgaaggccacagggcacaatgagctctcccttctaccaccagaaagtccctggtcaggtctcaggtagtgcggtgtggctcagctgggtttttaattagcgcattctctatccaacatttaattgtttgaaagcctccatatagttagattgtgctttgtaattttgttgttgttgctctatcttattgtatatgcattgagtattaacctgaatgttttgttacttaaatattaaaaacactgttatcctacagttgaa

SEQ ID NO: 85522 - DNA, 3308 bp, Homo sapiens
tgcgccaccatggccgtgactgcctgtcagggcttggggttcgtggtttcactgattgggattgcgggcatcattgctgccacctgcatggaccagtggagcacccaagacttgtacaacaaccccgtaacagctgttttcaactaccaggggctgtggcgctcctgtgtccgagagagctctggcttcaccgagtgccggggctacttcaccctgctggggctgccagccatgctgcaggcagtgcgagccctgatgatcgtaggcatcgtcctgggtgccattggcctcctggtatccatctttgccctgaaatgcatccgcattggcagcatggaggactctgccaaagccaacatgacactgacctccgggatcatgttcattgtctcaggtctttgtgcaattgctggagtgtctgtgtttgccaacatgctggtgactaacttctggatgtccacagctaacatgtacaccggcatgggtgggatggtgcagactgttcagaccaggtacacatttggtgcggctctgttcgtgggctgggtcgctggaggcctcacactaattgggggtgtgatgatgtgcatcgcctgccggggcctggcaccagaagaaaccaactacaaagccgtttcttatcatgcctcaggccacagtgttgcctacaagcctggaggcttcaaggccagcactggctttgggtccaacaccaaaaacaagaagatatacgatggaggtgcccgcacagaggacgaggtacaatcttatccttccaagcacgactatgtgtaatgctctaagacctctcagcacgggcggaagaaactcccggagagctcacccaaaaaacaaggagatcccatctagatttcttcttgcttttgactcacagctggaagttagaaaagcctcgatttcatctttggagaggccaaatggtcttagcctcagtctctgtctctaaatattccaccataaaacagctgagttatttatgaattagaggctatagctcacattttcaatcctctatttctttttttaaatataactttctactctgatgagagaatgtggttttaatctctctctcacattttgatgatttagacagactccccctcttcctcctagtcaataaacccattgatgatctatttcccagcttatccccaagaaaacttttgaaaggaaagagtagacccaaagatgttattttctgctgtttgaattttgtctccccacccccaacttggctagtaataaacacttactgaagaagaagcaataagagaaagatatttgtaatctctccagcccatgatctcggttttcttacactgtgatcttaaaagttaccaaaccaaagtcattttcagtttgaggcaaccaaacctttctactgctgttgacatcttcttattacagcaacaccattctaggagtttcctgagctctccactggagtcctctttctgtcgcgggtcagaaattgtccctagatgaatgagaaaattatttttttaatttaagtcctaaatatagttaaaataaataatgttttagtaaaatgatacactatctctgtgaaatagcctcacccctacatgtggatagaaggaaatgaaaaaataattgctttgacattgtctatatggtactttgtaaagtcatgcttaagtacaaattccatgaaaagctcactgatcctaattctttccctttgaggtctctatggctctgattgtacatgatagtaagtgtaagccatgtaaaaagtaaataatgtctgggcacagtggctcacacctgtaatcctagcactttgggaggctgaggaggaaggatcacttgagcccagaagttcgagactagcctgggcaacatggagaagccctgtctctacaaaatacagagagaaaaaatcagccagtcatggtggcatacacctgtagtcccagcattccgggaggctgaggtgggaggatcacttgagcccagggaggttggggctgcagtgagccatgatcacaccactgcactccagccaggtgacatagcgagatcctgtctaaaaaaataaaaaataaataatggaacacagcaagtcctaggaagtaggttaaaactaattctttaaaaaaaaaaaaaagttgagcctgaattaaatgtaatgtttccaagtgacaggtatccacatttgcatggttacaagccactgccagttggcagtagcactttcctggcactgtggtcggttttgttttgttttgctttgtttagagacggggtctcactttccaggctggcctcaaactcctgcactcaagcaattcttctaccctggcctcccaagtagctggaattacaggtgtgcgccatcacaactagctggtggtcagttttgttactctgagagctgttcacttctctgaattcacctagagtggttggaccatcagatgtttgggcaaaactgaaagctctttgcaaccacacaccttccctgagcttacatcactgcccttttgagcagaaagtctaaattccttccaagacagtagaattccatcccagtaccaaagccagataggccccctaggaaactgaggtaagagcagtctctaaaaactacccacagcagcattggtgcaggggaacttggccattaggttattatttgagaggaaagtcctcacatcaatagtacatatgaaagtgacctccaaggggattggtgaatactcataaggatcttcaggctgaacagactatgtctggggaaagaacggattatgccccattaaataacaagttgtgttcaagagtcagagcagtgagctcagaggcccttctcactgagacagcaacatttaaaccaaaccagaggaagtatttgtggaactcactgcctcagtttgggtaaaggatgagcagacaagtcaactaaagaaaaaagaaaagcaaggaggagggttgagcaatctagagcatggagtttgttaagtgctctctggatttgagttgaagagcatccatttgagttgaaggccacagggcacaatgagctctcccttctaccaccagaaagtccctggtcaggtctcaggtagtgcggtgtggctcagctgggtttttaattagcgcattctctatccaacatttaattgtttgaaagcctccatatagttagattgtgctttgtaattttgttgttgttgctctatcttattgtatatgcattgagtattaacctgaatgttttgttacttaaatattaaaaacactgttatcctacagttgaa

SEQ ID NO: 85523 - DNA, 399 bp, Homo sapiens
acccagaccttgattcagatcctagctcaggaactttccagctgtgtgacctagacagacctccacctctttgaaactcagtgttgataatgcccattttgaaagataatagttccagcactttgagaggctgaggcaagaagattgtttggccaggggttcaagaccaacctgggcaacagttgcactgccccccaccccttcacccctcccaacaaaacaaaaagttatctgggtagggtggcatctgtggtcctagcttcttgggagtctgagatgggaggatcacttgagcccaggagtttgaggttatagtgagctatgattgcaccattgcattccagcctgggcagcagagcaagaccctgtctctaaaaaacataataaacaaattttatt

SEQ ID NO: 85524 - DNA, 326 bp, Homo sapiens
caaataagaacccagagagagggagagattcacagacaatagcttaaaaagtctagaaattatagaccgattgaggtcagcaagaaacaaattattcaatatatcccctgagggctagagccagactttcccctatgattccaaaattacttcgcagtttcattagggtgaaaggcagtgcagtctcatgagttcagaaagtaaaggttgttccttaaaatttagatagacttgacaaccacttaggatggcattttggcattctgtccctgctcatcaaagaagttgctcaaatttgtgggatagaggaatgagagcaagaagta

SEQ ID NO: 85525 - DNA, 335 bp, Homo sapiens
aataagattccttttcagaagtggtggtccccacattggttactgctatgtttgtggaaggatacattttctctgtatctttaatgtcttctgaagtagtcggtatcttatgtgaggtgctgcccaagtttggaggtaaactggccacagatgccagcatatctgtggtcttcactaggccagaggtggggagtgaagtcagatgaacaggagaagacggcctactttctggtaatgtagtaggtacaggggacggtgaggttattgctggtaaagacagaagggaagaggaagagctggttttttccacagagggtgggcttgtccctgatatg

SEQ ID NO: 85526 - DNA, 375 bp, Homo sapiens
tggagccttcctgcgttccagttcctctaggagaggccaagggctgccctgctcccagcttcagggagcctctgcctacatgggatggcccactgtgtggcgtcaggtacctggcacccactgagcatccggggaattaggtccctcctgtgccccagagctgctaggcagactgctaggcggttgactcaaggtgttacctgctagtgcctggggtgaaggctgcatggagcccaaccttgctcctggccttcctgtgctcaggcctctccccttttcgccagggcttcctggtgcctctcccatgaagagggaacttcccctccactcccatggaagacccaggtttgggctgttgccagctttgaggcccct

SEQ ID NO: 85527 - DNA, 338 bp, Homo sapiens
tgctgggattacaggcgtgagccactgcgcctggccatgtcatcacttctttactgtgtttatcctaatttggacatcctctggtagatagatgccctcttgcagaaggtcaagaactctgctgatcctgaaatgtcagctttttccgccaacgagcacctgagtcttctttctccacccccttctgcatgccaaccaaccccatgttctgtctgcaaaagtagggcctagcatgccttcctctacccatctgcaacgggaagtagtgaaggaccgttgctttctaagcaggagcaccccacttgtttttgttgttgtttttggttttggtttttttt

SEQ ID NO: 85528 - DNA, 290 bp, Homo sapiens
ccttagagtacacacgtaggacatttttcttccacgcctcgagtgcgttgagagggtcagactctgctgtgttccacatgttaatgagaggtgctgtttgaatgtgaaaaaaatgccacttgactttcatcccagtgtctctcctctgtgccgtccaggagatgccagcagatgggtcttggaatttttttttttttgagatggagtctcgctctgtcgcccaggctggagtgcagtggcgcgaactcggctcactgcaaacgcgaactcagctcactgcaagctctgcc

SEQ ID NO: 85529 - DNA, 339 bp, Homo sapiens
ggcgacgttaactgctctgggcgccctcgaccacgcgtggctgagcctcccccaccacttggaagaagcggcggctacttctgcatttttcctccggctcctcgcccccgctgcccgcggatgcccggcgggctgatgaagtttgaccttttttttccatcaaagtatctcccccaccaccacggtgccccgcggcccctccctccctcctttcccagccttggggagtcttttgagctgtctcccgagccccgcgtgggccacgcagcgtgcagagcctgggagggagaatgggggtgttcctctagctgcggaactgtggggggcgtacgtccccgg

SEQ ID NO: 85530 - DNA, 253 bp, Homo sapiens
acgtttcaagagaatggtaccaaagggataggatcaaattgccaagtgttaatgttacaacaaatgaataccaatgctttcttcttgcagaaaagcccttttttaagcctaaaaatgactactttttaatgaaatcacgttattcctggagatacttagagaagagttgagttacagggtacctcattcctcttccaggtggtagcaaagcctcaatacttgggccagatgtttactctcctctttcctctgt

SEQ ID NO: 85531 - DNA, 222 bp, Homo sapiens
cacacagagactcttctagatttaattgggatttaggagattaaagcaatatgacaaataaatacaatcttgatccttgattggattctccatcagagaagggagctataaaggacatactggagataattgagacattttttaaatgaatggctgtgttaggtaagcttattgaatcaacgctgaattttttgtgtacgataccggcagatggctgtgtaa

SEQ ID NO: 85532 - DNA, 350 bp, Homo sapiens
ctgtgactgatggcctcaggagtccaggaataggccttctagcacagcagctagtagggctcccccaagccatccgctggcgtgtggaggtgcaggacctgggggaggcagtccccaacccagctaggccaaggggtagggtttttaggtctgtttttaacagagctcagagcaccaggtgaaggtggaaagttggcaggaaaacaaggtcagcatcttattttttctatactcagcagagtgtgccattcccagtttctgtcctgaggatttcaaagaccacaacagccacatttctttccatcttccctcagccagtagtcatttaaaattcttcagttgttctgaag

SEQ ID NO: 85533 - DNA, 497 bp, Homo sapiens
ggcgagacaccgcgccctgccgagcgggggaccccagtgcggcttttcaccgaggaggagctggcccgatatggcgggaaagagggattttatggacgaggagccccctacaatgccttgacggggaaggactccactagaggggtagccaagatgtccttggatcctgcagacctcacccatgacactacgggtctcacggccaaggaactggaggccctggatgaggtcttcaccaaagtgtacaaagccaaataccccatcgtcggctacactgcccggagaattctcaatgaggatggcagccctaacctggacttcaagcctgaagaccagccccattttgacatcaaggacgagttctgatgttccccctgcaggagcaggttcttgggagcgtgaggcaggaagacactaggtgctgaatctcctgcaaaactggctgcctggaggccctgagccacccagatctgaataaaacagatgcttaccctgga

SEQ ID NO: 85534 - DNA, 733 bp, Homo sapiens
ggcgagacaccgcgccctgccgagcgggggaccccagtgcggcttttcaccgaggaggagctggcccgatatggcgggaaagagggattttatggacgaggagccccctacaatgccttgacggggaaggactccactagaggggtagccaagatgtccttggatcctgcagacctcacccatgacactacgggtctcacggccaaggaactggaggccctggatgaggtcttcaccaaagtgtacaaagccaaataccccatcgtcggctacactgcccggagaattctcaatgaggatggcagccctaacctggacttcaagcctgaagaccagccccattttgacatcaaggacgagttctgatgttccccctgcaggagcaggttcttgggagcgtgaggcaggaagacactaggtgctgaatctcctgcaaaactggctgcctggaggccctgagccacccagatctgaataaaacagatgcttaccctggaagagcaaatgcctcctgttgtccttggtcaggggttctgtctacctggggacccctgtctgcacaccagggatcaataagagccaaagtgggacacctcctagatgtcagtatcagctggctgggcagtggaattttgagcgacctttactttatacttttctgtgcttgacagattttcagccatgaccatgttcactttataatcaaaacaaaaataaaggtcccatttttaca

SEQ ID NO: 85535 - DNA, 250 bp, Homo sapiens
aatagttcctaacctgaaatacgcctatttaaaactgcccctccacactcaattcccgtttttattatattcttctatgttttctttttgccatggcatttatcatccaatatttgtgatgtttattgtgtatcgcctgtctcctgctgctggaaagtaagctcctcaaatgtatgagctttatagtctccttgttcacacctatattccaattatctacaacagtacctggctcatagtaaatactcaa

SEQ ID NO: 85536 - DNA, 228 bp, Homo sapiens
actgcctagaaacaacactgtagtaaataatcttcggtgttttgttgggcttgctattctgtccctaggtgttttgtttaccattgtaatgaatttactgagcacaggtgatccatgtaactgcctagaaacaacactgtagtaaataatgctttgaaattgaacatttgtgccctacccaacgctccaaagtcctaattgcgttgactttcccacaccagatgctga

SEQ ID NO: 85537 - DNA, 348 bp, Homo sapiens
aattttttgtatttttagtagagacagggtttcaccgtgttagccaggatggtctcgatctcctgacctcgtgatccacccgcttcagcctcccaaagtgctgggattacaggcgtgagccaccgcgcccagtcttttccttatttctttaaagattcctcatttctgcccttccttaaattttttgatgtaactaagaaataagaattattcacttaaaacatttaagaatttatcacaatatgctagatgggactagaatatttacgttgaccacacagaatattcttttgttacggcaaaatctacacaaacaagcaaactggttcaagtatttgctgggtatga

SEQ ID NO: 85538 - DNA, 389 bp, Homo sapiens
tcagttgtggggaccaactctcagagactatttcctaaatgttgactctgcctcatgcagtggatgttttgagaatgcttctggcttcctcaatctctgtagctgatacatttcttgtagccacattgaggccctggcacaggaaagctactcagttcttctcaatctggcccagtcatcttatttctgccattgccctatacatttgaaatcttaaatgttctaaatatcttaaagcaatgaaatagattcaagtgtttctaacttagaaaaagtaaaagagagagcaaaataatacagcttttaaatcacctgtattctatacgaattattttaaaaagaaaatacttcacgtataatcccagcattttgggaggccaaggcgggcg

SEQ ID NO: 85539 - DNA, 270 bp, Homo sapiens
agactgtagagtggagcactatacactttacgatcacactgtgagacacaatgccaagaactctagcccaagaacgggatacaaccggctacttctaatatgagcacccaggaagctttagagctctggcggccagacttcgtatgcaacttttctgcgtggtagagagcctgcctagtgggtattccagtactgctggcatgcagtcacctgtgtggattaacattttgcaagggtgtatgggttggagtggagcaggagagcctgaag

SEQ ID NO: 85540 - DNA, 148 bp, Homo sapiens
gttgttgggaagattaaataagctgatctactgcaagctcttataagatatgtgcctggcatatagaaatgctcaacaagtgccagaggcagttatctggctaggtacttcatacatgtttttgaatgaataaatggattggtaatta

SEQ ID NO: 85541 - DNA, 418 bp, Homo sapiens
ttcacatattttgacaaaatgattgtgtataatcatggagacaaagcttattgttttaaatgattttgttaaatactagaaagtagttcactgagttaaaaggtttcatacaggtttcctaaaaaccatttggcttagatatatttaactatctgtgaaactacttgttattatcctctttactattgtatgggtttggttggattttgtctgttgaacacagatcctctgattttatttcgattttatttgaattgctttctgtaatattcaactacatggaaattgtgtttaatttgggcttatgtagagtggtccatagactttgagtgtgtgtttgggttgctgttctgaagaacagaagtagccaagaagtagtctgaaaaagtaggaccataaaaaattagactggtagaac

SEQ ID NO: 85542 - DNA, 102 bp, Homo sapiens
gatctttcatcaagattttacctgcatttatgtctaagggtccctgataaggcttgaggcatgtaacctatgtctaattaaaaatgatttgttgaatgaatg

SEQ ID NO: 85543 - DNA, 278 bp, Homo sapiens
cagatgttataatccccatttttcagagtggctcagagatgggagggaacttgttcaagttcatgaggcccataggggtcagacctgtgatttctagtgtgtactcaggaggcgggtacgaaaggagaagggggcaaggaacaaggtgttggagttaacaggagaagaaagggtggcatctggaaatagaatttcttcagctacccttggcacctggaaacccacaatccaaaggaggactggtttagagaaggtaccttttttttttttttgagatg

SEQ ID NO: 85544 - DNA, 126 bp, Homo sapiens
ggaaaagttactttgcccctctggggctgtttcgccttccatgaaatcgaaggttagattagttgcctataagggctctttccattctaaaatttaatggaagtgtgtatttacatatttgaactt

SEQ ID NO: 85545 - DNA, 356 bp, Homo sapiens
gagtactagtttgaaatgattacattcatcatttcaggttagtaaaaagcgtattataagacaccgtttataaaacattgcagcttagatatcacttcctctgggaacctcttcaactctctagctgttgttactcctctgtgttcccaaggcacctcttttcatacagtactacagatctttacctcaaattatatgggtctcgcttctatgagccatttaagttatttatattccttctgagacagggtctcactgtcacccatgctggagtgcaatggctcaatcacagctcactgcagcctcaatctcaagagctcaagcaatcctcccacttcatcagcctcttgagtggc

SEQ ID NO: 85546 - DNA, 359 bp, Homo sapiens
ttcaggattagattactgaagtatgatggcagtcattgagaaatcgtggagactagtatcccaaggacagaaaacgttcttattattggaagagaagaaaagtattttctataaagtataacccaatgaacttgatcgtgacccaccttgccctcccaaagtgctgggattacaggcatgagccaccacacctggccgctaggagattcttaaaaccaattcgtgccaaactgtcatgaatgctgctattcgagaagaaagagagaaggaacctaaagacactaaagaggccacaaaaggatttctctgataacttaacacatttacagtactggcatgaaagatagaaaagagggccg

SEQ ID NO: 85547 - DNA, 596 bp, Homo sapiens
agtaaagtaagcttatagtgcaggtattattgaagacatgtcgaaggtatagcgtaagcagcaaggagagaagtaaatctttctgggagttgggaactgctttgttgaagtggcaactgagtcttaaagaataattgagaatgtgactggtaaacaaggacagaaacatgttcatgaaagaaagcaagggacacattaaatccttccaggaaatagtttggtgtacatcccaaatcctagtatcattgaattatatacagggagtgaatgatgtgatcaaatgggcattttagaaagattatgctgacaactctggagggctgactagtcagtgtgaaggtcagaaaaacagcaagaaagcaaatgcaatagatctagtagaatgatgaagtgctaaactgacacactattttaagacttcaggaataccaggatgagtaaaactacatttaaaattttaatcatctgtggggtttagctatgaaaattttttgttttctaagctttctgcaatggatatgcactgctttcttaatagaaaaaatagtaaactttgttaagagagagagaactcagcaaaaggctcattacagggg

SEQ ID NO: 85548 - DNA, 5352 bp, Homo sapiens
gcgcactggagccctggccagcgcgcagccttcccggcgccggcgggctgggtcttgggaattctggtttgctttggctcactcgctttttacaaaccactggatcttacatgcctctgtaccccccacttccactccatgtccccatgctcctgcgccagcaacaggacatgttctctggatgtcagctgagtcattaaagtaactctgcatgtcagtagacagaccttggtagaaccacaaggctcccagagacacccatctctcctcatttttttggtgtgtgtgtcttcaccgaacattcaaaactgtttctccaaagcgttttgcaaaaactcagactgttttccaaagcagaagcactggagtccccagcagaagcgatgggcagtgtgcgaaccaaccgctacagcatcgtctcttcagaagaagacggtatgaagttggccaccatggcagttgcaaatggctttgggaacgggaagagtaaagtccacacccgacaacagtgcaggagccgctttgtgaagaaagatggccactgtaatgttcagttcatcaatgtgggtgagaaggggcaacggtacctcgcagacatcttcaccacgtgtgtggacattcgctggcggtggatgctggttatcttctgcctggctttcgtcctgtcatggctgttttttggctgtgtgttttggttgatagctctgctccatggggacctggatgcatccaaagagggcaaagcttgtgtgtccgaggtcaacagcttcacggctgccttcctcttctccattgagacccagacaaccataggctatggtttcagatgtgtcacggatgaatgcccaattgctgttttcatggtggtgttccagtcaatcgtgggctgcatcatcgatgctttcatcattggcgcagtcatggccaagatggcaaagccaaagaagagaaacgagactcttgtcttcagtcacaatgccgtgattgccatgagagacggcaagctgtgtttgatgtggcgagtgggcaatcttcggaaaagccacttggtggaagctcatgttcgagcacagctcctcaaatccagaattacttctgaaggggagtatatccctctggatcaaatagacatcaatgttgggtttgacagtggaatcgatcgtatatttctggtgtccccaatcactatagtccatgaaatagatgaagacagtcctttatatgatttgagtaaacaggacattgacaacgcagactttgaaatcgtggtcatactggaaggcatggtggaagccactgccatgacgacacagtgccgtagctcttatctagcaaatgaaatcctgtggggccaccgctatgagcctgtgctctttgaagagaagcactactacaaagtggactattccaggttccacaaaacttacgaagtccccaacactcccctttgtagtgccagagacttagcagaaaagaaatatatcctctcaaatgcaaattcattttgctatgaaaatgaagttgccctcacaagcaaagaggaagacgacagtgaaaatggagttccagaaagcactagtacggacacgccccctgacatagaccttcacaaccaggcaagtgtacctctagagcccaggcccttacggcgagagtcggagatatgactgactgattccttctctggaatagttactttacaacacggtctgttggtcagaggcccaaaacagttatacagatgacggtactggtcaagatgggtcaagcaagcggccacaagggactgaggcaagcacaatggtttcaaagaaagactgtaagctccatgattagcataaagcactaaccatgtctccatgtgacccgatggcacatagatgttgtagaataagttatgggtttttatgttttgttttgtgtttttccaaaacttgaacttgcaggcaagccttggttgggtatttgatttatccagaatgcttctctttagggaacaaggatgtttttaatggcataacaaaggcaagactctgccttaatttttgaaaagctgctaactacatgaacacaaatgtgtatttttgttgcagtgtagttttccttttgtgtaattttaaagtcagtgttgaattttattgaaagctcatgatgcgcttcaaagtggcaagtatttggctattaactgccaaaacaagagcctgattttttgaggccagtaattcgtttgctagaattgattttttttctctctctctttgttacataagggcattatgtaacactagccgaatggtagcctctgggttgttgtttttttcttttcctccatgatgttaatgggttatctcaaattttaagttaaactacctaaaataaataccaaagataatgcatatttttgcacagtggagcttacacttaaaagaaaacaaagccccatgggctgccttgaaatcaagagacaataactttgaacctcagcaagaccttgaaccgccggttcattttgcaccttattcagaaaatagagcatcatactcaccgagtctagtcagtgtagtgcttttaaaaattttgtcctttcatgtaacttttttattttaagaggaagaagaagaaaggggcacacacacacaataccgacgtctatcctttcctgctaggcagtgctggccaggctcatgtgtagtgtgcgagatggtgatgtactcttatatttttctgggcttttccttttgcacattccaaaattcatttcataagacaagatcttcataggacctccttggcatcctggcattctcaaaactgagccatccagcatgaaagataaatgggtttaaacccttgctgctgaatttattgcctggactgtcaggacatcaccagcccaccttcaccttagggaagatgccacacctggcctccacacttgctcttctgatcagtctgtctggattgagtcctacagtgtcagatagggcggcaaatgccaaagcagggaaacagggaggtgtggacaagccagtttgatgcagcacttcagatcaagtgcttaggaaggagaggaaacttgccttttttatggcagaggatagtaatgaaaatgtctcagtattttagggtcaatgagagccataaaaatataacataatcacaagtaaaggagataatggtctaaaacagctatttcccttttctgtgtgcatacttatgactgaatgtgagctaagcattttctcctgtggagccctagagcaggttactaaggaaggacacattgttttccagaagcctcccctgcctggctgactgccttgctagaaacataattttttttttctcactgaagctcaataatggaactctttttttttttttttttaatttaaagttccctatttgtgaattctgggattactgacttttctttttaattggagtctcaaaatcaactctcttatggtattatatctctgtatgccattaaaaaacagcttgttctagaatcatgtattttgtaaactgatgtttgtgatggtctctggttcttgaacagccatatctgaatgccgtgcctgcaaaactatgacaatttttgctgttttcagccttcagatttgatggcttgggaaactgaggtgttattttcaatgaaacaaagaaagagatgttaagcaagtggttgttttagatccaaatgtaaaggcaggtttgggaaggtgtttaaagagttggaggaattggggattgagttgtaaagaaaacttacagaagaggcaacaatttggttcttgacagtgagaggatattgagggcttcagctgctgctattatgatgttttgcaaaggaaaataatcaaaccaaagagtattcagtgatatgtaaattaaatgaagatacagtggagaatgggggtgaccacaaaagaggctccccctaaacacacagtgctgccacttaaaaagacttgagaaatttgaaagggggtgggtatggggggggcaagaaagagggagggaaatctttcaacttatttctgaaaaagagaaaaaaatataaaatttctggtgcacaggtttgttttttcaagaaaattttgcagaagctatgtttttaaagtgtacattttataaagtttatcagatattttcatatttaaagccaaatgtaaatagaggtctgtaaagaaaaataattgccatagaaagtataatttcagtgcagtaatttctgagagctagtacctatatgctaccggttagcatggttttagcaaatatataccagccttataaggttcgtattgctatgttcttctgttatttatttcagcatggactgttcatttgaaacctttttctagttattagcgttttaacagttacaagctttaaatggcaattttttttttttttttgtcaagagccaagacacaggtaatgcacgacattgattgctgcattttaccttcaaaatatttgtccttattgactgggtctccttaattaatgtacacatgtcattagaatgcagacggaggggactcaccatgaatatctggggttgattcccagatgtgtgttgcttctctattgcaagcagattccctgttggatttacttcggatttattcccttttaaagaatttttgcccatatctggaagggcactatatttttgggaggagccatagattcctggttatcctatttttaaacaaaatgtagacaaagtgaactctattttgattattgagaaaggagtagttttctatccctctaagagtatacttgaatcagacattttaaggatgtcactatggcactgttgtcatttccaaattcctagaaaagtttgttttactttgtttttattctgttaatgcattctttcttctctttacttcctttcttaccagtacactcctatctcaactctgtttatttgatgagttctgtcccgtaaatcatatttcccttacaattaataaatgtcacttcatattttataataaaccactcagtaaaagcaaaagcttgtcctgagaagtagagtgagttctttttcactctgtgtctaataatgttaaggtgggaaaaaaaaaagtgtggcatagctacctgcccatccccaaccctcagcaaagtagaatctcttttctggtaattttgggtttccgctctgggctctggcaagttgaacaatcctagccattgacaatcgtgatagttattattttcccatttgctgtctttttgtatctaaagtcttcctattgtactgcacaaaccatggattgtacatatttttatatattatgtcttattttattatttctaaataaa

SEQ ID NO: 85549 - DNA, 5370 bp, Homo sapiens
gcgcactggagccctggccagcgcgcagccttcccggcgccggcgggctgggtcttgggaattctggtttgctttggctcactcgctttttacaaaccactggatcttacatgcctctgtaccccccacttccactccatgtccccatgctcctgcgccagcaacaggacatgttctctggatgtcagctgagtcattaaagtaactctgcatgtcagtagacagaccttggtagaaccacaaggctcccagagacacccatctctcctcatttttttggtgtgtgtgtcttcaccgaacattcaaaactgtttctccaaagcgttttgcaaaaactcagactgttttccaaagcagaagcactggagtccccagcagaagcgatgggcagtgtgcgaaccaaccgctacagcatcgtctcttcagaagaagacggtatgaagttggccaccatggcagttgcaaatggctttgggaacgggaagagtaaagtccacacccgacaacagtgcaggagccgctttgtgaagaaagatggccactgtaatgttcagttcatcaatgtgggtgagaaggggcaacggtacctcgcagacatcttcaccacgtgtgtggacattcgctggcggtggatgctggttatcttctgcctggctttcgtcctgtcatggctgttttttggctgtgtgttttggttgatagctctgctccatggggacctggatgcatccaaagagggcaaagcttgtgtgtccgaggtcaacagcttcacggctgccttcctcttctccattgagacccagacaaccataggctatggtttcagatgtgtcacggatgaatgcccaattgctgttttcatggtggtgttccagtcaatcgtgggctgcatcatcgatgctttcatcattggcgcagtcatggccaagatggcaaagccaaagaagagaaacgagactcttgtcttcagtcacaatgccgtgattgccatgagagacggcaagctgtgtttgatgtggcgagtgggcaatcttcggaaaagccacttggtggaagctcatgttcgagcacagctcctcaaatccagaattacttctgaaggggagtatatccctctggatcaaatagacatcaatgttgggtttgacagtggaatcgatcgtatatttctggtgtccccaatcactatagtccatgaaatagatgaagacagtcctttatatgatttgagtaaacaggacattgacaacgcagactttgaaatcgtggtcatactggaaggcatggtggaagccactgccatgacgacacagtgccgtagctcttatctagcaaatgaaatcctgtggggccaccgctatgagcctgtgctctttgaagagaagcactactacaaagtggactattccaggttccacaaaacttacgaagtccccaacactcccctttgtagtgccagagacttagcagaaaagaaatatatcctctcaaatgcaaattcattttgctatgaaaatgaagttgccctcacaagcaaagaggaagacgacagtgaaaatggagttccagaaagcactagtacggacacgccccctgacatagaccttcacaaccaggcaagtgtacctctagagcccaggcccttacggcgagagtcggagatatgactgactgattccttctctggaatagttactttacaacacggtctgttggtcagaggcccaaaacagttatacagatgacggtactggtcaagatgggtcaagcaagcggccacaagggactgaggcaagcacaatggtttcaaagaaagactgtaagctccatgattagcataaagcactaaccatgtctccatgtgacccgatggcacatagatgttgtagaataagttatgggtttttatgttttgttttgtgtttttccaaaacttgaacttgcaggcaagccttggttgggtatttgatttatccagaatgcttctctttagggaacaaggatgtttttaatggcataacaaaggcaagactctgccttaatttttgaaaagctgctaactacatgaacacaaatgtgtatttttgttgcagtgtagttttccttttgtgtaattttaaagtcagtgttgaattttattgaaagctcatgatgcgcttcaaagtggcaagtatttggctattaactgccaaaacaagagcctgattttttgaggccagtaattcgtttgctagaattgattttttttctctctctctttgttacataagggcattatgtaacactagccgaatggtagcctctgggttgttgtttttttcttttcctccatgatgttaatgggttatctcaaattttaagttaaactacctaaaataaataccaaagataatgcatatttttgcacagtggagcttacacttaaaagaaaacaaagccccatgggctgccttgaaatcaagagacaataactttgaacctcagcaagaccttgaaccgccggttcattttgcaccttattcagaaaatagagcatcatactcaccgagtctagtcagtgtagtgcttttaaaaattttgtcctttcatgtaacttttttattttaagaggaagaagaagaaaggggcacacacacacaataccgacgtctatcctttcctgctaggcagtgctggccaggctcatgtgtagtgtgcgagatggtgatgtactcttatatttttctgggcttttccttttgcacattccaaaattcatttcataagacaagatcttcataggacctccttggcatcctggcattctcaaaactgagccatccagcatgaaagataaatgggtttaaacccttgctgctgaatttattgcctggactgtcaggacatcaccagcccaccttcaccttagggaagatgccacacctggcctccacacttgctcttctgatcagtctgtctggattgagtcctacagtgtcagatagggcggcaaatgccaaagcagggaaacagggaggtgtggacaagccagtttgatgcagcacttcagatcaagtgcttaggaaggagaggaaacttgccttttttatggcagaggatagtaatgaaaatgtctcagtattttagggtcaatgagagccataaaaatataacataatcacaagtaaaggagataatggtctaaaacagctatttcccttttctgtgtgcatacttatgactgaatgtgagctaagcattttctcctgtggagccctagagcaggttactaaggaaggacacattgttttccagaagcctcccctgcctggctgactgccttgctagaaacataattttttttttctcactgaagctcaataatggaactctttttttttttttttttaatttaaagttccctatttgtgaattctgggattactgacttttctttttaattggagtctcaaaatcaactctcttatggtattatatctctgtatgccattaaaaaacagcttgttctagaatcatgtattttgtaaactgatgtttgtgatggtctctggttcttgaacagccatatctgaatgccgtgcctgcaaaactatgacaatttttgctgttttcagccttcagatttgatggcttgggaaactgaggtgttattttcaatgaaacaaagaaagagatgttaagcaagtggttgttttagatccaaatgtaaaggcaggtttgggaaggtgtttaaagagttggaggaattggggattgagttgtaaagaaaacttacagaagaggcaacaatttggttcttgacagtgagaggatattgagggcttcagctgctgctattatgatgttttgcaaaggaaaataatcaaaccaaagagtattcagtgatatgtaaattaaatgaagatacagtggagaatgggggtgaccacaaaagaggctccccctaaacacacagtgctgccacttaaaaagacttgagaaatttgaaagggggtgggtatggggggggcaagaaagagggagggaaatctttcaacttatttctgaaaaagagaaaaaaatataaaatttctggtgcacaggtttgttttttcaagaaaattttgcagaagctatgtttttaaagtgtacattttataaagtttatcagatattttcatatttaaagccaaatgtaaatagaggtctgtaaagaaaaataattgccatagaaagtataatttcagtgcagtaatttctgagagctagtacctatatgctaccggttagcatggttttagcaaatatataccagccttataaggttcgtattgctatgttcttctgttatttatttcagcatggactgttcatttgaaacctttttctagttattagcgttttaacagttacaagctttaaatggcaattttttttttttttttttttttttttttttttttgtcaagagccaagacacaggtaatgcacgacattgattgctgcattttaccttcaaaatatttgtccttattgactgggtctccttaattaatgtacacatgtcattagaatgcagacggaggggactcaccatgaatatctggggttgattcccagatgtgtgttgcttctctattgcaagcagattccctgttggatttacttcggatttattcccttttaaagaatttttgcccatatctggaagggcactatatttttgggaggagccatagattcctggttatcctatttttaaacaaaatgtagacaaagtgaactctattttgattattgagaaaggagtagttttctatccctctaagagtatacttgaatcagacattttaaggatgtcactatggcactgttgtcatttccaaattcctagaaaagtttgttttactttgtttttattctgttaatgcattctttcttctctttacttcctttcttaccagtacactcctatctcaactctgtttatttgatgagttctgtcccgtaaatcatatttcccttacaattaataaatgtcacttcatattttataataaaccactcagtaaaagcaaaagcttgtcctgagaagtagagtgagttctttttcactctgtgtctaataatgttaaggtgggaaaaaaaaaagtgtggcatagctacctgcccatccccaaccctcagcaaagtagaatctcttttctggtaattttgggtttccgctctgggctctggcaagttgaacaatcctagccattgacaatcgtgatagttattattttcccatttgctgtctttttgtatctaaagtcttcctattgtactgcacaaaccatggattgtacatatttttatatattatgtcttattttattatttctaaataaa

SEQ ID NO: 85550 - DNA, 300 bp, Homo sapiens
actggagccctggccagcgcgcagccttcccggcgccggcgggctgggtcttgggaattctggtttgctttggctcactcgctttttacaaaccactggatcttacatgcctctgtaccccccacttccactccatgtccccatgctcctgcgccagcaacaggtaagggctgctgtgttttcttccttttcgctcgctgccggtgtgtcctggggaatggactctggccgccgtcccctaccctaccctgccccgctgctccagaggtgcccagctgtcacactgctgtagcgctcacc

SEQ ID NO: 85551 - DNA, 422 bp, Homo sapiens
caccatgtgcggcttttttgtatttttagtagatacagggtttcaccatgttggccaggctggtctcaaattcctaccctcaaatgatccacctgccttggcttcccaatgtgctgggattacaggtgtgagccatggtgcccagtcatatttctgtatatgtgacatttgcccttctagaactttgatccaactctagggaattggcttggcaaccctttttaatctaatctctttgtttacttaccttgaacttttggtcaaatgttcactacagataaacatgactaagtcaaaacagttggagaagtagaaataaattccaggttgatgtgttttaatgaatacagtttcttaatttccggagcttgcggaaaattccggagcttgcagaaactcataacattttgataagtagagat

SEQ ID NO: 85552 - DNA, 536 bp, Homo sapiens
agcaatattcccagcatcctctgctataatcctctagaataaataactgtttgggaacttcatacaaaaagctgactcccagtaggtattgagttcagtggcagtaattagcattcatgacacaacttgcctgaacatttgtaaaaacattatgtttatttacattctattcctgtttcagtgtgcatttgactttatgtcaaattgaaaagtggttgatttttagataccaacactgtaaagactgaacttttaaatttgaatgctaggaatattctttaaaaacttacttagattggcaaccaaatgaccatttgctttcactggagctcagcgatatttacacagcacttgagatattctctctacaattcaatttacaagctattagagaatctttgagataacaggattttttttttttttttttttgagactgagtctcgctctgtcacccaggctggagtgcagtggcacagtttcggctcactgcaagctccacctctcaggttcaagcgattctcctgcctcagcct

SEQ ID NO: 85553 - DNA, 125 bp, Homo sapiens
ctaacaaagccaaagaaaaggtggcacactggccttcaattcaaagcccagggtggcaagaaaagggtcactagttccctgaaaataactggcatgcaaaattcaaacaggtaattggggtggag

SEQ ID NO: 85554 - DNA, 454 bp, Homo sapiens
  misc_feature (325)..(325): n is a, c, g, or t
catgctgcacaggccagcaagagatcccaggcacgcaaccggccacagcctagtggaccatgtgcaggagctgcagtgtttgctgtggctgcccactgaccaagaatgaggttgccctgcttgaaagtcagctttagctaccaggggtttagtaagatgggcacatggggcagggcctagtgaaagcagagagacgcaggaagcagctactgccgtagtccaggtcagagaggactggtgggttcctgagtctcctgtggctttgccagagctagagaaaagatccgtggtctagatgtgtgtgatggcttcataatggattggntgggggaggagcaaagtagaagggaatgttcagagagtgagcctcagcttgagtatttagttgaaggatgttcccatttgctgagatgagaaaaactatagtgagagcaggtctggaagaaagcttgag

SEQ ID NO: 85555 - DNA, 763 bp, Homo sapiens
ccccactagattagctagacacagagtactgattggtgcatttacaaacctctagctagacacagagtgctgattggtggattcacaaacctttagctagacacagagtgctgattggtgcattcacaatcctccaggtagacagaaaagttctccaagtccctacccgtcccagaagcccagccggcttcacctctcactggcactcgcctgtggcgcctagcccgggcactccggcagcccagttggagctcctcccgcaatcaagcccagcagctgctggccagccacgcccagtgtggggccgccaagcccccgcccacccggaactcttgaaggcctgtgagcgccaccagaagccccggctcccgcaggcgcctctcgctccacacctccacgcaagcagagggagtcggctccagcctcggccagccccagagaggggcccccacagtgcagtggcggccagagcggatgccgaggcccaggagaggccgagagtgagcgagggctgctagcacgttgtcacctctcactaacaccagaagaggtggagatggtccatatttacaacatttgttgcagacaatgagacaaatttagtccatactccacaaattgccagaagtaatgttatttgacccaacaggagggagaaagcggaatttgtgtggagagtaagatgctgatgtttggatgtgcagagaagagtttccatatagcaggaaaagccctttttcctttctctccagcttgtaaggaa

SEQ ID NO: 85556 - DNA, 333 bp, Homo sapiens
attcgtaaactttttaaaaactatgggtttttttgctattttttttctagatcatcagctatcattttagtgtattttatgtgtggcccaagacagttcttcttccagtgtggctcaaggaagccaaaagattggatacccctgtaaacagagggtaatttaatgattaggttaccactgtgggcaactagagctcattcctgctgggaccctcagagggacactgacacatttgctggactattgttccatcaggggccaagaaagctggggtatgtatccacctacagatgttcctcattggttgtggagcctccacctccagagagtccc

SEQ ID NO: 85557 - DNA, 462 bp, Homo sapiens
attataaattacagattaaaccaaagcttccctcctttatgggtgcaaaattgatggtataagtaactgttctctcaaatggctaattatatttctagttgcctacttgaaggtctaattagccaattgcatatgcttttgtgggggcaaggagataattggcatcctcaagcaggtaattagaaaagcaattattagtgcccacggctaattacaagaatgaaaattgtccccaccaaaatggtaccagtgtctactgggcagaaaaccagtccctggaaagtgacaggaaacttaatccatttggcagtgttagaatggcaggcagtaaaacaaatcatcaactagacctacataatctataagcaacctcctgtgagagggctgtcagaagcctttctaactgtggcaaagggctgcagttggggcagttgccctattgccaataataacctgcacatg

SEQ ID NO: 85558 - DNA, 230 bp, Homo sapiens
agtagagatggggtttcaccatgttggccagactggtctcaaactcctcaccttgtgatccgccctcctcagcctcccaaagtgctaggattacaaaagtgagccaccaggcctggccagcttcctgatgattctaatgggaagtcaggcttgagaaccatggaatagatcattgcctatgtttctccctggtttcaaaatttatgattttaacttatctgatatgtttg

SEQ ID NO: 85559 - DNA, 1192 bp, Homo sapiens
ctttggggttgcattctcactccaagatcccaaatccaaagcccaagtgctcccctatgcaaatattcccaactcctttgttctacagcttatctgttgcccgctcctaaatccacagccctggggcacccctcctgaggtaccacagatttagtcgggaggtaccctctctgttcagcttccctggggtccccctcctcctcctttgctggttgtgtccaaagctaggtggggttcacggagaggatgtagttgggaggtgaaatgaggtgattttataaccagccaaagtccacccctttttttcaggcagtataaaggcaaaccaccccacccatcaccatctgtcatctcactaccaccatgctggcctcagggctgcttctggtggccttgctggccagcctgactgtgatggtcttgatgtcagtctggcagcagaggaagagcagggggaagctgcctttgggacccaccccattgctctttattggaaactacctgcagctgaacacagagcacatatgtgactccatcatgaagatcagtgagcgctatggccctgtgttcaccattcacttggggccccggcgggtcgtggtgctgtgcggacatgatgccgtcaaggaggctctggtggaccaggctgaggagttcagcgggcgaggcgagcaggccaccttcgactggctcttcaaaggctatggagtgacctgccgcacctgggagcgcaccaagccgctcaggcgcttctccatcgccaccctgcgggacttcggggtgggcaagcgcggcatcaaggaggtatccaggagaaggcgggcttcctcatcaaggccgtctagggcacgcgcggctccagcatctatcccaccttcttcctaagccgtaccacctccaatgtcatcagctccattgtctttggggaccgttttgactatgaggacaaaagttcctgtcactgctgtgcatgatgctggaaagcttccagttcacggcaccctccacgggggagctctatgagatgttctcttcggtgatgaaacacctgccaggaccacagcaacaggcctttaaggagctgcaagggctggaggacttcattgccaagaaagtggagcacaaccagtgcacgctggatcccaattccccacgggacttcattgactcgtttctcatccgcatgcaaggg

SEQ ID NO: 85560 - DNA, 659 bp, Homo sapiens
acgcaaagtgaccaagcattctcttttccaagtgaaatacgttattttaattgattagttgctttaatttgccttaagcgttttagcagagatttgcttttattgttgtgtttgccctgtaacactgattttatcagaggtttcttttatttaaattatcccaaatttgagttgaaaagttgcctagaatttttaaagtaacaaactggccagttcgtttcttaaacatctattttaaaaggactgggtgttgatacagtttttccagggttagatgtttatgactttatggatttgtcgaccgggtattactctaaactttaaacattaaaagctattataattgaggacaccaactgtttgcatagtgggatagagatagaaaaaaaaaagccatgacagtataatgactacaagattaactactgaactaaatggactttaaaagtggggagaaagtgattataaatcaaatactgtataacaaagaccaggacaccaagaatctgattggtgaaacctgcggttcctggcagatgctggtagttgcagtcaactttgagcacaatataattccaatttaaggagttgagaatcttagaacccactgtagtgagatttgtaatatgactgaataaattcttcctctcgtttgtgag

SEQ ID NO: 85561 - DNA, 374 bp, Homo sapiens
ctgaagatgcacttaataatgaagtcaggtagtgaaagtctgataccttgtttggtgacttcctgcaactcaccatggggaaggttcccccactcaggacttcaggtgcaacctgtggtgtgctaggaatcatctgcgctgagtgtatttagcaggatgagcaccagggttccagcaggctcacatttcactatgtaagcaccaagtgaatggggggatccttgaggggccacactttgccaggaaggttctttccagatttatcttccactttaactgtcttcaggggatttttcatcaatatctggtagcccctcagcgactctagtttggaacacatctcaaggtagattcaacatattacatgaacttgt

SEQ ID NO: 85562 - DNA, 462 bp, Homo sapiens
accataatgtcacaaggctgaaaagttagccccttttttagttttcattatgtactgcagtatgtagcaaaagactccctcgggcaaaggaaatgtactctttggggatttacttcataacaataaatggataaacagaacaccaaggataactgtttatatttaaccatgaacatgtatgtatacaatacatgcatatgcgtagaaagtataaaataaataaatccatcaaagcattaagtgttgtctcagtatggtggatctagggagtgctttgtagaccgccctctttgcctatcctttctaatttcacaacggtaaatacgtatacttttgcaatataaaatttcaaaaaatgttaactcaaattaagctgcatgtattccttcagtctgtcctatatttgtatgatgctccagaatgctcaaataacacttcattaaaaaaatttatttcttcaaa

SEQ ID NO: 85563 - DNA, 661 bp, Homo sapiens
ccctgaccaacatggtgaaaccctgtctctattaaaaatacaacattagccaggcgtggtgacacatgcctgtagtcccagctacttgggaggctgagtgagtagaattgcttgaacccgggaggcggaggttgcagtgagccgagatcacaccattgcaccccagcctgggcaacaagagcaaaactccatctaaaaaaaaaaaaaaaagtgaagaaactagatctgaagccttaattttctcccctataaacaggacttaacgatactgtcagctatcttattaccgcaaagatttaaagagagactattgatacacgtgctttgtgcttttaccttaaagcactacacaaatagaaggagtttcaggactgtcccttaagggtttactctattaaccattttcaagtccttaaattccctaggagaagcaattaagaaccaggcatcagtagagtatgttgaattaaaaggttctacagctgtattttgaggcctggaagagacacaaacaggactttctatggctaggcagagcagaagtcaccagttaggaaaaatccccagggtcagaaaccacctcccaaaatccgtgggattccaggcgtcagccactgctctcggccctctttacaccattttgtttgattgtctagtccct

SEQ ID NO: 85564 - DNA, 487 bp, Homo sapiens
ctgggggtagcagttgggatttacccagcacgctactttgttggcccctggggaggtggtgcagccaggcgggtaaggaggactcgcgccatcagcggggtctgagacatggtgtgcccagtgggcagagaataggcctgtggtttttaagaacctcactgatatcgaatgtgtcttggagtgagaaagtttttaatggaaaaggagcaagagagagtaatgaaataatttgctaagtgcctactatgttccaggcattttacatccacagtctctttcaatcaacacgtccatgcggaggagagcttcttgtcgcccattataaaggctggggagagaccgggaagagcgagaagctacacgctgggctgcagattgggccctagcgggcttggagcgtggatatgctggctggcccccctccccgggagtcacagctctcgccggtctcgccactcaggctctgccgggtacccaggaggcttgc

SEQ ID NO: 85565 - DNA, 623 bp, Homo sapiens
gccccagcgtctctgcagaccagtcccctccagggtccggcggggcccgcgcggtgggaggagtcgggcactggccggcgactaacgggtccgactgctgaccaagctaggagagacccggaccacggagacagagaccccggcatcgcgaccccgaggacctcctctcctcgccctgtggcacccactagtcctgggcactcagtcgcggagagcccccgaccccagcgcgccagccccgggggagccacctccatccccgcgtgccgcccgggccatgctcccccggggcagcggctgagccccagccgggacgggatcggagcccggcggagcatggatccgggctgggggcagcgggacgtgggctggggcggccttgcttgatcctcttcgccgcccttcgctgctcacggtgttcgcctggctgctgcaattatgcccggggccttgtgtgctggcgctgtggcacgcgggggaccggggcccggggaccccgccttagccggggaaacccggggggttcacatgggggagctggggccgtgtggcgctcgttgttgcggttgcgggcgactcgggggctggcgaccgccgaaggagccaggagtccgggggcctcc

SEQ ID NO: 85566 - DNA, 214 bp, Homo sapiens
aagatggcgccattgcactccagtctgggtggcagagcaagactctgtctccggcggttggtggggagtaaagttttctgtatccatactgtcctctaggttacaaaagactagagcaggccgggagtggtggctcatgcctgtaatcccagaactttcggaggctgaggcaggaggaatgcttgaacccaggactttgagaccagcccgagca

SEQ ID NO: 85567 - DNA, 798 bp, Homo sapiens
agcaattctctttcctcagcctcctgagtagctgggattacaggcatgcaccaccatgcctggctaattttgtatttttagtaggtatggggtttctccatgttgatcaagctggttttgaactcctgacctcaggtgatccacccacatcggcatcccaaagtgctaggattagaggcatgagccactgcgcctggcctgaaaaaaaattttaacgtttgagaaaatacaaaattttcatagtctccaagtatttctcctaagatctttccccctatgagggggaaaagatagtaactttacaatggagaaacccagcagaaacctgaaccaaatgaacaagttcaacatcatcagtaagaagaactatcaatgccataactctgatggaatgcactgggaaggattccacatcatttttgtgctgtaattgccaaaagttcgtaacttcagtccaatcatggaaatacatcagacaatcccaaatcgaggaacatttcataaatactgatcagtactggttcaagatgtcacggttatgaaagataaggaaagattgaggaactgttattgcagtcctacaaaacggcgagagactaagaaataactaaatgcagcgtgatcctgggtggaatttgggaacagaaaaaggacattagtggaaaaagtggtgaaactccaataaggtcttttgtttagcgaatatgttcattttaaatcagttaaattatttaaatatatttaaacattagttaaatgtatttaattaaattaataaaattggttattttgtgaaat

SEQ ID NO: 85568 - DNA, 294 bp, Homo sapiens
ctgggtgatagagtgaggctcggtctaaaaaaaaaaaacaaggtgcagcctgtgtgtgattcttaggttggtgatcttaggcaagatttaacctctctatggttcagtttcctaatctgcaaaatggacgctatctcatagggttactatggagatcaaatgaggaattcacataaagcactacagaaaatatttagcatggaataagcactcaataatgttttccattattatttccaatttttctctcagcatgtgtttcacaatcctttgttcatggcaaggtatgttgtc

SEQ ID NO: 85569 - DNA, 350 bp, Homo sapiens
aaaactttgtaaaatacaaatagacactttctcaaaattattgaaaaaattagttttaatagttaatgtcataactattattattcctttcaaaatcagggacaatattgagttgactgctctccctttttgttgtgtagtattatggtatttagtagtgttagtgcaatcagacaaaaacaccccaaacaggttagaaagaagcaaaacttattattttcaggtggtattatctttttgaaaaatccaagattctaatttgagaactattataaccaaaaagggtcaaaataaacagttccaaactacaggaaaaaagtgaaatatttcaacaataatttattggatat

SEQ ID NO: 85570 - DNA, 449 bp, Homo sapiens
aagccagaattaccctgataccaaaagcaaagatagtacaaaaaaagaaaatgaccaatatccctcatcaatatggatgcaaaatatataaagagacagatacaaagacatataaagagaattatataccatgatcaaatggtgtttattccactaatccaaggctggttgaataatcaaaactcaatcaatacaatccacgacattagcattaaatcgtctaccacgacattagcattaaatcatctacattaaagaataaaaatcggccgggggtggtggctcatgtctgtaatcccagaactttgggagggtgaggtgggcagatcacctgaggtcgggagttctagaccagcctagccaacatggtgaaacccccacctctactaaaagtagaaaaattagctgggcgtggtggtgcacactggtagccccctgctacttgggag

SEQ ID NO: 85571 - DNA, 443 bp, Homo sapiens
agccacaacaagggaactttccttgactaattaaggcaataatctcgtgccagaagggcctggacaagggttatttctttccgggttgtcttctggttcaatggcataatagattacaacaattgactgatctatctcattgatacttattgtctgaataatcatggccttgttacctatagcttcaacaatagcaataataagacaaacaaaatacacaaatacattctgtctctcacacacacacacacacacacacacacacgcacacgcacaatccagccttggaaatttaagaacttgtccagtcgggcaaggcaggacctggaaaaacagaaccaaatagatgtgttcaggaggaagtccagtgaaacaggcaagtggataagaggcaaagacatagacagcgtacagttcaggcaggtaataagcatgaagaagga

SEQ ID NO: 85572 - DNA, 307 bp, Homo sapiens
acatgtttttgtaaaaaagcaaattactgaccaaatatgtgattagcatagataaaacaattaatatgtttttcaaatccaacaatgtataaaaaggataataaagcatgaccaagtggagtgtatggaatgccagtttggtttaacagtcataactttatgttggctgggcatggtggctgaggcctgtaatctcagcactttgggaggcctaggtggggggatcacttgagcccaggagttcgagaccagcctgggcaacatagcaggacctcacctcttttgttatctctcacttctttttatt

SEQ ID NO: 85573 - DNA, 438 bp, Homo sapiens
cattttatcctactatgaagtaaagttacacatttttctgatgaagaaagtgaagtttagaattttactaagattatacaggtgttaaggatggtattttgtcccagtatgacatctatgcgttatgaatatatatgcctaaggtgtattttagacaaattgcatttatatttgtatttagacttctgtagtctcaattttttactcacgtattcatgaaattattcccatattttaaaacttagtaacatgtttataatggctgtatagtttttagaatatgtatacataatgtgtaattaattgatgtacttttgctagatattttgcaattttcaatatttggcattttatatttaatactcccacaaatattcatttatatgatttatattattttttgtccaatgctctaattaaaagagaattactaattta

SEQ ID NO: 85574 - DNA, 314 bp, Homo sapiens
agagaaatcacaaacacgcaatctattaaagagtaataaggttattactaaaaaaaaaatgacaataaagtttacaacttagatgaaatataaattcctagaaaataagcataccaaaattgacaaagaaaaataaaaatctgaacattcttaagtttttaaataaaatgtaatctataattttaaaacttacccttaaaactaaaaaaagaaacaaacaaaaatgctaccaacccaaatagttttgctaatgaattgtatcaagtagaactaacactaatctcatgtaaaatgttcctgagattgcgtgtttg

SEQ ID NO: 85575 - DNA, 418 bp, Homo sapiens
aaaaaaaaaaaaaagaaagattcaggttccagcaggatgtttccaattaagagtcacttccatgtctgctccttgtcacaggctgatgtatatttctgcacaatctgaatccgacttctattctgaagttttaagatttgagtcagagggctgggcgtggtggctcacacttgtaatcccagcacttttgagaggccgaggcgggcagatcacctgaggtcagaaattcgagattaatctggccaacatgttgaaacctcgtctcgactaaaaatacaaaaattagctgagcgtggtggaacacacctgtaattccaggtactcaggaggctgagggaggagaattgcttgaactcgggaggcggaggttgcagtgagctgagatcattccactgcactacagcctgggcaacaagag

SEQ ID NO: 85576 - DNA, 470 bp, Homo sapiens
aatacgtattctgaagccactatatctgcatatgtatcccagatttgaacaattaagtaaaaagatggtgaatgatgaaagccagttttctgtctgtagaagtgagaggtgacagataaccaaaggaagaaggctagaatggatagaggacagtgcttaagtgtagttcctgttgcctttagtcttatagacttcatttccaaagtttcttagcaccccccttccccctttggtgaggttgtttcacatattttctagacaattagattcttttgtcaaagtctgtgttccatccggagagcctctgatctcttaaatgattttttaaatttacatacattaaggttcactctgctgtaaaggtctgtgggttttaatcctgtctcacagtttttgcatatgttggccttctgcctgggaatactctcccagatattccccatgactggccccttatcttcaatcagatc

SEQ ID NO: 85577 - DNA, 671 bp, Homo sapiens
agttttttctctgccagaatttgttcctagcatttatttccaattgccttaacgaaaataaaatcatcccatgtatagaagtacttgcttagaaatcatggtgaattagtacgtaggctatgctgagaataataattggaaactgaaaaacaaagattgactatagtaattaaatggaaactttaaaaaccatcatttaaaatgtaaatctcttctccaataagtgtattcggtcctttgaaagaaactcctttgcaatcactctctgaaaaatatagattgtaaagaatcctggctgtgagaaaggaagctgaaaagggtttgtttttccctctgacactttccagcagagacatctcagaattgcctaagtgtgaatatctaaaattacaaactagtgttctctagaaatcttaggatacatgtgtgatgataaagagagctacagctgtactcattaccagtgaaataactcatgaaaaagttttgggccaactttcgatagcatgttgaaagccactgcgttttctttgtctctacttgcttattgttcatttttgcttcattacctatggtggcttctctgtatcccatagtgagagtagggcctggacaaggtttgtaatcctatcacacttccaaaattattgaataaaataatagatgccttc

SEQ ID NO: 85578 - DNA, 798 bp, Homo sapiens
gtagtaaagatgtgtgtgaatatttaattgtgagcatactagatgcagtattgttgattataaaagctgtgtattaatgcctttaagccccacggtaatcatatgaagtgggtagtactatttctgcttttcagaagaaaaaacaggcatagagaaatgaggttgcttgctcaaggtacctgagttagttaagtgttagggccaggacttgaatccaaccagtgtgactctagagccagtactattgatcattatatggtaaaattgtaaacaacctaaatgtttcacagtgattgttagggtccatccctacagtggggtactgccttctcagccatgaaaatgatgatagaataatataaagacatgaaaggatgtcttggtatatgtaagtgagaaaaaataaatttaaaaacatgattccattttggtaaaaaaacccaaaaatatattatgtctggaaggatatgtgccaaattgttaaatggttatttctgagtgtagttttacaggtgattgttttctttttgcttatccaaattttctaacttctacaatgaatataaattatctatcatgttgtaattaagatattaagatgtaacttttcaataaaaaattaaatgtgttagcataagctgagaaatttgggttttatactctgcattttaagcaagtttgtagaaattgtacatgagaatttgtaaatgcatgtagtgttttgtaattttttgtttgattccttattctagaagtaatatcaattgagtagagaaatatatcactcctaccacccta

SEQ ID NO: 85579 - DNA, 642 bp, Homo sapiens
gtagtaaagatgtgtgtgaatatttaattgtgagcatactagatgcagtattgttgattataaaagctgtgtattaatgcctttaagccccacggtaatcatatgaagtgggtagtactatttctgcttttcagaagaaaaaacaggcatagagaaatgaggttgcttgctcaaggtacctgagttagttaagtgttagggccaggacttgaatccaaccagtgtgactctagagccagtactattgatcattatatggtaaaattgtaaacaacctaaatgtttcacagtgattgttagggtccatccctacagtggggtactgccttctcagccatgaaaatgatgatagaataatataaagacatgaaaggatgtcttggtatatgtaagtgagaaaaaataaatttaaaaacatgattccattttggtaaaaaaacccaaaaatatattatgtctggaaggatatgtgccaaattgttaaatggttatttctgagtgtagttttacaggtgattgttttctttttgcttatccaaattttctaacttctacaatgaatataaattatctatcatgttgtaattaagatattaagatgtaacttttcaataaaaaattaaatgtgttagcataagctga

SEQ ID NO: 85580 - DNA, 1909 bp, Homo sapiens
gctggtggtggcgcgcggcgcggcgcggcgatggcggcgggtggcagcgatccgcgggctggcgacgtagaggaggacgcctcacagctcatctttcctaaagagtttgaaacagctgagacacttctaaattcagaagttcatatgcttctggaacatcgaaagcagcagaatgagagtgcagaggacgaacaggagctctcagaagtcttcatgaaaacattaaactacacagcccgtttcagtcgtttcaaaaacagagagaccattgccagtgttcgtagcttgctactccagaaaaagcttcataagtttgagttggcctgtttggccaacctttgcccagagactgctgaggagtccaaggctctaatcccaagcttggagggacggtttgaagatgaggagctgcagcagattcttgatgatatccagacaaagcgcagctttcagtattaatctccaaacatcactgctgctcggagaaaccacatccccaggcataacaccaccttcccactgtctggggctgacttgcacagaaattctgttgaagacagttgagaattcctttggagaaaacagcccagcttggcgtggggttaggttgctgtttcaaataactcacaggcccaggtgacatggaatcttggagcagccttgtgcagtggcagccagtggcttcctgaacgtgcctctgcgaagtgtgagatgaggggtcacataaccacactgttgactacctcattcctggtttttggcctccacatcatcttttttcttaatatttcatgttttaatttcagggtgtttatactttttgaaactagaccagaagatagtagactttatagagaaagaccagttttacctagatactaaaggaagaattaaaccgctgttagtttgaaatgctttttttttttttttttaaatggagatagggtcttaactcttgtccaggctggaggagtgcagtcgtacagtcatggctcactgaagtcttgaccccgctgcctcagcctcccaaataactggggccacaggtgtgcaccacaactctcagctaatttttaaaattttttatagaggtggggttttactatgctgtccagactggtcttaaactcctgggctcaagtgatccccctgccttggcctcccaaactggtgagattacaggcatgagccaccacaactggcctgaaattcttaaaggatgggagtgtcgatgacagcaccttggcatcgttgtgcctaacctgggagacggaagaagcacgccatgggaagtgtttacacttgggggacaagtgctaagtattgtggagcccatagccccttgagatagatggctactttgcctttcttcttgaactgtcttgcagaatgtggatttggggtaagtggtcttgaaggattcatttagtcaccctcaaattaagatttttacttcatctttcttgggcctgcacctccaagataacaaagaagaagcaatggtcgtgccaaagaggtccacaaccaggtgtgcactgttcactgcagcccatttgctgtatgaactgtggttgttgtgtgcccaatgacaaggctactaagaaattcatcatttgaaacgtagaggccgcagcagtcagcgatgtttctgaaatgagcatccttgacgcctgtgtacttcccaggctggatgtgaagctacattaccatgtgagttgtgccattcacagcacagtggtgaggaattgagctcatgaagcaggcaaggaccgaacacctccaccccaacgtagacctgcaggtgctgccccatgacctccaccaaagcccatataaggagcggagttgttaaggactgaagaaaaacttctctggagaaaaataaaattgcaattctacttaaaaaaaa

SEQ ID NO: 85581 - DNA, 359 bp, Homo sapiens
gactgttctcaaattcctggcctcaagtgatcctcctgctttggcctaccaaagtgctgggattacaggtgtgagccactgcatccagccaggacttttatatctatattctgaggtataattgagttgtcttggtctttgaggtcttacttgttttgtataaaggttgtgctagcttcatagaatgaattgagaaactctgtgtttttgcaattttcaggaatagtttaaattttctgtcccatgaagggtttgatagaacctaccgtaaaactttggggcctaattcatttttacagggaagaagaacaagaactatagatcttgtctgcctttttcatttatatgacatttattag

SEQ ID NO: 85582 - DNA, 409 bp, Homo sapiens
gaactgaattgggtcccctaaaacgctatgttggaatcttaatccccaggacctcagaatgtgaccttaataaaaacagggtctttacacaggtgatgcagttacaacaaggtcattagggtgggccctaatccactatgactgatgtccttaaaagggggactttggagagatgacgtgaaggccatgtggagacaatggggtgatgtgcctataggccaaaaaacgtcaaggaccgcaggccaccacctaaagctggaagaggagagggaagatcttcccctaagaccttcagagggaacatggccctgctgacaccttgatctcagacttcccctctaggaactgtgaagaatcaacatttttcgtttaagccggccattttgtggtacgttattgtggtagcctg

SEQ ID NO: 85583 - DNA, 242 bp, Homo sapiens
gtgaaggaagtatgaaaactgagactaatattatgaagtctttttttaattctttatcttattgcccatttttaaccccttggtgtttgaaatggaaaataaatattctcttcgcgatagataatatgtcaataaccaaaaggtggccttaaccaataattggcccaactttaaattattaccctaaagatatataaattaactaatctaaaattaaatgcaattttgctatgacttaaagt

SEQ ID NO: 85584 - DNA, 469 bp, Homo sapiens
gagtactgtttttgaatctcttccagtgaaaactaatatgataaaattcaaatgacatcaatatggcctattcgaatgaataacttaaatttttgtaaagctcctacattccaaacttgtaacactaatattaatatttttagtttttattcagtgaccctgtaaccccggtagagagaacaaagcttcttttagcaaatggattttgggcagtatataaaattacagcttgcattttcacagaggcctacacatctatcacaacaggttgaaataaaattcagactgtctcatcaggattataccaactatgaaacgcttgccatgtgtcttaagtattcctttaattattagaatttaaagcattctaacctgattggaaatttaaatgttgattcattattcttcatatttataagaccaattttaaaagctattaatttattccttctgcagttacctttcttca

SEQ ID NO: 85585 - DNA, 1866 bp, Homo sapiens
  misc_feature (3)..(3): n is a, c, g, or t
  misc_feature (83)..(83): n is a, c, g, or t
  misc_feature (137)..(137): n is a, c, g, or t
  misc_feature (486)..(486): n is a, c, g, or t
  misc_feature (896)..(896): n is a, c, g, or t
aanagagaatgagaatgtagagccatttgctggctcagcttaaggccacagctttcttagcaatgcagcttgtacagttgtcngagctttctggtagaaccctagtctgggtgcaacagtcacagagacaaatatgnaaataggaacatgtatgaaaacttaaacccttaaaaagaaagacgcttagcctctatttatttccaaataattgctgttcaaggcattgctctttatctcttgggccccatgacagagtggcttaaaataaatcatcaagtcttcagggcaagtgtgatttattttttggtcatatactgctgctttgtcattctatgtaattattatattcagccagtctgcttatcattggttacagcttcataatgtcacaaataatcctgcttatgtttatctgtctaggtgtcagccatccatgccataaatcctataacaacctaataatattctcttcatgtgttttgtgcngaagctacattgcaataagtatggctttcacataaatagagagttttggagtacaggagtgactcggggaaaagtgtgattccacagatggtgctactcagacaaatcaaagggctgaatgtagtatctggcaaatccatctttaatgcagccattcctctacatggctttggtttagagtatacattaatgcattaactctaggctagtacagagcttaatgatgcatccctgcttaatttctaccaatttcacagaggatatttttgtctcctgcaagtaggaatcaagaaagtttactagatgtgctcatagtgtagtgagccttatgtgggaaaaggaaaaccaacacctttgaattctttcattctgtgtggagttgccctaaattaagctgatgcttcagtgtnttcatcccttacacaatcagttgcatcactcctccaccacagagccataaaactcactggtctagtcagtgctttagatgtttcaggtgcctaataacttttggcaactttttttttttttttttttttttttgctattggcctataggtcatctcagcattatcaaaactaagtttgataacttacattctatttgcatacggcttttaacttgttaggaatggaaatccacctttttgaagttccactgtgttacagagtctttacaagttccaatcttgtaaactaggtatgattatccctttttatggataaggaaactcatgttcagaaacttaagtaatcttctcaatgatatatatctagcaactggtcgaaccaggattcaaattttatgtctaataattgtgaacaaaatccatcaaataaccatccaaaacccagcctgtgaacgcatttaaagaaattttgctctagaatcagcactgattttcaactctgctgtcttctgtgaacattgcataataaactaacactaagtcaaacacagaccatgttcccacccaagtcagccttggttcccaagcacaagtcgctttcagaatagcttgttgttgaagcaggaaaaaaaaaattgtgcttgatttggccttgagtagcaatgtgaattataaaggaagttaagcatggcttgctagaagagtcccagcggtgctggtgcttctatagaattaattggagagtctttttttttttgaagtcccaggcagccaatgagtgaaaatgcataatttatgcaagtgttggggaaaaggcacacctgtgccaagataagattttcctatcttggatgagtgggaagtttaatttttctgcaaaaataaattggaagcctaaatattagaacttatggggaagagttatgccttctaatgtatttaaataaacgtgaggttcttttgttccttt

SEQ ID NO: 85586 - DNA, 1256 bp, Homo sapiens
gcacactgtacctaccatctgcattgagcagaaagacttttgttttactgaagacaaaagatgtttttattttagacccagaagagaggagtttgctctgaatttgtaaataagtcttccccattcctcatactcgagcctctcctctctggttgcctcctgccaccagcatccatggctcatttgacacctttttaaatatcaggacaagtctgaaacaaagtagtaaaatgtatataactcttacctgttgtcattctttttcttttaaatttgttgctaatctctgataatgaagattcttactctgattctcagctgagctgtgagggcttccagggaaaatggaacaaaatggtgttcttaggtaatgggttgtagatactgagtcttcctttccttttctgacccttctcgaggacatttgctttcctcacacttttgtagtctctctttacatattactatatggaaatgaattgctctgtgctgaaatttgaagaccagataatgaaactgaaaagcaaacaattttactgaatctgtctacccttcattcatgagaactccagaatgagtgttgaccactgaagcatcttttaagtctgtgttccattgtgccattcaggtttgctgtcacatatgcatcatctgaaatcatttgaaatttttgtacaataaaatatcctggatttgatcctgaaggaaactagtaagatcagatttttgggtcatgtctgttgtattttcagtaatgtgatttcagatggtcatctggattctcccacttctctactccattatttctctacttttccttccagcaaacctgaaacgtgagggagatggattaatgtgagtaacaggaatgtgtctttaaaaagctagagtggttacatttaatcaggcagtaagataatttgggttcttgagttgttttggagtaatatcccacaactggggtaggaagctcaggacttttttctttaaagctagtcatttcaaaagcatattgtatttttttgaatgactacagtatggacaatttcaaaaaccaaaacccactttggattggtggaagtaaaaactggtaactcactcaagtgaatgaatggtcttgcattttaaaagcttatgggaaactcaatttgaaatgattagaaaatgtcaagtattataagctggtatttaagatgcttgtaaatactatttatgtttttaattttgtaaaataaagatttctttttaaccactgg

SEQ ID NO: 85587 - DNA, 1264 bp, Homo sapiens
gcacactgtacctaccatctgcattgagcagaaagacttttgttttactgaagacaaaagatgtttttattttagacccagaagagaggagtttgctctgaatttgtaaataagtcttccccattcctcatactcgagcctctcctctctggttgcctcctgccaccagcatccatggctcatttgacacctttttaaatatcaggacaagtctgaaacaaagtagtaaaatgtatataactcttacctgttgtcattctttttcttttaaatttgttgctaatctctgataatgaagattcttactctgattctcagctgagctgtgagggcttccagggaaaatggaacaaaatggtgttcttaggtaatgggttgtagatactgagtcttcctttccttttctgacccttctcgaggacatttgctttcctcacacttttgtagtctctctttacatattactatatggaaatgaattgctctgtgctgaaatttgaagaccagataatgaaactgaaaagcaaacaattttactgaatctgtctacccttcattcatgagaactccagaatgagtgttgaccactgaagcatcttttaagtctgtgttccattgtgccattcaggtttgctgtcacatatgcatcatctgaaatcatttgaaatttttgtacaataaaatatcctggatttgatcctgaaggaaactagtaagatcagatttttgggtcatgtctgttgtattttcagtaatgtgatttcagatggtcatctggattctcccacttctctactccattatttctctacttttccttccagcaaacctgaaacgtgagggagatggattaatgtgagtaacaggaatgtgtctttaaaaagctagagtggttacatttaatcaggcagtaagataatttgggttcttgagttgttttggagtaatatcccacaactggggtaggaagctcaggacttttttctttaaagctagtcatttcaaaagcatattgtatttttttgaatgactacagtatggacaatttcaaaaaccaaaacccactttggattggtggaagtaaaaactggtaactcactcaagtgaatgaatggtcttgcattttaaaagcttatgggaaactcaatttgaaatgattagaaaatgtcaagtattataagctggtatttaagatgcttgtaaatactatttatgttttcacttgtaataggttcttacccttccccgcttcggtcttctgcta

SEQ ID NO: 85588 - DNA, 741 bp, Homo sapiens
gcacactgtacctaccatctgcattgagcagaaagacttttgttttactgaagacaaaagatgtttttattttagacccagaagagaggagtttgctctgaatttgtaaataagtcttccccattcctcatactcgagcctctcctctctggttgcctcctgccaccagcatccatggctcatttgacacctttttaaatatcaggacaagtctgaaacaaagtagtaaaatgtatataactcttacctgttgtcattctttttcttttaaatttgttgctaatctctgataatgaagattcttactctgattctcagctgagctgtgagggcttccagggaaaatggaacaaaatggtgttcttaggtaatgggttgtagatactgagtcttcctttccttttctgacccttctcgaggacatttgctttcctcacacttttgtagtctctctttacatattactatatggaaatgaattgctctgtgctgaaatttgaagaccagataatgaaactgaaaagcaaacaattttactgaatctgtctacccttcattcatgagaactccagaatgagtgttgaccactgaagcatcttttaagtctgtgttccattgtgccattcaggtttgctgtcacatatgcatcatctgaaatcatttgaaatttttgtatgtttcactagtcacgacggtgacaacgacgtgcctagcgcatagcgatgcatagcggcacgcggt

SEQ ID NO: 85589 - DNA, 281 bp, Homo sapiens
ccaaaacccacttggattggttttgaaattgtccatactgtagtcattcaaaaaaatacagtatggacaatttcaaaaaccaaaacccactttggattggtggaagtaaaaactggtaactcactcaagtgaatgaatggtcttgcattttaaaagcttatgggaaactcaatttgaaatgattagaaaatgtcaagtattataagctggtatttaagatgcttgtaaatactatttatgtttttaattttgtaaaataaagatttctttttaaccactgg

SEQ ID NO: 85590 - DNA, 1987 bp, Homo sapiens
gcacactgtacctaccatctgcattgagcagaaagacttttgttttactgaagacaaaagatgtttttattttagacccagaagagaggagtttgctctgaatttgtaaataagtcttccccattcctcatactcgagcctctcctctctggttgcctcctgccaccagcatccatggctcatttgacacctttttaaatatcaggacaagtctgaaacaaagtagtaaaatgtatataactcttacctgttgtcattctttttcttttaaatttgttgctaatctctgataatgaagattcttactctgattctcagctgagctgtgagggcttccagggaaaatggaacaaaatggtgttcttaggtaatgggttgtagatactgagtcttcctttccttttctgacccttctcgaggacatttgctttcctcacacttttgtagtctctctttacatattactatatggaaatgaattgctctgtgctgaaatttgaagaccagataatgaaactgaaaagcaaacaattttactgaatctgtctacccttcattcatgagaactccagaatgagtgttgaccactgaagcatcttttaagtctgtgttccattgtgccattcaggtttgctgtcacatatgcatcatctgaaatcatttgaaatttttgtacaataaaatatcctggatttgatcctgaaggaaactagtaagatcagatttttgggtcatgtctgttgtattttcagtaatgtgatttcagatggtcatctggattctcccacttctctactccattatttctctacttttccttccagcaaacctgaaacgtgagggagatggattaatgtgagtaacaggaatgtgtctttaaaaagctagagtggttacatttaatcaggcagtaagataatttgggttcttgagttgttttggagtaatatcccacaactggggtaggaagctcaggacttttttctttaaagctagtcatttcaaaagcatattgtatttttttgaatgactacagtatggacaatttcaaaaaccaaaacccactttggattggtggaagtaaaaactggtaactcactcaagtgaatgaatggtcttgcattttaaaagcttatgggaaactcaatttgaaatgattagaaaatgtcaagtattataagctggtatttaagatgcttgtaaatactatttatgtttttaattttgtaaaataaagatttctttttaaccactggtcataggagaatagaaataaaagaaaactagataaaagtaaaatatacataccttcattctcttacaatatcaatcatcatgtaactttagaaaattgtgccatattgtgtgagaatgtgagtgaaaagggatatgtcctaatatatgtaaatggttgaaacagtgtcaggtacacccaggagttcctgaccacacttttgagaattacactgaattacggtgattgtccatgccagtaaaagaacataatgagtttcgattcgtcgaatcaataaactatatgcccatttaaaaatgcaagatgccttaggccatccccttagagatcccacattcaataaggtccgtggcgtcaagaaatctgcatcttaactaagcaccacaaattaattggaataactggtctggacaattccgaacgagaaaaaccccgttcacagagatccccgaagaggttcggccattataacgtccaatagagggggtgcgcaactacagcagctaccaccaaagttttccaaacgccggactggagtttaatctgtggcagacccttaccacaagccagtgcagacccatagagatcacggggcgcctgcgacgcatgtcatccaccaatccctcgacgacctccccgaaccacgtatatcatccactgagctcacaaacacggcaccacagcaatacgaattccatcagtctactaatcattgaacttgcaactctacaa

SEQ ID NO: 85591 - DNA, 349 bp, Homo sapiens
cccacaaactagactaagcccatttaagggaaaacaattcaagaccaattcagctgccctcccttcccactgcaacttacatatgacaagagataaaacattgtgggaaaggggcaggcagaaaagtcttaatggttatactcagttagcagaggcaccctgaaatgatttctaatcactacaacagtacacagatattctctaaactatattcagaggatctgaatcttcagtgaaatcattgcaggacggagtatcaactggactatacgtctggatctgcagctacattcaagaaaagtcaactgctttgaaacgttgccacaattacattcttaaaggaaatcag

SEQ ID NO: 85592 - DNA, 429 bp, Homo sapiens
atttagaacaaaacagatcagtcggttggggggattcagtaacactctacacttgtatccagtcaattgttgatggtaatccaatcttggatgtggtgaaaagagggtgggcttagggtctaagtgaaattgactgccagtgtgtgactctgaatcatttatttatatctctgaggttttcgttcccttttttataaaaattttattaaataagttttcatttttccgtaaaactaagactgaaggaaagtctgcctttcttaaagtcagcaaggtctactgataaagaagataccttgtaatctctactttcatgacagaaatccaggcctaatcaatacttttttctattatcactgtaattaaggcataaggctttccctgatatacaaatgattaaacctctcaataaacaacttcacataggtc

SEQ ID NO: 85593 - DNA, 565 bp, Homo sapiens
tcgatgcagctgtagtgacaatctcagagcagcttctacaccacagccatttccagcatgaagatcactgggggtctccttctgctctgtacagtggtctatttctgtagcagctcagaagctgctagtctgtctccaaaaaaagtggactgcagcatttacaagaagtatccagtggtggccatcccctgccccatcacatacctaccagtttgtggttctgactacatcacctatgggaatgaatgtcacttgtgtaccgagagcttgaaaagtaatggaagagttcagtttcttcacgatggaagttgctaaattctccatggacatagagagaaaggaatgatattctcatcatcatcatcttcatcatcccaggctctgactgagtttctttcagttttactgatgttctgggtgggggacagagccagattcagagtaatcttgactgaatggagaaagtttctgtgctacccctacaaacccatgcctcactgccagaccagcattttttttttaacacgtcaataaaaaaataatctcccagaaagtttatctttgc

SEQ ID NO: 85594 - DNA, 447 bp, Homo sapiens
aggacatttgcttgtatatgacacaggtggactgcagcatttacaagaagtatccagtggtggccatcccctgccccatcacatacctaccagtttgtggttctgactacatcacctatgggaatgaatgtcacttgtgtaccgagagcttgaaaagtaatggaagagttcagtttcttcacgatggaagttgctaaattctccatggacatagagagaaaggaatgatattctcatcatcatcatcttcatcatcccaggctctgactgagtttctttcagttttactgatgttctgggtgggggacagagccagattcagagtaatcttgactgaatggagaaagtttctgtgctacccctacaaacccatgcctcactgccagaccagcattttttttttaacacgtcaataaaaaaataatctcccagaaagtttatctttgc

SEQ ID NO: 85595 - DNA, 785 bp, Homo sapiens
acttttatttcttctccgtttttcctcattcttttcctcttatttctttgacttttctgatttctttttttttcttattttcctttttttttcatattccttttaattttttcttacttcttttacttttcttatttgccctcttgtggaaatgaggcacagcctcccttatggttgagccgtagttctagctgagcacggatggtttgatcctcctgtgttggggcactgtatggtgtgagggcacaaaaccttgacccacatgggtctggtcaccttctcacagaggtcacctttacagccccccaactctttgaaggatgtgtcccaaggtgtctcaagtctgatgcaatgaaagctgccccccattgaccacaggactgagtccagaatgtcctgcgtgtttcccagagtgtctgtcctaacaccgcttaaagattagccactgctagacagtgatcctcaggtatatggtctcaggattggccccaagcacacggtgtgtgtgtgtgtataaatatatcttcacaaagcataggtacccattaaagccatattgctttgctgaatggttctaatagctacagatgatttctagcctgaaagaaaagcaccacgaattgtttgaagttgacttgtcagatgtggcatgcttggtctaagttttgacaggaagggtatgtgggtaggggtgtacggagcatctcatgagaccagttctcctcctgagaggtccgtgatgttgggaactgttgccccagatggactttgcccttgtgagactt

SEQ ID NO: 85596 - DNA, 996 bp, Homo sapiens
aacatgtatgcatccaaaaacagcccccaaaaaatacatgaagcaaaaactaacagattggaagagagcagtagttcaaaaacaacagctggagaccttaacatactacttttaataatggataaaactaagcagaagatcaacagggaaacagaagacttaaataacactgtataccaacaaggactaacagagaactgtagaaccctccacccaactactacagaatgcacgttcttctcaagtgcacatgaacattctccaggacagaccatatgctaggctgttaaaaaaaagttcagcaaatttaaaaggattaaaactgtacaaaagtatgtcctcaaatcccagtggggtgagttagaaataaataacaaacttgggaaattaataaatacatgcaaattaagcagtatacttctaaataaccagtgggtcaaacaggagatcacaaacaaaattaggaagtgtcttgaggccgggcgcggtggctcacacctgtagtcccagccctttgggaggccgaggaggcgggtcgcttaaggtcaggaggtccaggcaggaaaattgcttgaacccccgaggcagaggttgcagtgagccgagatcacactacagcctgggtgacagagtgagattccatcaaaaaaaaaaaaggaaatattttgagacaaatgaaaatgatactatatatcaaacttatgggatgcagctaaagcgtgcttagagggaactttagagctataaatgcctacatttttaaataaatctaaattgcctaaacgtctaccttaagtcattggaaaaagaacaaacatctcaaaaggaaaaggaagtaataggattagagtgaaaactggtgagatagagaatagaaaaacagtagagaaaatctgtaaaaccaaaggtgatttttttaaaggtaatctttaaaaagatcaacaaagttgacaaacttttagccacactgaccaaaaaagaaaggctcaaattact

SEQ ID NO: 85597 - DNA, 378 bp, Homo sapiens
ctgggattaatcagaagtcaacatggtggattagcatgtaagatggagttgctttaacctgcacatctttgctattacaaatagtgctattatatatatataaaatatgatttatatatgatatatatataaaagtgtgaataatcttgctgttttcttttatgatttaatttttcagtctataagattgaacatatgtcattttgtttatacatgtgttatagattgagtatttgtgttcccccatcaaatacgctgaagccttaactcccagtatgactctattgggagatagggcccgtgaggaggtaataaaggttaaatgagggcataatggtgaggccctgacccattaggcctggtacccttataagaaaa

SEQ ID NO: 85598 - DNA, 769 bp, Homo sapiens
tgtacttacaggccacccctgaaaaggcatatcagattcctaaagtgcttcgtaatgccccttcaaagagtcttaagtcagatatggcttccccaaaccaattttgcagtcagacatgtaaaaatcagaaaatcaattcctagaactcgctcaatgtttcatttcatcccataccaggcaccatgatgtgtcaatcttagttcaaagcactacaaaccaaaccaggtgatgacaagtaccaggaaagaaaatagaaacttttagcagggcacagtggctcatgcctataatcccagctactcagaaggctgaggcaggagaattgcttgaacctgggaggtggaggctgtggtgagccaagatggtgccactgcactccatcctgggcaacagaacaagtctcaaaaaaaaaacaaacaaaaaaaaaaacaaaaaaaaaacaacacctctgccaatctccgttgcaaactggctccccatttaaatggactgacaaggcagttatacaaatttaagtggtgtgcacttaagttcaatctaactttgaagtgactcatgccccagtaaaaggactatgctttctatagtcaaaaattctttaatgctctgacaaggaggcccaggagtttgagaccagcctgagcaatatagtgagaccctatcttcacacacaaacaaaattaagctgggcccagtggctcacatctataatcctagcactctgggaggctgaggcaggaggatcacttgactcaggagttcaagacca

SEQ ID NO: 85599 - DNA, 653 bp, Homo sapiens
ctctgcttcctctttaaacataagttttaatttcaaaccatctctttgtgaatgcatatggccgtatgctgttaagagcacccaggtcacatcttaaatgctttgctgcttagaaatttcttctgccagataccttaaatcatctcaagttcaaagtttcacagatctctaaggcaggggaaaaatgctgttagtctgtttgctaaagcacagcaagagtgaccttagctccagttcccaataagttcatctccatctgagagcatctcaacctggacttcattgccccatcactatcagcattttggtcaaaactattcaacacatttctaggaagttccaaagtttcccacctcttcctgtcttcttctgagctctccaaactgtaccaacctctgcccattacccagtttcaaagttgcttccacattttcaggtatctttacagcagtgacccaaactcctggtaccaattttctttattagttcatatatacattataatgaactacgtgagactgggtaattgataaagaaaagaggtttaattgactcacagtttcacaaggcttaggaggcctcaggaaacttacaatcatggtggaaggccaaggggaagcaaggcacgtcttacatggtggaaggggtggggg

SEQ ID NO: 85600 - DNA, 460 bp, Homo sapiens
  misc_feature (3)..(5): n is a, c, g, or t
  misc_feature (314)..(314): n is a, c, g, or t
  misc_feature (321)..(321): n is a, c, g, or t
  misc_feature (343)..(343): n is a, c, g, or t
  misc_feature (355)..(355): n is a, c, g, or t
  misc_feature (457)..(457): n is a, c, g, or t
atnnnaagttccagggtacatatgcaggatgtgcaggctggttacagaggtcaacatgtgccatggtgatttgctgcacagatcttcccatcacctaggtattaagccccgcattagctgttcttcctgatgcgcgcccttcccagcccccccgacaggccccagtgtgtgttgttcccctccctgggtcaatgtgttctcattgttcaactcccactcataagtgaaaacatgccatgtttggttttttgttcctgcattagtttgctgaggataatggctttgaaatctaaagtatgctctctgatcacggngaaattnaatcataaatcaacaaaatagnaaaaaattcccncattgtagtaagtcaactaatacttccatgcaactcatggatcaaaggagaaattaaatgataaattagatttacaaataaataaaatgctgtacttatgtngct

SEQ ID NO: 85601 - DNA, 994 bp, Homo sapiens
ttcacctcccaggttcaagtgatcttcacacagcctcccaggtagctgggatcacaggtgaggtctgtctctgtcacccaatacagtggcgtgatctcagctcactacaacttctgtctcctgggcccaagtgatcctcctgcctcagactcccaagtaactgggactacaggtgaacaccaccacacctggctaaatttttattcttagtagagatggggccttgccactttgcccagactggtcctgaactcttggggtcaagcaatactcccaccttggccacttgtgatcttctggggttacaagagtgagccaccacacctggccaacatgtatttcttgataatgtaaaaattagtaaagaattgacttttacagtggtctttaatttgtattagcatataaattaaagttttagaattttaaaaacaaatacaacaagcaaaacaaaacaacaacacaaaacagcaaccaccaaacaaagtaagagaaacagaaaagcacaagaaagagaagagcagaacaagacacaagaagagcacaagggggggggggcgggcatggagacagccccccgagggggcacaagaaatgtagaaacgacaaacaccgaatatgtgatatagaagacgggagcggcgctcgccatgagatgggcatcgacgacaataaaaagagaaacgagagagagcgcgcacatgaagatgagaaggcatcaggcgatgacgacgagagacagcagagctgggcgagagtctcagcggacgcgagacaaacagaaaatgaaggaagagacgaacaaaagccaaaggccacgacgaccaaccacaaccagaagaaaagagaagcagccgaagaggagagagcaaaagacaacacatgaaaacagcgtccgaaacagtggtaaaagaaaagaacagagacacagcgggggcgcacgactagcagcgaccccaccagcgaagacgcagcaggagaaccaataaaagag

SEQ ID NO: 85602 - DNA, 443 bp, Homo sapiens
cgctatgggtgaactatgtagaaacggccattattttgcctgcaaatgttaacagaagggtattaaaaccacagctaagtagctctattataatacttatccagtgacgttcctcatccactgggagatcttttggggactgggtcatctaacgaatcaagtgtcccaggaggaagcctgttcagaggacattaggccaactaaatgaatgagagagagtaaaggcagagtcaggactagaactgagttctagattataatctggtttgctcttggcacccaacttgccactcaacccctcaggtactttcctaattgatgacatacttagttgtaaaaagtcacaagaatagccacttgaaaatcattcctttttaaatcttcctattctacagcagttaagaaaataaattttgaaaccagaccaagattcaaagcctggt

SEQ ID NO: 85603 - DNA, 456 bp, Homo sapiens
aacaaaaaaaaaaaacaaaaaaaaatgaataactttttagttaagcatgtcctgtgtaatattatactaaaaaaaaattcattgtttatcggaaattcaaatgtaactggacatcctttcttttatctggcaaccccctgcctgctgtattccttctctttttgtttggagacagtcttactgtgtcacccaggctagagagcagtggtgtgatctcaactcactgcagcctcaacctcctaggctcaagggatcctcccacctcagcctcccagatagctgggattacaggcacataccaccatgctcagctaatttttgcatttttagtagagatggggtttcgccatatagcccagggtggtcttgaactcctggcctcaagtgatccacccgcctcatcctcccagagtgctgggattacaggcgtgagtcgctgcacccaaccttgtattc

SEQ ID NO: 85604 - DNA, 139 bp, Homo sapiens
ctgtgggtcatcattttttccatctgtaaatttgatcagctacttactaaggtttcttcactgagtataagtctcccttgattaaattaaagcattgtctgagtgagtagacaaagtaaaaatgtatttgggggaataa

SEQ ID NO: 85605 - DNA, 397 bp, Homo sapiens
tatggagagtaatttttattttagacacattgtaaatgtttcttacaatgattatttttaaagcaagctctagagtttccaaaactgggcattgagtagaatccagcatcgtaataattcagatttggttcctgtttgcccttgtactgtgctggagctcactgtcctggagctcaagggaacccactggcactagaggtgtattgagttgagtcaatggaacacctgtcagcttccatctcgataccatagggagcatgaatgttcaagctcttgctgctagaagtgatgaaagtggctgccgttatggtttttattaatagctttttttttttgtaaaatgtccttttaaatgaagacaagtttactttatgaaaaataatcaagtttatgcttt

SEQ ID NO: 85606 - DNA, 480 bp, Homo sapiens
tagctgggcaacaggcatgcaccactgtgctggctaaaaaccactattattaatcctgtcgagcacatattccattttggcaaatgttaactgatgagattaaaattacccttcacattaataaagttctatttctataatattttcagcaagcaagtggattctatgaggacaggaaatgattcttctagcctaactttttaaagctgaagtttagaacttattttgggtttttctttgatgcatgaaaggatctggttgtagtttcccaccacacccagctaattttgtatttttagtagagatggggttttaccatattggccagactggtatcgaactcctgaccttgtgatccaccctccttgttctcccaaagtctgggattacaggcatgagccaccacaccccgcctgtagtttcttaaaatgactcatctctattcaaccagtcattgttgaaactcaggaaagagccaca

SEQ ID NO: 85607 - DNA, 180 bp, Homo sapiens
ctgttttttttttttctattaatctggtcctttttctatagcaaatttaatttattgaactattatataccctatatttctcaaatttttctttaaagatgaaataattccatatcaaatctttgtttatatgcagctacattatgcctatattttttccttgaaagggcagtcaagcta

SEQ ID NO: 85608 - DNA, 632 bp, Homo sapiens
tttcaatttgagagtagattaacagcatttctgtagttaggagagcagccagttacatattcttttcttgggagtttagacttgcaggtccctctgaatgaggtaaagccaggtcctcctaccccaactaaagtttaaagatgcaggggagatgtcaaaagatgtgatctgagatttctgcaatcacttggaaactgtactggctaattaagatcataatagattatttattctttcattcactcatgtttatgcgtgtgttctttcactctttaaccattcagcaggtatttactgagcaactgaaacttcattcatattatatgagttattacatgataatatcaataagaaaaattatgtgaaagtttattaatattggctatgagggggatgaaagcagcaagccaaaaaaaaaaaaatgctgtattttaaagaaagtcaaaggtagcttcatccatgataaaaaggtgagaaaactgagatccagtggagttaatcaacttgtctatgatcacatacctagtttatggtggagaaaagactgaggtttagagactgattcataaaaccgagctctttctatgatattggaatatcagataaatcaataaactcccaactagatgaaa

SEQ ID NO: 85609 - DNA, 336 bp, Homo sapiens
aacaggttgatacattagcagctaaatattaggcaaggaaggagttatgtaaaatagtaatgtcatcttatacttgtgggaggggttttgtatttctgcaaagcattttcacagctcttatctactctgctcaacaaatataaagagtaaatttcctttattctcattttttcagtgagaaaactgagatccagtggagttaatcaacttgtctatgatcacatacctagtttatggtggagaaaagactgaggtttagagactgattcataaaaccgagctctttctatgatattggaatatcagataaatcaataaactcccaactagatgaaa

SEQ ID NO: 85610 - DNA, 556 bp, Homo sapiens
caggcataatactctcaagccttggcttctggaaagactacactgagtgtcgcacaaaatattcatttgtattgctttggtaaaactagaaaacactatgggcatgtaagatcttattaatattataatcagatatcctttaactattaaccagcagtcctagaaactggaagtatgtcatagtaagccttagtttcccaaatgaagactttaagccatagattacctttatttgtaagatccttaaaatttaccccagaaaaaatagctagaacatcctcctccatgtgagccacatatgtcgtctgtgaatcactttcatctccaaattagtacgatccaaattagcagggctttcctacagtgaaacctgtttaagcaaacatctgctggttcactgaaaagtaatttttttctacaggtggcctttgaatttgtggcccaaaaatccatggaaagaaaatgtagcctttgagatggaagcccttcaaagagaggtggtgtccttgagaggctgggtctgctctcgctggggagaagcgtgcgaaaaggaact

SEQ ID NO: 85611 - DNA, 348 bp, Homo sapiens
agctgctgctcagggggctgaggcaagaggattgtttgagcccaggagtttgaggtcacagtgagctgtagtcatgccactgcactccagcctaggcaacagaatgagaccttgtgtcttaaaaaaaaaaagtttcctttgttgggttattttaatttggacctggttatcatttttcagccatatttaactttgtacatatcagaatgttctgataaaacttaacttttattaaagtgtttgtgatataatctgctagttttggtacacattatcttttgcaatgccagttattttcttttccagtgtgggtttgcataggaaaagaattgctgtcactttctattt

SEQ ID NO: 85612 - DNA, 366 bp, Homo sapiens
caccatgcccggataattttggtatttttaatagagatgggttttcaccatgttcgccaggctggtcttgaactcctaccttcaggtgatccacccgccttggcctcccaaagtgctgggattacaggagtgagccaccaagcccagcctaaatttttgtatttttagtagagatggggtttcactatgttgcccaagctgttcttgaactcctatactcaagcaatatacctgccttggcctcccaaaatgctggaattgcaggtgtaagccaccacgcctggcttaagtatacatttcaaaattacttaatgagtacaattagattatttgaaacacaaaggctaaatgtttgaaggaatgtta

SEQ ID NO: 85613 - DNA, 833 bp, Homo sapiens
tgctgggcatgagttgtttgtgacaaatattcatatacatattcttgtgtggacatatgttttcgcttctcttgggtatatatctaggagtaggattgctgggtcatatggtaagtctctatttaatggtttagactcagtactttgttttctgcctttccacagctcagtttcataaagaggcaggagccttttgttcagggctccttggcagtaaggtaatttcttcttctgcattgtatccagctgacccttgctcagtgctgttctttgggggaaagatggaatgctgggaagccagcacctcttattccttctagctaacacttttacagtgacggatataatgatatcttcaactagtattgttgaattatctccctgatgctgtccaattttgcttcatatattttggggctctgttattaggtatgcatatatagtcattattgttatatctttgtggtggtgtggcctttttattattttagcacttttatatctttacctctaataacgtttttaaaaattgaacgttgattttgtctgatgttagtacaaccacttcagcttctttgtagttgctgtttgcatgacatatctttctccattcttttactttcaatctatttgcatctctgggtctaaaatgtgtagatagcacatagttgaatcttttaaaaaatacattttacaatctctgatttttattggaatgtttaatccatccacatttaatgttacgattgatggagctggacttatttctgccataaaaatatctcatgacatttttattcctgtatttctattgtacttttttgcattaagaa

SEQ ID NO: 85614 - DNA, 365 bp, Homo sapiens
ttcggcgtggtggcacacacctatagtcccagctactagggaggctgaggcaggagaatcacttgaaccccggaggcaaaggttgcagcgagctgagatcataccactgccctccagcctgggtgacagaatgaaactctatctcaaaaaaaaaaaacctaacattataaaaccatttgaaaaataaaattagggtgaaaatgatctttccatcaaagcaagaaaacaagtaacttcaaaattaggtatcaattagaaaccttaaaagtgatagctaatattaatcatatcaagatgacaaaattaatgagaaatgaatttagaatcaattatttgaaactgtgttaacaggttccaaatggtta

SEQ ID NO: 85615 - DNA, 508 bp, Homo sapiens
gccaccatgcctagccaagcctgtggttttctttctggaagtgacgcagtgcactgagaagaatccgtcccacgccacagcccttacagtcatcgttattgacatcacagtcaagtacagcagccacttgggctcccgggacatgcgctggagttggtactttataaagacaagctgtaggcaacagtctgattaactcgatgccacagcacatcacagattaccgacgtccagttcccattaccttggagctcagacaaagctcaaacccaagggcatggacaaaccagtccccaaatgctatccttgtggatctatctccaggcacccctcttgtaataatgctacatcgatcgggatccactcacaaggcggaaaccacagagtcatttaaacagggaagttttaacagaacaatgaactatttacaggggattgtgactaagtgtgaatcaaagagaactctaaaaaacacccatggggccgggcgtggtggctcacgcctgta

SEQ ID NO: 85616 - DNA, 668 bp, Homo sapiens
atgttaagtaaacaatacaaaaacttaataattatgaaatacagcaaacaaggagtgaattggataacaagcccatgatgaactgttgagtcagttgtataattacagatattataagttcagaggaaggcagtatcctaaagattagacatggctcaataatttatgtattcccaaataggaacacttctaaattgaataattaaagaagagtttgttttaacaggagaaatagctggtctgtatagagttagtctcctgaaggagaaaagaatcacatgatagctaagtaaaacaaaaactaggatgtaatagattttaagtaacaaacagaaaatatagacaatgagggcagagtcaaagttaggaccaaaatgagtttacttttagttaaaagtaataaggaagcaagaactataatcaagcaaaagctatatagggtgaaatgtaagaattagtgaattggaggtgggaagcccaggtaggcagatctgtagaaggaatctatagagtagaaatgcatccgttagtaatgatggtcattcctcatgtttctgattctcaaatgcatacatactctctcagttccagaactatccttcagttcctaattgggaggccaagcttatgatgtgtcttgattgcagacttgtatgtgatacccttat

SEQ ID NO: 85617 - DNA, 552 bp, Homo sapiens
tggagtctttttagtaaggatccaccctcggcctcccaaggtgctgggattacaggtatgagccaccgtgcctggccatccgttgttttttgtttgtttgttttattatattgagaagtccacagcaaagaatcacagtgatgaaccagttgctgtgttgagtcaacaacttaagagcagctaaggccaagcagcagctgcttgctgcagcactccatcatatgctaaattggaattgagcaaagtgtctgggaagagacagtaaagagaggattcatgttgaaaagagaaataaatatttatttattgcatgggatgcagccagatgatttaggtcattaatgagttgaggaagtaactttaaactatcaaacataagaataatacaatgaagactctattaagagattattaatctggctaagaattgtatatagaaaaaaatgaagagcgaagatgagctaggatagatactaggatagatactttggaacaatctcaagatgaggtgattcaaagcttggaatgggaagaaaggaaaaatttccaaag

SEQ ID NO: 85618 - DNA, 224 bp, Homo sapiens
ttgccttcaccaatctctctacatgtggcactggtttcatatccatgtccctcctttctctgcaggccaggggttatcaccatgcaagctttgtcggaagaggaccggaggctctggatggaagccatggatggccgggaacctgtaagtaacaattcagggaagtagagcaagaatgaaggccctgagttgtttgttgcttccctagtgcagtgatttttgct

SEQ ID NO: 85619 - DNA, 789 bp, Homo sapiens
cccaaagtgctgggattacaggagtgagccaccgtgcccagccccatttagggatgtttttagagctgtcagttctatccatctctcactatgtctgatacaagcacatatatgctatatactcacactcatacacacacacactcctagatacacacacaccctctttaatggttagagactataaaataaatattgttgctacccttatctcttcaccacccctctccccaaattcttcagctaagcttttattatgaactccattccaaaagctagatgggagagaaaattttctgctgttaaatggaatcattgtctcctatttccaagcaaaggtagaggaggaaataaatgcagtctgtttttttaagtcatttttttctgacagtctctgaaacttattgataagaacactgtgtcttgagggctgtattttttgcatctgttctttccatagtttctataagagacacaatatttctatatatttccaccttaattaaaacggggccttaaaaatgagagaggggtaaggaaaaagtaaaagtaaaaattaattttaataagagaataaataaaaagagagagaaaaataaattgacttggccagagaagcaaaaatcagaacacatggtgattggggaagccaaaaagaaataaaatatgaaggtttgcaagctttggccaaaagctacaagacaagtctaaatgatacaggttttttggttttcaaggctcctacattcactcagaagcttctgtatcctttttttattctcctaaagg

SEQ ID NO: 85620 - DNA, 627 bp, Homo sapiens
gcggctgtgaaggaagcacgaggacagaacgggcccagatgccctgaagagcaccgaggacagagctctggtgggtcagggctgcgcacaggtgggtgaggggccacgcagggctccctacagtcctcccagagcagtgggtccatgggatgcggcccccaaagatgggtccacatgctgaccctggaacctgtgaatgaggccttatttggaaaaaggtttttacagaggtaactcgttaaggatctcaagatgagagcatcctggatcacccaatgactggtccttataagagactcatagaggagacacttggagggagccaggccagtcgaccactgaggcagagtcagagggacgcagcccccagaggaggaagaggcaggaaggggccgcacagggccttcggcccagagacgccttgattttgaacatctggtccccagatgacgagagggtgaatctctgctggagtgagcccccggctttggggaggggtcatggcagcaccaggtgctcaggtccctggttcacggcacagccgcggtgcatgggcagccctgccgacctgctcccaaagacttccagaactgccatctgataaaggtgagccacccttgccaagca

SEQ ID NO: 85621 - DNA, 801 bp, Homo sapiens
gcacagtgttctttttggaggctctggaagagagtccatttccttgccttttgcagcttctagaggccacctccattcttccatcttcaaagccagaaacagcatctctctgagcccgattcctcacatctctttctctggctctgggcttccgcctttcttttccacttttaaggacccttctgatgacattgggcccacccagacagtccaggatcatctccctctctgctgatcagcaaccttaattctacctgcagtcttaatcccctttgccatgttacataacatagtcatagcttctggggacatggtcatcgtggggcggggggattattttgcctaccacggctgctttaaattccttgtcaaataattccaacaactgtgtcatctctgttggtgtctgttgatcatcttttctcattcgaattgagaattacctagttcttggtgtaacaactgattttttattgtatcttagacattttgggtagtctgtatgagactctggatcttacttaaatcttctactttagcaggcctcccctgttactgtgccagcaggggaaggagggacgtcaccatgttactgccaggtgggggtggaagtccgggtatcccacttggcttgcagtaataccaagttcaagaccagcctggccaacatggctggtggggccaggggtgcctcgttactcttcctatgtggcttccacattgcagaggaggcaagggggctccttaccactgggaaagataaagtcccagctccctgcccggccttctctgacgctaccc

SEQ ID NO: 85622 - DNA, 654 bp, Homo sapiens
ttcgagctagaataccctgatgtattgataccaattttataattttgcttaaaagataaaaagttggttttatgtctcattttcatttaattgtgtcattatcaaacccaatgcatgccatactattcttccacaattacataactgaataactctccaaatcaggtaaacctatctgagacacaagagtcacgtaagattaatacagaggccattcaatatggatgatatcttacttatattctcaatgattgagattccttctgtaaattaatgaagtttcttttcatgtccacacgtaagaacaagaaaccatcatcctttcttctctccctctagtatagctggtccccttcaacttcgctctgcttttcaactatattttatttgccttccaaatgctactctgcttcagtgcccacactgacaaacacttatgttggcaagctgccattcaaaagaaggcctttccattttgtgaggactggtcaatcaaacctgcctggcctccaggctgtcgggagcactgcctcagtcccggccagtttgtcaagacccagaggtttctggtttctcttacggcaattattaatttgactcaacttctttgaagaaagaaacaagacttttaagtaagataatattctaaatgtt

SEQ ID NO: 85623 - DNA, 696 bp, Homo sapiens
tagacagagtctcgctctgtcaaccgggctagagtgcagtggtgtgatcttagctcactgcaccctccacctcccgggttcaagcaattctcctgcctcagcctcccaagtagctgggactacaggtgtgcaccaccacacctagctaatttttgtatttttagtagagatggggtttcaccatgttggccaagctggtctagaactcctgacctcagagatccacctgccttggccacccaaagtgctgggattacaggcacccagcctggtttttcttaaatgagataatttcttccttttttcctaaatcatgtgtcaggaataataaaattattatttatagtaattccattactcacagtaataattgtgataataatgtaaacaatttgtatttatatagcattctattattcacaaagcattttgacatatattgtccaatttcattcctacaaaaatccttgtgaggtagatagaaaaagtattattttcctattttacaaatagaaaatagaggctcagagaagttaatcgaatttcttaatagcatatatttaggacgtgatggtggagattgaatttcatcctaaatctaactctaaaacctgtcctatgacaccctccatatactacataatagccaaagacatattaagcctatctgctgttcaacaaattacatgcacccag

SEQ ID NO: 85624 - DNA, 359 bp, Homo sapiens
acatattgaaaatagcttatagtggagaatcatataaaagaattgaatggagcagccatccaagtataatgaagattcatctggagggcagacttcaattaaacccccacaacggatactcagccaaggaaatggagaaaatatatagatattttgtatccagatttaaattatatctgctaatcacaaggtagtggcacaaagatcagggccaaaagtgttttgctcaggtagctaggacatatagaacagcctgagaagtatggataacttctcagacttcatgagttaactgtgcaagctggtaacgtatctgtccgccagtgatacccattggactgagggagttacattagctg

SEQ ID NO: 85625 - DNA, 757 bp, Homo sapiens
caggggctgggggactcctctgctcaccttagtccttgatttcgaaggccccaattaactatctgttgtgtcagaatcggcgagtgcaaagtagctgcgccccgctgacgcgctctctcctgggtccgggtatcccagggcatccggagctggggagggttgtgcggactacccaaggcacgcgcagataccgggcagggaagaagggctccgtgttccaaggatggtcgtttacctctcctgagatcagccctaatcccttggtaacttaagcgcctctgaactcggggagcgcttggtggggcgcctccctgcatccacccctacccctggctccttcccaggcccagcatctttcccaccattctcacccccaccacccccacggccccgcccgtttagaggcgtgcggtgggcacttggtttacagaaccggcgtttcagatgtttatttgcaactaatttcttgtgctggaaaatgcttgttacccgggcggagcgcttccgctctgcgcggtccggcccggcgggcggtagctcgctgatccctccggcgaagcctccaaggagcgggcggctgggagaggttgtgccacccgggaccaagccatcggcgctgctccggactcccggtagggggagccgccgcgggcgccaggccggattgtgttctggcctcggggcggccctgctgccagcggccgggactctcagcacagagctcgggaggactccacctgctctccagataaggcgc

SEQ ID NO: 85626 - DNA, 372 bp, Homo sapiens
caagagagacatagcaggcattgaaacaatggaaatgcccacatagcagaagggagtgaggggatccaaactacaagagcgacaaaatcaactgtggatccagagacgaaaaaatgttctgtagtgcaaaggtaatctggtgagaatgatgaaaaaaaaagaaccatttttagaaaaaaggaatattagaaatattgaagtaaatatcataagtcattctattacaaaggcattaactccttcctatcaatagaatgtaccagtttaaaaatttttagtaggaatatatcttttattttataacagaaatcaagggacaaagagaatttgatcatccatacttcctactcttattggttgtcaaaatgtagc

SEQ ID NO: 85627 - DNA, 768 bp, Homo sapiens
ctcagctcacctgctttgtcctagagccagcagagtccaggctgctgttaacaacttcatgtccccgtgggtagcaggcaggtgcttctgtctgatctggctctccttgaccactgtactcatcaaatagaccaagatccccagagtccaagatccttacaagggggccagaaagggatgagctttctgaagaagcactgatgtaaaataccaggaattttgacatcgaagaagatttttgtgatggcagctgggatttggccataatctagaagacacatggtgaatacagttgcaagtcatttagtcatatttcttgctaaattgctgtgtcttcaatggtgagtctgttcaactttacttttgttatgcttccctcaatcacgaaaaggacaaacttctcaacagactggtcctgagtaaaagtgacctgaattctctgataaagaagagggaaagattcggctgggtaatgccaggtttgtctcacttgacagtacaatgtaactagttttgccataatgttgtgagaggagatatgtgtgggcccaagaccagaatggtggaactatgcaatcaatcgtagatttatagcattgcatgcaacaaaatgcccaggtttggtgtcaggaagcccaggttcaggctttgcaaatcctacgattgggaatcagttccttaacctctctgacttttggctaacttgattataaaaccacgtaaagaaaggcttttcatatggttgttctagggaaaaaaatgagataa

SEQ ID NO: 85628 - DNA, 290 bp, Homo sapiens
ccacctctgatctgacaagaggcagagctcaggtggtaattcttactcgcctgccactcaccttgtgctgtgcggcctggttcctaacaggccatggactactgctggtccgtggcctgggggttggggacccctgtcatacagtacttgaaaccacctggcacatagtaaatgcttaatgaaagttagctattcttatttaacccttaaaaccactatattaagtactattagtaagtattgttaagtatattaagtattatatctccttttataggtaaattaactga

SEQ ID NO: 85629 - DNA, 393 bp, Homo sapiens
ccatgtaagctaggatggtcttgatctcctgacctccacacatgcattcttttttggttttttggttttggtttttggagacagactctgcactccagcctggaagcctggataacaagagctacactcagtctcaaaaaaaaaaaacaaaaaaacacctgacttaacttcctgctcatgctggacaccagaataaattcctaaggcgggcggtgtaaaccggggacccccagctcctgggattcacctactttctccccctccaattcagggtgtggatttcaatgtatgcagccttctgggacctcagcagggcagaggatcatgggacacagagtctcttggggatacgtggaatcccctaacccagggaggtctcgcccgggttatcct

SEQ ID NO: 85630 - DNA, 689 bp, Homo sapiens
tgctggaactcaccatatagatgcctcactgcttttcatttctaagtttctcctccatgtctttttcctcttgccagtgtttagataaaattatttctatttgatacatttttcttcactcttgtccttaatgggtcaagtctcatgtggcttcatagccctgacagacagtagtattgctattttggagtcaaggtctcgttctgtcggccaagctggagtgcagtggcaccatcagggctcactgcagccttgacctccgaggctcaaggaatcctcccacctcagcctcagccttccggatagttggtactacagatgatccagctctgtcggaggcacgtaggcacagccaaatctcatgctgtacattgatcacctgtccaacctttgcctagagtgggagcccccagttccttcgagatccaacattacctgtctgtaaagaagaagaggaggagggagacagcggggaggatccggtggcagtttaacaccagagcaggtccaatgtttacttttacccttttggaggtgggtaacggcaaatgctgggtgctgggtttcagagagactctgcataatgagcttggatttgggggctcacatgtactttacattttgctagagtgtaggagttgctatttttgtatttaattcacagccagactgttccatgattcccacca

SEQ ID NO: 85631 - DNA, 1065 bp, Homo sapiens
tctgtaaactccccctgaaagacattcctattaatacagtaaatgtgaacactgacttgtttttataagcacatctgaaagggcatatttgagtctcatcccaactttggtccttgctatctgtgcaggcttgggcaggtcatctccctgctggtctcaatatcctcacctgtaaaatgattgtaaatgatccccctaccttcaagattctctgattgatagaattttttctttaattaaaaaattttaaatattccttgagttggagcactgatcaataagtggattgcttagggaggttggaacgaatagattcagtcccaacttcctcttttaaattccctcttcctcactcttcctgcaacacttatttttacagttgagttttaaaaataagtaatatataaaataatttctgtagtgtggtttcagatttaaaaattcctgcagacaggctgggcttgcaaccccatcagtcgatggtcagagccctttgctttttgagaccatttttaggtgagcttggcttgcctggatacagtgtgcagtgcattcttcctgaattttgcaattctggtatctgggtgtattttctaggtgtgtcagggtgagtgtaatccacctagggtgtggaaaaagccaagaaagggaaattaaaagaggttcctatccagtcatgttaatgatcttccacttgtactatcctgtgcttcgttgttaacctcgaaaacatactttgttggctgcaaaaataaacaaagggaaactcagaagtgtgtgagcatgcgtgtgtgtatttagagatagttctctggtgaagaaatggaatcctgctgatttaaatggcacaagattgtcttcgtgataatgagtcatcatataatcataatagatggttgtgtaatggggtgacccagccagtttttccagtgcaaagactcaaggtaattaacctgctattatcaactgcttttgattaagttactttcaagaggaaatacttagatttgaaacataaactctgaatttcatcaataaaagtaaattgccaagtgagactttgaa

SEQ ID NO: 85632 - DNA, 1436 bp, Homo sapiens
atgcattttgcatactaaaatgatgaaacattcttaatgaatttaaatagctactttatcagaaacaggagtcataggttgaatttttatgtgggtagtagagctaagaatatttgtaaaacagctctccatgatgggctccaacaggatgaagtaagaccacctaccaaggaagtaagatcagtcccaaaatgaactgtacatgaaattctgctctaagatctttttgctttttaacatgatttcagaaaaggctaatttttgtaatggactacaatacttgttttgctacataagctttcaggattttttttcttttatttttattttaaaattaatttttgagcagcattcttgactgcaagaaagcttctgtcagtttcccaaattactcaaataacatgtattttacactgaaaatcatgagctccttaactcaaagcttttccttgttgtttttgtaactatttaccatacaattacttgtaaatgaaatgtataacataaatatgcgctaacataaaggaagatgtttaaatattttttagacttctgaaaaaagataaaactctcggtttttaagaacattgtatctttcattttatctttctttctcctccaaatatattaataactatccttctatttgttacgttcttttacttaaagggactaaagtataaatcaggtaattaatacacaaaactttattctgtcccttgcttgtagcactacttcattccagtttcctcagagtttattatataaatcagacagatttgtaaataagtattttacagtctacatttatttgattatgaaaatggaaacagaataaaatgtgaacagataacaaactttacttgtgtgtttctccatcttttcaagttgatcaggtatatggatggcattttaaataatgtattaaatttagagaatgcattaaatagaaaagaaaattgtgggaaataggaaagcctttccattaagggtttagatataaaatgttctattcagttacaaactaaacctaaaatgagagggtttttttgtttaactgaaagagctagagagtaattaaaggtaattggcatgttattattcttaaaaggttcgcttttctgttctaagaataccagggaacaattgaatagataaaaagcaaactataaattgccaaatagatcttttgtataataatacatctcccaagacaaaagatatttcagacccataaaaaataagggaagtgtatttgcctgactggtcttgcatcttgcctgaccacaatgaatttgcatcagattttaaactcacagagttataaaatatcttaatgtgttaagagggaatcaaaagtgaatgtgattaacttgaaggaactagttggcagactttaacattaggctagtagaaactatttaataaataaaact

SEQ ID NO: 85633 - DNA, 466 bp, Homo sapiens
  misc_feature (2)..(2): n is a, c, g, or t
tntgtgatgctcagcatgagatgcaatctcaaaggaggggtgcacaccgtaggcaggtgccacacatgatctttcctaagttcgtaaaaggaaccaacacaggagcagctggcattctgcggggttcctctgggaagcatgagatgatcacctggtctctactgtggctcctggaaacgcactttgcttccctattcatataacaggcagacatttgcatggacagggcattcagccttggacttgtcttagtttaaatagtgagaatttgtcctgggctccccacaaaactctgaatcagtgtctggtgccagggccattgtaacagctcaggaacagctgccccagggagcccaaactcacagaacagtctttgtcccttggtgacttgcctatttcaagaccacaggcaggagtccatgttgatattcttctccctctgagacaacagcgcagccagccttgg

SEQ ID NO: 85634 - DNA, 1069 bp, Homo sapiens
agaggaggcttagaggatttctagttgattgttaaacctattcatcaacctactcataagaaatgaaaagcctcccttctccacaagaaaagacctcatcaactggagctgacatggctcaaaggctctagagatgtcagaggccgtgtctggctggggaagggacacgggatcctctgcactccacagcagctcaggcacaaactcccccgcttccgaggtgtaaaaagacagcagagtctccagctctctacccaaggcgcttgacgggcactgtctaggtggcactggcttcacatgcatcccccttccctctacagtgggcagcagtgttatctccggatgaaagcaaaggctctgagggcagaaggagtcgggctcacagctgtgcagtgccagcgacctaacctcactatgcttcagtttcctgaatcagcccatctataaaatgggataattcttagcacagagtgagcacacagtaagagttgatgctgctgtccttgcaaccatttctgttatggccccaggataaagtccttatagtcccttatagatttacaccaaaggatgtcgagcccttggtttgtgaagtgggactggtaactagattcaatgagatccatgccctgggcttggtgacagaatcaatgatggagttaaaatcctcacttccccccttccaaccgcatggcctcaggaagacaacatcccaaactcatctgtcacaggaagacagtaccagcatcttcatgatcagggtgactaaatggaggctaggcattgtgccaggctctcaacatacctcaagccccacaggatggtatcaccaggtgatggcaacaccagctccatgtcacaagtaaaaagactgaggctcggagacattaagtgatctgctccaaggtcaccaaagtagaagcagctgagaaggacctgaagccttccagctaaggtccagaagctgtgctaagggtagtgtctggcccggcgcacggtctcacacctgtaattccagcactctgggaggccgaagcaggcagatcgcttgagctcaggaatttgagac

SEQ ID NO: 85635 - DNA, 1193 bp, Homo sapiens
attacaggtgcccgccaccacgcctgactaattttttgtatttttagtacagacaggatttcactatgttggccaggctgttctcaaactcctggccttgtgatctaccctcctcaatctcccaaagtgctgagattacaagcatgatccactgcacccggccagttgttttttttggtttttttgtttttttaggttttttttacgaaaatgtttgggaacagaaatgttgtggatttgagattttgttggattttggaatatttgtattatacctactgtttgaacatcccaagtttgaaaatctgaaaccttaagtgttaacatgagcaccttaataaagtttggacagtatttcttttataaacaatattattgatattgctaactattaacattagaaatgaaagtcgagaaagataattacctggaacgttagtacccagaaatacccaattgtgttggtatttgttttaagttttcatttttatgcatctccacctcagaaccataatctaaatttacagttgaattcatttcaatacctcagtggtgtaccattgagtcctaaaattctagaatgttaatcccagtcatgtgtgtacactaacatgccttttttgaagtcttttgaaacctatcagatacagtgtggagtccattttgctgaagagtatctagaatatctgctaccctaagaagcagtcatagtcccttccatagtagtttaagttttaaattgtccactgttctgagtaacgtgatgaaattttgcaccaccctgtcctggatatgaatcaacataaccacgctgtacgtgctcccattggtcagtcattgacatcatcggcttttgacatccatctgtggacatcagcatgactcagtgattcaggatcaccctaagatgatcccccttcttaggtatagtcagaaggttgatattagctacatcagaattcctaagtcattcactttatcttatcttataagcgttttatcatctcacttcaacacaagaagggtgagcacggtactatgagatattttgagaatgagcgagaccatgttcacataacttttgtatggtatattgttccgttttcttattggttattgctgttcatttgttactgtgccagatttataaattaaacttgattataggtatatacctataggaaaaaactgtg

SEQ ID NO: 85636 - DNA, 214 bp, Homo sapiens
aagctccctgctgccagctctcttgtccactaggctctgagcagccttggtgctggcaccaagaagaaccaggggcacagggacccctgccaggaggctcccgccagcatcctcagggccgtaagctccaactcaggtttttactgaaacctcagtgtgcttctcagtcctccggggtcagccttgctggagccaccttgttgtgtgggactga

SEQ ID NO: 85637 - DNA, 4824 bp, Homo sapiens
  misc_feature (197)..(197): n is a, c, g, or t
  misc_feature (303)..(303): n is a, c, g, or t
  misc_feature (516)..(516): n is a, c, g, or t
tgaaacagggtctcgctctgtcacccaggctaaagtgtagtgccgcgatctcagctcattacaacctctgcctcccaggttcaagggatcctcccacctcagcctcccaagcagttgggaccacaggcatgtgccaccatatccggctaatttttgcttttttcatagagacagggtttcaccatgttgcacaagtnggtcttgaactcctgagctcaagtgagctacctgctttggcctcccaaagtgctgggattacacatgtgaaccaccgtacccggccccaaaaatgctttcttaagngtaactacgtaatgctagttgtagtttagattcctggatgttaacttaaaatagtcccataggaacccagtgtggtggctcacgcctgtaatcccagcctgaggcaggtggatcatctgaggtcaggagttcgagaccagctgggccaacatggtgaaaccctgtctctactaaaaacacaaaaaaattagctgggcatagtggcaggcaccngtaatttcagcttctcgggacgctgaggcagaagaattgcttgaacccaggaggcagtggttgcagtgagcccagatcgtgccattgcactccagcctgggcaacaagagcaaaactctgtctcaaaaaaatcaattaatttaggctgggcgcagtggctcatgcctgtaaatcccagcactttgagaggctgaagcgggtggatcatgaggtcaagagatcgagaccatcctggctaacacggtgaaaccccatttctactaaaaatacaaaaaaaaaaccccaaaaaacaaaaaaacaaaaacaaacaaacaaaccaaaaaaacacaacaactagccaggcgtagtggcaggcgcttgtaatcccagctagtcgggaggctgaggcaggaggagaatggagtgaacccaggaggcagagcttgcagtgagctgagatcgcgccacagcactccagcctgggcaacagagcgagactccatctcaggaaaaaaaaaattaattaattaaaaaaacagtaagataaataacacttctcccatttcagtaaaaggatgaagccagtttctcaatgaataaaaacaagagactgttgaatgtcaagttttatagacagtccagacaacacagggagacaccatctctacacacacacacacacacacacacacacacacacacacacacacacacaaaatagctgcgtatggtggcatgggcctgtagtcccagctattggggcagggccagggggtgggaggctgaggggagaggatgccttaacagggaggttgaggctgcagagagccatgatcacgtcactgtactccagcctgggtgatacagcaagactctgtctcagaaaaaaaaaaaagaaaaaagtcaagaatgcattcttgaggaattccaccaacaaaatgcaccaaatatagccaaagagttttctgctatatgccaagtggaaagctatgaagaaagagaagaacagaagcaggaggacattggttttcatctcctattctttcaagaagtaagatccattatcttttaaaaagtctaaacactggtaaggcaagacacaactcccacccataacactgcatctctgtcctcaggcaacaaatcaaatgtcagataaaagcacaatatctaccactcaacccccaggcttcagcacagaactcacaaacattctgctggctaaggcaaaaaggtgtactgtatttccagagagcttgcagagttctgagcactaatcccataatcctcatatctcaatctacacaaagcaccatcaggctaagaaacagattatatagcaggcacaacactcttgggtatgcaaacatgttaaggatcaaagtaagaaaagagtaactataggggccatactatatttgccaaaaagtgacttgtttaaaaattaaaaagaagccgggtgcagtggctcacacctgtaatcccagcactttgagaggctggggtgggtggatcacctgaggtcagtagttcaaaaccagcctggccaacatagtgaaaccccatctctactaaaaatacaaaattaggcgtggtggcaggcgcctgtaatcccagctactagggatgctgaggcaggagaatcgcttgaacccggaaggcagaggttgcagtgagccaaaatcgcaccactgcactccagcctgggcaacaagagcaaaactctgtctcaaaaaaaaaaaaataaaaataaaaacaaaaaagaaatccagtttacctccttgtgcaattcctaataaattgctgagaagtgatcttacataggaatcttgtataatttattctgatgcgttcgaggtggccgttagttgactccgcggagttcatctccctggttttcccgtcctaacgtcgctcgcctttcagtcaggatgtctgcccgtggcccggctatcggcatcgacctgggcaccacctattcgtgcgtcggggtcttccaacatggcaaggtggagatcatcgccaacgaccagggcaatcgcaccacccccagctacgtggccttcacggacaccgagcgcctcatcggcgacgccgccaagaaccaggtggccatgaaccccaccaacaccatcttcgacgccaagaggctgattggacggaaattcgaggatgccacagtgcagtcggatatgaaacactggccgttccgggtggtgagcgagggaggcaagcccaaagtgcaagtagagtacaagggggagaccaagaccttcttcccagaggagatatcctccatggtcctcacgaagatgaaggagatcgcggaagcctacctggggggcaaggtgcacagcgcggtcataacggtcccggcctatttcaacgactcgcagcgccaggccaccaaggacgcaggcaccatcacggggctcaatgtgctgcgcatcatcaacgagcccacggcggcggccatcgcctacggcctggacaagaagggctgcgcgggcggcgagaagaacgtgctcatctttgacctgggcggtggcactttcgacgtgtccatcctgaccatcgaggatggcatcttcgaggtgaagtccacggccggcgacacccacctgggcggtgaggacttcgacaaccgcatggtgagccacctggcggaggagttcaagcgcaagcacaagaaggacattgggcccaacaagcgcgccgtgaggcggtcgcgcaccgcttgcgagcgcgccaagcgcaccctgagctcgtccacgcaggcgagcatcgagatcgactcgctctacgagggcgtggacttctatacgtccatcacgcgcgcccgcttcgaggagctcaatgccgacctctttcgcgggaccctggagccggtggagaaggcgctgcgcgacgccaagctggacaagggccagatccaggagatcgtgctggtgggcggctccactcgtatccccaagatccagaagctgctgcaggatttcttcaacggcaaggagctgaacaagagcatcaaccccgacgaggcggtggcctatggcgccgcggtgcaggcggccatcctcatcggcgacaaatcagagaatgtgcaggacctgctgctactcgacgtgaccccgttgtcgctgggcatcgagacagctggcggtgtcatgaccccactcatcaagaggaacaccacgatccccaccaagcagacgcagaccttcaccacctactcggacaaccagagcagcgtactggtgcaggtatacgagggcgaacgggccatgaccaaggacaataacctgctgggcaagttcgacctgaccgggattccccctgcgcctcgcggggtcccccaaatcgaggttaccttcgacattgacgccaatggcatccttaacgttaccgccgccgacaagagcaccggtaaggaaaacaaaatcaccatcaccaatgacaaaggtcgtctgagcaaggacgacattgaccggatggtgcaggaggcggagcggtacaaatcggaagatgaggcgaatcgcgaccgagtcgcggccaaaaacgccctggagtcctatacctacaacatcaagcagacggtggaagacgagaaactgaggggcaagattagcgagcaggacaaaaacaagatcctcgacaagtgtcaggaggtgatcaactggctcgaccgaaaccagatggcagagaaagatgagtatgaacacaagcagaaagagctcgaaagagtttgcaaccccatcatcagcaaactttaccaaggtggtcctggcggcggcagcggcggcggcggttcaggagcctccgggggacccaccatcgaagaagtggactaagcttgcactcaagtcagcgtaaacctctttgcctttctctctctctctttttttttgtttgtttctttgaaatgtccttgtgccaagtacgagatctattgttggaagtctttggtatatgcaaatgaaaggagaggtgcaacaacttagtttaattataaaagttccaaagtttgttttttaaaaacattattcgaggtttctctttaatgcattttgcgtgtttgctgacttgagcatttttgattagttcgtgcatggagatttgtttgagatgagaaaccttaagtttgcacacctgttctgtagaagcttggaaacagtaaaatatataggagcttaaattgtttatttttatgtactactttaaaactaaactgaacattgcagtaatgttaaggacaggtatactttttgcaaacaaatgcataaaatgcaaatgtaaagtaaagctgaaattgatctcaaaaaaaaaaaa

SEQ ID NO: 85638 - DNA, 144 bp, Homo sapiens
gatctggtggagaaaagaagcaaaactttgttttaatttactgtttttttaaaatctttttggatattgttttgcatcccatacatttgcaactggcaatgaaatgtaagctttggttctgaaaaaaaataaatgtagctattc

SEQ ID NO: 85639 - DNA, 553 bp, Homo sapiens
gggagcggctagagaaggaacattcaaatcttcccacgtgggcaagttccaagcaaatgtttatttttttacctcctctttggtttttgtctcacttgaagcactttgtgtttatgggaaaataccaaaaattaccaaaatttaaaaacccagggctttgctggaagtgagggtatcttcttggcttttcccttttcctccccaccactatacgcacatgcacacacagctctattttttggtgcttttcgttcattattcactccatttcattttagctcttgaagtcaaaatgggattccaaagagcaaaatagaagtttggagagtttgaaatctctcctcgtggctggacgccgtggctcacacctgtgatcccagcactttgggaggccaaggcaggcatactgcttgaactcaggagttcaagaccagcctggggaacatggtaaaaccctgtctctacaaaaaatagaaaaattagctgggcatggtggctgtagtcccagctatttgggaggctgaggtgggaggatcacttgagcctggggagg

SEQ ID NO: 85640 - DNA, 320 bp, Homo sapiens
tcacaatatatctaggtagttacctagtgataccaggtaactacctaaaagtagacctaaaaattagaatccaggttttgaataatctctccatttcctctgtaagctattacacggaccatggccccttgaatgttgacgttctagagttgtatccctaggcatcttctcttctcaaatatactactcctcctaggtaactttactcatatcaaaggattcagcctactcaccaaaactacattcccaacaaatctctaaaatcccaactagaatttccaactacctattttacactgtcatttggatattcccatttg

SEQ ID NO: 85641 - DNA, 658 bp, Homo sapiens
gtggaagctttgttctttcgatgtttgcaataaatctttccactgttcactctttgagtccacactgcctttatgagctgtaacactcaccgcgaaggtctgcagcttcactcctgaagccagcgacacccacgagcccaccgggaagcccaaacaactccagacgcgccgccttaagagctgtaacactcatggcgaaggtctgcagcttcactcctgagccagcgagaccacgaacccatcagaaggaagaaactgtgaacacatctgaacatcagaaggaacaaattctggacacgctgcctttaagaactgtaacactcaccgcgagggtccgtggcttcattcttgaagtcagtgagaccaagaacccaccaattccagacgcagttgcattttatagaacagaatgctttaagaacgtgaactctaaaatcagtatgccggggctgatgagctcagctcccctcatcctagctctgtggttttgggcaaacgatttaacctctctaatctcagtttcctagttggtaaatgggaataattatagtactcatgtaaaggaatttttgtgaggattaaatcagataatccatgtaaagtacttagcatagtgcctgggatggtatatgagtttgatggatgttgatttttatgg

SEQ ID NO: 85642 - DNA, 2290 bp, Homo sapiens
gagagacttagagccgagtgggacaaagcctggggctgggcgggggccatggcgctgccatcccgaatcctgctttggaaacttgtgcttctgcagagctctgctgttctcctgcactcagggtcctcggtacccgccgctgctggcagctccgtggtgtccgagtccgcggtgagctgggaggcgggcgcccgggcggtgctgcgctgccagagcccgcgcatggtgtggacccaggaccggctgcacgaccgccagcgcgtgctccactgggacctgcgcggccccgggggtggccccgcgcggcgcctgctggacttgtactcggcgggcgagcagcgcgtgtacgaggcgcgggaccgcggccgcctggagctctcggcctcggccttcgacgacggcaacttctcgctgctcatccgcgcggtggaggagacggacgcggggctgtacacctgcaacctgcaccatcactactgccacctctacgagagcctggccgtccgcctggaggtcaccgacggccccccggccacccccgcctactgggacggcgagaaggaggtgctggcggtggcgcgcggcgcacccgcgcttctgacctgcgtgaaccgcgggcacgtgtggaccgaccggcacgtggaggaggctcaacaggtggtgcactgggaccggcagccgcccggggtcccgcacgaccgcgcggaccgcctgctggacctctacgcgtcgggcgagcgccgcgcctacgggcccctttttctgcgcgaccgcgtggctgtgggcgcggatgcctttgagcgcggtgacttctcactgcgtatcgagccgctggaggtcgccgacgagggcacctactcctgccacctgcaccaccattactgtggcctgcacgaacgccgcgtcttccacctgacggtcgccgaaccccacgcggagccgcccccccggggctctccgggcaacggctccagccacagcggcgccccaggcccagaccccacactggcgcgcggccacaacgtcatcaatgtcatcgtccccgagagccgagcccacttcttccagcagctgggctacgtgctggccacgctgctgctcttcatcctgctactggtcactgtcctcctggccgcccgcaggcgccgcggaggctacgaatactcggaccagaagtcgggaaagtcaaaggggaaggatgttaacttggcggagttcgctgtggctgcaggggaccagatgctttacaggagtgaggacatccagctagattacaaaaacaacatcctgaaggagagggcggagctggcccacagccccctgcctgccaagtacatcgacctagacaaagggttccggaaggagaactgcaaatagggaggccctgggctcctggctgggccagcagctgcacctctcctgtctgtgctcctcggggcatctcctgatgctccggggctcaccccccttccagcggctggtcccgctttcctggaatttggcctgggcgtatgcagaggccgcctccacacccctcccccaggggcttggtggcagcatagcccccacccctgcggcctttgctcacgggtggccctgcccacccctggcacaaccaaaatcccactgatgcccatcatgccctcagacccttctgggctctgcccgctgggggcctgaagacattcctggaggacactcccatcagaacctggcagccccaaaactggggtcagcctcagggcaggagtcccactcctccagggctctgctcgtccggggctgggagatgttcctggaggaggacactcccatcagaacttggcagccttgaagttggggtcagcctcggcaggagtcccactcctcctggggtgctgcctgccaccaagagctcccccacctgtaccaccatgtgggactccaggcaccatctgttctccccagggacctgctgacttgaatgccagcccttgctcctctgtgttgctttgggccacctggggctgcaccccctgccctttctctgccccatccctaccctagccttgctctcagccaccttgatagtcactgggctccctgtgacttctgaccctgacacccctcccttggactctgcctgggctggagtctagggctggggctacatttggcttctgtactggctgaggacaggggagggagtgaagttggtttggggtggcctgtgttgccactctcagcaccccacatttgcatctgctggtggacctgccaccatcacaataaagtccccatctgattttta

SEQ ID NO: 85643 - DNA, 403 bp, Homo sapiens
tcaagcttctaacgatgtacggggacatgtgggactccaggcaccatctgttctccccagggacctgctgacttgaatgccagcccttgctcctctgtgttgctttgggccacctggggctgcaccccctgccctttctctgccccatccctaccctagccttgctctcagccaccttgatagtcactgggctccctgtgacttctgaccctgacacccctcccttggactctgcctgggctggagtctagggctggggctacatttggcttctgtactggctgaggacaggggagggagtgaagttggtttggggtggcctgtgttgccactctcagcaccccacatttgcatctgctggtggacctgccaccatcacaataaagtccccatctgattttta

SEQ ID NO: 85644 - DNA, 2411 bp, Homo sapiens
gagagacttagagccgagtgggacaaagcctggggctgggcgggggccatggcgctgccatcccgaatcctgctttggaaacttgtgcttctgcagagctctgctgttctcctgcactcagggtcctcggtacccgccgctgctggcagctccgtggtgtccgagtccgcggtgagctgggaggcgggcgcccgggcggtgctgcgctgccagagcccgcgcatggtgtggacccaggaccggctgcacgaccgccagcgcgtgctccactgggacctgcgcggccccgggggtggccccgcgcggcgcctgctggacttgtactcggcgggcgagcagcgcgtgtacgaggcgcgggaccgcggccgcctggagctctcggcctcggccttcgacgacggcaacttctcgctgctcatccgcgcggtggaggagacggacgcggggctgtacacctgcaacctgcaccatcactactgccacctctacgagagcctggccgtccgcctggaggtcaccgacggccccccggccacccccgcctactgggacggcgagaaggaggtgctggcggtggcgcgcggcgcacccgcgcttctgacctgcgtgaaccgcgggcacgtgtggaccgaccggcacgtggaggaggctcaacaggtggtgcactgggaccggcagccgcccggggtcccgcacgaccgcgcggaccgcctgctggacctctacgcgtcgggcgagcgccgcgcctacgggcccctttttctgcgcgaccgcgtggctgtgggcgcggatgcctttgagcgcggtgacttctcactgcgtatcgagccgctggaggtcgccgacgagggcacctactcctgccacctgcaccaccattactgtggcctgcacgaacgccgcgtcttccacctgacggtcgccgaaccccacgcggagccgcccccccggggctctccgggcaacggctccagccacagcggcgccccaggcccagaccccacactggcgcgcggccacaacgtcatcaatgtcatcgtccccgagagccgagcccacttcttccagcagctgggctacgtgctggccacgctgctgctcttcatcctgctactggtcactgtcctcctggccgcccgcaggcgccgcggaggtgaggctgccccggcaaagccagcggccccaggagactgaggtgggcgggagggtggtcctctgggctgggggacctgcggaaggggcggcactgcccccaatgtgagtctccttcccaggctacgaatactcggaccagaagtcgggaaagtcaaaggggaaggatgttaacttggcggagttcgctgtggctgcaggggaccagatgctttacaggagtgaggacatccagctagattacaaaaacaacatcctgaaggagagggcggagctggcccacagccccctgcctgccaagtacatcgacctagacaaagggttccggaaggagaactgcaaatagggaggccctgggctcctggctgggccagcagctgcacctctcctgtctgtgctcctcggggcatctcctgatgctccggggctcaccccccttccagcggctggtcccgctttcctggaatttggcctgggcgtatgcagaggccgcctccacacccctcccccaggggcttggtggcagcatagcccccacccctgcggcctttgctcacgggtggccctgcccacccctggcacaaccaaaatcccactgatgcccatcatgccctcagacccttctgggctctgcccgctgggggcctgaagacattcctggaggacactcccatcagaacctggcagccccaaaactggggtcagcctcagggcaggagtcccactcctccagggctctgctcgtccggggctgggagatgttcctggaggaggacactcccatcagaacttggcagccttgaagttggggtcagcctcggcaggagtcccactcctcctggggtgctgcctgccaccaagagctcccccacctgtaccaccatgtgggactccaggcaccatctgttctccccagggacctgctgacttgaatgccagcccttgctcctctgtgttgctttgggccacctggggctgcaccccctgccctttctctgccccatccctaccctagccttgctctcagccaccttgatagtcactgggctccctgtgacttctgaccctgacacccctcccttggactctgcctgggctggagtctagggctggggctacatttggcttctgtactggctgaggacaggggagggagtgaagttggtttggggtggcctgtgttgccactctcagcaccccacatttgcatctgctggtggacctgccaccatcacaataaagtccccatctgattttta

SEQ ID NO: 85645 - DNA, 2565 bp, Homo sapiens
gagagacttagagccgagtgggacaaagcctggggctgggcgggggccatggcgctgccatcccgaatcctgctttggaaacttgtgcttctgcagagctctgctgttctcctgcactcagggtcctcggtacccgccgctgctggcagctccgtggtgtccgagtccgcggtgagctgggaggcgggcgcccgggcggtgctgcgctgccagagcccgcgcatggtgtggacccaggaccggctgcacgaccgccagcgcgtgctccactgggacctgcgcggccccgggggtggccccgcgcggcgcctgctggacttgtactcggcgggcgagcagcgcgtgtacgaggcgcgggaccgcggccgcctggagctctcggcctcggccttcgacgacggcaacttctcgctgctcatccgcgcggtggaggagacggacgcggggctgtacacctgcaacctgcaccatcactactgccacctctacgagagcctggccgtccgcctggaggtcaccgacggccccccggccacccccgcctactgggacggcgagaaggaggtgctggcggtggcgcgcggcgcacccgcgcttctgacctgcgtgaaccgcgggcacgtgtggaccgaccggcacgtggaggaggctcaacaggtggtgcactgggaccggcagccgcccggggtcccgcacgaccgcgcggaccgcctgctggacctctacgcgtcgggcgagcgccgcgcctacgggcccctttttctgcgcgaccgcgtggctgtgggcgcggatgcctttgagcgcggtgacttctcactgcgtatcgagccgctggaggtcgccgacgagggcacctactcctgccacctgcaccaccattactgtggcctgcacgaacgccgcgtcttccacctgacggtcgccgaaccccacgcggagccgcccccccggggctctccgggcaacggctccagccacagcggcgccccaggcccagaccccacactggcgcgcggccacaacgtcatcaatgtcatcgtccccgagagccgagcccacttcttccagcagctgggctacgtgctggccacgctgctgctcttcatcctgctactggtcactgtcctcctggccgcccgcaggcgccgcggaggctacgaatactcggaccagaagtcgggaaagtcaaaggggaaggatgttaacttggcggagttcgctgtggctgcaggggaccagatgctttacaggagtgaggacatccagctagattacaaaaacaacatcctgaaggagagggcggagctggcccacagccccctgcctgccaagtacatcgacctagacaaagggttccggaaggagaactgcaaatagggaggccctgggctcctggctgggccagcagctgcacctctcctgtctgtgctcctcggggcatctcctgatgctccggggctcaccccccttccagcggctggtcccgctttcctggaatttggcctgggcgtatgcagaggccgcctccacacccctcccccaggggcttggtggcagcatagcccccacccctgcggcctttgctcacgggtggccctgcccacccctggcacaaccaaaatcccactgatgcccatcatgccctcagacccttctgggctctgcccgctgggggcctgaagacattcctggaggacactcccatcagaacctggcagccccaaaactggggtcagcctcagggcaggagtcccactcctccagggctctgctcgtccggggctgggagatgttcctggaggaggacactcccatcagaacttggcagccttgaagttggggtcagcctcggcaggagtcccactcctcctggggtgctgcctgccaccaagagctcccccacctgtaccaccatgtgggactccaggcaccatctgttctccccagggacctgctgacttgaatgccagcccttgctcctctgtgttgctttgggccacctggggctgcaccccctgccctttctctgccccatccctaccctagccttgctctcagccaccttgatagtcactgggctccctgtgacttctgaccctgacacccctcccttggactctgcctgggctggagtctagggctggggctacatttggcttctgtactggctgaggacaggggagggagtgaagttggtttggggtggcctgtgttgccactctcagcaccccacatttgcatctgctggtggacctgccaccatcacaataaagtccccatctgatttttaaagacccacaccagaagacgaccagaccagagcagagccaaacaacaccaggaggggcgcccaaaaaacactcgcggggccccactcagctcacccatgtgagagggccccccctaggcgcaactagccacaggcccgcacaacaccagcgcggagagaccacctgctattcggcaccaccgtgggggaagacaccccaccagcagagaacgaggttgatacctcgcgcgtgccagaaccgagcatagacagccagaggcgcgacgggatacctc

SEQ ID NO: 85646 - DNA, 2508 bp, Homo sapiens
gagagacttagagccgagtgggacaaagcctggggctgggcgggggccatggcgctgccatcccgaatcctgctttggaaacttgtgcttctgcagagctctgctgttctcctgcactcagggtcctcggtacccgccgctgctggcagctccgtggtgtccgagtccgcggtgagctgggaggcgggcgcccgggcggtgctgcgctgccagagcccgcgcatggtgtggacccaggaccggctgcacgaccgccagcgcgtgctccactgggacctgcgcggccccgggggtggccccgcgcggcgcctgctggacttgtactcggcgggcgagcagcgcgtgtacgaggcgcgggaccgcggccgcctggagctctcggcctcggccttcgacgacggcaacttctcgctgctcatccgcgcggtggaggagacggacgcggggctgtacacctgcaacctgcaccatcactactgccacctctacgagagcctggccgtccgcctggaggtcaccgacggccccccggccacccccgcctactgggacggcgagaaggaggtgctggcggtggcgcgcggcgcacccgcgcttctgacctgcgtgaaccgcgggcacgtgtggaccgaccggcacgtggaggaggctcaacaggtggtgcactgggaccggcagccgcccggggtcccgcacgaccgcgcggaccgcctgctggacctctacgcgtcgggcgagcgccgcgcctacgggcccctttttctgcgcgaccgcgtggctgtgggcgcggatgcctttgagcgcggtgacttctcactgcgtatcgagccgctggaggtcgccgacgagggcacctactcctgccacctgcaccaccattactgtggcctgcacgaacgccgcgtcttccacctgacggtcgccgaaccccacgcggagccgcccccccggggctctccgggcaacggctccagccacagcggcgccccaggcccagaccccacactggcgcgcggccacaacgtcatcaatgtcatcgtccccgagagccgagcccacttcttccagcagctgggctacgtgctggccacgctgctgctcttcatcctgctactggtcactgtcctcctggccgcccgcaggcgccgcggaggctacgaatactcggaccagaagtcgggaaagtcaaaggggaaggatgttaacttggcggagttcgctgtggctgcaggggaccagatgctttacaggagtgaggacatccagctagattacaaaaacaacatcctgaaggagagggcggagctggcccacagccccctgcctgccaagtacatcgacctagacaaaggtgagcggcgggggcgacctcagcccatctcagagccctgcctgtccccattccacctcacctgggaccaacgatggcaggcaccagccaggcccggggcccctgccacctcaggctcagaaatccctggggagtcctgcgggggggtctgccctgtgtctcccactgtgatgagggtggaggacagccgccaacccgttggcgcccttggcttccagggttccggaaggagaactgcaaatagggaggccctgggctcctggctgggccagcagctgcacctctcctgtctgtgctcctcggggcatctcctgatgctccggggctcaccccccttccagcggctggtcccgctttcctggaatttggcctgggcgtatgcagaggccgcctccacacccctcccccaggggcttggtggcagcatagcccccacccctgcggcctttgctcacgggtggccctgcccacccctggcacaaccaaaatcccactgatgcccatcatgccctcagacccttctgggctctgcccgctgggggcctgaagacattcctggaggacactcccatcagaacctggcagccccaaaactggggtcagcctcagggcaggagtcccactcctccagggctctgctcgtccggggctgggagatgttcctggaggaggacactcccatcagaacttggcagccttgaagttggggtcagcctcggcaggagtcccactcctcctggggtgctgcctgccaccaagagctcccccacctgtaccaccatgtgggactccaggcaccatctgttctccccagggacctgctgacttgaatgccagcccttgctcctctgtgttgctttgggccacctggggctgcaccccctgccctttctctgccccatccctaccctagccttgctctcagccaccttgatagtcactgggctccctgtgacttctgaccctgacacccctcccttggactctgcctgggctggagtctagggctggggctacatttggcttctgtactggctgaggacaggggagggagtgaagttggtttggggtggcctgtgttgccactctcagcaccccacatttgcatctgctggtggacctgccaccatcacaataaagtccccatctgattttta

SEQ ID NO: 85647 - DNA, 2312 bp, Homo sapiens
gagagacttagagccgagtgggacaaagcctggggctgggcgggggccatggcgctgccatcccgaatcctgctttggaaacttgtgcttctgcagagctctgctgttctcctgcactcagggtcctcggtacccgccgctgctggcagctccgtggtgtccgagtccgcggtgagctgggaggcgggcgcccgggcggtgctgcgctgccagagcccgcgcatggtgtggacccaggaccggctgcacgaccgccagcgcgtgctccactgggacctgcgcggccccgggggtggccccgcgcggcgcctgctggacttgtactcggcgggcgagcagcgcgtgtacgaggcgcgggaccgcggccgcctggagctctcggcctcggccttcgacgacggcaacttctcgctgctcatccgcgcggtggaggagacggacgcggggctgtacacctgcaacctgcaccatcactactgccacctctacgagagcctggccgtccgcctggaggtcaccgacggccccccggccacccccgcctactgggacggcgagaaggaggtgctggcggtggcgcgcggcgcacccgcgcttctgacctgcgtgaaccgcgggcacgtgtggaccgaccggcacgtggaggaggctcaacaggtggtgcactgggaccggcagccgcccggggtcccgcacgaccgcgcggaccgcctgctggacctctacgcgtcgggcgagcgccgcgcctacgggcccctttttctgcgcgaccgcgtggctgtgggcgcggatgcctttgagcgcggtgacttctcactgcgtatcgagccgctggaggtcgccgacgagggcacctactcctgccacctgcaccaccattactgtggcctgcacgaacgccgcgtcttccacctgacggtcgccgaaccccacgcggagccgcccccccggggctctccgggcaacggctccagccacagcggcgccccaggcccagaccccacactggcgcgcggccacaacgtcatcaatgtcatcgtccccgagagccgagcccacttcttccagcagctgggctacgtgctggccacgctgctgctcttcatcctgctactggtcactgtcctcctggccgcccgcaggcgccgcggaggctacgaatactcggaccagaagtcgggaaagtcaaaggggaaggatgttaacttggcggagttcgctgtggctgcaggggaccagatgctttacaggagtgaggacatccagctagattacaaaaacaacatcctgaaggagagggcggagctggcccacagccccctgcctgccaagtacatcgacctagacaaagggttccggaaggagaactgcaaatagggaggccctgggctcctggctgggccagcagctgcacctctcctgtctgtgctcctcggggcatctcctgatgctccggggctcaccccccttccagcggctggtcccgctttcctggaatttggcctgggcgtatgcagaggccgcctccacacccctcccccaggggcttggtggcagcatagcccccacccctgcggcctttgctcacgggtggccctgcccacccctggcacaaccaaaatcccactgatgcccatcatgccctcagacccttctgggctctgcccgctgggggcctgaagacattcctggaggacactcccatcagaacctggcagccccaaaactggggtcagcctcagggcaggagtcccactcctccagggctctgctcgtccggggctgggagatgttcctggaggaggacactcccatcagaacttggcagccttgaagttggggtcagcctcggcaggagtcccactcctcctggggtgctgcctgccaccaagagctcccccacctgtaccaccatgtgggactccaggcaccatctgttctccccagggacctgctgacttgaatgccagcccttgctcctctgtgttgctttgggccacctggggctgcaccccctgccctttctctgccccatccctaccctagccttgctctcagccaccttgatagtcactgggctccctgtgacttctgaccctgacacccctcccttggactctgcctgggctggagtctagggctggggctacatttggcttctgtactggctgaggacaggggagggagtgaagttggtttggggtggcctgtgttgccactctcagcaccccacatttgcatctgctggtggacctgccaccatcacaataaagtccccatctgatttttaaaaaacaacaacaacccaaaca

SEQ ID NO: 85648 - DNA, 2515 bp, Homo sapiens
gagagacttagagccgagtgggacaaagcctggggctgggcgggggccatggcgctgccatcccgaatcctgctttggaaacttgtgcttctgcagagctctgctgttctcctgcactcagggtcctcggtacccgccgctgctggcagctccgtggtgtccgagtccgcggtgagctgggaggcgggcgcccgggcggtgctgcgctgccagagcccgcgcatggtgtggacccaggaccggctgcacgaccgccagcgcgtgctccactgggacctgcgcggccccgggggtggccccgcgcggcgcctgctggacttgtactcggcgggcgagcagcgcgtgtacgaggcgcgggaccgcggccgcctggagctctcggcctcggccttcgacgacggcaacttctcgctgctcatccgcggtgcggggaccggggaccggggccgcggggtcggggcaggggtccggggccgcggggtcgggggcaccgcaaggctcacgcgcggcttcctcctgggtgcgcagcggtggaggagacggacgcggggctgtacacctgcaacctgcaccatcactactgccacctctacgagagcctggccgtccgcctggaggtcaccgacggccccccggccacccccgcctactgggacggcgagaaggaggtgctggcggtggcgcgcggcgcacccgcgcttctgacctgcgtgaaccgcgggcacgtgtggaccgaccggcacgtggaggaggctcaacaggtggtgcactgggaccggcagccgcccggggtcccgcacgaccgcgcggaccgcctgctggacctctacgcgtcgggcgagcgccgcgcctacgggcccctttttctgcgcgaccgcgtggctgtgggcgcggatgcctttgagcgcggtgacttctcactgcgtatcgagccgctggaggtcgccgacgagggcacctactcctgccacctgcaccaccattactgtggcctgcacgaacgccgcgtcttccacctgacggtcgccgaaccccacgcggagccgcccccccggggctctccgggcaacggctccagccacagcggcgccccaggcccagaccccacactggcgcgcggccacaacgtcatcaatgtcatcgtccccgagagccgagcccacttcttccagcagctgggctacgtgctggccacgctgctgctcttcatcctgctactggtcactgtcctcctggccgcccgcaggcgccgcggaggtgaggctgccccggcaaagccagcggccccaggagactgaggtgggcgggagggtggtcctctgggctgggggacctgcggaaggggcggcactgcccccaatgtgagtctccttcccaggctacgaatactcggaccagaagtcgggaaagtcaaaggggaaggatgttaacttggcggagttcgctgtggctgcaggggaccagatgctttacaggagtgaggacatccagctagattacaaaaacaacatcctgaaggagagggcggagctggcccacagccccctgcctgccaagtacatcgacctagacaaagggttccggaaggagaactgcaaatagggaggccctgggctcctggctgggccagcagctgcacctctcctgtctgtgctcctcggggcatctcctgatgctccggggctcaccccccttccagcggctggtcccgctttcctggaatttggcctgggcgtatgcagaggccgcctccacacccctcccccaggggcttggtggcagcatagcccccacccctgcggcctttgctcacgggtggccctgcccacccctggcacaaccaaaatcccactgatgcccatcatgccctcagacccttctgggctctgcccgctgggggcctgaagacattcctggaggacactcccatcagaacctggcagccccaaaactggggtcagcctcagggcaggagtcccactcctccagggctctgctcgtccggggctgggagatgttcctggaggaggacactcccatcagaacttggcagccttgaagttggggtcagcctcggcaggagtcccactcctcctggggtgctgcctgccaccaagagctcccccacctgtaccaccatgtgggactccaggcaccatctgttctccccagggacctgctgacttgaatgccagcccttgctcctctgtgttgctttgggccacctggggctgcaccccctgccctttctctgccccatccctaccctagccttgctctcagccaccttgatagtcactgggctccctgtgacttctgaccctgacacccctcccttggactctgcctgggctggagtctagggctggggctacatttggcttctgtactggctgaggacaggggagggagtgaagttggtttggggtggcctgtgttgccactctcagcaccccacatttgcatctgctggtggacctgccaccatcacaataaagtccccatctgattttta

SEQ ID NO: 85649 - DNA, 2502 bp, Homo sapiens
gagagacttagagccgagtgggacaaagcctggggctgggcgggggccatggcgctgccatcccgaatcctgctttggaaacttgtgcttctgcagagctctgctgttctcctgcactcagggtcctcggtacccgccgctgctggcagctccgtggtgtccgagtccgcggtgagctgggaggcgggcgcccgggcggtgctgcgctgccagagcccgcgcatggtgtggacccaggaccggctgcacgaccgccagcgcgtgctccactgggacctgcgcggccccgggggtggccccgcgcggcgcctgctggacttgtactcggcgggcgagcagcgcgtgtacgaggcgcgggaccgcggccgcctggagctctcggcctcggccttcgacgacggcaacttctcgctgctcatccgcgcggtggaggagacggacgcggggctgtacacctgcaacctgcaccatcactactgccacctctacgagagcctggccgtccgcctggaggtcaccgacggccgtgagtgcttcccccccgccccccagctcccgcccctcgaccctcgaccgccgccccggcccgcgcgccgctgaccgcgccccctccgcagccccggccacccccgcctactgggacggcgagaaggaggtgctggcggtggcgcgcggcgcacccgcgcttctgacctgcgtgaaccgcgggcacgtgtggaccgaccggcacgtggaggaggctcaacaggtggtgcactgggaccggcagccgcccggggtcccgcacgaccgcgcggaccgcctgctggacctctacgcgtcgggcgagcgccgcgcctacgggcccctttttctgcgcgaccgcgtggctgtgggcgcggatgcctttgagcgcggtgacttctcactgcgtatcgagccgctggaggtcgccgacgagggcacctactcctgccacctgcaccaccattactgtggcctgcacgaacgccgcgtcttccacctgacggtcgccgaaccccacgcggagccgcccccccggggctctccgggcaacggctccagccacagcggcgccccaggcccagaccccacactggcgcgcggccacaacgtcatcaatgtcatcgtccccgagagccgagcccacttcttccagcagctgggctacgtgctggccacgctgctgctcttcatcctgctactggtcactgtcctcctggccgcccgcaggcgccgcggaggtgaggctgccccggcaaagccagcggccccaggagactgaggtgggcgggagggtggtcctctgggctgggggacctgcggaaggggcggcactgcccccaatgtgagtctccttcccaggctacgaatactcggaccagaagtcgggaaagtcaaaggggaaggatgttaacttggcggagttcgctgtggctgcaggggaccagatgctttacaggagtgaggacatccagctagattacaaaaacaacatcctgaaggagagggcggagctggcccacagccccctgcctgccaagtacatcgacctagacaaagggttccggaaggagaactgcaaatagggaggccctgggctcctggctgggccagcagctgcacctctcctgtctgtgctcctcggggcatctcctgatgctccggggctcaccccccttccagcggctggtcccgctttcctggaatttggcctgggcgtatgcagaggccgcctccacacccctcccccaggggcttggtggcagcatagcccccacccctgcggcctttgctcacgggtggccctgcccacccctggcacaaccaaaatcccactgatgcccatcatgccctcagacccttctgggctctgcccgctgggggcctgaagacattcctggaggacactcccatcagaacctggcagccccaaaactggggtcagcctcagggcaggagtcccactcctccagggctctgctcgtccggggctgggagatgttcctggaggaggacactcccatcagaacttggcagccttgaagttggggtcagcctcggcaggagtcccactcctcctggggtgctgcctgccaccaagagctcccccacctgtaccaccatgtgggactccaggcaccatctgttctccccagggacctgctgacttgaatgccagcccttgctcctctgtgttgctttgggccacctggggctgcaccccctgccctttctctgccccatccctaccctagccttgctctcagccaccttgatagtcactgggctccctgtgacttctgaccctgacacccctcccttggactctgcctgggctggagtctagggctggggctacatttggcttctgtactggctgaggacaggggagggagtgaagttggtttggggtggcctgtgttgccactctcagcaccccacatttgcatctgctggtggacctgccaccatcacaataaagtccccatctgattttta

SEQ ID NO: 85650 - DNA, 2404 bp, Homo sapiens
gagagacttagagccgagtgggacaaagcctggggctgggcgggggccatggcgctgccatcccgaatcctgctttggaaacttgtgcttctgcagagctctgctgttctcctgcactcagggtcctcggtacccgccgctgctggcagctccgtggtgtccgagtccgcggtgagctgggaggcgggcgcccgggcggtgctgcgctgccagagcccgcgcatggtgtggacccaggaccggctgcacgaccgccagcgcgtgctccactgggacctgcgcggccccgggggtggccccgcgcggcgcctgctggacttgtactcggcgggcgagcagcgcgtgtacgaggcgcgggaccgcggccgcctggagctctcggcctcggccttcgacgacggcaacttctcgctgctcatccgcggtgcggggaccggggaccggggccgcggggtcggggcaggggtccggggccgcggggtcgggggcaccgcaaggctcacgcgcggcttcctcctgggtgcgcagcggtggaggagacggacgcggggctgtacacctgcaacctgcaccatcactactgccacctctacgagagcctggccgtccgcctggaggtcaccgacggccccccggccacccccgcctactgggacggcgagaaggaggtgctggcggtggcgcgcggcgcacccgcgcttctgacctgcgtgaaccgcgggcacgtgtggaccgaccggcacgtggaggaggctcaacaggtggtgcactgggaccggcagccgcccggggtcccgcacgaccgcgcggaccgcctgctggacctctacgcgtcgggcgagcgccgcgcctacgggcccctttttctgcgcgaccgcgtggctgtgggcgcggatgcctttgagcgcggtgacttctcactgcgtatcgagccgctggaggtcgccgacgagggcacctactcctgccacctgcaccaccattactgtgaccccacactggcgcgcggccacaacgtcatcaatgtcatcgtccccgagagccgagcccacttcttccagcagctgggctacgtgctggccacgctgctgctcttcatcctgctactggtcactgtcctcctggccgcccgcaggcgccgcggaggtgaggctgccccggcaaagccagcggccccaggagactgaggtgggcgggagggtggtcctctgggctgggggacctgcggaaggggcggcactgcccccaatgtgagtctccttcccaggctacgaatactcggaccagaagtcgggaaagtcaaaggggaaggatgttaacttggcggagttcgctgtggctgcaggggaccagatgctttacaggagtgaggacatccagctagattacaaaaacaacatcctgaaggagagggcggagctggcccacagccccctgcctgccaagtacatcgacctagacaaagggttccggaaggagaactgcaaatagggaggccctgggctcctggctgggccagcagctgcacctctcctgtctgtgctcctcggggcatctcctgatgctccggggctcaccccccttccagcggctggtcccgctttcctggaatttggcctgggcgtatgcagaggccgcctccacacccctcccccaggggcttggtggcagcatagcccccacccctgcggcctttgctcacgggtggccctgcccacccctggcacaaccaaaatcccactgatgcccatcatgccctcagacccttctgggctctgcccgctgggggcctgaagacattcctggaggacactcccatcagaacctggcagccccaaaactggggtcagcctcagggcaggagtcccactcctccagggctctgctcgtccggggctgggagatgttcctggaggaggacactcccatcagaacttggcagccttgaagttggggtcagcctcggcaggagtcccactcctcctggggtgctgcctgccaccaagagctcccccacctgtaccaccatgtgggactccaggcaccatctgttctccccagggacctgctgacttgaatgccagcccttgctcctctgtgttgctttgggccacctggggctgcaccccctgccctttctctgccccatccctaccctagccttgctctcagccaccttgatagtcactgggctccctgtgacttctgaccctgacacccctcccttggactctgcctgggctggagtctagggctggggctacatttggcttctgtactggctgaggacaggggagggagtgaagttggtttggggtggcctgtgttgccactctcagcaccccacatttgcatctgctggtggacctgccaccatcacaataaagtccccatctgattttta

SEQ ID NO: 85651 - DNA, 1545 bp, Homo sapiens
gagagacttagagccgagtgggacaaagcctggggctgggcgggggccatggcgctgccatcccgaatcctgctttggaaacttgtgcttctgcagagctctgctgttctcctgcactcagggtcctcggtacccgccgctgctggcagctccgtggtgtccgagtccgcggtgagctgggaggcgggcgcccgggcggtgctgcgctgccagagcccgcgcatggtgtggacccaggaccggctgcacgaccgccagcgcgtgctccactgggacctgcgcggccccgggggtggccccgcgcggcgcctgctggacttgtactcggcgggcgagcagcgcgtgtacgaggcgcgggaccgcggccgcctggagctctcggcctcggccttcgacgacggcaacttctcgctgctcatccgcgcggtggaggagacggacgcggggctgtacacctgcaacctgcaccatcactactgccacctctacgagagcctggccgtccgcctggaggtcaccgacggccccccggccacccccgcctactgggacggcgagaaggaggtgctggcggtggcgcgcggcgcacccgcgcttctgacctgcgtgaaccgcgggcacgtgtggaccgaccggcacgtggaggaggctcaacaggtggtgcactgggaccggcagccgcccggggtcccgcacgaccgcgcggaccgcctgctggacctctacgcgtcgggcgagcgccgcgcctacgggcccctttttctgcgcgaccgcgtggctgtgggcgcggatgcctttgagcgcggtgacttctcactgcgtatcgagccgctggaggtcgccgacgagggcacctactcctgccacctgcaccaccattactgtggcctgcacgaacgccgcgtcttccacctgacggtcgccgaaccccacgcggagccgcccccccggggctctccgggcaacggctccagccacagcggcgccccaggcccagaccccacactggcgcgcggccacaacgtcatcaatgtcatcgtccccgagagccgagcccacttcttccagcagctgggctacgtgctggccacgctgctgctcttcatcctgctactggtcactgtcctcctggccgcccgcaggcgccgcggaggctacgaatactcggaccagaagtcgggaaagtcaaaggggaaggatgttaacttggcggagttcgctgtggctgcaggggaccagatgctttacaggagtgaggacatccagctagattacaaaaacaacatcctgaaggagagggcggagctggcccacagccccctgcctgccaagtacatcgacctagacaaagggttccggaaggagaactgcaaatagggaggccctgggctcctggctgggccagcagctgcacctctcctgtctgtgctcctcggggcatctctggttgctcgggttttcaccctttttacagggggtcccccttttcttaaaattggccccggggggttaaaagacccctcccaccccctcctcccccccggg

SEQ ID NO: 85652 - DNA, 1837 bp, Homo sapiens
gagagacttagagccgagtgggacaaagcctggggctgggcgggggccatggcgctgccatcccgaatcctgctttggaaacttgtgcttctgcagagctctgctgttctcctgcactcagggtcctcggtacccgccgctgctggcagctccgtggtgtccgagtccgcggtgagctgggaggcgggcgcccgggcggtgctgcgctgccagagcccgcgcatggtgtggacccaggaccggctgcacgaccgccagcgcgtgctccactgggacctgcgcggccccgggggtggccccgcgcggcgcctgctggacttgtactcggcgggcgagcagcgcgtgtacgaggcgcgggaccgcggccgcctggagctctcggcctcggccttcgacgacggcaacttctcgctgctcatccgcggtgcggggaccggggaccgggttcgctgtggctgcaggggaccagatgctttacaggagtgaggacatccagctaggtgaggcagtgctgggacacgagggcacaggcgcggctccgtcccgggctgggaagtgcatcctgggagcggggacctcagcctcctctcctcccacagattacaaaaacaacatcctgaaggagagggcggagctggcccacagccccctgcctgccaagtacatcgacctagacaaaggtgagcggcgggggcgacctcagcccatctcagagccctgcctgtccccattccacctcacctgggaccaacgatggcaggcaccagccaggcccggggcccctgccacctcaggctcagaaatccctggggagtcctgcgggggggtctgccctgtgtctcccactgtgatgagggtggaggacagccgccaacccgttggcgcccttggcttccagggttccggaaggagaactgcaaatagggaggccctgggctcctggctgggccagcagctgcacctctcctgtctgtgctcctcggggcatctcctgatgctccggggctcaccccccttccagcggctggtcccgctttcctggaatttggcctgggcgtatgcagaggccgcctccacacccctcccccaggggcttggtggcagcatagcccccacccctgcggcctttgctcacgggtggccctgcccacccctggcacaaccaaaatcccactgatgcccatcatgccctcagacccttctgggctctgcccgctgggggcctgaagacattcctggaggacactcccatcagaacctggcagccccaaaactggggtcagcctcagggcaggagtcccactcctccagggctctgctcgtccggggctgggagatgttcctggaggaggacactcccatcagaacttggcagccttgaagttggggtcagcctcggcaggagtcccactcctcctggggtgctgcctgccaccaagagctcccccacctgtaccaccatgtgggactccaggcaccatctgttctccccagggacctgctgacttgaatgccagcccttgctcctctgtgttgctttgggccacctggggctgcaccccctgccctttctctgccccatccctaccctagccttgctctcagccaccttgatagtcactgggctccctgtgacttctgaccctgacacccctcccttggactctgcctgggctggagtctagggctggggctacatttggcttctgtactggctgaggacaggggagggagtgaagttggtttggggtggcctgtgttgccactctcagcaccccacatttgcatctgctggtggacctgccaccatcacaataaagtccccatctgattttta

SEQ ID NO: 85653 - DNA, 302 bp, Homo sapiens
gcaacacaggccaccccaaaccaacttcactcctttctctgccccatccctaccctagccttgctctcagccaccttgatagtcactgggctccctgtgacttctgaccctgacacccctcccttggactctgcctgggctggagtctagggctggggctacatttggcttctgtactggctgaggacaggggagggagtgaagttggtttggggtggcctgtgttgccactctcagcaccccacatttgcatctgctggtggacctgccaccatcacaataaagtccccatctgattttta

SEQ ID NO: 85654 - DNA, 2011 bp, Homo sapiens
gagagacttagagccgagtgggacaaagcctggggctgggcgggggccatggcgctgccatcccgaatcctgctttggaaacttgtgcttctgcagagctctgctgttctcctgcactcagggtcctcggtacccgccgctgctggcagctccgtggtgtccgagtccgcggtgagctgggaggcgggcgcccgggcggtgctgcgctgccagagcccgcgcatggtgtggacccaggaccggctgcacgaccgccagcgcgtgctccactgggacctgcgcggccccgggggtggccccgcgcggcgcctgctggacttgtactcggcgggcgagcagcgcgtgtacgaggcgcgggaccgcggccgcctggagctctcggcctcggccttcgacgacggcaacttctcgctgctcatccgcgcggtggaggagacggacgcggggctgtacacctgcaacctgcaccatcactactgccacctctacgagagcctggccgtccgcctggaggtcaccgacggccccccggccacccccgcctactgggacggcgagaaggaggtgctggcggtggcgcgcggcgcacccgcgcttctgacctgcgtgaaccgcgggcacgtgtggaccgaccggcacgtggaggaggctcaacaggtggtgcactgggaccggcagccgcccggggtcccgcacgaccgcgcggaccgcctgctggacctctacgcgtcgggcgagcgccgcgcctacgggcccctttttctgcgcgaccgcgtggctgtgggcgcggatgcctttgagcgcggtgacttctcactgcgtatcgagccgctggaggtcgccgacgagggcacctactcctgccacctgcaccaccattactgtggcctgcacgaacgccgcgtcttccacctgacggtcgccgaaccccacgcggagccgcccccccggggctctccgggcaacggctccagccacagcggcgccccaggcccagaccccacactggcgcgcggccacaacgtcatcaatgtcatcgtccccgagagccgagcccacttcttccagcagctgggctacgtgctggccacgctgctgctcttcatcctgctactggtcactgtcctcctggccgcccgcaggcgccgcggaggctacgaatactcggaccagaagtcgggaaagtcaaaggggaaggatgttaacttggcggagttcgctgtggctgcaggggaccagatgctttacaggagtgaggacatccagctagcctcctctcctcccacagattacaaaaacaacatcctgaaggagagggcggagctggcccacagccccctgcctgccaagtacatcgacctagacaaagacccttctgggctctgcccgctgggggcctgaagacattcctggaggacactcccatcagaacctggcagccccaaaactggggtcagcctcagggcaggagtcccactcctccagggctctgctcgtccggggctgggagatgttcctggaggaggacactcccatcagaacttggcagccttgaagttggggtcagcctcggcaggagtcccactcctcctggggtgctgcctgccaccaagagctcccccacctgtaccaccatgtgggactccaggcaccatctgttctccccagggacctgctgacttgaatgccagcccttgctcctctgtgttgctttgggccacctggggctgcaccccctgccctttctctgccccatccctaccctagccttgctctcagccaccttgatagtcactgggctccctgtgacttctgaccctgacacccctcccttggactctgcctgggctggagtctagggctggggctacatttggcttctgtactggctgaggacaggggagggagtgaagttggtttggggtggcctgtgttgccactctcagcaccccacatttgcatctgctggtggacctgccaccatcacaataaagtccccatctgattttta

SEQ ID NO: 85655 - DNA, 2605 bp, Homo sapiens
gcgtcctcaggcctcgcctggcatttgctgtcacagaggttgcttccttgggtccgtccgtcctcgcccctccagcctgggcgccccccgacccctgtctcattccctccaccacatgcagcacagtccaggaggctggggtccaagagggccatggctggcacccggcttagtgctgagtccccagtgcccagcaagcctggcacccaggaggtggtcagcaaacgcttctgaacgacaggaagtgggactcttcagccatcgatgatccgctgtgcggccacaggtccgtgtctcttgttctcctgcactcagggtcctcggtacccgccgctgctggcagctccgtggtgtccgagtccgcggtgagctgggaggcgggcgcccgggcggtgctgcgctgccagagcccgcgcatggtgtggacccaggaccggctgcacgaccgccagcgcgtgctccactgggacctgcgcggccccgggggtggccccgcgcggcgcctgctggacttgtactcggcgggcgagcagcgcgtgtacgaggcgcgggaccgcggccgcctggagctctcggcctcggccttcgacgacggcaacttctcgctgctcatccgcgcggtggaggagacggacgcggggctgtacacctgcaacctgcaccatcactactgccacctctacgagagcctggccgtccgcctggaggtcaccgacggccccccggccacccccgcctactgggacggcgagaaggaggtgctggcggtggcgcgcggcgcacccgcgcttctgacctgcgtgaaccgcgggcacgtgtggaccgaccggcacgtggaggaggctcaacaggtggtgcactgggaccggcagccgcccggggtcccgcacgaccgcgcggaccgcctgctggacctctacgcgtcgggcgagcgccgcgcctacgggcccctttttctgcgcgaccgcgtggctgtgggcgcggatgcctttgagcgcggtgacttctcactgcgtatcgagccgctggaggtcgccgacgagggcacctactcctgccacctgcaccaccattactgtggcctgcacgaacgccgcgtcttccacctgacggtcgccgaaccccacgcggagccgcccccccggggctctccgggcaacggctccagccacagcggcgccccaggcccagaccccacactggcgcgcggccacaacgtcatcaatgtcatcgtccccgagagccgagcccacttcttccagcagctgggctacgtgctggccacgctgctgctcttcatcctgctactggtcactgtcctcctggccgcccgcaggcgccgcggaggtgaggctgccccggcaaagccagcggccccaggagactgaggtgggcgggagggtggtcctctgggctgggggacctgcggaaggggcggcactgcccccaatgtgagtctccttcccaggctacgaatactcggaccagaagtcgggaaagtcaaaggggaaggatgttaacttggcggagttcgctgtggctgcaggggaccagatgctttacaggagtgaggacatccagctagattacaaaaacaacatcctgaaggagagggcggagctggcccacagccccctgcctgccaagtacatcgacctagacaaagggttccggaaggagaactgcaaatagggaggccctgggctcctggctgggccagcagctgcacctctcctgtctgtgctcctcggggcatctcctgatgctccggggctcaccccccttccagcggctggtcccgctttcctggaatttggcctgggcgtatgcagaggccgcctccacacccctcccccaggggcttggtggcagcatagcccccacccctgcggcctttgctcacgggtggccctgcccacccctggcacaaccaaaatcccactgatgcccatcatgccctcagacccttctgggctctgcccgctgggggcctgaagacattcctggaggacactcccatcagaacctggcagccccaaaactggggtcagcctcagggcaggagtcccactcctccagggctctgctcgtccggggctgggagatgttcctggaggaggacactcccatcagaacttggcagccttgaagttggggtcagcctcggcaggagtcccactcctcctggggtgctgcctgccaccaagagctcccccacctgtaccaccatgtgggactccaggcaccatctgttctccccagggacctgctgacttgaatgccagcccttgctcctctgtgttgctttgggccacctggggctgcaccccctgccctttctctgccccatccctaccctagccttgctctcagccaccttgatagtcactgggctccctgtgacttctgaccctgacacccctcccttggactctgcctgggctggagtctagggctggggctacatttggcttctgtactggctgaggacaggggagggagtgaagttggtttggggtggcctgtgttgccactctcagcaccccacatttgcatctgctggtggacctgccaccatcacaataaagtccccatctgattttta

SEQ ID NO: 85656 - DNA, 2300 bp, Homo sapiens
gagagacttagagccgagtgggacaaagcctggggctgggcgggggccatggcgctgccatcccgaatcctgctttggaaacttgtgcttctgcagagctctgctgttctcctgcactcagggtcctcggtacccgccgctgctggcagctccgtggtgtccgagtccgcggtgagctgggaggcgggcgcccgggcggtgctgcgctgccagagcccgcgcatggtgtggacccaggaccggctgcacgaccgccagcgcgtgctccactgggacctgcgcggccccgggggtggccccgcgcggcgcctgctggacttgtactcggcgggcgagcagcgcgtgtacgaggcgcgggaccgcggccgcctggagctctcggcctcggccttcgacgacggcaacttctcgctgctcatccgcgcggtggaggagacggacgcggggctgtacacctgcaacctgcaccatcactactgccacctctacgagagcctggccgtccgcctggaggtcaccgacggccccccggccacccccgcctactgggacggcgagaaggaggtgctggcggtggcgcgcggcgcacccgcgcttctgacctgcgtgaaccgcgggcacgtgtggaccgaccggcacgtggaggaggctcaacaggtggtgcactgggaccggcagccgcccggggtcccgcacgaccgcgcggaccgcctgctggacctctacgcgtcgggcgagcgccgcgcctacgggcccctttttctgcgcgaccgcgtggctgtgggcgcggatgcctttgagcgcggtgacttctcactgcgtatcgagccgctggaggtcgccgacgagggcacctactcctgccacctgcaccaccattactgtgaccccacactggcgcgcggccacaacgtcatcaatgtcatcgtccccgagagccgagcccacttcttccagcagctgggctacgtgctggccacgctgctgctcttcatcctgctactggtcactgtcctcctggccgcccgcaggcgccgcggaggtgaggctgccccggcaaagccagcggccccaggagactgaggtgggcgggagggtggtcctctgggctgggggacctgcggaaggggcggcactgcccccaatgtgagtctccttcccaggctacgaatactcggaccagaagtcgggaaagtcaaaggggaaggatgttaacttggcggagttcgctgtggctgcaggggaccagatgctttacaggagtgaggacatccagctagattacaaaaacaacatcctgaaggagagggcggagctggcccacagccccctgcctgccaagtacatcgacctagacaaagggttccggaaggagaactgcaaatagggaggccctgggctcctggctgggccagcagctgcacctctcctgtctgtgctcctcggggcatctcctgatgctccggggctcaccccccttccagcggctggtcccgctttcctggaatttggcctgggcgtatgcagaggccgcctccacacccctcccccaggggcttggtggcagcatagcccccacccctgcggcctttgctcacgggtggccctgcccacccctggcacaaccaaaatcccactgatgcccatcatgccctcagacccttctgggctctgcccgctgggggcctgaagacattcctggaggacactcccatcagaacctggcagccccaaaactggggtcagcctcagggcaggagtcccactcctccagggctctgctcgtccggggctgggagatgttcctggaggaggacactcccatcagaacttggcagccttgaagttggggtcagcctcggcaggagtcccactcctcctggggtgctgcctgccaccaagagctcccccacctgtaccaccatgtgggactccaggcaccatctgttctccccagggacctgctgacttgaatgccagcccttgctcctctgtgttgctttgggccacctggggctgcaccccctgccctttctctgccccatccctaccctagccttgctctcagccaccttgatagtcactgggctccctgtgacttctgaccctgacacccctcccttggactctgcctgggctggagtctagggctggggctacatttggcttctgtactggctgaggacaggggagggagtgaagttggtttggggtggcctgtgttgccactctcagcaccccacatttgcatctgctggtggacctgccaccatcacaataaagtccccatctgattttta

SEQ ID NO: 85657 - DNA, 2224 bp, Homo sapiens
gagagacttagagccgagtgggacaaagcctggggctgggcgggggccatggcgctgccatcccgaatcctgctttggaaacttgtgcttctgcagagctctgctgttctcctgcactcagggtcctcggtacccgccgctgctggcagctccgtggtgtccgagtccgcggtgagctgggaggcgggcgcccgggcggtgctgcgctgccagagcccgcgcatggtgtggacccaggaccggctgcacgaccgccagcgcgtgctccactgggacctgcgcggccccgggggtggccccgcgcggcgcctgctggacttgtactcggcgggcgagcagcgcgtgtacgaggcgcgggaccgcggccgcctggagctctcggcctcggccttcgacgacggcaacttctcgctgctcatccgcgcggtggaggagacggacgcggggctgtacacctgcaacctgcaccatcactactgccacctctacgagagcctggccgtccgcctggaggtcaccgacggccccccggccacccccgcctactgggacggcgagaaggaggtgctggcggtggcgcgcggcgcacccgcgcttctgacctgcgtgaaccgcgggcacgtgtggaccgaccggcacgtggaggaggctcaacaggtggtgcactgggaccggcagccgcccggggtcccgcacgaccgcgcggaccgcctgctggacctctacgcgtcgggcgagcgccgcgcctacgggcccctttttctgcgcgaccgcgtggctgtgggcgcggatgcctttgagcgcggtgacttctcactgcgtatcgagccgctggaggtcgccgacgagggcacctactcctgccacctgcaccaccattactgtggcctgcacgaacgccgcgtcttccacctgacggtcgccgaaccccacgcggagccgcccccccggggctctccgggcaacggctccagccacagcggcgccccaggcccagaccccacactggcgcgcggccacaacgtcatcaatgtcatcgtccccgagagccgagcccacttcttccagcagctgggctacgtgctggccacgctgctgctcttcatcctgctactggtcactgtcctcctggccgcccgcaggcgccgcggaggctacgaatactcggaccagaagtcgggaaagtcaaaggggaaggatgttaacttggcggagttcgctgtggctgcaggggaccagatgctttacaggagtgaggacatccagctagattacaaaaacaacatcctgaaggagagggcggagctggcccacagccccctgcctgccaagtacatcgacctagacaaagggttccggaaggagaactgcaaatagggaggccctgggctcctggctgggccagcagctgcacctctcctgtctgtgctcctcggggcatctcctgatgctccggggctcaccccccttccagcggctggtcccgctttcctggaatttggcctgggcgtatgcagaggccgcctccacacccctcccccaggggcttggtggcagcatagcccccacccctgcggcctttgctcacgggtggccctgcccacccctggcacaaccaaaatcccactgatgcccatcatgccctcagacccttctgggctctgcccgctgggggcctgaagacattcctggaggacactcccatcagaacctggcagccccaaaactggggtcagcctcagggcaggagtcccactcctccagggctctgctcgtccggggctgggagatgttcctggaggaggacactcccatcagaacttggcagccttgaagttggggtcagcctcggcaggagtcccactcctcctggggtgctgcctgccaccaagagctcccccacctgtaccaccatgtgggactccaggcaccatctgttctccccagggacctgctgacttgaatgccagcccttgctcctctgtctctcagccaccttgatagtcactgggctccctgtgacttctgaccctgacacccctcccttggactctgcctgggctggagtctagggctggggctacatttggcttctgtactggctgaggacaggggagggagtgaagttggtttggggtggcctgtgttgccactctcagcaccccacatttgcatctgctggtggacctgccaccatcacaataaagtccccatctgattttta

SEQ ID NO: 85658 - DNA, 1881 bp, Homo sapiens
gagagacttagagccgagtgggacaaagcctggggctgggcgggggccatggcgctgccatcccgaatcctgctttggaaacttgtgcttctgcagagctctgctgttctcctgcactcagggtcctcggtacccgccgctgctggcagctccgtggtgtccgagtccgcggtgagctgggaggcgggcgcccgggcggtgctgcgctgccagagcccgcgcatggtgtggacccaggaccggctgcacgaccgccagcgcgtgctccactgggacctgcgcggccccgggggtggccccgcgcggcgcctgctggacttgtactcggcgggcgagcagcgcgtgtacgaggcgcgggaccgcggccgcctggagctctcggcctcggccttcgacgacggcaacttctcgctgctcatccgcgcggtggaggagacggacgcggggctgtacacctgcaacctgcaccatcactactgccacctctacgagagcctggccgtccgcctggaggtcaccgacggccccccggccacccccgcctactgggacggcgagaaggaggtgctggcggtggcgcgcggcgcacccgcgcttctgacctgcgtgaaccgcgggcacgtgtggaccgaccggcacgtggaggaggctcaacaggtggtgcactgggaccggcagccgcccggggtcccgcacgaccgcgcggaccgcctgctggacctctacgcgtcgggcgagcgccgcgcctacgggcccctttttctgcgcgaccgcgtggctgtgggcgcggatgcctttgagcgcggtgacttctcactgcgtatcgagccgctggaggtcgccgacgagggcacctactcctgccacctgcaccaccattactgtggcctgcacgaacgccgcgtcttccacctgacggtcgccgaaccccacgcggagccgcccccccggggctctccgggcaacggctccagccacagcggcgccccaggcccagaccccacactggcgcgcggccacaacgtcatcaatgtcatcgtccccgagagccgagcccacttcttccagcagctgggctacgtgctggccacgctgctgctcttcatcctgctactggtcactgtcctcctggccgcccgcaggcgccgcggaggctacgaatactcggaccagaagtcgggaaagtcaaaggggaaggatgttaacttggcggagttcgctgtggctgcaggggaccagatgctttacaggagtgaggacatccagctaggtgaggcagtgctgggacacgagggcacaggcgcggctccgtcccgggctgggaagtgcatcctgggagcggggacctcagcctcctctcctcccacagattacaaaaacaacatcctgaaggagagggcggagctggcccacagccccctgcctgccaagtacatcgacctagacaaaggtgagcggcgggggcgacctcagcccatctcagagccctgcctgtccccattccacctcacctgggaccaacgatggcaggcaccagccaggcccggggcccctgccacctcaggctcagaaatccgttgctttgggccacctggggctgcaccccctgccctttctctgccccatccctaccctagccttgctctcagccaccttgatagtcactgggctccctgtgacttctgaccctgacacccctcccttggactctgcctgggctggagtctagggctggggctacatttggcttctgtactggctgaggacaggggagggagtgaagttggtttggggtggcctgtgttgccactctcagcaccccacatttgcatctgctggtggacctgccaccatcacaataaagtccccatctgattttta

SEQ ID NO: 85659 - DNA, 1517 bp, Homo sapiens
gggcggtaccggcccggaatgtaagggatcgaaccccacgcggagccgcccccccggggctctccgggcaacggctccagccacagcggcgccccaggcccagaccccacactggcgcgcggccacaacgtcatcaatgtcatcgtccccgagagccgagcccacttcttccagcagctgggctacgtgctggccacgctgctgctcttcatcctgctactggtcactgtcctcctggccgcccgcaggcgccgcggaggtgaggctgccccggcaaagccagcggccccaggagactgaggtgggcgggagggtggtcctctgggctgggggacctgcggaaggggcggcactgcccccaatgtgagtctccttcccaggctacgaatactcggaccagaagtcgggaaagtcaaaggggaaggatgttaacttggcggagttcgctgtggctgcaggggaccagatgctttacaggagtgaggacatccagctagattacaaaaacaacatcctgaaggagagggcggagctggcccacagccccctgcctgccaagtacatcgacctagacaaagggttccggaaggagaactgcaaatagggaggccctgggctcctggctgggccagcagctgcacctctcctgtctgtgctcctcggggcatctcctgatgctccggggctcaccccccttccagcggctggtcccgctttcctggaatttggcctgggcgtatgcagaggccgcctccacacccctcccccaggggcttggtggcagcatagcccccacccctgcggcctttgctcacgggtggccctgcccacccctggcacaaccaaaatcccactgatgcccatcatgccctcagacccttctgggctctgcccgctgggggcctgaagacattcctggaggacactcccatcagaacctggcagccccaaaactggggtcagcctcagggcaggagtcccactcctccagggctctgctcgtccggggctgggagatgttcctggaggaggacactcccatcagaacttggcagccttgaagttggggtcagcctcggcaggagtcccactcctcctggggtgctgcctgccaccaagagctcccccacctgtaccaccatgtgggactccaggcaccatctgttctccccagggacctgctgacttgaatgccagcccttgctcctctgtgttgctttgggccacctggggctgcaccccctgccctttctctgccccatccctaccctagccttgctctcagccaccttgatagtcactgggctccctgtgacttctgaccctgacacccctcccttggactctgcctgggctggagtctagggctggggctacatttggcttctgtactggctgaggacaggggagggagtgaagttggtttggggtggcctgtgttgccactctcagcaccccacatttgcatctgctggtggacctgccaccatcacaataaagtccccatctgattttta

SEQ ID NO: 85660 - DNA, 899 bp, Homo sapiens
gagagacttagagccgagtgggacaaagcctggggctgggcgggggccatggcgctgccatcccgaatcctgctttggaaacttgtgcttctgcagagctctgctgttctcctgcactcagggtcctcggtacccgccgctgctggcagctccgtggtgtccgagtccgcggtgagctgggaggcgggcgcccgggcggtgctgcgctgccagagcccgcgcatggtgtggacccaggaccggctgcacgaccgccagcgcgtgctccactgggacctgcgcggccccgggggtggccccgcgcggcgcctgctggacttgtactcggcgggcgagcagcgcgtgtacgaggcgcgggaccgcggccgcctggagctctcggcctcggccttcgacgacggcaacttctcgctgctcatccgcgcggtggaggagacggacgcggggctgtacacctgcaacctgcaccatcactactgccacctctacgagagcctggccgtccgcctggaggtcaccgacggccccccggccacccccgcctactgggacggcgagaaggaggtgctggcggtggcgcgcggcgcacccgcgcttctgacctgcgcctgcacgaacgccgcgtcttccacctgacggtcgccgaaccccacgcggagccgcccccccggggctctccgggcaacggctccagccacagcggcgccccaggcccagacaaaaaaatagtcaatagtgctcagactggtagcttcaaacagctcacagttaaggaagctgtgctgaatggtttggtggccactgaggtgttgatgtggttttatgtcggagagattataggcaagcggggcatcattggctatgatgtttgaagaccaatctttaacatctgattatat

SEQ ID NO: 85661 - DNA, 989 bp, Homo sapiens
gcgagtcctggaaagcgttgttggcccggttgctctggagccgggtctcgggtctggtggctgccggccctgcggcatctcgccatggggagcacggagagcagcgagggccgcagggtgtccttcggagtggacgaggaggagcgggtccgggtgctgcagggtgtccggctgtctgaaaacgtggtgaaccgcatgaaggagcccagctctccaccccctgctcccacatcttctacctttggccttcaagatggcaacttgagagcccctcacaaagaatccacactgcccaggtcggggagcagtggtggccagcagccctcagggatgaaggagggtgtcaagaggtatgaacaggagcatgctgctatccaggataagctcttccaggtggcaaagagggaaagagaggctgccaccaagcactccaaggcatccctgcccacgggcgaaggcagcatcagccatgaggagcagaagtcagtccggctggccagggagctggagagcagagaggcagagctaagacgccgtgacaccttctacaaggagcagctggagcgtattgagaggaagaatgctgagatgtataaactgtcttcagagcaattccatgaggcagcctcaaagatggagagcacaataaagccccgcagggtggagcccgtctgctcagggttgcaggcccagattctccactgctaccgagatcgcccgcatgaggtgctgctgtgctcggacctggtcaaggcataccagcgctgcgtgagcgccgcccacaagggctgaggagcagacatcattccctgccctggcagtgacttggagccctgaagaagggaccaatcatgggaccacagccactgtgccctgccgtttcctgctgggcccctgcatatgcccctgagcctggggctgccacgtgtttaggaaacaaagtatgcgctactgtctgaaaacaaataaagcagatgcctttgttttca

SEQ ID NO: 85662 - DNA, 407 bp, Homo sapiens
  misc_feature (40)..(41): n is a, c, g, or t
  misc_feature (43)..(44): n is a, c, g, or t
cgcgggcggcgccgcccgggacagtaagtttgtatttggnngnngtttcgaggctccgcagctggttagccccgcagggtggagcccgtctgctcagggttgcaggcccagattctccactgctaccgagatcgcccgcatgaggtgctgctgtgctcggacctggtcaaggcataccagcgctgcgtgagcgccgcccacaagggctgaggagcagacatcattccctgccctggcagtgacttggagccctgaagaagggaccaatcatgggaccacagccactgtgccctgccgtttcctgctgggcccctgcatatgcccctgagcctggggctgccacgtgtttaggaaacaaagtatgcgctactgtctgaaaacaaataaagcagatgcctttgttttca

SEQ ID NO: 85663 - DNA, 375 bp, Homo sapiens
ctacggctcctccccttttccattatgtgggttaaggccccgcagggtggagcccgtctgctcagggttgcaggcccagattctccactgctaccgagatcgcccgcatgaggtgctgctgtgctcggacctggtcaaggcataccagcgctgcgtgagcgccgcccacaagggctgaggagcagacatcattccctgccctggcagtgacttggagccctgaagaagggaccaatcatgggaccacagccactgtgccctgccgtttcctgctgggcccctgcatatgcccctgagcctggggctgccacgtgtttaggaaacaaagtatgcgctactgtctgaaaacaaataaagcagatgcctttgttttca

SEQ ID NO: 85664 - DNA, 681 bp, Homo sapiens
ggctgtctcaggcataaagggatggctatcctgggcacagcggggcgggttgtcctggaggcgggctgcaccatcctcatgggggccctccagtggggctttcctgtctcctgagtgtacacaggccccagtgaaggagcccggtgtggagccccataccacagcatgtttcagtgtctgctatattgtgagcctaagccacccaccacagggcttgaccctgcgaccgtcctctcatttctagaacgggaaagcacagtgcttctccttgagggttaaaaggatgctgctgggtgtcagggacttagcctagcgcctgggaggccccgcagggtggagcccgtctgctcagggttgcaggcccagattctccactgctaccgagatcgcccgcatgaggtgctgctgtgctcggacctggtcaaggcataccagcgctgcgtgagcgccgcccacaagggctgaggagcagacatcattccctgccctggcagtgacttggagccctgaagaagggaccaatcatgggaccacagccactgtgccctgccgtttcctgctgggcccctgcatatgcccctgagcctggggctgccacgtgtttaggaaacaaagtatgcgctactgtctgaaaacaaataaagcagatgcctttgttttcagtcgttgactcactggcaa

SEQ ID NO: 85665 - DNA, 783 bp, Homo sapiens
gggattaccgggattgtatccaaggggctgggtggaatctgcttgccgtccaccgtggaagctggtcagcgctccaccttctacctgttgagactggcagaatgctgagatgtataaactgtcttcagagcaattccatgaggcagcctcaaagatggagagcacaataaagcacaaacaggcaacacttcataacccagtggcggccctggacccaggaggtttgtgcagtcatggacagctacacaggcgcctgccatggacggaagggaaggctgcacagacacctgccatggacggaaaaagggaaggctgcaccaacaggtctgccgtggacggaagggaaggctgcacggactcctgctgtggacgaaagggaaggctgcccagaggtctgccgtggacggaagggaaggctgctgcgtggactgccgccgtggacggaagggaaggctgctgcccggactgccgccgtggacggaagggaaggctgctgcccggactgccgccgtggacggaagggaaggctgctgcgcggactgccgccgtggacggaagggaaggctgtacagagccttatcaccaatgggaaggaaaggctgcacggaggcttgcttggatagaagggaagggtgcagattgtcttggacatgaagggaaggctacacacagaattatcatggatggaaggaaagctgcacagaggaatgttaatgacgagaagggaagaatgcagagccttgccatagatgagaaggaaggatgcacagaagcttttttgat

SEQ ID NO: 85666 - DNA, 1008 bp, Homo sapiens
gcgagtcctggaaagcgttgttggcccggttgctctggagccgggtctcgggtctggtggctgccggccctgcggcatctcgccatggggagcacggagagcagcgagggccgcagggtgtccttcggagtggacgaggaggagcgggtccgggtgctgcagggtgtccggctgtctgaaaacgtggtgaaccgcatgaaggagcccagctctccaccccctgctcccacatcttctacctttggccttcaagatggcaacttgagagcccctcacaaagaatccacactgcccaggtcggggagcagtggtggccagcagccctcagggatgaaggagggtgtcaagaggtatgaacaggagcatgctgctatccaggataagctcttccaggtggcaaagagggaaagagaggctgccaccaagcactccaaggcatccctgcccacgggcgaaggcagcatcagccatgaggagcagaagtcagtccggctggccagggagctggagagcagagaggcagagctaagacgccgtgacaccttctacaaggagcagctggagcgtattgagaggaagaatgctgagatgtataaactgtcttcagagcaattccatgaggcagcctcaaagatggagagcacaataaagccccgcagggtggagcccgtctgctcagggttgcaggcccagattctccactgctaccgagatcgcccgcatgaggtgctgctgtgctcggacctggtcaaggcataccagcgctgcgtgagcgccgcccacaagggctgaggagcagacatcattccctgccctggcagtgacttggagccctgaagaagggaccaatcatgggaccacagccactgtgccctgccgtttcctgctgggcccctgcatatgcccctgagcctggggctgccacgtgtttaggaaacaaagtatgcgctactgtctgaaaacaaataaagcagatgcctttgttttcagtcgttgactcactggcaa

SEQ ID NO: 85667 - DNA, 1045 bp, Homo sapiens
gcgagtcctggaaagcgttgttggcccggttgctctggagccgggtctcgggtctggtggctgccggccctgcggcatctcgccatggggagcacggagagcagcgagggccgcagggtgtccttcggagtggacgaggaggagcgggtccgggtgctgcagggtgtccggctgtctgaaaacgtggtgaaccgcatgaaggagcccagctctccaccccctgctcccacatcttctacctttggccttcaagatggcaacttgagagcccctcacaaagaatccacactgcccaggtcggggagcagtggtggccagcagccctcagggatgaaggagggtgtcaagaggtatgaacaggagcatgctgctatccaggataagctcttccaggtggcaaagagggaaagagaggctgccaccaagcactccaaggcatccctgcccacgggcgaaggcagcatcagccatgaggagcagaagtcagtccggctggccagggagctggagagcagagaggcagagctaagacgccgtgacaccttctacaaggagcagctggagcgtattgagaggaagaatgctgagatgtataaactgtcttcagagcaattccatgaggcagcctcaaagatggagagcacaataaagccccgcagggtggagcccgtctgctcagggttgcaggcccagattctccactgctaccgagatcgcccgcatgaggtgctgctgtgctcggacctggtcaaggcataccagcgctgcgtgagcgccgcccacaagggctgaggagcagacatcattccctgccctggcagtgacttggagccctgaagaagggaccaatcatgggaccacagccactgtgccctgccgtttcctgctgggcccctgcatatgcccctgagcctggggctgccacgtgtttaggaaacaaagtatgcgctactgtctgaaaacaaataaagcagatgcctttgttttcaaaaaaaaaaagaatgggcttcgctgggcctcgccgggggaagctctacggggcgcg

SEQ ID NO: 85668 - DNA, 1141 bp, Homo sapiens
gcgagtcctggaaagcgttgttggcccggttgctctggagccgggtctcgggtctggtggctgccggccctgcggcatctcgccatggggagcacggagagcagcgagggccgcagggtgtccttcggagtggacgaggaggagcgggtccgggtgctgcagggtgtccggctgtctgaaaacgtggtgaaccgcatgaaggagcccagctctccaccccctgctcccacatcttctacctttggccttcaagatggcaacttgagagcccctcacaaagaatccacactgcccaggtcggggagcagtggtggccagcagccctcagggatgaaggagggtgtcaagaggtatgaacaggagcatgctgctatccaggataagctcttccaggtggcaaagagggaaagagaggctgccaccaagcactccaaggcatccctgcccacgggcgaaggcagcatcagccatgaggagcagaagtcagtccggctggccagggagctggagagcagagaggcagagctaagacgccgtgacaccttctacaaggagcagctggagcgtattgagaggaagaatgctgagatgtataaactgtcttcagagcaattccatgaggcagcctcaaagatggagagcacaataaaggtccaatacttatgaactcaaggaataccaaatggaggaagaaataccccatgacagatgggtttacttgtgagcacgaatcacctgctgtctccggccacctgggatgctcagccagtgcctttggaaacatttctgccttgaatgtcaggccccgcagggtggagcccgtctgctcagggttgcaggcccagattctccactgctaccgagatcgcccgcatgaggtgctgctgtgctcggacctggtcaaggcataccagcgctgcgtgagcgccgcccacaagggctgaggagcagacatcattccctgccctggcagtgacttggagccctgaagaagggaccaatcatgggaccacagccactgtgccctgccgtttcctgctgggcccctgcatatgcccctgagcctggggctgccacgtgtttaggaaacaaagtatgcgctactgtctgaaaacaaataaagcagatgcctttgttttca

SEQ ID NO: 85669 - DNA, 755 bp, Homo sapiens
gcgagtcctggaaagcgttgttggcccggttgctctggagccgggtctcgggtctggtggctgccggccctgcggcatctcgccatggggagcacggagagcagcgagggccgcagggtgtccttcggagtggacgaggaggagcgggtccgggtgctgcagggtgtccggctgtctgaaaacgtggtgaaccgcatgaaggagcccagctctccaccccctgctcccacatcttctacctttggccttcaagatggcaacttgagagcccctcacaaagaatccacactgcccaggtcggggagcagtggtggccagcagccctcagggatgaaggagggtgtcaagaggtatgaacaggagcatgctgctatccaggataagctcttccaggtggcaaagagggaaagagaggctgccaccaagcactccaaggcatccctgcccacgggcgaaggcagcatcagccatgaggagcagaagtcagtccggctggccagggagctggagagcagagaggcagagctaagacgccgtgacaccttctacaaggagcagctggagcgtattgagaggaagaatgctgagatgtataaactgtcttcagagcaattccatgaggcagcctcaaagatggagagcacaataaatgctgggcccctgcatatgcccctgagcctggggctgccacgtgtttaggaaacaaagtatgcgctactgtctgaaaacaaataaagcagatgcctttgttttca

SEQ ID NO: 85670 - DNA, 662 bp, Homo sapiens
ggctgtctcaggcataaagggatggctatcctgggcacagcggggcgggttgtcctggaggcgggctgcaccatcctcatgggggccctccagtggggctttcctgtctcctgagtgtacacaggccccagtgaaggagcccggtgtggagccccataccacagcatgtttcagtgtctgctatattgtgagcctaagccacccaccacagggcttgaccctgcgaccgtcctctcatttctagaacgggaaagcacagtgcttctccttgagggttaaaaggatgctgctgggtgtcagggacttagcctagcgcctgggaggccccgcagggtggagcccgtctgctcagggttgcaggcccagattctccactgctaccgagatcgcccgcatgaggtgctgctgtgctcggacctggtcaaggcataccagcgctgcgtgagcgccgcccacaagggctgaggagcagacatcattccctgccctggcagtgacttggagccctgaagaagggaccaatcatgggaccacagccactgtgccctgccgtttcctgctgggcccctgcatatgcccctgagcctggggctgccacgtgtttaggaaacaaagtatgcgctactgtctgaaaacaaataaagcagatgcctttgttttca

SEQ ID NO: 85671 - DNA, 1002 bp, Homo sapiens
gggtgtcaagaggaagaatgctgagatgtataaactgtcttcagagcaattccatgaggcagcctccttcatccctgagggctgctggccaccactgctccccgacctgggcagtgtggattctttgtgaggggctctcaaggatgaaggagggtgtcaagaggtatgaacaggagcatgctgctatccaggataagctcttccaggtggcaaagagggaaagagaggctgccaccaagcactccaaggcatccctgcccacgggcgaaggcagcatcagccatgaggagcagaagtcagtccggctggccagggagctggagagcagagaggcagagctaagacgccgtgacaccttctacaaggagcagctggagcgtattgagaggaagaatgctgagatgtataaactgtcttcagagcaattccatgaggcagcctcaaagatggagagcacaataaagccccgcagggtggagcccgtctgctcagggttgcaggcccagattctccactgctaccgagatcgcccgcatgaggtgctgctgtgctcggacctggtcaaggcataccagcgctgcgtgagcgccgcccacaagggctgaggagcagacatcattccctgccctggcagtgacttggagccctgaagaagggaccaatcatgggaccacagccactgtgccctgccgtttcctgctgggcccctgcatatgcccctgagcctggggctgccacgtgtttaggaaacaaagtatgcgctactgtctgaaaacaaataaagcagatgcctttgttttcaaacaacacaaaatcaaacacaacaaaagagggggggcagattcccgggggcagtagcgccccgtttggaaaggccacaggaggggtaaaacagcggcggtaaacggaggacagtcggtgggcaccctcggggactggcacaccaaccgagaactgtcacgcgcggggtgcacacaaacaccaaagagagcacaaccagaa

SEQ ID NO: 85672 - DNA, 1189 bp, Homo sapiens
gcgagtcctggaaagcgttgttggcccggttgctctggagccgggtctcgggtctggtggctgccggccctgcggcatctcgccatggggagcacggagagcagcgagggccgcagggtgtccttcggagtggacgaggaggagcgggtccgggtgctgcagggtgtccggctgtctgaaaacgtggtgaaccgcatgaaggagcccagctctccaccccctgctcccacatcttctacctttggccttcaagatggcaacttgagagcccctcacaaagaatccacactgcccaggtcggggagcagtggtggccagcagccctcagggatgaaggagggtgtcaagaggtatgaacaggagcatgctgctatccaggataagctcttccaggtggcaaagagggaaagagaggctgccaccaagcactccaaggcatccctgcccacgggcgaaggcagcatcagccatgaggagcagaagtcagtccggctggccagggagctggagagcagagaggcagagctaagacgccgtgacaccttctacaaggagcagctggagcgtattgagaggaagaatgctgagatgtataaactgtcttcagagcaattccatgaggcagcctcaaagatggagagcacaataaagccccgcagggtggagcccgtctgctcagggttgcaggcccagattctccactgctaccgagatcgcccgcatgaggtgctgctgtgctcggacctggtcaaggcataccagcgctgcgtgagcgccgcccacaagggctgaggagcagacatcattccctgccctggcagtgacttggagccctgaagaagggaccaatcatgggaccacagccactgtgccctgccgtttcctgctgggcccctgcatatgcccctgagcctggggctgccacgtgtttaggaaacaaagtatgcgctactgtctgaaaacaaataaagcagatgcctttgttttcaaacaacacaaaatcaaacacaacaaaagagggggggcagattcccgggggcagtagcgccccgtttggaaaggccacaggaggggtaaaacagcggcggtaaacggaggacagtcggtgggcaccctcggggactggcacaccaaccgagaactgtcacgcgcggggtgcacacaaacaccaaagagagcacaaccagaa

SEQ ID NO: 85673 - DNA, 1301 bp, Homo sapiens
gcgagtcctggaaagcgttgttggcccggttgctctggagccgggtctcgggtctggtggctgccggccctgcggcatctcgccatggggagcacggagagcagcgagggccgcagggtgtccttcggagtggacgaggaggagcgggtccgggtgctgcagggtgtccggctgtctgaaaacgtggtgaaccgcatgaaggagcccagctctccaccccctgctcccacatcttctacctttggccttcaagatggcaacttgagagcccctcacaaagaatccacactgcccaggtcggggagcagtggtggccagcagccctcagggatgaaggagggtgtcaagaggtatgaacaggagcatgctgctatccaggataagctcttccaggtggcaaagagggaaagagaggctgccaccaagcactccaaggcatccctgcccacgggcgaaggcagcatcagccatgaggagcagaagtcagtccggctggccagggagctggagagcagagaggcagagctaagacgccgtgacaccttctacaaggagcagctggagcgtattgagaggaagaatgctgagatgtataaactgtcttcagagcaattccatgaggcagcctcaaagatggagagcacaataaaggtccaatacttatgaactcaaggaataccaaatggaggaagaaataccccatgacagatgggtttacttgtgagcacgaatcacctgctgtctccggccacctgggatgctcagccagtgcctttggaaacatttctgccttgaatgtcagggccacactgcgttactgagcatgttctgaccgggccgtcttgggcatcacctgccattctcctgccatcctctcaacagctctgtggggtggggtcctcccccatacctgatgcaccgaccacacagtggaaagtgacaaagccagcgccttgccccaggccccgcagggtggagcccgtctgctcagggttgcaggcccagattctccactgctaccgagatcgcccgcatgaggtgctgctgtgctcggacctggtcaaggcataccagcgctgcgtgagcgccgcccacaagggctgaggagcagacatcattccctgccctggcagtgacttggagccctgaagaagggaccaatcatgggaccacagccactgtgccctgccgtttcctgctgggcccctgcatatgcccctgagcctggggctgccacgtgtttaggaaacaaagtatgcgctactgtctgaaaacaaataaagcagatgcctttgttttca

SEQ ID NO: 85674 - DNA, 895 bp, Homo sapiens
gcgagtcctggaaagcgttgttggcccggttgctctggagccgggtctcgggtctggtggctgccggccctgcggcatctcgccatggggagcacggagagcagcgagggccgcagggtgtccttcggagtggacgaggaggagcgggtccgggtgctgcagggtgtccggctgtctgaaaacgtggtgaaccgcatgaaggagcccagctctccaccccctgctcccacatcttctacctttggccttcaagatggcaacttgagagcccctcacaaagaatccacactgcccaggtcggggagcagtggtggccagcagccctcagggatgaaggagggtgtcaagaggtatgaacaggagcatgctgctatccaggataagctcttccaggtggcaaagagggaaagagaggctgccaccaagcactccaaggcatccctgcccacgggcgaaggcagcatcagccatgaggagcagaagtcagtccggctggccagggagctggagagcagagaggcagagctaagacgccgtgacaccttctacaaggagcagctggagcgtattgagaggaagaatgctgagatgtataaactgtcttcagagcaattccatgaggcagccgagatcgcccgcatgaggtgctgctgtgctcggacctggtcaaggcataccagcgctgcgtgagcgccgcccacaagggctgaggagcagacatcattccctgccctggcagtgacttggagccctgaagaagggaccaatcatgggaccacagccactgtgccctgccgtttccgcatatgcccctgagcctggggctgccacgtgtttaggaaacaaagtatgcgctactgtctgaaaacaaataaagcagatgcctttgttttca

SEQ ID NO: 85675 - DNA, 1262 bp, Homo sapiens
gcgagtcctggaaagcgttgttggcccggttgctctggagccgggtctcgggtctggtggctgccggccctgcggcatctcgccatggggagcacggagagcagcgagggccgcagggtgtccttcggagtggacgaggaggagcgggtccgggtgctgcagggtgtccggctgtctgaaaacgtggtgaaccgcatgaaggagcccagctctccaccccctgctcccacatcttctacctttggccttcaagatggcaacttgagagcccctcacaaagaatccacactgcccaggtcggggagcagtggtggccagcagccctcagggatgaaggagggtgtcaagaggtatgaacaggagcatgctgctatccaggataagctcttccaggtggcaaagagggaaagagaggctgccaccaagcactccaaggcatccctgcccacgggcgaaggcagcatcagccatgaggagcagaagtcagtccggctggccagggagctggagagcagagaggcagagctaagacgccgtgacaccttctacaaggagcagctggagcgtattgagaggaagaatgctgagatgtataaactgtcttcagagcaattccatgaggcagcctcaaagatggagagcacaataaagcacaaacaggcaacacttcataacccagtggcggccctggacccaggaggtttgtgcagtcatggacagctacacaggcgcctgccatggacggaagggaaggctgcacagacacctgccatggacggaaaaagggaaggctgcaccaacaggtctgccgtggacggaagggaaggctgcacggactcctgctgtggacgaaagggaaggctgcccagaggtctgccgtggacggaagggaaggctgctgcgtggactgccgccgtggacggaagggaaggctgctgcccggactgccgccgtggacggaagggaaggctgctgcccggactgccgccgtggacggaagggaaggctgctgcgcggactgccgccgtggacggaagggaaggctgtacagagccttatcaccaatgggaaggaaaggctgcacggaggcttgcttggatagaagggaagggtgcagattgtcttggacatgaagggaaggctacacacagaattatcatggatggaaggaaagctgcacagaggaatgttaatgacgagaagggaagaatgcagagccttgccatagatgagaaggaaggatgcacagaagcttttttgat

SEQ ID NO: 85676 - DNA, 756 bp, Homo sapiens
acacagcagattacactgtataacctatatcacaacactcttaaagaaatctggataaaacataactctcccctaaaatcttagtacatagaagagcattgagagagagagaaagaaattaccaagtaagtgggaaaagaagactaaaatcaaagcctataccacaggagcccatggcaatatcagacctggatataagccctaggatctgggtgtttaatgccttcagagggataggacatgctgctttgaattcacacagtatggggaactggaactaagagctctgcataaagctggatatctaagggctacccaatatataaaaagggggacaaaagaaactctactagtccaggaggcatgctgtttctcatgcctctgggcagaaaaaaaaaaaggccttctgcaagaaacaaaaaccccaagcctgttctattagtgtatgtaaagtcatggtatttgaactccaagctgaaaaattgcataaaactggtattagatctatgaaactcctaattttcaaaaatagtgatccttccagaacccaagacctgtgacacacctcttaacaaatataaactcacagttaaaaaaacaaaataaaaattataaaccacacaaggaaacaaatcactatgaaaagagtcagctaatcaagtagaactgaatgttattttttaaatctgaaacaagttaaaaaggcataggaaccattaggaaataagacacaatgggggaaacatttttaaaaag

SEQ ID NO: 85677 - DNA, 388 bp, Homo sapiens
atgttttatttttgagcattttaaaattcagattcccttaaaatttcttaaaaacactaatttcatattatacggcttcccagtcctgaattacacattttactactatgtgaagctggatgcccttcagagaaattggcaaaggataatggcatgtaaaatactgttcatttctcatttcccaaccatgaatagtaatatccacattataaacataaaatatactcctcagacttcacatccacagaactggcttatctgcacagaaaatttcatgtttaatcaagaaggtctttaagctgaaaggagaccatgacatgctttaaaagactaaagaattttctggttctatcttcctacctttctttgcaaaaataattgggttctg

SEQ ID NO: 85678 - DNA, 189 bp, Homo sapiens
tgaccgaatgaagacatgaaggcccacacagcccctgtacaaccatcttctctggaggcgctgcgtctgggcacttttcctctatgtagctccctccccaaccattttcctctgtcatcagactaatcactttgaacaccagtgttccctcccctacaacacagtgtatttctggaaaagcatctttca

SEQ ID NO: 85679 - DNA, 455 bp, Homo sapiens
ctttatactttgtgtggtttgtttttagggaaaagtaattgatgtcgagagggttttccaaaacagaattttgtccctaataagcatttgattcttaagattctctgtattttgttacatttctggaatcttatacatatgagctattgacataaaatgagcacaattgtgtaactctttatgggagcaacagttataatgttttggcacatctcaaagatgtctagattatgtgactacatacagaagattaaatcaatgccaatcatttcctaaagtaaggcatttaacagtaagagaaatatttgtattgatttttttaggaataccatatttataataagttatacaaatttgattgtatgaatagctcaaattagagtaaaaattagccttgtagcctcactgcatttgaacttttaaatgcacttatgggaaggaggcaagatgaccaa

SEQ ID NO: 85680 - DNA, 647 bp, Homo sapiens
agttggaatcataccctatgtagcctttttaaattggcttccttcacttagtaatatgctttaaaggttcctccatgtcttttcatgcttgatagctcatatggactcattttaatactcatcataaacactgccaacattgcttcctggaatggaggctggagagaacttgggttctaaaattatcctgggtggcaatgcagcccatagtttcccgagcaagctatagacaagactgtgctgactattagaggggaatctgtggtcatgctggctccattcaaaacaatgattgtagaaaagggtcccctcaccctttctggatagatgccaggataatgcttcaggaagtgaaggccccaggctgagtatggtagctcacgcctgtaatcccagcacttcgggaggtcaacgcaggaggattgcttgagtccaggagtattttgaaaccagcctggacaccatagcaagaccccgtctctacaaaaaattaaaaaattagatgagcatggtggcacatgcctgtgttcccaactacttgggaggttaaggtgggaagatcacttgagcctgggaggttgaggctgcagtgagctgtgaccatgccaccacactcactctgggcaacagagggagactctgactca

SEQ ID NO: 85681 - DNA, 380 bp, Homo sapiens
tgagattacaggtataaaccactgcagtcagccacagcattattaaagtgtcagttctcccccaaattgatcaacgtgatttcaataaaaagccagcaggtttatttgtataaatacacaagctgatactagaattcatatgaaaggtaaagaacctacagtatccaagataattttgaagaaaaagaacaaagttggataattatactacctcatttcaagaattactataaagccattgttttgtctcgtatatgtttatagttttgcattttatagtaataaaacaatgtggtattggagtaggtatagattaactgaacataatagtgagtctagaagaaggcctacatatataaagttgattgattcttgatagt

SEQ ID NO: 85682 - DNA, 547 bp, Homo sapiens
tataaatggagatactaatggcacctaccctgtagaattcatgtgaggatggaaacatataatctatgcactatgcttagcagagtgtctgtacagaacacacactgttaaatggtaactgttattaccatgattagtttgcaaagcactttcacgtatagttgctgcaaactaatgtgcactattttgttgtcatttgccagatagatcattaacacattattgtttcacctcaatccctccttatatgttaaatctaaatgttattcaactacaaaattttaaaaatatctgagatctgacaagacaatgttgaggttcggtatgctcctataggcagaaaagtaagccacttcagtgtttttattcgtagctggcagcaccacttgaggagcccagactcatagttaagactcttctgatcctaggcaaagtctccactgagaaactactgatgatgtagcattggactaggccttcaaaaagaaagctgggggaagggaaataggggagtggatgaggtgaagtaggacactgcaaaaaaaaa

SEQ ID NO: 85683 - DNA, 295 bp, Homo sapiens
ttcgtgttagaaaataatctaaagccagggaaagaatcatccaaaaaggattaaagagagtagtacccagcactcatgtaaggccaggaacattgcttgttcccaccagccagactggaaaacctcaaaattcacatggcattggtaagaacactcagaagggtcttgcctcagaagtggagaataatttggcatagacaatgcaacactctggtcccacctaacaaactttaaaagcaaaacccaaaggattaaacagtttccaagtaacataactgcatccaaaaacaaagct

SEQ ID NO: 85684 - DNA, 878 bp, Homo sapiens
gcgccctttgccgctctggatccagctagaggcttgtcattgttcccacatggctaagtgctcgggttcgtcctaattgagctgaacactagtcactgggttccacagttctcttccatgacccacggcttctaatagagctatagcactcaccacagggcccaaggttccattccttggaatccgtgaggccaagaaccccaggtcagagaacaaaagtcttgccgccatcttgggagcagcccaccccatcttgggagtggcctgccaccatcttgggagctctaagaacaaagacctgctggtaacagctggataagcccaactgctttgtagctgcctgtgtgtggcaaacaactaacactccttaggcctcaattttttaatttataaaatgaaagcagtaaatatcacatcatataagttgttgagtatttatgagaattaaaaggaataatcgccataaaaggcctgatactggcaataatatatttgacaaatatgagtttctctttttccctttattctactttacggcaactcctacctcctattctctttcttttgctactaagcagacatctgggtttgtttgtttgtttcatcagggagaggttctaaacgttgtatcctttaaccctcaaagcatcatctattctcttagagggtaaagggcagagatgttatccctgttggtttctaaccttggagaaggtcagaaatgtcacgagctctctatagatcctcttatcagcttctcttacacaatcctttggttctgtgtgtggtgaaaactggattgggggaaaatcagatcagtagaaaccaaatgttgaagcaactggtgaatagagaaatacagattgcgtatccctaca

SEQ ID NO: 85685 - DNA, 499 bp, Homo sapiens
aataatcatgaactcagagcttacctgagctggtaaatacaggcaccatccatatcacaacgctgcctaaaaattgtatttatattgcatgcaaatatttgacaactccatcacaaacaataaaagatcggggagagaaaagccatttagcctgataaagtacatctcaatttagctagcagatcagtacccacaggaataatctggaaggcatgttccctaccccctccaccttctgttatttgcatttctagcagtgatcactgaagcatcaggatttgtggggattcacaagtaacatcatgatgggaggaggcagccctgcctccgatgatgagctgaaaatagctgaagatggtaaaaccaagagcaaagcaacccggctcatagccgaaatttcatctcctcctcagcctctcacagagaagccaggaagagtctgattggcttgcaatcgggtaaacaaaaataaacacataaatgaataaagtcactgatc

SEQ ID NO: 85686 - DNA, 1977 bp, Homo sapiens
  misc_feature (18)..(18): n is a, c, g, or t
  misc_feature (73)..(73): n is a, c, g, or t
  misc_feature (298)..(298): n is a, c, g, or t
taacatttgaggaaaaanctaaaggaagagtaggagcaagccatgcagctatctagggaaagagcgtaccagnaaagaacgtctaagggtgaagagccagagggaggcatacacttaacatctgaagaacagagcagaaaggccagcatggatgaagtgagtgagcaggggaagagtaagagatgaagtctgaggtttgatctaaggagctgagatctggaaagtcattgtaatgacactgagttttactttgcatgaggtaggaagctattagaaggtttggagcagaagagtgctncataatgtgaatcagtctggccgcgatgttgaaactaacatcacagttgttagttggggaggggaggttgtaggcaaaggcagaagcaggaagctctgttagaaaactgtggcaataatcttctaggtaaaaggtagtggtgattcaaagcaagatggtagcattggagaggatgagatatggtcagatgaggatatattttaaaagttgagctaacaggatttgctgaggaatcagaagtgaaccaaagactacaaagtttttgatctgaacaattcaaagcatgaagtttttatttactgtaatgaaagtgaaccagaccataggagaggctattgaagtgtgtggagggcggagagggggttcagatagagaggggataacaagaaatgtttgagatgcctgttaggcaccagaatagacataaaaagggagccggcaatacaacctggagttgagatgagagttttggagtcatcagcatataggtgggatttaaagtcatgagaaaggctgagaggtgagatctcaataggagcacaagtagatgaaaaagagaagctgtccaagaattggaccttgggtaccccactgttgagacgctggagtgctagcgaagaaccagcagaggaagttgaggaggcagccaacagaataggaaggtagctaagaaagggtgttgtcccagaagtcaagggaagtgttttaagagaagtgtgtcttcatctgtgtcaaatgctgttgataggttaaattagctcaagacagagaactggctactggtgggcttgacaagaggcctgaaatgctttggtttgcattcctttatctttcatacacaacttacctaaagtaggaatacgcttcaaatgtatatatttgggaataagttcctcactcctcaagtctacggtagggtttgatgtcatcagggcaaaacaaaaatgcaattagagtatttttagtgtgctatatgaaaggccaaattggcagcctctcttttctcaaggtcagtatcaacatgcataaatcatgttgacagtatgtctatgtgcccttgacatgatgtgatgaaaatggcacgttaccaaaacctattacctcaatctaatcatgagaaagacatcagaaagattccaatagagatacattctgtgaaatacctgatcagtactcatccaaactgtcaaagccatcaaaaacaaggaaagtctgaaaaactatcacagccaacaggagcctaggagacatgatgactaaaatgtactttgacctcctggatggggtcctggaacaaaaataacattaggtaaaaaccaagaggccctgaatgaactatagattttagttaaaataatgtgttaatattggttcattcattgtaacaaatgtatcatactaatgtaagatgttaataatagggaaactgggtacaaattatatgtgaactctgtactatcttctcaatttttctgtgaatccaaaactattctaaaaataaagtctattaataaaagtattaggcaaagtatttcagagaacatttatccaatgaaaatatacaggtggctaattcatattaagcatgaaaaatgctcaaattcatttgttattagggaaatgcaaattaaaaccacaatgagacatcagtctgtgcccagcaggattgctgtaacaat

SEQ ID NO: 85687 - DNA, 709 bp, Homo sapiens
tctccagcaagatctttgagctgtggtttctccacctgtggaatataaatgttaacaacataaccttctttctaaggataacttgagaattaacagtgcaagtaaatggaaagtatagtacctgtcaccagatatttaatagtagttattacgaaattgtaactcactacctgtgttagttgaggtttatcttcagccatgcaaatcaaaatcagattattttcacatcagcagataaggtttgtctgagaatcttatttttaatttgatactcttatttttaacttgatgccattgtgtgaaatcaccattacttagtaaacgtttgctattttcactttaaataactaaataatatttcattttatgggtgtattataatttattcagttctctattgttcaatatttacattgtttccagtttttttctgttacaaacactatttaatttttgtagtgataaatttgcatatgccatgattattttgtcctggaagtggaataacttgattaaaatgttaccaaagtccttagacttctgcattattatcaaatggctctccaaaaaacattctaatttatattcccattcacatcactggatagtttttctattgaagcttttatattcagatttgaaaaacactgattgaggctattttagaaattatcttaaagagcattcttttcaaagtaccaaagaattt

SEQ ID NO: 85688 - DNA, 484 bp, Homo sapiens
ggctgcagtgggtttgtctcgtgtacctctacatccaatgcccacggcaagaacaaccagaaaagctggacacactttttgaaggttttctggaggtgacaaggcaatctagcctcaaagggccaatgtcctgggcagatgtggcgttcacaggccactggaaacttgacacctttctacccctcagggcactgctggtggccgatgagcagagagctcatcttggagcttggaggctgagagcttctgaaaacacacagggtggggagataaaatctggaattcaaggaccactgggaggaagggcctgggaaactcccagacattcagtggggacctgaaaagggagcatggactttgccaggagtgggacaaacggaagctggatcagctgcccaaaggtctgaggcggacttcatgcagtccctccccggagtgcgttcagatgaaccacccctgctcttcccacaaaaataaatcctct

SEQ ID NO: 85689 - DNA, 1569 bp, Homo sapiens
aggtaggagaggaagacagctgcatcccattctgccccattccaccctgcgtggactttgagatccaggtgggcgccatgggaaaggtagcagggtgggtcagtgctgtctggaaagattagataaggaggaggaagggagctagatagaagtggggcaggtgactatcaaggagcctgactcaaaacctaccaccttggccaccatcagagcaccatgggagggggaatgacagactgggggaatgacagactggggaaatccccgagggaccctgaacaaccctccccccgcccccattcagctgtggatgagaaaactgtccctggggcatggaggagaaactgacccgcccaggtcacacaagttaatggaacagcaagttccagatcccaggtcttctggctcccagccccagacactggctgtgggtggaggattacccaggtgccaaggcaagagactgaaggcacaaactgtttcagtataataaaaaaaatagaataagaatagtcataatacaaattagatatagagatgatcatggacaattagcaatcactattaatctttagcttttaatattactctttgttgcattactaatataacctaggaataaccggtgggtatagggtcaggtgctgaagggacattgtgagaagtgacctggaaggcaagaggtgagccctctgtcacgcccacataagggccgcttgagggctccttggtcaagtggtaacgccagtgtctgggaatgcacccgttaattagcagaccgcgaaagggagtctcctttccttggaagagttggggaacactctgctccaccagcttcttgtggaaggctggatattatccaggcctgcgcgcagtcatccggaggcttaaacccttccctgtggtgctgtgcttcaatggtcccactccttgtccactttcatgctcctcccgtactcctggttcctctttgaagagcgcagtagatagcggtagaagaaatagtgaaagtcttaaagtcttcgatctttcttacaagtgcagagaagaaaacgctgacatatgctgccttccctctctgcttcggctacctaaaagggaagggccgcctatcctgtaatcacatgacttgcttcaccttgtcaatcacttagaagattcaccctccttaccctgcccccttgtcttgtatgcaataaatatcagtgaccccagccgttcagggccactactggtctccgcgtcttgatggtagtggtcaccccggcccaggtgttttttctttatctctttgtcttgtgcttttatttattacaatctctcatctccgcacatggggagaacacccactaagccccgtagggctagaccctacaactggccaccactccacagatgcaggccagccccaaggaggccactccaacagcaggcactgtcagaacactgggatgggctggtggtgggtgggaagcctggggggccctttctccagatagccaaagtcacacctactaggcggaatgttaagagagaaacccagattcactggttggggctcctggctca

SEQ ID NO: 85690 - DNA, 107 bp, Homo sapiens
caagtaaaacttagcctctagctcgcgtgagactgattggaattgcttcagtggacagtactaaaggtgttgcagaatctctaaagttagcatcgcggccagcatgc

SEQ ID NO: 85691 - DNA, 609 bp, Homo sapiens
cagggaggagacagtcatctacaggccaaggagaaaggcctggaacagagccccttacagccttcaagaggaaccgaccctgctgatgcagacttccagcctccagaactgtgagacaatgaatttctgttgtttaaaccacccagtgtgccatacttcgtcatggcagtcctagcaaactgatagagtgcactcaaaagcacagattcttttcatggactttccaaagcccagggacttctgtttcttctagctgtgttttgaaattgcgacatggcatgggtcatcaggatacgagttgttatctccttcccgtaagagcaattaaggtcaaagactgaagccagagctcttgggtttaagtcccattagctgtgtgacctctggccctaatggtgtctcttgtaaaatagaataataatacctgcttcttagattacttggaggaccaagtgaattaataacatgtaaaactcttggtgctcggcacataataagtgctcgacaatgaaacgttcattgccattgttggggggccagaaagcaaccactgcctgagagcaccccagacccatgaatcacacagcaagaaagaaagcccgcatggtc

SEQ ID NO: 85692 - DNA, 276 bp, Homo sapiens
  misc_feature (45)..(45): n is a, c, g, or t
  misc_feature (53)..(53): n is a, c, g, or t
  misc_feature (55)..(55): n is a, c, g, or t
ccgcacccactgacctgcgcccactgtctggcactccctagtganatgaaccngntacctcagatggaaatgcagaaatcacccgtcttctgcgtcgctcacggtgggagctgtagactggagctgttcctattcggccatcttggctcctccgcatttgtttttatggtggttttgtattgtttttatagagctgccctcacatgcttagcaacattagatgtctggagactggaaagtccaagatcatgtgcctgaggattcagtgtctggtaa

SEQ ID NO: 85693 - DNA, 273 bp, Homo sapiens
ttatattttatttttattccccagaaaacagtttccaatgttgaagaacaataattttatcaatataaataacctacctgcaggtgttttatatcatattcaatgacaaactatgaaatgtaacatttttgctttgacagcccatgaaatccatcatctattttcatagatccttcattcagaaaaagatttgattttcaggatttatggtccgatcagaaatatttgaattatagatttgcagcttttgaaatcaacatcaggatttactag

SEQ ID NO: 85694 - DNA, 364 bp, Homo sapiens
gtaatcaagaggaaagatattgtgaatctcttaaaaactcaaagcttactggattgatgttgatgtactcttactaaaatcttaactaagtctaggcaaggtggctcatgcctgtaattccagcactttgggaggctgaggcgggcagatcacttgagcccaggggttcaagaccatgggcagtgtggcgaaaccctgcctctacaaaaatgttttaaaaattagccaggcatgagagtatatgcctgtagtcttagccatgtgggaggctgaggtgagaggatcacttgagcctgggaggtccaggcagcagtaagccatgatcgtgccactgaactccagcctggacaacaacagagtgaga

SEQ ID NO: 85695 - DNA, 463 bp, Homo sapiens
acaagtatcaaagcttaaaattacactaagacttttggaattcttgtatttttataaagtgccctcttctcttttaaagtagttcttagcagggctgttatctacgttgatcacctaaaattattttccctacatgtggtaaaggaagaatatgatcagtgttaatttacatgtaacagattagaaggaattggaccctaatagtagcaggtgattaaacattttattatcccacctgttagcctggctacaggtattatatttcatgtcctgctgtttacaaaaaagaacttccataaaccttagaaatcttacttcctcaaaaattattgtttatggagtttagagcttggagatttaagtatttattgcagttttattttcaaatgataaatgctatctataatttatgtggtttttatttctcatgtttacattaaaataaaacctgataaactgtttt

SEQ ID NO: 85696 - DNA, 315 bp, Homo sapiens
ttcaacccttccttttctttttcctctttcatcacacctagtttatcttccatcttagcctaccttcatcttcttctgttacagagctcatgactcactcacttccacttaagatacccaacaatttcctagaactttttcctggcttccgcaaaaaatcatttggacctatgcaaaacttctgaacctctattatacttttttctttcacttgttttatagttttgttttgtttttttaataggtcccatgctgatttttttttctccgtgctcaattttgaacagggtgatagctattcagattcagtgtttg

SEQ ID NO: 85697 - DNA, 327 bp, Homo sapiens
ccagaaaaatattcctccatttgaactctaaactaaatacacattttattagcttccagcaaaagactatttagccaacaactgcaaaatatgagggagacaaaaaatgggaatcaaactcatgtttctatcttttatatctgccaaatacaattaaggtttgtcctgtggcttactgaggggaacaataaaatatcccttttgttgtatgtttagggacgtagtttaaaatagactaatatgagcaacagaaaaattcctatgtgttttcctccttttttcaaaacactgggctgccagaaaaataatccgtgttttgggcccaag

SEQ ID NO: 85698 - DNA, 240 bp, Homo sapiens
gatagaatagccagccttccacttgaatgcactgccatattgtcaagctgcattccttaagcatcacttcttagaggcctcaagcttctcgggaatgtttgatgacttaaaggggaaatgaacaggttgcaattatgcttgtcaaggttcttcttgtgaacctttatttggacaattcacacaaaaaaagaaagcagctcattttctaattcaggatattatttctttttaaaactggta

SEQ ID NO: 85699 - DNA, 730 bp, Homo sapiens
gtagaaggaggcagttatgtttatattgaaggtgaaatttttctttcatttagaatggaaaacatccccaaatgtatcattataaactagtcagccttgactacacaaaattgacctttaagttgcttgagaaaaacacaatgcaaatcgttcagaagggtcaacatcctttggtgctaaaatcttgtgtatgttttcagaatggctttttctgtatgttatagaataatcactaaaggaaaggtagttgaatttaaagtcatgaagcaagactctttaattcagttattttaaacaagaattaaaaccccaaacatccttggcaggctttgaagcacacagaattttctagtatttcttattaaatacaccaataataaacatatacttagtttacctgatgagtttagacataattctatataatgttcgcttatattcatttattaactagcaacacttgtgcaagaacaaggtattctgcttgaaaacactgatttttaagttcctgttgcccgattgtaaagaaaatcatctgacacagaagcctggattttgctctcctaacactggtgttttccttgagcctctaattcaaataaaacaaactgatacaccttacagccttattcatctgtgtctggataactcacttttcatctattgaataagaaaaagtgtttaaacttaataaaataaaaaattgtgcaccaattactacagatccttg

SEQ ID NO: 85700 - DNA, 853 bp, Homo sapiens
gagtctgcagacggccgtggctcctctgttcttcccgaggctacagcaacagccagaggtgttcctggggagatggcggaacagcacggagcacccgaacaggctgcagctggcaagagccatggagaccttgggggcagctacaaggtgatcttgtacgaactagagaacttccaaggcaaacgctgcgagctctcggccgagtgccccagcctgaccgacagcctgctggagaaggtgggctccatccaagtggagtccgggccgtggctggcatttgagtccagggccttccgcggggagcagtttgttctggagaagggggattatcctcgctgggatgcctggtccaacagccgtgatagtgacagccttctgtccctccggcctctgaatattgatagtccagatcacaagctgcatctgtttgagaacccagctttcagtggccgcaagatggagatagtggatgatgacgtgcccagcctgtgggctcatggcttccaggaccgtgtggcgagtgtccgtgccatcaacgggacgtgggttggctatgagttccccggctaccgtgggcgccagtacgtgtttgagcggggcgagtaccgccactggaatgagtgggacgccagccagccgcagctgcagtctgtgcgccgcatccgtgaccagaagtggcacaagcggggccgcttccccagcagctgaaaggcacccagacttcaaggacccagacccaccctggggggctgcaagggcaagaagaggaggctccagggttggggcgagggccgacctgtccacccttccctggaatctgctcaataaagcctggggttggtcccccacccgc

SEQ ID NO: 85701 - DNA, 1282 bp, Homo sapiens
gagtctgcagacggccgtggctcctctgttcttcccgaggctacagcaacagccagaggtgttcctggggagatggcggaacagcacggagcacccgaacaggctgcagctggcaagagccatggagaccttgggggcagctacaaggtgatcttgtacgaactagagaacttccaaggcaaacgctgcgagctctcggccgagtgccccagcctgaccgacagcctgctggagaaggtgggctccatccaagtggagtccgggccgtggctggcatttgagtccagggccttccgcggggagcagtttgttctggagaagggggattatcctcgctgggatgcctggtccaacagccgtgatagtgacagccttctgtccctccggcctctgaatattgatagtccagatcacaagctgcatctgtttgagaacccagctttcagtggccgcaagatggagatagtggatgatgacgtgcccagcctgtgggctcatggcttccaggaccgtgtggcgagtgtccgtgccatcaacgggacgtgggttggctatgagttccccggctaccgtgggcgccagtacgtgtttgagcggggcgagtaccgccactggaatgagtgggacgccagccagccgcagctgcagtctgtgcgccgcatccgtgaccagaagtggcacaagcggggccgcttccccagcagctgaaaggcacccagacttcaaggacccagacccaccctggggggctgcaagggcaagaagaggaggctccagggttggggcgagggccgacctgtccacccttccctggaatctgctcaataaagcctggggttggtcccccacccgcaaaaaaaaaaaaaaaaaaaaaaaaaaaaaaggggggggggcttaaaattttccctggggggccccagttttgggtttacccggtttttttgtacaagggtgggcccccatatatagggggcggcgagtattatattaagcgataggagcatggggccggtcggttttaacaaaccggttggtagctgtggagaaaacctgtgttaatgtgggggagacttttgggacaagagacccttaatttcgtgggggtgggcgtctatattggggacaaatttcccttacaggaaggtttaaacggcttaagggggaacttttaacattttcaaagggtggtttactgggtggtaaaaataggggggatatggtggcgcgtagaagttgggcgaagggggtattgctttgggaaattttttcccgggcggtttga

SEQ ID NO: 85702 - DNA, 413 bp, Homo sapiens
tggatgagtcaaatctaaggtcttcgaaccttatgttaggggttggaggtcttggtgtgaggaaggaagactttaaaattaaagactgttaagtccgtgtggctttttcttactttggattcatttatcctgtactccatgtagctcgcatggttagagagatctgaggcctactcctatttgagaggatgttatcccccatagccagaaaccagggtggcttccaaaagaaaagggtagcattcggtgactctgctttaggccttgaggatgaatcttttctttgtttttgtcttcctgtgtccttttgcatcatcagagatctggagactaagctttgagcatgggcttggggaagaggggccaaagaggcagcttggctggcattaagtgttgaaggccgtagaccagac

SEQ ID NO: 85703 - DNA, 693 bp, Homo sapiens
gctattatgataggcacaattttagtgaaagatgaagactagaaaccctggcagctacatgtaggggtaaaatgtatcagccctctagaagttaagtagaagacattttatagaaaatcatatcttttgaaatttgtttttccatagtaatgtataatcttattctaccattggcccaaaaaataagcaaataataataataatccaacataagaaaataagggatagttggatttggggataggatatcaaaagaccttgatttcctggattaaaatatgaatttttctttctatattccaagtgtagagaagaagaaaggcaaacaaattcccagacagagattgatatggtttgactgtgttcccacccaaagtctgatcttgaattgtagtaattcccatgtgtcaaggacaggaccaggtggagtaattgaataataggggcaatttcccctatactgttctcataatagtgagtgagttctcataagatctgttgattttctaatggactttctcctttgcttggctctcattctctttcttgccaccaagtaaagaaggacatgtttgcttcccattctaccatgattgtaagtttcctgaagcctgccaagcattgctgaactgtgaaacctctttcctttataaattacccagtttggggtatgtctttatgagcagtatgaga

SEQ ID NO: 85704 - DNA, 327 bp, Homo sapiens
tctactagagaatagaaccaacacagagggaaacacagctgagtggggaaagagaggcggataacatcgtttgaatttctagatcccacaatgcctcaagtctatccctgtacctttacctttcagtgatattagccaataaattccacttattaagccagtttgagttatgcagattacagtccttctacagcatttcactgcccttaaaaccacacagaactaagctcacttaaaaaaaaatctaaagtgcaaaaaattgacttttttcactttcagtatattctttttactaactaaagtatttattacaaatttctttgggtt

SEQ ID NO: 85705 - DNA, 375 bp, Homo sapiens
gtatattttatagagatggggcttcgccatgttgcccaggctggtctcaaactcctggactcaaacgattagcccgtcttcacctcccagagtgctgggattacaggcatgagccaccatgcccagcccaggagcacatctaaaaatgctctgtgctctggctcaggaaggaatgcatgtagccaagtgggggccaaagggtgggggcaaagctgcccattaagtaccttggaggtgaaggccaggtcagcagtggggatgtgggtaccctaattgtggacattagccacagatgctcctgtcatctgtgcagtggctaagatcttacgcagagtgcaccctaggagctgtgctggggatgccatcacccccctg

SEQ ID NO: 85706 - DNA, 392 bp, Homo sapiens
tgataaggttctggttcctctgagacctggatggactctttgcaaagagtgctgggagattcttctgggggcagtggttctcaaatacaaacgtgcagaagcaacatccaggcagcttgtttctgtgttgacacctcagattcccctctgaagaatctgttgagaaggtgtgggcatggcacaagaatggggatgtttaacaggcaccccagtgatcatgatggaagtctgtgggttatattctgagaaacagtatcctccatttctttgtttgtttttaacttcagcccctttgagtgggtgtctggttcttagaatcaaaaagtattaatcaaggcagtgcatattaccaaggtttgggaagtaaaggcaagccattagacaaagtgata

SEQ ID NO: 85707 - DNA, 545 bp, Homo sapiens
cttgcctagagtgtgtaaattaactttatcactatgctccttataaattgattttttttcccttcaaaaattgttttgttcccaattctgcacaaacccctgggattgttcagtgttgcagacacacctttgacagtctttgaagtttgacttttaaaattcttaggaacagcatagtaagttacttttaatattgatccttttaaggtagtagaaacttaaatgcaaatttggtaaaaattgcttttccagaaccaaattctgcatttcttctttccagtttaaagattaaacatgcaaagcgttttgaccagccaggaagcactgctgttgtcttttgttttgccaagtttgatccttagtaagctgggtagcttcaggtgtgggtgtccactgccaaattcaaacttccagacacctctttgagaacactatggaccttagggccaacttgaaacaagacagatgccttgagactgaaataggttctatagattctcattcctgtatagttactaaggtgagcccactaagggaagggcaat

SEQ ID NO: 85708 - DNA, 662 bp, Homo sapiens
ttgtgccaaatatttttcccacattgaggcaaaaggttcttccatatctcttgtcagttagttaggcatagctacttgtggtaatggacgggagtacataatctctcaggtgagggaactctcaagtggctaaaggcaattctttagagaagacagcagctggccaggtgcagtggctcacgcctgtagttccagcactttgggaggccaaggagagtggatcacttgaggtcaggagtttgaggccagcctgcccaacatggtgaaactctatctctactgaaaaaatacaaaaattagccagtcatggtggcaggcacctgtaatcccagctactcaggaggctgaggcagaattgcttgaacccaggaggcggaggttgcaaggagccatgatcacaccactggactccagcctgggctacagagactccatctcaaaaaacaaaaaacaaaaacaaaaacaaaaacaaacaaaaaaaaacagaagaccgcagctatgggtggtttgcagccaatacttataggaggaactaggggttgggtgcactggcccagtaaaggagatctgggcagggcacaaacagcatctgctactgtgatattttcttaatactaatctacaggtttgtattcctgtatatagactcttcttaggagaaa

SEQ ID NO: 85709 - DNA, 453 bp, Homo sapiens
tttggtcagctcacctcccctgatcctagatgcagataccgctcagtttcaaagcacttttccccctacacgagttctgggggaagatcattttaagtgaccagctcctctcaccttctcagctcacatggtcaggcagtagagatatcatttcaaccaccagatttgttaggtttttgttagacgtcagttggcagagctgaactaaatactttttctactttcctcccacttttcctttcctgtcttgtgacttgccttgccacagtggattagaaattctcttcgtggaatacagcttggcaggcgattgctggaaaagcagatagagaagaccactggtttcggcccccgctcgctgcccagagtgcagctgacctgatgggggggctaggcaggggcaggttttataaatgcacttctgggaggcgatggccagatgggaggcgggct

SEQ ID NO: 85710 - DNA, 389 bp, Homo sapiens
caatgagatcacttcaaaattccaggcctcaagcagtcctcctgccttggactcccaaataagcaaatactttctaatgactttgatagaacaacattaaattaagaaaaagttaactaaaatattaagtatcaccagaaatggtaactaggtaggtaaatatataagaatttttaacattaaagtcagtgaaatagaaaacagaaaaaatagaatcaataaaaccaaaagctggttctttgagatgataaaaaaaatggataacttctagaaaagcttatcagaaaaaaaagatagaagaaatgaaggcccaatatcaagaaggagagaggtgacattactacaaatgctacaaatgttaaaagcaaaacaggagaatactatgaata

SEQ ID NO: 85711 - DNA, 692 bp, Homo sapiens
ttgtatctggtgaatcagtattactacctgaacaaagagcatgctggctcttaaaaaaaaaaaaaaacaaactcatgatacctaacgtattaagcaagtactttatctttatctgccagattctggcatgcacacacatctgcaacccctgcataacactgatcttaaacttgaaaaaacccagggctcagtttaatacactaaggcacaggaacatcaaactagttttagtataccgtatataatactttgggaaagaggaggaaagctaaaggggacaatcctactcaactccagaagattaacttccttgacagttgcaagcactgtgttgtcagatcttccacattttcaagaggactctgaaacccagatttttatttggaattgcatgactcttcagtgctgcctcaattaaaaatgaaacagctggctgatagattccacagttggctgctagattcctccgtgaaagtataatcacgtgtgaatgttttgtattaatattatacacaaactaatagcaaaatgagttttgaggtaaaggtacagattcccaggatacaggaagtaaacaaggatataaaaagagtaacaggtcgggcatggtggttcacacttgtaatcccagcattttgggattataggcatgagccgacgtgcccggccttaaaaaatcacttaaaatcttt

SEQ ID NO: 85712 - DNA, 692 bp, Homo sapiens
ctgaggctctgaccccttgtagccgctggccctcccttgacccctttggatgagtgagggggctcagctggaccctatgaccttgcttcacattgggtaagccttctgacctgaggccttcctgtggtttcagctgagagaggctagtgacatagagagccgaggcaaatcctggatctgtgcctgcctcaagagctccctcctttgtgggagttgcatttgggggagcagcatagttctcaggggctccacctaggcaggcgctagactgatggaggaggcagttgaaggaggaggtagttttcttgtggtccctttgtctatttagccaatgatacgataggagagggtcaggtggggagctgagacattccgaagtgaaaagtcaggattggctttttcttctagagcatggagttttccaaggatctgtcactagtgtgccgtctgaacagacatcgctgctgacacctaaaacctcttctaagaaacactccaattattcagataattgcttgtgcctaagactgtataacctaagagtcgggtgcaggcttgataaagaattggaagccctctgcaaaactgctacaggtgttctgtgttccgacgccctccatcaccttggacaggggttcttcttccggcccagtctctcccatttcctcttttctccctccatctcctcccat

SEQ ID NO: 85713 - DNA, 294 bp, Homo sapiens
acaaaatttttttttttaaattcactgggcatggtcatgcacctctgtagtcccagctattctggaagctgagaggattgcttgagcccaggaggtggaaaccgtagtgggccatgatagcgccactgtactctagcctggcaaaacagcaagactgtctcaaaaaatagtaataataatgcagagggatcctttgtacccttgacctagtttcctccagtggtaacatcttgctaaagtacaatatcataattttgacattgatataagccatctatcttgttcagacctccc

SEQ ID NO: 85714 - DNA, 1102 bp, Homo sapiens
tttaaatacctatcttatatcaatgcaatatttacaattagcaagcaaaaaatttatctagaatgaaaagataaatatggtagcaaaggacttaagttagtactttaactggtgtgccacaagtaaatgattacattctgagaagcttgctcatttttaactacttgtacatcagtagaaaataaggattaagtcaaaaagaggataggaagtaatactagaatacctgatattataaattattaagagttctgactattagaaggtattactgccatgtactaccatttaaagtgaagagattttggaagaaaaacaaaaactataatcaacagaaaaactctgaaagaaattttaagatgaacaaccttcaagaagttaaaggcggctgcagtggaccgtgggcagccagggtcggtgaagaatcccaacatggctgggcgaaaacttgctctaaaaaccactgactgagtagcttttgcagagatcataccccagaaccaaaaggccattgctagtttcctgaaatcctggaatgagaccctcacctccaggttggctgctttacctgagaatccaccggttatcgactgggcttactacaaggccaacgtggccaaggccggtttggtggatgactttaagaagtttaatgccctgaaggttcccgtgccagaggataaatatactgcgcaggtggatgccgaagaaaaagatgtgaaatcttgtgctgagtgggtgtctctctcaaaggccaggattgtagaatatgagaaacagatggagaagatgaagaacttaattccatttgatcagatgaccactgaggacttgaacgaagctttcccagaaaccaaattagacgagaaaaagtatccttattggcctcaccaactaatcgagaatttataaaattgagtccaggaggaagttctggcccttgtattacacattctggacattaaaaataataattatacagtagaccaatagcaccataattttaggcacagtaaattagccaatatctctcattgctaactcagtttcatttaacttcttgtgttgcctttaacaactttttttttaatatcattctcgc

SEQ ID NO: 85715 - DNA, 469 bp, Homo sapiens
ttaacagaatgttttgaagatttgtccttattgtagtacttttcaagatttccttatttttaaggctgaatgctatcccagtgattgtacgtgccttgtttgctgaatctactcatccttaagggtacatttgcttccaggtaacatgtttgtgagtaatactacaatgtgcatatatctattccatgttctgctttgtctgtttgggatatttttcatacactgattcagtaccatgtgtattcccttgcttttgttgtctcatccgttgatgctacgtcccccaaattattgccacgaccagttgtaatgaagcttcacccttctgtattgtgctaggaattttacagttataggttttacattatagtcttcattcattttttaaaattgacacatgtaattgtgcatattttggggaaacaattatatatatgttttgtataacaataaaaatcagtacttctat

SEQ ID NO: 85716 - DNA, 525 bp, Homo sapiens
agtctcacacctcactcttcaagctgggaaaatgatgctgttaccttgggaggtgagaccctccagatgggaacctcgacgctgggagctggtgtgttcccggaattcgggggaatatttcattccctgcgtatggtgtctggactttcagatccctcctcccaggcacccaggcatcatttcacaaccccatgctcagcaagccccagagaaaactcctcaataaactacgagtgttaatacccgatgcaataagatgtgattaaattttacacaagggaggggtgcaggtacttcagaatcataaaaacagcttttccacaaaactgtcagcattagacacaaatatgagagcaaaggggcgctcgggcttactcacattgctcagtttgtttacactaagtccgcacaacatgaaaacacctgctccactttcacaatcagtcttctccattgtgcacaggaaagttatagtttggagaaggtttttgtatttcaataatgccacccattttgtggtgttta

SEQ ID NO: 85717 - DNA, 197 bp, Homo sapiens
atttccatgaagctctcctgattcattgtacttatgccaacaatttttctggaccaaaatagtagagacctatagagtccagtggctgcgaacaggtaaacactcgggactcttaccaatgttcctcacaaagtttcaacttaaaactaaatgattcccctctacctcagtcattactgtacatgttattgataaca

SEQ ID NO: 85718 - DNA, 331 bp, Homo sapiens
gggaatctcagcccctgcacatccttctgtcattctttgctcctgctatttcttctcccttactaaactcacttgtctcagactgctaatggacaaatgccatagccagttgatcactctggccaccagcctccattgtactgacccagttttcacctctgactttcttgggtatctgttgccatccagccccatctagagttccatactttcatttccttctggtcacctactctcaatgctgctagtcctttgtttagccaaccataatgatgtagtctaccacctctttgagagtgtagtatgcatcaagcactgtgctaagtgtttt

SEQ ID NO: 85719 - DNA, 407 bp, Homo sapiens
agctgaaaagaatcttaatgcaaaagaattcttaactggaaaactggaaacaagcaatagtaaggaactggtgaattatgccacatccaagaagcataacatatactcatttaaaaagatagaaaacctaggccgggcacagtggctcacacctgtaatcccaacactttgggagacccaggagggtggaacacttgaggtcaggagttcgagaccagcctggccaacatggtgaaaccctgtctctactaaaaatacaaaagttagccatggtggtgcgcacctgtagtcccagctactcaggaggctgaggcagaaaaatggcatgaacccgggaggcggagcttgcagtgagccaagatcacgccactgcactccagcagaacgagactccatctcaaaaaaaa

SEQ ID NO: 85720 - DNA, 403 bp, Homo sapiens
ttccttgacattattccttaaacaatacagtataaaagtatatacatattaagtaacctagaaatggtttaaagtatacaagagaatgtgtgtaggttatatgcaaatactatgccattttatatgagggacttgagcatctgtgacttttggtgtccacaggtgagcctggagccaatccctcacagatactgagagacaactataatcataaaactgtaattttaaaaggtagtacaacactcgaggttaaaagcctaaatctaagccagactgaatttcaggctcctcatcccctcacatattagctatgtagccttgtgcaaattatttaatttttaatgccttagtttcctcatctatgtaacagaaccaataatcatttctacctcatagggtaact

SEQ ID NO: 85721 - DNA, 410 bp, Homo sapiens
aagaaagagaccagaaagaggtgtctcaccttttttattcctctacaaagtatgtctggatgtggcatctgaaacttctctaattagtaccttatgatcatgagaacagccagcctgagggcaaagccctcattgaggctggaagagcacagagattatggtaggcagaattatagcccccactagagatatccatgtcctaggctctgtaatctgaagatgtgttactttacgtggccagagactttgcagatgtgctaaggaagggtatggccttgagatggagagagagttttggattctctgatgggcccagtgtaaccaccagagttcttaaatgtggaagagggagcaagagagtcagtgttagagtgatgtgatgtgagagactcgagcagtcattgctggct

SEQ ID NO: 85722 - DNA, 359 bp, Homo sapiens
ttggcattaataatatgaccaggaataaatttatttaagaaatgtagatgaagtatcgatattatcatgttatagggatcaggtaagagttatcaccaaattctgcccctgtcatttgacccttttgtttaagaattcctgagggcactgtacacactacagatgttatcagaaaaagttacgttttaatgggtgacttcagtagcacaataacaatagcaggtatttcaaaaagtctgacatgcatcatgcagtttaggtttgccatattatccagcctcagatacttcctctacattttggcataggcctatctgaatgatgttcaggctactattcagagaaagagtggcctaggc

SEQ ID NO: 85723 - DNA, 689 bp, Homo sapiens
tgactgtttgcatccttgacatctctggccttggtcccacacgcagcctgaggctgtggcgagacactaggccaggactcagaagttcttggggctggtcccagtttcacaaattttgtcagatcacaccccctgtctgggcctgatttccttgatttgcaaatgggtgcctccgtgtctgtgctgctcagctctcattttgctgtgatgctcaaagaccatgcagcttggtgcttagcacagtgacccagaggctctaggaggcccgggctccagtcccagccctgccacttcctagctgggggaccttgggcaagctgcttaacttctctgggccttggtttccccatccatacagagggtgacaggagtacctgggatgaccttaatgcataatgatgcttttaaccccgagactggtagtatgtacttgatgaagtggcagcttttactatttgccactagaaatgaatgggggctgagcacaatggctcaggcctgcaatctcagcactttgggaggctgaggcaggaggattgcttgagcccaggagttcaagaccagcctaggcaatatggtgaaacctcatctcaaaaaaaaagaaaaaaagaaaaataaaaagaaaagaagcaataggaaagtcttttgtaaactgaaaaatgtcacaaatataattggtgctgcttcta

SEQ ID NO: 85724 - DNA, 846 bp, Homo sapiens
gctggggaccaggcggagatccgtactgtggtggcactcatgcacctgttgttggtagtgaacttctggctgccattcagtcagcagctgttaactactaaggtgccaggacaaaatgaaatgcaaccaagaagtcatgccccatcacaaagtgcaatttgaggaaaacaagaaggcagatgttttgccattgagccagaattaagttttcttctaggactatcaaggactatgtggatctgacaggcacttctgctcagctctcctctagagactcctagaacatcatcgtttcctgatttctttgctggctgcttttataaccaaactccaaacatcaaaattatcatcttagtcctgggtgttctgtcctaatgtgttaactgcaaaaatgacctcaattcttaggaacttctgccatcagtagctggagtctattgggtttcaagtctgggcctcaagaggcattgcaaactttcatcctctcttttgagatttcagcaccatcaccaaatgaacaagtcccaggtagcctgctggaggatgtacaaccatgtggaacgccgatgagccatcacagctgagttgttttggacctgctagctctaaaccaatgtcgcagctgtctgtagaagcacgaatgagatatggccaagctccattgagcctggcccagataagcagaactgtttcacggagcccaggacaaattgccaaaccccagtattgtgtattcaataatttctagttgttctaagccactaagtttcagggtgacttgttaagtggttataactacctaataagtacattttgtatttcctttttattatcatctaccatagc

SEQ ID NO: 85725 - DNA, 680 bp, Homo sapiens
ctcaggcttccggtctgtttggtgccctggtcgcgtgtcttccgaactctgctgcttcgccccggcaagagcacttccttccgcggctgctaaaactggtgcgcgggttcccaacttcgcagaagcagcttcatcggccccccgctagagacctcagaccgcagccatcgacgcctcgcctcggggatctgtccccaccctcggggccagctcaccatgagtcaggccctgtgctaggtgctgggatgaagcagtgactgacacaggcctggacctgtccttgtgaagagtgcgtctgtgacacagatactgtgccatgtggcaaaacttgaatggagacatcagctctttgtgggtctcaagtctactggctttcaatcagctcttctgcttgacagctgcaggtcttgggactgcccagcccccataaccctgtgagtgcattcctgataataaccctctttctcttgtcctcccccaccccacatcattggttctgtttctctggagaaccataatacatcatttactaatcaggaaatagattcagagacattaataactcatccaacctcacagttaactgtagagttgggcttgaaattccaaggtcgattttcttagccaatacaccatgctacatatatgtatgtaaaaataaaaacgcttgtgaactgaaa

SEQ ID NO: 85726 - DNA, 1529 bp, Homo sapiens
ctcaggcttccggtctgtttggtgccctggtcgcgtgtcttccgaactctgctgcttcgccccggcaagagcacttccttccgcggctgctaaaactggtgcgcgggttcccaacttcgcagaagcagcttcatcggccccccgctagagacctcagaccgcagccatcgacgcctcgcctcggggatctgtccccaccctcggggccaggtcagggaccagagacctgcgacgctctccttaggggtttagttcccaggctttctgaccccagtaattccaaacgcttccctttgtttccacagccctagcgtagcgaggtgctccctgcagtttttgcttctgagatagagttctcttttcagctccttcggtagtcacttcgtacatagtgattcatgatgcgaaatcctctctgttgaaataactgacgaggcctctgtcttctgactggaccctgacttccatgccctttccactctcactccagtacatgcccaaaccccaatctttgttgctccaggcattgcctctgtggcgctgtgtcccctcctttgaactctgatccttctgctcaggccctttctcccagtctgaagtaaggagtgaaaaaatgtgaattgttctactcatctggaaaagagaaccctgaggcaggaacaagtcgttaattgcatgtgcgtttgtccacagctcaccatgagtcaggccctgtgctaggtgctgggatgaagcagtgactgacacaggcctggacctgtccttgtgaagagtgcgtctgtgacacagatactgtgccatgtggcaaagtaagcgcgtgggacagcagagccttgtttgccattaaagtaatatcacaagtctgttaaggttggagaatcaagtgaacatgctgaaaagttatggggaatgtagtctcatagctgggggagctgggggccttgtcaattggttcccccagtctggagagcaatctgagagtaagtagtgacactgtgtgtgctgagtgtgtctgtgggggtgtttttggataaaattaacatttgaatttgtgaactgagtgaagcagagtgcccttcataatgtgggtgggcctcattcaattagttcaaggcccgcataggaaccacctcctgcctgactgaaccgggacctacgtcttttcttgccttcagacttgaatggagacatcagctctttgtgggtctcaagtctactggctttcaatcagctcttctgcttgacagctgcaggtcttgggactgcccagcccccataaccctgtgagtgcattcctgataataaccctctttctcttgtcctcccccaccccacatcattggttctgtttctctggagaaccataatacatcatttactaatcaggaaatagattcagagacattaataactcatccaacctcacagttaactgtagagttgggcttgaaattccaaggtcgattttcttagccaatacaccatgctacatatatgtatgtaaaaataaaaacgcttgtgaactgaaa

SEQ ID NO: 85727 - DNA, 1374 bp, Homo sapiens
ctcaggcttccggtctgtttggtgccctggtcgcgtgtcttccgaactctgctgcttcgccccggcaagagcacttccttccgcggctgctaaaactggtgcgcgggttcccaacttcgcagaagcagcttcatcggccccccgctagagacctcagaccgcagccatcgacgcctcgcctcggggatctgtccccaccctcggggccagctccttcggtagtcacttcgtacatagtgattcatgatgcgaaatcctctctgttgaaataactgacgaggcctctgtcttctgactggaccctgacttccatgccctttccactctcactccagtacatgcccaaaccccaatctttgttgctccaggcattgcctctgtggcgctgtgtcccctcctttgaactctgatccttctgctcaggccctttctcccagtctgaagtaaggagtgaaaaaatgtgaattgttctactcatctggaaaagagaaccctgaggcaggaacaagtcgttaattgcatgtgcgtttgtccacagctcaccatgagtcaggccctgtgctaggtgctgggatgaagcagtgactgacacaggcctggacctgtccttgtgaagagtgcgtctgtgacacagatactgtgccatgtggcaaagtaagcgcgtgggacagcagagccttgtttgccattaaagtaatatcacaagtctgttaaggttggagaatcaagtgaacatgctgaaaagttatggggaatgtagtctcatagctgggggagctgggggccttgtcaattggttcccccagtctggagagcaatctgagagtaagtagtgacactgtgtgtgctgagtgtgtctgtgggggtgtttttggataaaattaacatttgaatttgtgaactgagtgaagcagagtgcccttcataatgtgggtgggcctcattcaattagttcaaggcccgcataggaaccacctcctgcctgactgaaccgggacctacgtcttttcttgccttcagacttgaatggagacatcagctctttgtgggtctcaagtctactggctttcaatcagctcttctgcttgacagctgcaggtcttgggactgcccagcccccataaccctgtgagtgcattcctgataataaccctctttctcttgtcctcccccaccccacatcattggttctgtttctctggagaaccataatacatcatttactaatcaggaaatagattcagagacattaataactcatccaacctcacagttaactgtagagttgggcttgaaattccaaggtcgattttcttagccaatacaccatgctacatatatgtatgtaaaaataaaaacgcttgtgaactgaaa

SEQ ID NO: 85728 - DNA, 1046 bp, Homo sapiens
ctcaggcttccggtctgtttggtgccctggtcgcgtgtcttccgaactctgctgcttcgccccggcaagagcacttccttccgcggctgctaaaactggtgcgcgggttcccaacttcgcagaagcagcttcatcggccccccgctagagacctcagaccgcagccatcgacgcctcgcctcggggatctgtccccaccctcggggccagctcaccatgagtcaggccctgtgctaggtgctgggatgaagcagtgactgacacaggcctggacctgtccttgtgaagagtgcgtctgtgacacagatactgtgccatgtggcaaagtaagcgcgtgggacagcagagccttgtttgccattaaagtaatatcacaagtctgttaaggttggagaatcaagtgaacatgctgaaaagttatggggaatgtagtctcatagctgggggagctgggggccttgtcaattggttcccccagtctggagagcaatctgagagtaagtagtgacactgtgtgtgctgagtgtgtctgtgggggtgtttttggataaaattaacatttgaatttgtgaactgagtgaagcagagtgcccttcataatgtgggtgggcctcattcaattagttcaaggcccgcataggaaccacctcctgcctgactgaaccgggacctacgtcttttcttgccttcagacttgaatggagacatcagctctttgtgggtctcaagtctactggctttcaatcagctcttctgcttgacagctgcaggtcttgggactgcccagcccccataaccctgtgagtgcattcctgataataaccctctttctcttgtcctcccccaccccacatcattggttctgtttctctggagaaccataatacatcatttactaatcaggaaatagattcagagacattaataactcatccaacctcacagttaactgtagagttgggcttgaaattccaaggtcgattttcttagccaatacaccatgctacatatatgtatgtaaaaataaaaacgcttgtgaactgaaa

SEQ ID NO: 85729 - DNA, 1434 bp, Homo sapiens
ctcaggcttccggtctgtttggtgccctggtcgcgtgtcttccgaactctgctgcttcgccccggcaagagcacttccttccgcggctgctaaaactggtgcgcgggttcccaacttcgcagaagcagcttcatcggccccccgctagagacctcagaccgcagccatcgacgcctcgcctcggggatctgtccccaccctcggggccaggtcagggaccagagacctgcgacgctctccttaggggtttagttcccaggctttctgaccccagtaattccaaacgcttccctttgtttccacagccctagcgtagcgaggtgctccctgcagtttttgcttctgagatagagttctcttttcagctccttcggtagtcacttcgtacatagtgattcatgatgcgaaatcctctctgttgaaataactgacgaggcctctgtcttctgactggaccctgacttccatgccctttccactctcactccagtacatgcccaaaccccaatctttgttgctccaggcattgcctctgtggcgctgtgtcccctcctttgaactctgatccttctgctcaggccctttctcccagtctgaactcaccatgagtcaggccctgtgctaggtgctgggatgaagcagtgactgacacaggcctggacctgtccttgtgaagagtgcgtctgtgacacagatactgtgccatgtggcaaagtaagcgcgtgggacagcagagccttgtttgccattaaagtaatatcacaagtctgttaaggttggagaatcaagtgaacatgctgaaaagttatggggaatgtagtctcatagctgggggagctgggggccttgtcaattggttcccccagtctggagagcaatctgagagtaagtagtgacactgtgtgtgctgagtgtgtctgtgggggtgtttttggataaaattaacatttgaatttgtgaactgagtgaagcagagtgcccttcataatgtgggtgggcctcattcaattagttcaaggcccgcataggaaccacctcctgcctgactgaaccgggacctacgtcttttcttgccttcagacttgaatggagacatcagctctttgtgggtctcaagtctactggctttcaatcagctcttctgcttgacagctgcaggtcttgggactgcccagcccccataaccctgtgagtgcattcctgataataaccctctttctcttgtcctcccccaccccacatcattggttctgtttctctggagaaccataatacatcatttactaatcaggaaatagattcagagacattaataactcatccaacctcacagttaactgtagagttgggcttgaaattccaaggtcgattttcttagccaatacaccatgctacatatatgtatgtaaaaataaaaacgcttgtgaactgaaa

SEQ ID NO: 85730 - DNA, 394 bp, Homo sapiens
tgggcttctgtgtaacacatcttgtcccagaaccttggtgatgtgtgtgaacttacagtatctctgtcctaaataaccccagcaagggagatccaacttcaactcttaaactttgtggtgatggctaagtctttaaatcatgttaattattgtttcagaggtttttggttatcaggaacagaaaactctcatgaaggaagaaaaggtttgtaggaggaacactggggagtgcacatagctgaccacccaggcctcaggaaggaagggagcagggcagtgctagagattctggtgagaaacccctgcctctccagggctctgccaccagataaactagcttcagggcactgccaccagatgagccatggtcagctttttcctggctttgttgtgt

SEQ ID NO: 85731 - DNA, 839 bp, Homo sapiens
cttgccgtcagccttttctttgacctcttctttctgttcatgtgtatttgctgtctcttagcccagacttcccgtgtcctttccaccgggcctttgagaggtcacagggtcttgatgctgtggtcttcatctgcaggtgtctgacttccagcaactgctggcctgtgccagggtgcaagctgagcactggagtggagttttcctgtggagaggagccatgcctagagtgggatgggccattgttcatcttctggcccctgttgtctgcatgtaacttaataccacaaccaggcataggggaaagattggaggaaagatgagtgagagcatcaacttctctcacaacctaggccagtgtgtggtgatgccaggcatgcccttccccagcatcaggtctccagagctgcagaagacgacggccgacttggatcacactcttgtgagtgtccccagtgttgcagaggcagggccatcaggcaccaaagggattctgccagcatagtgctcctggaccagtgatacacccggcaccctgtcctggacacgctgttggcctggatctgagccctggtggaggtcaaagccacctttggttctgccattgctgctgtgtggaagttcactcctgccttttcctttccctagagcctccaccaccccgagatcacatttctcactgccttttgtctgcccagtttcaccagaagtaggcctcttcctgacaggcagctgcaccactgcctggcgctgtgcccttcctttgctctgcccgctggagacggtgtttgtcatgggcctggtctgcagggatcctgctacaaaggtgaaacccaggagag

SEQ ID NO: 85732 - DNA, 451 bp, Homo sapiens
tgaggtttcactgatgagaaactaaagtgtagttagcataactacaaaaaattattggatgccacagatgtcaaagaacttggagatcaattagtctggtggttcctttcctttctgaatataagtatcaatttttaatttataaacaaaacagaattatacacaaacacagagctatgtggaccccacatattagtaattgttcttttttgcatctgttgactaagacaatgcctataaactactttgaattcactacgcttttaaatacatgtctattacagtaatctcaataacatctaaattaatttgtctcacagtgacaaatgtgtggcattggctgacgtatggatttgtgtattggacaataattccaagggcctttaaaaggcaataaaggcaaaaatctcacccatctccttcatgtcctcattgcagcacaaatgagggc

SEQ ID NO: 85733 - DNA, 742 bp, Homo sapiens
cgtggtggtgtgtgcgtgtagtcctagctactcaggaggctgaggcaggaggatcgcttgaacccaggaggcagaggttgcagtgagcagagatcgtgccactgcactccgcctaggcaacagagtgagactccatctcaaaaaaaaaaaaaattgtaatcacaaatgtcacacagacttataccctgctgtagtcacctaatcttacgagaagtcttttcccatgttgtatggtctatgttagttattctcataactgttcaacagtccccacagtgggtatgtggtcaggtaattagcccctgtgttattgaacaccagaggatttcaaggctttcactattactaataaagctatggtaaacatctctgtatgtatagcattattgtcattcaagcttctttctttagactagattctcctaaagcacagggatacgaggtgcatagctcttggtgtgtattgctgaagataatgataaaaatgtagtgtcattggctgtgtaggaaaaagccaatgtctttgcatttgcccacattgttagttttaaaaaatttttggactaatataagaagtagaaaaaatggttagtcattattttaatatattttttaactagttgggttaagtaaacgttttctcatagatttgtttattatttgcattttgtcttctgggaatcatttcttcacgtatctaaaaatatttttcttggcaattagtatgattacattagattaa

SEQ ID NO: 85734 - DNA, 476 bp, Homo sapiens
aattcggcactagggaagagagaatctgagaaaagcacagtgtttcccataaactgaagagaaagacatcaaagttctaggtagctgaaatttgcagggcaataccataagagggagctatttgtagaatagttctcaaattttgtgtaagcatcccctcatgtctttggctgactattaagttgcttatgcatagggtgaactccacaaggtctgacacaaacaactgccaggaaaagaacagctaattaggatgtaaaagggaaacaagtatgggagtatgtgcagggtaaggagacatttgcattttgaccagttggagaggagaggtcttgttgagcttgttaaacaaattcatgaagattccagtaaagataatttatatccagaagaaaagttgatcaatagaaacagaccccaaaatagagttaacagaaaaagacatttaaacagtgattataaatatgttcacgtat

SEQ ID NO: 85735 - DNA, 311 bp, Homo sapiens
ttttttttttaaagactcaaggtaatgaaaactatgagtagaatagtaaggtgtgacaggggacaaataagtagatataaaactatgctgcaatattctagttattaaagctgggaaatatgcaaatgtaagtagtgcttggaaccagagaaggttctatatttagctgttcttctgtagctaaatctgacaaattgaaaaatatcatattctctgctctaggtacattttatgtatattttgacagcatatcaaatatatgaaacattaggttaaataaattaaaatccagtggaataaactatatggga

SEQ ID NO: 85736 - DNA, 421 bp, Homo sapiens
gcatcccagcctctggctgctgtcactgcaagtgctctcatcccctgacccagcagggctttgggctgttgttactttgtcatggtcgttctagcagctttggaaacctcttcaggttaagagtcttgcataagtgagagtgggagcatggccctcagatatttggccacatccttactggtgtgttacagagacccaggaagaatgtagttgaacgaggacacatgcaggtgtcccgggccctgaacagcttctattcagagtttggcctttcgaaggctgtgccatctcaggtgtgcctgcagtgtgcagcaggtgtatgcagcttcctctttgcaggtttcttggtatttaatctcatcctttaatatcttctattaactcaaaggaaattctgttcttagtttgaagtctgagagag

SEQ ID NO: 85737 - DNA, 367 bp, Homo sapiens
tattattcataaccttattgataactggccataaatggcccataaatgtttgcttatactgtttaatatattatcctaaaaaaaatcactcaatttttaatagtttttttaatgtgttggctgacagtctatacattattttggattaaatgaagagaattaacctaaagaaatcaaaatctcaacagcaatgactgatttacctattataaaagttatccatgctttttgttgttttattcttaaatattctattaacttgctcattgtattatttgtactttatattgatgaggatcaataaatgttacttgacagtactgatgtacaatttaataaaattgatttatatattttcatctgcttt

SEQ ID NO: 85738 - DNA, 345 bp, Homo sapiens
acattttttctaggctcctttattttcatgccaattgtctggatactggaatttaaaaaaaacctcaatagatttccagcatctggttattgggcctcccctttcttaagctctaggattaaaatgttcttcacttgctattactaaaaattaattctcttaagttattttaaaaatgtttgaaggaaaatatagccctgcccttttaaggattaaaagccatttgtttcagcagaaaaaaaggttgtaaaaatcccatatgacaaaacctgtagtaaaaaagtgatcctacataagtctttgcaaaataaattctacccaacagagtagtttagaggacgaaat

SEQ ID NO: 85739 - DNA, 356 bp, Homo sapiens
caatcatttaaccctaagaaatagaagtattaggaagagaaaacatagtccttattttgagcagtgtgattgtagagacaaacatccaagagaaacagttgaaaaactattagaaatgacaaaaggtagttttgtttaatagttcaccatgaaaatctgtactatatagaaaatctgtatatagaatatagcattggccaattggaaatgtaatttgaaaatcccatttgcagcaaaacttggaactgtatactgtctaagaataaacaatgggaaaaatgcaaaatccttatgaggaaaatgatacattttaatggaggaaataaaatgcctgaataaacactgtgttcctgtct

SEQ ID NO: 85740 - DNA, 2231 bp, Homo sapiens
  misc_feature (114)..(114): n is a, c, g, or t
  misc_feature (258)..(258): n is a, c, g, or t
  misc_feature (276)..(276): n is a, c, g, or t
  misc_feature (694)..(694): n is a, c, g, or t
  misc_feature (707)..(707): n is a, c, g, or t
  misc_feature (1103)..(1103): n is a, c, g, or t
  misc_feature (1158)..(1158): n is a, c, g, or t
  misc_feature (1378)..(1378): n is a, c, g, or t
  misc_feature (2056)..(2056): n is a, c, g, or t
  misc_feature (2206)..(2206): n is a, c, g, or t
cgagctcgcgcgcccgcgggtggacacttgtgtatccaaagatttcggcacgaggagagagagagagagagagagagagagagagagagagagagagagagagagagagagagngataaattctgccaaattttcaaataattatccttaagctttcacaaagattttttaaaaaaataaagggcaggggatacttcctaacaccttctataagaccaatattaccctaatactaacaccagacaaagacaacagggnaaagaaaataacagaccnatatccattgtgaatatggatgtacaaatcttcaacaaaatactaacaaattgacttcagtagcatatgaaaatgattatctgagggatcttcaaaagttcatggaaaacacatatgagaagagaatgcatggatttcaattttttgcactaaaatgaacttgtactaacttataacatgtctgaacaagatctagattgaggcactaagaaagataaggcatcagtttgaaaacagcccatatcagagcgacatgaattttgttaaaattgaagcaagaacaaacatcacatttgtagtgaagcttgagttggagaatggtgaaatcactggtgctttacaaaaagtttatggggacaacgccccaaagaaatcagcaatggataactcattttaagaaaggatgagatgatattgnatatgaagcctanggtggcagaccatccacatccatttatgaggaaaaaattaatcttgtttgtgacctaattgaagaggatcaacgattaacagcagaaacaatagtcaatgccataaacatctcagttggttcagcttacccagttctgaccgaaaaattaaagttgtgcaaactttccacttgatgggtgccaaaaccattgtgcccagatcagctgcacaaaagagcagagctttcaaaggaaattttaaacaagcagagtcaagatcctgaagcatttctttaaaggattataacaggagatgacatatagttttaccagtatgatcctaaagacaaggcacaatcaaagcaatggataccaagaggtaaaaagtggtccatgccaggtgcagtggctcacgcntgtaatcccagcactttgggaggccgaggtgggtgggtcgcttgaggccaggagnttgagaccagtctgggcaacatggggaaaccccatctctactgaaaacacaaaaattagccaggtgtggtggcacatgcctgtagttccagctgctcaggaggctgaggcaggagaatctcttgaacccaggaggtggaggttgcagtgagccgagattgtgccactgcacaccagcctgggcaacagagtgtggctctgtctcaaaagacaaacaaacnaacaaacaaacaaaaaaagtggtccagtcaaagcaaaagtgaactggtcaagagcaaaggtcacagcaacagttttttgggatggtcaaagcatttacttgtttactttctggagggccaaagaatgatagcatctgcttattatgagagtgttttaagagagttagacaaagctttagcagaaaaataccaggaaagcttcaccagagagtctttctccaccatgacaatgctcctgcttattcctctcatcaaacaaggtcaattttgtgaaagttctgaagggaaatcattaggcatccatcttacagtcctgatttggctccttctgacttcttcctatatcttaatctttaaaaaatctgtaaaaggcaccaatttttcttcagttaataatgtaaaaaaatggcattgacgtcagatttccaggaccctcagttctctagggatgaactaagtggctagtatcatcacttacaaaagtgtcttgaattgatggagcttaatgttgagaaattagtttatattttatattttttaactccattttcacaaacatttgaagtctccttgtacatcactaccaagtggagtttattccagaaatgaaagattgatttgatatataaaaattaatcaatataatattaataggataaagggaaaaaaatcatcatntcaatagatacagaaaaagcatttgacaaaatccagtaccctttcatgatttaaaaacacaccagaccagaaaaagaaaggaaattcttcaatctcataaaggtcatctttgaaaaacccactgctaacattatacttaatggtgaaagnttgaaaatttctccctagtatcatg

SEQ ID NO: 85741 - DNA, 321 bp, Homo sapiens
gagcccacagatccaactccctaggccaaggctgcagcctggggcagagatgcagaggcctggaggagcctagggcacgcggcctgcgggctggctggggttcagagttcgtatgtgtgtggagtgactgggcaggtgttcagaaatgaaggctggcactgccaggtaaggcccttccctccctgatgtgagagccctggagccaccgcagaggcccagtcagatctctgttctaattctggcctggtgtggaggatgaggagagacggcccagaaaggaaggcagactgtgcagaccccatgtcttctggcccgcgaggc

SEQ ID NO: 85742 - DNA, 756 bp, Homo sapiens
atttttattatgacatttatttgtattacaaggaaccaatgttctaagggacaatctctgataaatgctgctgtgtggcaaataaatgctgcagttctgaaggtagaaagttgagcagtaactgtaacccgttttaagtgtacccaaggaaatgaataagagacacatctcaaaggttctttttgtttctttatagaatgaatattaagtacttttcatgagtttacccaagagtaataataattctagattttagccctgtgaggccaattaaagataattttgattattaatgtttccttctcattttttttttaaataacaaagcatcataaagaaatcccagtcaaaaaaaaatgctgctgcctggaaaacatagtgaaaccctgtctccatcaaaaaatattttaaaattagctaggtgtgggggcatgtgcctgtagtctcagctactcaggaggctgaggtggcaggatcacttgagcccaggaggcagaggttgcagtgagctgagatggtgccactgcattctagcctgaacaagagtgagaccctgtctcaaaacaaaaacgaaaaaaacaaaacaaaaaaccatgcttatacagaaatgggaaaatgctacaaagatattgccatagtactgaaagcacacagcataacaatcattaatgctttgaagcattttaaaaacagtaaggggaatgtcaacataaaaaagaacaactacgaaaaggtgagaaacgatcaagttatctc

SEQ ID NO: 85743 - DNA, 462 bp, Homo sapiens
gtgcactgtgagtacagcgtgtatgtgaacatgtgtgaatattgtgtatgtgtgagtacatgggtgtgtgagcatgtctgtgattacgtgtgagcacatgggtgtacgcgagcatgtgtgtatgtgattacatgtgtgacacatgggtgtgtgtgaacacacgtgtgtgattgtgtgtgtgagcacatggttgtgtatgcattcttcctccaaggtcatctccaagcctcacctctctgctcccactcccatcactcactctggcactctgatcagcatccagtggtaaaggtctaccctaaatagttatggatatggggtccttagtagtccaagttccagagaaaggaaagtgacagctgaggtgtcagggtaaaaagaaggaaaaaaaaatgccgggcatgtaactcacattttattctctctctctctttaagaatctggcagagagctcatcttcct

SEQ ID NO: 85744 - DNA, 693 bp, Homo sapiens
agaggctctgactccccacacagcaaaatctctgtatataacttttgactcctccaaaacttaactacgaatagccttttgttgaccagaagtcttactgataacataaacaattaatacatatttttcatgttatatgttttatatgctgtattcttacaataaaataagctagacaagtgcaaacattaagagaatcattgggaaagaaaatatatttactaagtgtaagtggattctcataaagatcttcatcattgtcttcatgctgaggaagaggagaggttggtgtggctgtctcgcagaggtggaaggggcagaagaggtggggagatagaatgggaggcaggataggcaggtacacttggtgtagcttttattgggggaaaaaaacacatgtgagtggacccatgcagttcaaacttgtgttgttcaagggtcaactgcagcttttcttgattctaaatttagatataatttaccaattcattcatttaacatttattgactgtctacaaagctccagagactcaggtaggctttagagataatagtggggagcaagaaacacataagctcttggggcttattttaaaaaagaataaagtaggtaaagagtgactgtgatgaataattcaaaactctaaagtttctttagttgatatgactgaatttaattttagacaatcacat

SEQ ID NO: 85745 - DNA, 330 bp, Homo sapiens
cctgggcaacaagaatgaaactctgtctcaaaaacaaacaacaacgacaaaaaacacaaagatgacaacaggctgaaactggagggaagagtgacgtggaggagactgttgggtgtgttccttaaaatgcccaacacagtgctcatgtttataatcccagcactctgggaggctgaggtgggaaaattgctcaaagccaggagttctaggccagcctctatgggcaacatagggagaccccatttctacaaaaataaataaataaataaataaaaattaaaaattaaccaggtatggtagtagtagttctagctacttgggaggctgagg

SEQ ID NO: 85746 - DNA, 697 bp, Homo sapiens
gagccactatgcctgccccagaacttcttttttattaaaaaaaaaaaaaaagttatattggcatattttgcacattatttaattcacctttttaaagtgtacaattctatatatttttaaaattttttgtccagatgggattttgccatgttgcccaggctggtcttgaactcctgggctgaagcaatcctcctgcctcggcctcccagacggttgggattacagatgtgagccactgtacccagtctggttcttttttatagtttctgattctctaccaaggtatcctatctttcattcattgtgacagtatcttcttttacattgagcgttgttatattagttgcttacgaatcttgcattctggttgggtgcagtaactcaggcctgtaatcctagcactttgggaggccgaagtgggaagatgtcttgagcccaggagtttgagaccagcctgggcagtctagagagaagaccccacctccacaaaaaataaaaaattaactgggtttggtggtgcatgcctgtggtcccagctactcaggacgctgaggtgggagaattgcttcaacctgggaggcagagattgcggtgacccaagatcgcgccattgcacttacagccggggcaacaaagagtgaaacctctgtctaaaaagaaagaaggaagagaaaaagaatgctgaaaacatcatgta

SEQ ID NO: 85747 - DNA, 119 bp, Homo sapiens
gcaatttcctgccatctctgactactcctcagtgcacctctcagaacctcatctcccccagatcacaagcactgacatacatttcagtcttctgtcacagcatcactcacatccagcag

SEQ ID NO: 85748 - DNA, 509 bp, Homo sapiens
aataatgagtatttcagtatcagtaaaaggtcctaaggaagaaaatgtagaagatatggctagaaaaataatgttctagtaaaataacatagtatttctatgtaaagaacatagtatttcaggcttagaaatttcaatttaatatggtagataggaggcaactataaaatcttctaaagcagagaagtaatataaccagctccaattcatattcatggaaaagtataaattcatcaggatgtacacagatttagctacaagaatattcattaagtaattgtgtacataccaatatcagaagcagtttatatgtttgacaaaagggaactggttaagtatgtagctttttaaaaaatgtatgctatttaataatgaaataacctaatgaaagtttaaaaaatggattataggccgggcgcagtggctcacccctgtaatcccagcactttgggaggccgaggtgggcggatcacgaggtcagaagatcaagaccatcctggctaacatag

SEQ ID NO: 85749 - DNA, 238 bp, Homo sapiens
tcttccatcatcatcatcatcgtgaaaatcccccagctaccccaccctctactcggctgccctctctccttccagtcttctggaacttactgcttaaatagtcagtttctgtcctgaccctcctaacccattgctggctgccttctgcttcttccaagccactggaagaaaatctcagtcatggttgaaccctcagtgtctagcgtagagcctggcccaaagcaggctgagtcagcac

SEQ ID NO: 85750 - DNA, 341 bp, Homo sapiens
gaaaaaaaacaacacacacacacacacgcaatagaaaacttgaaggcatcttccttttccaatcccagtaaacacacactactcacagcattggtgatttcaggtctttgtagattctctccccactttcccacctaggagggaaccacccacacttatggtagtctcctcatgccctgggaaggacctgaagaagcacttacttccctttccaaccactttctcatttttgcccagggaaagagcagtagcccatctggcccattggtccctgttttctggtgggtggtggtatcacctgttccacttccacatcttcttggagcacctgcatttggggg

SEQ ID NO: 85751 - DNA, 504 bp, Homo sapiens
tctataggctggaagactgcatcagggggaaagagtgaggaagacccaccccaccacctctgggagagctccagggctattcactaagcgaaaaagcaaacggcagaacaagacaccctagacaatcccatttacatgaacatacataaaaccaaactactaatgtttatgtgtacacaaacattttgtaaatggtgggcaagaaaggtctggcagaagcaaactcatcctgaaacagtgggtacctctggggaggaatcagaattgggatgtggggatggtggggaagtaaccaagaagcctgttactgcttatctctagcaaggatggctaagaacacagattctggaatgtgggttcaaatcccagcaccagccacgcgcggtggctcatgcctgtaatcccagcactctgggaggccgaggcaggtggattacttgaggtcaggagttagagaccagcctggccaacgtggtgaaaccccatctctactaaaaatacaaa

SEQ ID NO: 85752 - DNA, 111 bp, Homo sapiens
gatccatactttttgggctcaactcagggttaccaaaatagagtcaaactcaactcaggattacctaaatggagtcaaattttgtgtgtggttttgtaacatgattctttc

SEQ ID NO: 85753 - DNA, 516 bp, Homo sapiens
aaacacccatagcttccctgtctgtccatttcgtgagctcctcattaccttccatgactcacttttccatgtgacacggagcctccctggcttccactgctgatactgaccattcctttctttgttctctatgctgccgtggacacagagccaccatcgctgttaactgtactagagtctttactttttttttcttttgtgagcctaagccttcctcaagacaagaatctttgttttgtttaaaaaaagaatagccttaatgtttttttttctgattttaaagtgaacaccctattgtagaacatccatgtaagcaaaaagaaaaaaaataaaaatgatttgtaatttctccaagaaatgacctgtgttgacatttcagtgattatacttccaagtcttttactaaatgtgtacgtaaatagctttatttttgtgtgtgtaaaaatctgtagcctctgtaaacaagccaaatgtcatatacaccccacacaaaacaataaaagcaaaaatcaccag

SEQ ID NO: 85754 - DNA, 453 bp, Homo sapiens
ctccctgaagacaagaactacatttcatttatgactgggtctttaacacataccagaagtcccgaaatacatgattggcactatgtaaccatgggttaggcggggcacagtggctcatgcctgtaatcccaggactttgggagactaaggtgggcggattgcttgagttgagtttgagaccagcccgggcaacatggtgaaacctcatctctccaaaaattacaaaaattagccaggcatggtggtgtacatctgtagtcccagctactctcagaaggctgaggagggtggatcacttgaaccccggaggtagaggctgcagtaagccaagatcacaccactgcactcctgcctgggtgacagagtaagaccgtctcaaaagacaaaaacaaaaacaaaaaaaacaatgggttaaaccaacgaattaacctagtgccaggcgaaccaagctga

SEQ ID NO: 85755 - DNA, 847 bp, Homo sapiens
gaccatgtggtcgctctgaactctcttcatttcagccatctcacaggccattttcactacccttgaaacttcactttccacatatccagcttgaagagaaaagatttctaaaaggattccatgtgtatttaggccttctccaaccatctgccttatgaggttcacccatttccaaacaaaggttttaaatacggtgactgttcttggatttgcaagaatgtacaaccagcaggtccccttttgcagtaaagggcattatacttgaaggggcatactcattttttcctcaggtcagaggcagagggaagagttaacagtgatcaaatagagaccttcatgtgtctgttttttgtttttgtttttaagttcatttaagggtgatgacggagaaagaagggagtaaaaatgatgcgcgcacaaagaaatttttcccattgcttgccagattcattctttttaggctacccttactccagtccttacctacaccctaaagaactgtatttagctagcaagagaggcattctcaggatacgtgagcttccaggcatggactaacatgtggtttcaaatcaatagtgtattctaacagaaaagcgttacttaatcttaattctccattatgtgataaaataatctatagaaataggtatcactttggccagttctgtgcatgtagctgaaaaaaaaatgtgacacatttctgttgtatgatttgctatgattttggtttcctgagacatttgttccctacagtcttgaatatgaaattctgtgtaaataatatgactatgcatttttgctgaaaaacaaatgtatgaaataagaataaattatttgtaagcac

SEQ ID NO: 85756 - DNA, 359 bp, Homo sapiens
gttaaggatttaatgagatagtatacacaaaaaaacaacaaaaacatagaacataaaagtgatgctgttggtagcactgctgttatccatattggtgccttctaacagtctcagtaatcatggaaaaacacaatgagtttcaatgtaatggctttgtagatatgtctaaagtttttatattgagcatatttaaattatgatgattatataaccttatacattaattttatatatttataaaatattgctcaattaaattcatgcttagaagtatcttatttttttcttttaatatttagctttgcatgtatatgtaattcatttaattatagaaagcattatcctgtggcatcatatag

SEQ ID NO: 85757 - DNA, 2573 bp, Homo sapiens
tgaaggccttagaatccagaggggccgattaggcaacaccaggggataaacaattgaggtcacactgctcggcatgggcagaagcagctcttcaggagctgtccacacttcaggggtgctcagactgactgctcctaagaattctgctgcatatatttttagccccatctcctgccactgctgacagatattgtgacagtaagtagcagacaggactgtggcttcacctcctccgggcacctggctacagtgatgagtcagttcacctgatgacaaaccagggtctggccttgccaaagcacttaagttctcatgacctggaccgcactggaggccctggctaagtcaggatgtcgtagcctcttcttggttttgccccttggccttgaaattcttttttcttgaataactttaaaaaaatagagataaagtcttgctatgttgcccaggctggtcttgaatgcctgggctccagcaatctttttgcctcaacttcccaaagtattgagattacaggtgtgagctaccatgcccggccttgaaattctttcttcgctatgtctgcatgttttttgtgttctgtatttatttcttctccaaggaaacagcctacattttccatgtgtccatgtttctgaggccgtgggtgacagtgggaattgcactaatgggggcccagcaggcctgggggctggtcttagcgctagaccttgaacaaggcacttcacctgctggtctccaattttctcctctgtaaaatgaaagagttgaactaagtgatctcaaaagtttcaaccagcccgataattccttaattctttaaaaatttaactttatatatctttattattctttaacctcatctttgttacactaatattagtcactaatatttattgagtgtttactacctgacaggcacagtgccagtttacattttaattttcacatcatttctatgatgtgggtactcatttttttaaagctttatgaaggtataatttacgtactataaaattcacctgttttaagtgttcagttgaatgatttttaatttacatagtggtgcaaccatcaatgatgtgggtattcttaccccaatttaaaagataagaaggggcagtgttaagtaattgacccatgattccacagctagtaagagcgacagccaagactccaaacctggttgatgctcttaaccactgtgctatgccgcaggtaggcagacttcattactgccttatcctgaaaccctttgcacagtttctattactgatttctatgtagatttgaatataacaaatttaaatcatgtccttggtaacagaactgatcacagccaaaaaaaaattcaccaaatgggtttattctgtactccaatataggtgtcttcccaggtttatatccttggcttgagaaaagggttgtacaaatagatgattgcagagtttccacatccttccagatacctctgcctctaacagtcacactcttagtaagggaagttgtttgatttacttcttcccttaggttgattacaagtgaagtgcgccgtcttattcctttttcattgctggagcacaaattgaattgtgcccagaccgtatctttctcacatgaaacctggatctcacctatcccttccatgcctgattcccgtgtttgcatattttatttccacatttacctcttgtcagccctgacagagaatttggcaccccttcaagcttctcctaaacaatctatccacacaaacacccctgagcaatatggacttcactgaagatagtgtgtaagcaaaggagaagagttcacattgtgcatcctattagacattttgttctcagaagtaccttactggccaaaccaatgaaggttttcctcttgtcctcccctctcaaggctcagtcacctcaacttctttttgcctactagatatccaatccatcacctcgcctcccctggccctagctcaattaccctcttaaacccattcctgctcagcaaaacttcctctagttcaccattcattcatttgaacattaggaggcaatttagtgacctgttgtacctgaccatgttcttaagggggaggtctcacgtctcattcccagaaaagtctaccatatatagatacatattccccgccccgccccagatttctggtgaatgaaatcacttgtatcttattaggtacatatacgcaaatccttaacctcaattctctgtcctcttcatgtcttacccagatatctcaggaagatttctcttttccttctgtttgcctccctcttcgacttacttgggagtcagcatctgaccacagtcgtgactggtaatgatgatttgtgcaaatactatcaaggaaaggacatgaattgtcttaattttagacccattaaaaaaccgcacaggcctcaatcttaaaagtcctatctaaatacccagaaatacccttcagaatttttgaagctatgcccatgtacaaaattttcttccttccctaattttaatggtatactaacaccttaggtaaataaaatatttctttactattttattgataaaaaaaa

SEQ ID NO: 85758 - DNA, 644 bp, Homo sapiens
tgaaggccttagaatccagaggggccgattaggcaacaccaggggataaacaattgaggtcacactgctcggcatgggcagaagcagctcttcaggagctgtccacacttcaggggtgctcagactgactgctcctaagaattctgctgcatatatttttagccccatctcctgccactgctgacagatattgtgacagtaagtagcagacaggactgtggcttcacctcctccgggcacctggctacagtgatgagtcagttcacctgatgacaaaccagggtctggccttgccaaagcacttaagttctcatgacctggaccgcactggaggccctggctaagtcaggatgtcgtagcctcttcttggttttgccccttggccttgaaattcttttttcttgaataactttaaaaaaatagagataaagtcttgctatgttgcccaggctggtcttgaatgcctgggctccagcaatctttttgcctcaacttcccaaagtattgagattacaggtgtgagctaccatgcccggccttgaaattctttcttcgctatgtctgcatgttttttgtgttctgtatttatttcttctccaaggaaacagcctacattttccatggggaagaaataaaaaaaaaaa

SEQ ID NO: 85759 - DNA, 373 bp, Homo sapiens
gctctattaaacaataaaggtgagtgtttatgcttagatgttatgacaaacttcttatttgcagacctaagttttccaaattctgaaacataataaaagtttgttgtcacttgaaaacagacagtaggatttaagttttatctttctcccggatcacctgagatcaggagtttgagaccagcctggccaacatggcaaaaccccatctctactaaaaatacaaaaaatcagccgggtgtggtggcaggtgcccgtaatcccagccactcgggaggctgaggcaggagaattgcttaaacccgggaggaggaggttgcagcgacccgagatcgcaccactgcactccagcctggagaagagagagagactccat

SEQ ID NO: 85760 - DNA, 360 bp, Homo sapiens
  misc_feature (87)..(87): n is a, c, g, or t
  misc_feature (182)..(182): n is a, c, g, or t
atggcaggcctgatgaccatagtaaccagccttctgttccttggtgtctgtgcccaccacatcatccctacgggctctgtggtcatnccctctccctgctgcatgttctttgtttccaagagaattcctgagaaccgagtggtcagctaccagctgtccagcaggagcacatgcctcaaggnaggagtgatcttcaccaccaagaagggccagcagttctgtggcgaccccaagcaggagtgggtccagaggtacatgaagaacctggacgccaagcagaagaaggcttcccctagggccagggcagtggctgtcaagggccctgtccagagatatcctggcaaccaaaccacctgctaa

SEQ ID NO: 85761 - DNA, 420 bp, Homo sapiens
tagtagagatggggtttcaccatgttgaccaggctggtcccgaactcctgaccttgtgatccacctgccttggcctcccaaagtgctaggattacaggcatgagctaccatgccgggccagatcactttctttttatagtgaattcaaaacaatgaacactatagaaagtcatccttttcagataaagccaatgaagttttagaaattttcattaaaaatcattctacattgactgcatttttgatgtttgacttgtgaattgtttgaaaagcattgatatttataaaaagtcttaggaaaagtaaggcctgaagaccttccatagaatgagacgtagttgcatattttatgattaaactagcaataatgatgactaatcttcaaaccctgctatttgccattttatagatttgaaaact

SEQ ID NO: 85762 - DNA, 420 bp, Homo sapiens
gagcccctgccctccagaagctcacatcctcctactcatggcagacaaataaacgtgaattacactgcagggaggtaagtgtggcagcagatgtagtatgcagtgcagaggtggccatggttgcgagggcaaggagggcttcctagcatgggcgttatttgaccagaggtctggcggtggcttttgctagcagtgtgattgtgatctgagccagggacagatacctctgtgagccttggtttcctcatctgtaaagtggttaaagactgaataaagcaaaatatgtgcaaacagtctgtgaatggggaagtaacagatgttgctttctattatgttctctcctagccatgaatatcaattattacagaaatgaaaagggatcctgcacccaaattcaaatcaagcaagttcacctagagg

SEQ ID NO: 85763 - DNA, 369 bp, Homo sapiens
attctttggtggataaagtgcttaatgaatgcttcttatctctgtgaagtattttaaaagagactcatatacaaccaaaaaaaaagagtcttgaattgtattcacgctagtggaaaataagcttcatccttagccaggcttaggctacttaaggacattggagactcaaggggatgggatgtgctccacgcattccagcaatttgtaagatgctctgggagtattccaattgtgcctttatattgatgaagctgaccaaattatttaccatggcttttgtggaggctgtgcaattgtttatccatattttaaaaagtgctaattgaaatatgtttatctcatgatattgatataaagtaatataatatg

SEQ ID NO: 85764 - DNA, 423 bp, Homo sapiens
gattaggacgtcactcagcgacctgtgtcttcagccctgtcctttctattcctctgaccccgcctcctttctaaatgcagcgacctctgttcttcagccctatccctttctattcctctgaccccgactcctttctaaatgcagcgacctgtgttcttcagccctatccctttctattcctctgacccgcctcctttctaaatgcagcgacctgtgtacttcagtcctatccctttctattcctcttccatagcatattctgttccctcccctcgctctctctgaacagacatggaagagagtgaggggagggaacagaatatgctaaggaagaggaataagggcgtgtgggaggtttggggagcagcaccaagtacctgctagataggaggctagattgggcctcaggtgggaattggggtg

SEQ ID NO: 85765 - DNA, 464 bp, Homo sapiens
ttctctggcatggacctggaacgagagtttgatattggtagtggagtttgggcatgggctttctgaatattgtgatcataaataggtcttattaaaatgagttcttggctgggtgtggtggctcacgcctgtaaatcccagcactttgggaggccgaggcgggtggatcacttgaggtcaggagttcaagaccagcctggccaacatggtgaaaccccatctttactaaaaatacaaaaagtagtcaaggtggcacgtgcttataatcccagctacttaggagactgaggcacgagaatcacttgaacccagggggtggaggttgcagtgaaccgagattgtgccactgcactccagcctggatgagggggcaagactctgtctccaaaataaaagagttcttcatcttcatgacttttaatagggatcaaaaccaaaactatttctagccagtgtaactacag

SEQ ID NO: 85766 - DNA, 307 bp, Homo sapiens
tttttgtatttttggtataagacagggttttgccatgttgcccaggctggtctcgaactcctggattcaagcaattcctgcctcagcccctctagtagcggggattacaggtgcacgccaccatgcccggttaatttttgtatttttagtagagacggggcctcaccatgttggccaagctggtctcgaactcctgacctcaggtgatccacccacctctgcagtgggataattaaggaatcagagagaccgaggggttaaggtggaattatttaattatttaggtgcactgacccagtgggattca

SEQ ID NO: 85767 - DNA, 305 bp, Homo sapiens
gtaggtggacatgtgtttgggtctagcaagtacagagaaaacaggaatgctgcttaacatattgcaatgtgcagcacagcttctctcaacaacgacaacaaaaatcatccagcataaaatgtccataatgctgaggctgagaaaccctggattataattatgactgtattttacatagtgaggaagcacacaagaaactatctatataattaacatcaccaaattactttgtccgataagaaaaaaaaaatctaggccgggcgcggtggctcacgcctgtaatcccagcactttgggaggccgag

SEQ ID NO: 85768 - DNA, 507 bp, Homo sapiens
agggcccgtgggtctaggatctagacctctaggaggagcaacctggatggctattgctgatgtttgatggagtgctgtgaaactggttttgcaagcattggaaaactgcaactggtattgactattatttaatggaatgaactaccaccaaagaaaagaagcacaccctggggtgtttttgtcagcaggaacctcactaacagatacaggaaggagagtgtccattgctcttccagtcatgcagcccatttctccagtgcctcctattcgctgagccaaacggagccagctagcaaaggagaaatgtggtttgcagagtccttgctcagcatcctcaaacagactctagtagtatgggtttgaagctgagagacagtattctaataaccagcacaatatacaatatgttgggatgataagtagaatattgcttagtatgaatatgaataatctcattattctgctcaacttggtgaggaagctagaaagttttaaagcacagttctc

SEQ ID NO: 85769 - DNA, 172 bp, Homo sapiens
ctgtccctgccctgacagggtagaacatgaagttgccactgtcactcctctgctcccccaatatgagttcaggaggcgctgtctgcctctgcttttgcacccactcgcctgtccaggggagaccagatgggcaacataggaagacccggtctctacaaaaaataaattaaaa

SEQ ID NO: 85770 - DNA, 572 bp, Homo sapiens
caaagtgctagaagctctgagccgccacgcctggcccctgcaattctttaaaaaaaatgatggtagggtcccaggcccagataatctgacttcactgtgattaagccgggtggggacaggcatcagaggtttttctacttccccatgtgatgccactgtgcagccagcacgtagagcagctaggcgtgaggacccacacagaggatgctggaagcagctggttcatctgccaggagaatgcagtatcttgtgaccaagaagtgggcttctcccagggccacttctaaaccacctcatcagagagctcaggttcatatccgagggaagaaactgaagtgctttctcacacgcttccagcttgatgagaatcacagtagggagctttgcttttccaaacaggctttgtcacatgatcatggaagaaaggagatgcccacgtaagatcacagagacaaggtgaaaaacccgtagccccgaattggaattggaagcatcagtatgaattcatgctatatttttgtcttacaaagtaaagcaggtgtttgctagctctgtcaaccataaagtttaga

SEQ ID NO: 85771 - DNA, 1332 bp, Homo sapiens
  misc_feature (832)..(832): n is a, c, g, or t
agggcagttgttgggctcaccctattcctgtctctcagggatcactatcctgcattgcctgataaccagtgtcttgaaaactgtcctttcatatgttttaattttttgttttgttgtttttgttgttgttattgttgtgttgttgtgtcctgggagggtaaatcttagatattctcccatgcctttaaatatgttgtctccactgccaggaacagccagatcccttctcattggctaaattgtcctaactcagcatcactttttccaagaagtttcccctggcattcagcctcctctctcccacccagatgctagaatggcaccccttgccggttctcccctcatggtactctcaccccagtgtaactgaatgttttcttctctgtgatcaccattaaaccacaagagtcctgagggcagagtcctttgtgggaattcacttcactttgggaactgtgtacccaacatgtagagtttagagaaagatgcagctgtgttcaagattaagttgagaaagtaatcgcatccttatattaacaactattttggattcagtcattttgtacaagttaaaaatgtttaatgggaaaaaattaaaactgaatttaataaaaattgtatttctgaaaaagaagctacattttattttgtaaagaataaaaatggtcacttctggggaagtttacctcattaggaactcaaagttgctaagatgctgcttccgttgtctgtagaccttctggtccatataaccatttatgtgtagtcagtcttaaatggaaggcttagggacactttataagacaagatcctctaggtgctagtcacttcnttaaaaaaaaaaaaaaatgtaagggctgggcgccgtggctcacgcctgtaatcccagcacttgggaggccgaggcgggtgaatcactaggtcaggagtttgagaccagcctggccaacatgatgaaactctgtctctattaaaaatacaaaaattagctgggtgtgttggtgtacacctgtaatcctagctactcaggaggctgaggcaggagaattgcttgaatccaggaggcacaggttgcagtgagccaagatcacgacactgcactctagcctgggcaacagagtgagactccatcttaaaaaaaaaattttttttaaatgttggttggctctagcctagcatggtggctcacacctgtaatcccagcactttgggaggctgaggcgggcagatcacctgaggtcaggagttcgataccaacctggccaacatggtgaaactccgtctctgctaaaaatacaaaaattagctgggcatggtggtgggtgcctgtaa

SEQ ID NO: 85772 - DNA, 424 bp, Homo sapiens
gatgccttatttagtccatttggtgaggtaatgttttcttggatgtccttgatgcttgtagacatttgttgatacctgggcattaaagagttaggtatttattccagtcttcacagtataggcttgtttttagccatcctttttgagaggactttccaagaattcaaaagggattgagtgttgtgacctaagcctatggtcactgcagccatttcagcactagagagtgccctaagccccggaatgctgcaactcttacagactccttgatacacagctttggtagattttgggaaaataagggagaattccctgggttaccaggtaaaaagtctctcccacttccctctctttctggcaaaggaagtcagtctctgcaccaggctgcctggagttgggggagggataatgcggtcactctaat

SEQ ID NO: 85773 - DNA, 349 bp, Homo sapiens
acccaaggagcttttaaaaacacagatttctggtttgggaaccagagctttagagtctatccctcgctagactctggccaccccacaagataggtctatcttcagaccttcagataggtctaatttgttttagcagtttatttcctctgtatttttttgtcttctccgtagtctccaacttcagtgcacaaggctcataaactcataaagacttctacagccttgcctcgaactgtccttatatgcttctgagccccgtattctactcttcaatctcttctcttcgactcttgtttctgtcctgcttctccttttccctctgaggtatagagcctaaaattgatttcaa

SEQ ID NO: 85774 - DNA, 821 bp, Homo sapiens
gcgtggtggtgtgtacctgtagtctcagctacttgtaaggctgaggtgagagggactgcttgagctagggaggttgaggctgcagctgcagtgagctatgatcgtgtcactgctctccagcctgggtgacagagcaagactttgactcaaaaaaaaaacccgcaattctagcaagttgtttaaaacatttgaatcccttgtcttctcattgatttctcagaatttggtttattcttaccaaaaagttattgttatcaatgcaagtcacacttcagtgttccaaaagtctactttaaaagtaaatacatactctagttgtctctgaaagtatgtcatactttcatatcacttttggcccttagacacactcaattctttttattcctgaattacaatataaaattctcatttccttgtgcatctcttcttctaagaagtacaatcacaaatgatacaattccatggtattattgctcccttaaaatgctatcttctgcttttaactaactgctgttaacaattaagcatccttaacttttcaagaaaattgagtaataaatgtaatcagaaatcacatctttacatacataaaaaggactcttgccattactaagtgctttaaaacatggacacatgtctgtgtgtgtgtgtctgtgtgtgtgtatagattctatgtttctaccattactaccagtacataccatgacacagtagaatgcaaaatataaaactaaaacccagccatttttaacaggattggttggtatatttaatcctgcccacacattcatgaacctttatgcagaattttttctctcgtt

SEQ ID NO: 85775 - DNA, 736 bp, Homo sapiens
aaaaaaggatcctgatgggctgcggcagaggcctttcctgcagcgatggccaggctgcacgtacagacctggaagtctcatcatggtggtggtgtccaaagtgagggacaagctcatggaggatctggacacagagtaccccaggcctgtgagagtcgggggtcatagagggtcagaggtcaccaagatgaggaggggccagcaaggaacttccaagaccgggcacagtggctcgcgcctgtaatcccagcactttgggaggccaaggtgagaagatcgcttgagcccaggagtttgaggccattctgggcaacatagcaagacccagtctctactaaaaattaaaaaaattagccgtgtgtggtgttgctttcctgtagtcccagcttctccgggggctgaggtgggaggatcacttgagcctaggagtttgaggctgcagtgggcccgatcacaccactgcaccccagcctgggccacagagcaagaccctgtctcaaaagaaaaataaacttccagggagctccctgggccacatggggacactgaggcagggaagatgagggtctggttgggggtgcacggctaagtgggggacagtgaggaaagggcatcctgggaagtggagatgggcagggcaggcgaggcaggaagggtggctttgaagaggcccacggggagcctgaggtgtagcccagggactctgctgggggccttagtgcagagtggaggtccc

SEQ ID NO: 85776 - DNA, 712 bp, Homo sapiens
ccgttgcttggtcctagctggttaacctcacccttgcacaacaagcacgtcaatgggagcaggatcagctactttcttgtaggtgaattcccgtttttgaagtggggtttcggctccctaatctgcacttttttttttcctaccagtttggagaaacagctgggaagaactggatttgcaggtattgctggagccagagcgaagcccggccactgtcaccatgggctccagcctcgcctctctgggcctggtggtgagcggcttcagcaacaggtttccggtccccgcagagggtcccactctgaactcccgatttacagactgttctcgggccgtgatgaggattaagacaatgcaactaagagcactctgactacagaagcatgatttaaagctccacaaccctgcaataaccacgaagaaaaataaaaagcggctagtccgccaggcacggtggttcatgcctgtaatcctagcactttgggagcccgaggcaggcggatctcctgagcccaagagttcagtaacagcctgggtaacatagcaagactctgatctaacaacaaaaaaaaattagaccaggaacagtggctcacatctgtaatcccagcactttgggaggctgaggcaggagaatcgcttgaacccgggaggcggaggttgcgatgagccgagatcgcgccattgcactccagcctgggaaacaagagcg

SEQ ID NO: 85777 - DNA, 408 bp, Homo sapiens
ttgtcatgctgcttcctatcaactttatctatcataacctcacatcttcttctggtttttatttctcttctccagatcagtaaaaactcctttaagtgtacctcccagttcaaaattagtctgtactcctattatacatgtgctactacagcagtttgctaacatgcattataaaatattcaaaaatggaaattttagctatctgataatatatttaacatgttaattttttctcactaaaactaagacttggggaaacaatatgattgcatttcattttaaaagttaacttttttattactaaaacatttttggtaaaactacatgattaaatgttcttcatgcattttttattttcaattttatactttctgattcagtgattgaaaggtctgatatcatggtcag

SEQ ID NO: 85778 - DNA, 307 bp, Homo sapiens
ccacaaccccactgtaatcatgagaaaaatatcagacaaccctgatttgagggaaattctacagaatccctcatcttcaaaaagtatctaggttatgaaaaacaaagcaagactgagaaactaacatagccagggtggctgaggagacaagatgactaaatgcaatgtggggccgggcacagtggctcatgcctataatcccagcactctgggaggccgaggcgggtgggtcacctgaggtcgggagttcgagaccagcctggccaacatggggaaaccccatctctactaaaaatacaaaaattag

SEQ ID NO: 85779 - DNA, 157 bp, Homo sapiens
gaaataactataaatataggttaacatttattgaatgcctaccttgtgctaggtgctgtgctgagtatttgtattgacacatttaatctttgcaatgattctatgaaataaaggtattatttccattttacagatgaggaaactgaggaatagaggg

SEQ ID NO: 85780 - DNA, 203 bp, Homo sapiens
caggaagattgcttgagcccaggagttcacgaccagcctaggcaacataggagggggaccctgtctttaaaaaagaaaaaaagggagaggaaagaggagagagagagagaaagaggagagaagaaaaaggaagaaagaattggttaaattgttgccacattctaccagcctggctagtactcttcaagattgtcaaggtcatg

SEQ ID NO: 85781 - DNA, 302 bp, Homo sapiens
atgtttcttgatcttggtctcaataagatggtgaatcggtcattctcatcctcctgggagcaaatgagcagaatcccaagaaggcaataaagaaatcttaaacgcatgttaataaattcttaagttaagcacacaatgtgtgcgtgtacccacacatgccaattttgatagccagccagtatttataacagtatcattgactgaatgtcatcagcccataagcagatcctggaaagaacatatatagttgaattttatctaaataattacttgagagtatctttaaaaaatctaagcccctg

SEQ ID NO: 85782 - DNA, 496 bp, Homo sapiens
gttttggtgcagagtaggagctcaatactatttgaaagcataaatagatgaaaaatccaagatcacttaatatttgtttctgccaagctatgttctgacagttctagcatacataccagggaaacaatccttactaggcagcattcgacagcccataaaaatataaattatcttgaaaactcttaaactctaaagactgccttagaaaacaagtattatgtaggacttcttgcttggaaccagggtgatagcctgtgctttaagcatgctaccagtgaagagaaaatctcaaagacacataattcacttagacttttggtcttgatatcctaacatgtaaagtgcaagaggttagattaggtgatctttaagttcacagttctctagcaataattatgctactaactggtgatcaggatacaaatatgttttatacataattttactttacagagatgttaaggggcaagttttatagggcttcgaaaataacagc

SEQ ID NO: 85783 - DNA, 708 bp, Homo sapiens
cctggggaagtcccagtgatgtgctgggttcagagtcagtggaattggaggcgcaggccacctacggaggcaccagaggaacagcgaagggagcgcttgccatcactcctgcccttagccccaggcagcacaactcacagctctaggggagaatccatcctgcttgaggaggttgggggagagtaaagaggactttctattacaacttggataccagctcagccacagtatgatagggcactgggcagtcttgaggcctccattcccggccctagttcccaggtgacatttctaaacacaccttgggccagaagggaacccgatgccttgaagggaaggatccagtcctggcaagatgcatcattaaggagccgttggtccttgaataaatgtcagctgtagccagttagtacttgccatgggccttggttgagactcagaggcatgctagcttcaggtgtagcccagcgcattcccgcctttcttggccacagggaaagactccttatgcttgaggaaaggagaaggaagagtaaaggggacttttcctttactcaccagctcagccacagcgaagtggagcagcaaatggggaccctgagtccaggctttggctcctggacattatttttggacctgctatgggccagacgggagcccactaccctgaagggagagacccagacctggaagcattcaccacaagct

SEQ ID NO: 85784 - DNA, 376 bp, Homo sapiens
tgccgaccttactgctcttgacagagtctctacttgaacatagaaaatgacagaattacctttgaatccgggcttgtcagtcattcagtcaggtcttctccctaatcaccctcaattgtgaggatctgcgatgctatgaaaggcacgtgcctgttccaataattaccagtacatctgtttaatcacttaaacatttaaagcctgagttattcatatgttcatgtgactttataagcacatcggggacttctgaatatgaatttatgtcccatgtaaagaaccagtacactctctctacatgatgggacggggtgaccatcaaactgtggaaagtgggtacgttttgacgtgaaataagagtgatactatttcacta

SEQ ID NO: 85785 - DNA, 385 bp, Homo sapiens
gttcatgcctgtagtggtagctactcaggaagccaaggcagaaggatggcttgagccctggagttggagatcagcctaggcaacacagcaagaccccatctccaaagtaagactaaacaccacgcacacaacctctcctacctccctagcctccttctttgccactgccagatatgtcatcacaaaccctccctcggtctgacacagggcatggggaagagtagagactacagcagggtggaacagcccacacagtggccaagacgggaattggaggccaagggctgtgtctcccgctgggcaggccacttgctctactgtctttaagtggttaagtgactgggcaggggcaaatgggggattctgattagaaactggacaatgt

SEQ ID NO: 85786 - DNA, 199 bp, Homo sapiens
atatcctttagttaatgggcaaaatagcaatacaaataaaaggaaaatagatagttccatgacagacatttcatatatgtattcattaaaaacaaactttaggcatcttctacacacaataaattgtgctagatgcaatagcacagcaaatataaattggacatgggtattgactttaagaagctcagaactgtgggag

SEQ ID NO: 85787 - DNA, 490 bp, Homo sapiens
ttgatccagcatgttgggtcaaaatgatctagggaaaagtagcaggagtttaattcagagaggtcataggtaggagaaggagcaaatcattgtagtgccttattgcctgtgttaatgacttcgcattttatttggagacgggagttcttgggaggattttgagcagaggaatggcacgatccttcatttagtacatgttaagtgagcaggactctgtttatatatgtgatcacaaaaatataaaagatggggctcatgcctgtaatcccagcattttgggaggccgatgtgggaggattgtttgagcccaggagtttgagactagcctgggcaacatagagagacccttgtctcaaaaaaaaaattataggccagatgcagtggctcacacctgtaatcccggcgctttgggaggccgaggcaggtggatcacctgaagtcagaagttcgaggccagcctggccaaacgtggtgaaatcccatctctact

SEQ ID NO: 85788 - DNA, 467 bp, Homo sapiens
ctgagatcaagtgtgatcaagggagaccatgcagagcagacgcaacagccacgaagaagagggagcttgggaggcaggacgcagtcaccagtgcctctgaagaggggacttggctggaccttcaccctgaagaggagccattctcagtgactttggctctccacatggggagaatggcaagaacaaaagcctgagctgagggcgaggggggctgggtctgagtcaggacaccagccacctggccagagaaaggagttcatctgggatgagtgagattcgaggcaagagtcggagaatcaaacacaccaggcaggaacctggcaggggcagctgggagtcagggggtattaagaggccttgttttagaacatgaatatgttacctccaagctaactttaattcttagcatttaatgtgtcttttatgtgtaatttttttagcattcaaacttaaatcaacaattttaa

SEQ ID NO: 85789 - DNA, 322 bp, Homo sapiens
ccatttcaaaaggacacaggatcccactggccaataaatcaacagaaaaatagcacagtacattgaatatagaaagaattcatgattccatggtgatactgaaagaaggagagaaaaaggggaaactcttctttaaataaaaattttttaaaagctagctaattaccaggcatggggcatgcacctgttcatttcagctactcgaggctaaagaggcttgggtttggggtcctggcactttttcttactagccttctaattctgagaaagttaaattatctcccaaagtgctgggattacaggtgtgagccaccatgcccag

SEQ ID NO: 85790 - DNA, 747 bp, Homo sapiens
gattctcaggctaccctagttgcataggatactagcactcaccctgtaagtactgctttgtctgaatattgtggttaattttgtgccaacaagttacaggggttgcttgaggaaagctggcaagtccaaggtgctcatgaagctctgagagtgaagggaacaatttttctcttcttcagaggttggcttttctggccatgtgaagcaatgtttttaaagtacaatataaagagtacagtgttcagatcctgcagttaatcccaggactgacttcctgcagtttcagttgtgtgactgggacatgttcctaacttctctggccagagctgcttcatctgctcaccttccacatggtctagaggattctatgaagtactacgggcaaagcactttgtccctacaacactcttgcccattggagttagagtgtaattgggtccatatgtttatttctggcatggattaataattcacttttgacatttaatacaaatcaggcatcaattttttttgacactgccttatggtggttttgtgttattctttccattaggttttatgaggctcaggtgttagtaagcccacagagtggtgaatttatagaacatgaggcctggaaaggacttgacagatcaactagaatccaaccctcgcattttacacatggaaaaatagaagtaaatgggggtgaaatactttgcctagcagcacatagtgaatcagtaatagagagaagctaaaatataa

SEQ ID NO: 85791 - DNA, 436 bp, Homo sapiens
ctgtatagcctgtgttccatgggacaggatgggggctcagatgttcctcagagacaaggaatgaatctctgggatgaccactcccagattccctagctcaggacacacgttcaggcgcatctgccatacaaggtcattctcggggtaggcttaaggtattgctgtcagatgcatttgccatcagggagggagctgctctctcagagtcggatgacccacttatcccaatttgcttgggacttttctggtttcagcagtgacagtttccggtcccagaagccttagttccacctaacccagacagtggggtcagcctagctcagaggaggatgctggctggaaaccccaggcaggcagagctcagaagtctcaagataccaacaattgccacccagttttgagtacttacgtgccagatgctcaatcctcatgtctc

SEQ ID NO: 85792 - DNA, 455 bp, Homo sapiens
aactagccagtattgagggctcctgggttatggaaatgaaaccagggctgggaaaagatattccctgtcctgtatcacttccaatgaagagaaacaagaattttagcaaattgaacattgctgcagtgcctagaacaatgcctggcatgtagtagatgttgaataaatacttgtttaatgaacaactttatattcttcaattatctcatcctagggactgataagttttctcattctatcagagaaaataaaggttatgagggttgcattaggtagagtaagctaggctacagctgtaagtagactcaaagatgtgtaatggatcaaatgcaacagaagtttatttgttgctcttgttcaaggtgggtgtttctggttagcaggtgactctcctccattgagttcagggactcagtttccttctatcttgtggctctgccgtccccaaagaccac

SEQ ID NO: 85793 - DNA, 232 bp, Homo sapiens
gaaatatctacctggttacatagcagcaataccaggatacttgctcctgctattactttctcaggtcctgcccagcgatgctgagaactccctgcattttgtagtatgatatcgagttaacagccagagaaaatcacaaagtgtggagtgcccccaaagccagatgacaggagtgaatttaatcttgtgataaagtggagtcattggaggttttaaaaataacagtttagga

SEQ ID NO: 85794 - DNA, 342 bp, Homo sapiens
tggccctaacatccgggcatgcctcaaactccctgtattctccccccatgttaaaccaatatagcaggtttcaagtaaaacaccactcaagtcagagcctctaaggtgcttcaacttctaatccttccttcatggaagctccaatgctttggatattatgatcctgagtggtgatcaaaataagattacaaacaagaatttccaaagaattcagaattaatggagtcatgctaatttatgtggtttagccacttactagccatattactaattattttctctaggcttctggcctcaccttactgttcaatacttgtttccccacatcccagttatactacc

SEQ ID NO: 85795 - DNA, 284 bp, Homo sapiens
gtcgtagataccagttaggatacctaggagagttcttaaatgcctcttctttcaaggaaaaaaattagaatgaattaactagttaacaaccaagagtaatagctattatttctacatgtagctgcctaatgtcacacacttttatatattcatagtgattccttgtaacaaccttgatacatattgcccggattttgaaagggctttgaggttatttgcccaaggtcatgataacagagatggtattcagaataagatctgacttcaaagcctttccagtctgt

SEQ ID NO: 85796 - DNA, 360 bp, Homo sapiens
gacagagtgagtttttagttttatttctgccaggttaactgttatctttaaaaaaaaaaatcaatttaaaaagtccagaatctctacagcatatcatccacaatgttgagaacataatccaaaattacttggtacacaaaatgcaagaaaatgtggcccattcttaagcaaaaagacaatcaatggagaaaagtgagaagacaagggctgtggtttgaatgtgttccccaaagttcatgtgttgaaaacatgatccccaatgtgacactattaagagatggggtctttaagatatgattcgtgaggcagatccctcatgaatgaattaatgttattattgcaagagtgagctatcacagg

SEQ ID NO: 85797 - DNA, 383 bp, Homo sapiens
caagatgtgtcacactagatatgcttattgccgttgagtttctagggtgtagtttctttcaggctctttcagctgatagagtgtgaggaaacaggtgtatataatacacacatttgtaagtatttccatttgtgaccatctgtatctatatgaagttaaaaatgagttcataatgatgtgctcaactctaatccatgattacatggatcattcttgcttccttctcttgtttatttgtaaccttccactccagcagtgagaaacctggcttccaccatctgccatccagtttatttaattggtcagtcacagcatacatggttccagaattgttaatctttatttccatggggtacaactttcaactatagcataacagtgtt

SEQ ID NO: 85798 - DNA, 127 bp, Homo sapiens
cttacaagaatgtccataaaaccctgtttataatagccaaaagaacagggaacaaccataatgcacatcaaaagaagaatggattaaaaaaattatattcacacacaggagtactatatagtattga

SEQ ID NO: 85799 - DNA, 2402 bp, Homo sapiens
  misc_feature (2)..(2): n is a, c, g, or t
  misc_feature (232)..(232): n is a, c, g, or t
  misc_feature (653)..(653): n is a, c, g, or t
anagctaccatcatcctgatgtcgctataaaggccagcatttttctgaaaagttggggaaaatgggaaaagcaacaaggcaactagtaggtatcacttaccttacctgcccagaccccacacccctaggtctcctctcaaaggaattcctgcccctcccatggcccatcttggtccgagaagggggtggtcatccccaggctagccagccacttctgacctgtgtggcctgnctggctggaaggcccaggcaatgacatgtgtctcgcagtttggactgagacatggaatggggccgcattaacaacaggaaacaatctgaacagactgaaccacgagcagcagaaaggcagaagagcagccgcttcagccccttaccatccgagacctgggtgtgtggtctgtcttggtcactctctctgtctctctttctctctttctttctctgtccccaaggctggagtgcagtggtgcaatcttggctcactgcaacctccacctctgggattcaagcaattctcccacctcagcctctcgagtagctggggctacagctatgcgccaccatgcccagctaatttttttttttttttttgagatggagtcttgctctgtcccccatgctggagtgcagtggcatgatctcggctcgcngcaacctcctcctcctgggttcaagcgattctcctacctcagcctccccagtagctgggattacaggcgcccaccaccacacctggctaatttttatttttagtagagatggggtttcaccatgttggccaggctggtctcgaactcctgacctcatgatccacccgcctcggcctccccaagtgttgggattacaggcgtgagccactgcacccggcctaatttctgtatttttagtagagatggggtttcacgatgttggccaggctggtcttaatctaacttcaagtgatctgcccgcctcgccctctcaaagtgctgggattaggcatgaactaccatgcccagtggggtattctctttcaataaagctcctcttttccaaggaagccacaccagaacagagatgaagaccagtgggaaaacatgggagcaactccgtgggcaggccagcggggaggccatgctgcaaagctgccgtgattccctggtgatctctcagcaggccaaggccagacatgtgaggaaggccttgaggacttcattctgtgcctctccttggatggaagggggtgctttagtgtggcactcctgacttttcaattgactggtgaagaggcccttgtgtgcacctcactatgtctgcctaggtcatgggggctccctggccaagaatgacgtggttccccctttcatcagtccgattcgcagtttgtcttaactgtagtggtatagccagagcaagaaaaagaatgtgatttaggacaaatgattggatgagtgattggtagatgtcctcagctatggcgtggttttgcaggtcactgttccacccacctgggcacagcatatacgctttttctcttccccataatcctgtaggggctgcgacttctgaagcacaagaggcagaggcgaacagctccaggtgcccctctggagctaccctacctcatctcccaagggagcggccacagcccagagtggggtctttcattttgtgatcttttcccttgacattcagcaaaagccctgacagtggtagaataaaggcaggatgggtgagtgcagagtgattctgcttttgttgggtttcagggaaacccataggcagattctgaacctggtggttgattctacatgtgggaattgtggctttgaagacctctggacatgagaacatatttccaagacagaggattctatggggacgggtcaccattaaatggtgtgcaagcataattctgttcaaaaatgaaggcatgtttagaggtgtgtcacagttaaaaaccaacctgaactttgcagttagattttaaaagatggtcagttagagtagaaatagcttagaatattccattgagtctaagatacagttagaaatcaacatctttgaaattagggtgtgtcttttaatcagttgatgtcagagtttaacgggcagcatttttttctttcttgggattacaaaaaatgatggtgcattctataattggcagcatcttagatctgaggaagtatgatacttgtttgacggaatggttgacggcagaattttgttaaaaagctatatcttcactgtattttaacacattatctaatttaagaaattgttaagatcccccacctggcagaggacccagtacaaaataggcactcaatagatgttacaccaactttggaagggcaaacatatttcttaatgagaggcagtccttcatgttttgcaataaaatgacttttaaaaaa

SEQ ID NO: 85800 - DNA, 1742 bp, Homo sapiens
  misc_feature (2)..(2): n is a, c, g, or t
  misc_feature (232)..(232): n is a, c, g, or t
  misc_feature (653)..(653): n is a, c, g, or t
anagctaccatcatcctgatgtcgctataaaggccagcatttttctgaaaagttggggaaaatgggaaaagcaacaaggcaactagtaggtatcacttaccttacctgcccagaccccacacccctaggtctcctctcaaaggaattcctgcccctcccatggcccatcttggtccgagaagggggtggtcatccccaggctagccagccacttctgacctgtgtggcctgnctggctggaaggcccaggcaatgacatgtgtctcgcagtttggactgagacatggaatggggccgcattaacaacaggaaacaatctgaacagactgaaccacgagcagcagaaaggcagaagagcagccgcttcagccccttaccatccgagacctgggtgtgtggtctgtcttggtcactctctctgtctctctttctctctttctttctctgtccccaaggctggagtgcagtggtgcaatcttggctcactgcaacctccacctctgggattcaagcaattctcccacctcagcctctcgagtagctggggctacagctatgcgccaccatgcccagctaatttttttttttttttttgagatggagtcttgctctgtcccccatgctggagtgcagtggcatgatctcggctcgcngcaacctcctcctcctgggttcaagcgattctcctacctcagcctccccagtagctgggattacaggcgcccaccaccacacctggctaatttttatttttagtagagatggggtttcaccatgttggccaggctggtctcgaactcctgacctcatgatccacccgcctcggcctccccaagtgttgggattacaggcgtgagccactgcacccggcctaatttctgtatttttagtagagatggggtttcacgatgttggccaggctggtcttaatctaacttcaagtgatctgcccgcctcgccctctcaaagtgctgggattaggcatgaactaccatgcccagtggggtattctctttcaataaagctcctcttttccaaggaagccacaccagaacagagatgaagaccagtgggaaaacatgggagcaactccgtgggcaggccagcggggaggccatgctgcaaagctgccgtgattccctggtgatctctcagcaggccaaggccagacatgtgaggaaggccttgaggacttcattctgtgcctctccttggatggaagggggtgctttagtgtggcactcctgacttttcaattgactggtgaagaggcccttgtgtgcacctcactatgtctgcctaggtcatgggggctccctggccaagaatgacgtggttccccctttcatcagtccgattcgcagtttgtcttaactgtagtggtatagccagagcaagaaaaagaatgtgatttaggacaaatgattggatgagtgattggtagatgtcctcagctatggcgtggttttgcaggtcactgttccacccacctgggcacagcatatacgctttttctcttccccataatcctgtaggggctgcgacttctgaagcacaagaggcagaggcgaacagctccaggtgcccctctggagctaccctacctcatctcccaagggagcggccacagcccagagtggggtctttcattttgtgatcttttcccttgacattcagcaaaagccctgacagtggtagaataaaggcaggatgggtggtcaaacataaggtaccgagctgaa

SEQ ID NO: 85801 - DNA, 402 bp, Homo sapiens
tttcttggaaagcagacagaagagcaataaatgactaggcaagcccaagaaaactgaatcatagcccaactgtggtaaacttacgatcaacacaatttatgtcatacgttccccaaaatgttcagaaagtggaggtgaaagagagctaaagaaaataaggaggattggttgaaattgtttccgaagcttcagatcattacattttctccccaactagtgaagtcaggtgcctgctgctctaccatcctgagactttaggtttattctctagagagggttaaacagagggtttctagattgggggataccagcaacagtaaggggcagggtacaatactgaaaataaataaattaagtcaatatattgagtaagattttccggtcctctttccctaatcgtca

SEQ ID NO: 85802 - DNA, 331 bp, Homo sapiens
  misc_feature (1)..(1): n is a, c, g, or t
  misc_feature (3)..(3): n is a, c, g, or t
  misc_feature (6)..(10): n is a, c, g, or t
  misc_feature (130)..(130): n is a, c, g, or t
  misc_feature (165)..(167): n is a, c, g, or t
  misc_feature (328)..(328): n is a, c, g, or t
nanctnnnnnacagggtttctgtcatccaggctggagtgcaatggcacgatcatggctcactgcagccttgacctcccaagcttaagtgatcctcctgcctcagcctcccgagtagctgggacttcaggnacacatcaccatgcccggctaattttaaaaatttnnngtagagatgaggtctcactatgttcctcaggctgggctcaaactccttggctcaatcaatcctccggctttggtctcacaatatgttgagattacaggtgcgaaccactgtgcctggccaaattaatttatttttaatgacaaataaaaattatatatatntgt

SEQ ID NO: 85803 - DNA, 506 bp, Homo sapiens
ctcccactgcccaagacgctgaaaggaaagaaggccaaggggaagaaggtggccccggcccctgctgttgtgaagaagcaggaggccaagaaagtggtgaattccctgtttgagaaaaggcgtaagaattttggtattggacaggacatccagcccaaaagagaactcacctactttgtgaaatggcccgctatgtcaggttgcagcagcagagagccatcctctataagcagctgaaagtgcctcctgctattaaccagttcacccaggccctgaactgccaaacagttactcaactgcttaagctggcccacaaatacagaccagagacaaagcaagagaagaagcagaggctgttggcccaggctgagaagaaagctgctggcaaagggggcgtccccactaagagaccacctgcccttcgagcaggagttaacaccatcaccaccttggtggagaacaagaaagctcagctggtggtgattgcacacgatgtggattccatc

SEQ ID NO: 85804 - DNA, 391 bp, Homo sapiens
tgttacaggctaaattgtatccctcaaaaaaattcattgttgaagtcctaatacccagcacctcagaatgtgatcatatttagagacaaaaaatctttacaggccagatgtggtggctcatgcctgtaattccaggagtttgagagactgaggcagcaggatcacttgtggccaggagtttgaaactggcctgaaaaacatatcaagactccgtctctacaaaaaaatttaaaaattagccaggtatggtggggcacactggtagtcctggatacttagaagactgaggtgaaaagatctcttgagcccagaagtccaaggctgcccatgagctatgatcaaaccactgcaccccagcctggtcaacagaccaaagcttaatctcaaaaaa

SEQ ID NO: 85805 - DNA, 2642 bp, Homo sapiens
gagagctgccttcaccttgatcttgtaacctgtcttccttgcatatacggtagcacattccagatcacttcggtgagaaaagacctctgtttttgaagaggaaactttcttaaattgtaaaataaaacttaaaaaacataaaaactctgtacaaaaattgaagacctaaaaattatagcataccttttttttgctcttgagtttttgaagctcttgtctttaaatgacttaactttttaaaaaataagatgttttatggctttaacccatgtttttattaagatctgagaatagcatattttaaacactgatagatacagaagaaattattatttaatatataaattgcttggaatgatttcattgcagcttgtaaggatgggttgatgccagaatggtttcataaatctttcagtcttacagagccaaagtttgcagattatatcgagttgcgttgtgcagctgctaaaatggaatcatagctttttataatttgcagaaaacaattgcattaatgtctggatgtttctcagttttattcttttctcataaatgttcctcgaatgttggcaccttctactgctgatctatattagaatctagtccaagaaagtgtctgatttaataacattaaatagttatttcaatatattttttcaaattatcctcatagaacctgttgcctccagtgagatggtaatctactacccgaataaatttaagagcacctgttgagagcccctgttttgcggtagaagacaattgtccctatcccaatttccactgaaatatgagagcagatttgcagagaccatcatgtcagagaagaaatttccttgtcagagatgttaaagggctacagtcccttagcaaagaaacttcgaaatctaagttggtttgtgtttttctaaatttgataccgtaattcatttggcagcaaaatctgacttgaactgatgtgagagtattgtactttatatttatgctacttcattgtgacttaattttccctgaagaaatatccatggatttgattataggttttcccttagatgctgtggaggtgttttgtaatattcaaaatatgcccatattgcctttttaaaaccccaaagattatgaattctgaaacacatccagcccagcgggttttggataaggggttgtaggcatttaagcagcctcacataatgggctgacttcatccaaaacatgaaaatattacaaggcaaattctgttttttatattttttggttcaatgcttgaacaacttgtttttctgctgggggaagaaaaaaagaaccaaccctgagtgtgattgttacggaaactaatgactttgtttttaaaggatcacattgattcaacaccttctattggacccagaagtgcgtaaatattacctatggtagtaaacgtttaattatcattcagtttaaatgttggccttctgtatgtagccaagaacagctcattttgtgaatttcagtttttaagtggctgctttttgatttggttgtattattttattataatgtatttgcaagtatattaaaaaattaacattgagccataaaaatccccaaatatgttcaaggacttcataattgaaaaatatatagaaaacaatccttacttctttttacaaaaacaaaatcatgggaattattcttttctatatatttagttataaatctttctctgggccgggcgtggtggctcacgccagtaatcccagcactttgggaggctgagacaggcgaatcacgaggtcaggagttcgagaccagcctggccaacatggtgaaaccccgtctctactgaaaatacaaaaaattagctggacacggtggcaggcgcctgtgtgtggcgggcgccagctactcaggaggctgaggcaggagaatcgcttgaacccaggaggcagaggttgcagtgagccaagattgcgccactgcactccagcctaggtgacagtgcgagactctgtctcaaaaaaaaaaaaaagaaaaaaaatctttatctggatctgttaaaccatatattattgatcattgcaagtgaaattttgagagattgtttctagtatttaggtgatgaaaacatttggtaatattgctttggttcaaagaattttatgtctttatctttctagaagaaagcaattatatatatatttttgctaaattacataaacatttaattacatcaggttctaatttaaacatgtattactcacttgaggccacttttaaatattcatactctttgacataagatgctttgtatatttctcatttcttttagttcttagtaagtcagctttaaaaagtacctgccaaccagaaccttccatattctggactaaatcttgctcttcggattatacttcagtgcagtaactgtggatttgcaattttgaaggggagatagtagctattatattttacacttgcttgatgtgataactctaaagactttttaactgataaaagcgcacatggctattttgatacacaaagttgtgtttgctactttagaagcttttgtggcagaattgtaatctaattttcataccttgtatttctgaatcacaacaaaaaaataaatggggaacaagacttacagatttgcaaactta

SEQ ID NO: 85806 - DNA, 429 bp, Homo sapiens
gcagatggtttgaaatgttgcacagggcaggcagggaggcctcattaaggaggtggcatgtgagcaaccacacaaaggacctggatgacttagctatatctggaagaagagtgttctagacagaggggccagtcagttcagaggccccagggtggcagtgtttgtctggagtgtttaaagaacagcaaggtcagcgtgcctggacagttgtgatgaaagaaagaaaaataggaggtgaaatcaggggagtaagaaagtggagaaggaagcaaactgcacagtttatggtgtattgtaaatattttggcttttaatctgagttgagaagtgacacaatctgacttgtattttaagagttatgtcataggaaggcaagagtgaaaacagtcagatcattaggaaggtaatcctagtaagagttgacgatag

SEQ ID NO: 85807 - DNA, 1230 bp, Homo sapiens
gggaaaatagcaaccttccatttggtttcccttctataatagttttttcctctaacggggagcaatctttctctcgaaactgctaatattgatcccaaagttactttgactgcattaacttaacttacggggtgggggcgggggtgagggtaggtgcttttttcttatgcaaaaatactcctttccggtgagaccagattaactatctccatgtttgtccttttctacctcgttttttcaccactcccaaacataacctcccaatcttttttgttagtccggccgtcaatttgtatagtaccaatttctgtaaattctctcaattcattgaagatcgtagggttaaacttttttgtgtgtgatttaaacttacaaacaagtgaagaagctatcgtttatttcagacgaggctgtagtttaaataccaaaagagggaaaataaaaaagaacctttgtaaaatatatctgaacctaatggtttgtacaactggagaatcgttctagattagttaccaattaaatataactccgccagtgtaagggtgtgaggtgcagttgtccaggagacgattttgtatagtatttttcttgtacattacttccagtaaatatttgaaaatatattgaagtaaacttgaattttttttttgtcacaagaaaatattaagagttattgttgcagttctgatgagctgcaggttttttgaactcacttctggaggtgcagagccacaaacgcactttcggggcctagttttgctcgaatatgaatttagataggtatcaagctgtaactaagacaatatttgataaatgttggatgacatttaatttaatggagcatgtacttatttgcatttgctggcagttcaggcatagttaaagtgagagttctcctatatttcataataagtgggtctgccaaaacccatgtattaaataaattgtccaagtgaaactcgactaactttggcctttgtgtatttcctgaaggtaatattgttaactgttaataaatacttctgacactacatttaaatgtttgcagattctgcaaactaattgctcattgtaatgttgaaataatttggatatttcacattgaaatgaaaagcctttctctggagcattttagatttgcattttaaatgcatgaaatgtaattgatttatttgtaatattttaaatggtattaataaactcagataaaagactaggccagttaatttg

SEQ ID NO: 85808 - DNA, 701 bp, Homo sapiens
cccgggacagtttccagtcggcttctccgtgaccttcctcccccttccagctcggagcgggatgctgggatccctccaaggaccctctgaggacgtaggagggatgctgagacagggccagcttcaaaccttgtcaagctctgacaagggaagatgaagcctagttccagctaggggtgacctgtctatctgcattttttgagctgcagagtgatgggagtcatattcgctgcctgtgcagcaccacaggcctgatgaaaatgaaatggcaacaccgtgcagatggcaaagcgtaggcctcacaaacatcctggccgtgaagagcttgtcttcaagagtagctggtgcagaaactcgctcggactgacctggaagaagaccctgaggagaacccgggcacacagcagccattccagtcctcagcttcaagggggctcacgaaggttgtggatccttgcccagcctgcagtggggacctggtgtggcattgagtggctgtgagtgctcagtgtcccccatctcatgctaagcacagcgaagtagggggagattgcgtagtgtgctgatggagcagttgcctccacctggctgcgtgtccctccgtcatgtgacagaaaagaagaaggcaatggtgtttttctgtagcaagtcactatttatggaagaggagaccctttatctgcatcgcaattctgaagatt

SEQ ID NO: 85809 - DNA, 885 bp, Homo sapiens
tgttcgtattttaccatgttccctaaacattcagaaggaggcattcagtgggtgaatttgtgaaatatttttctagatccatttgtaatgtcctctttcctcctctaaacaaagggctgggattctgtaaaagccacagcacattacatgcctttctttttctaagcaggaatctctctttctgaaatgagtattacctccatgttggggcaagggaaagagccctggactgtggagagtgaagtgaaaataacaaaaacatcaagtggttgggaatgcatcaaaggtgtgaacacaggtaagagctcaaatggacagagaggaagctgcaccattagtattcaggtaactccttccgagttgaagagttctgtggaacaaaaagggtttaaatcctgtgagctctcaatggaaacctttctttgccctcatttatccctctgctcttctgacgtgtagtagtttatcctttcacactcccatggcgctacagctccaacagtgacaaaggcaaagtctttatcatgatggacaacaccctgtcatgtggcttctgtgacctctttggtttcttcactctgaggggcacagggagggttgtgtccaagaggtctcctgtgatctctcctgtacctgactgcgtctgatgctcagttctctgtctatacagatcagagctgaggcctccatggacctgcccccttgacctattcaggttttgccccatttcctgtacttgggagacctaatcaggtgacgggaaaacattggcagctcctcctttgcatctggggctccggaaacctcatggtgctgtctccagccctgtctgtctgtcaaagtctttcagcctcagtcatttcttctgttctgcttttgccacag

SEQ ID NO: 85810 - DNA, 262 bp, Homo sapiens
tgcatctgttgtcactcctgtcacagtgctgttccctctgctggagactctcccctctctcctggctaacctctattgttcgggtcctgctcaagtgtcacatcatttccttgggcaactgttccctgcccgcacaagtctgtgttaggtttctctttggcgctttcacatcaccctgcacttccttagcatagcacctggcacacggcacagcacggcacggcacttgcctgtgtagcctgttggtaccaccagagggtgg

SEQ ID NO: 85811 - DNA, 319 bp, Homo sapiens
ggcacacagtgggctgagcggacaagtcgcagcctcagggggacctcccgtcctcccaactggcactgcatctttctgggcctggctctgctgcctcacagccccgttcagctggtggcttttagaggcttccagagtgtgcttggcccctttacctctatgccattgggcccagggggagcagtagagtggctgcggctgggggtgggacttcccctttctgtgtcttgcttgccccgtgtctcccagtgagtggccgccctgagcctggggccagcagcccagccccagtgagaaataaaagtagccatcctgcctg

SEQ ID NO: 85812 - DNA, 403 bp, Homo sapiens
cctcttctcttctcttgcatacattatgagtgacatttcataatgtatttctggatattgttgatatccaatttttctttgaagattttgttgatatttttgaccagtgagactatttttaatgttagtactcagattaagagatgcaaacattttcattctggtaaatggtataataagcagtaccaaaccattttttatagtttattcttgggtagatatgtgctaggctatcagggatgtccagacgtatttcagacaccatgaccttgtatggagcttggaccattgatttattccatgaataagagttactcaaatatttagaaacccaaaggataaagtttttggctttggaaatagatagataatatgaaaaacgtagtaagtttaggtttgataa

SEQ ID NO: 85813 - DNA, 138 bp, Homo sapiens
gatctgagtacctgtctcgtggagtactggtctagtgaacagactgagcttgaatcctggttgctcctctctgtgtgaccttgggcgagtgacggtcagccccggccataacacagtactgcagacttggcagctcgc

SEQ ID NO: 85814 - DNA, 654 bp, Homo sapiens
gggatgaagagacaatgaagggagaaagagaaggaaggaaggagacattatactgacttttcagataaaagccagacaactagttaacaactgccatgtagtaatggggcggggctctactggggtgcaggggctcatggacccccagagcattctaatcagacatgctagatatttgacagaaaagtggattctgtttgatggtttgtttcaagaagttaaggggacagaagttaaattatgtttctgtttttttcttcttccaaatgaaactcactctaaacacccaactaaaaaatgatcttacagatctgtgtagtctaatacctatgtacatgttgctattcaaatttaaaattaaaaaccttttttttttttttgagacaaagtctcactcttgtcccccaggttggagtgcaatggcgtgaactcagctcactgcaacctccgccttccaggttcaagcaattctcctgcctcagcctcccgagtagctgggattacaggtgcctgccaccacgcctggctaagttttgtattttttaaatagagacggggtttcaccatgttggccagactggtcgtgaactcctgacctcagatgatccgctcgcctcggcctcccaaagtgctgggattacaggcgtgagccac

SEQ ID NO: 85815 - DNA, 753 bp, Homo sapiens
ccgcgagggcggagctgcgttctcctctgcacagatttcggtggtactgcgaaggcggagcagagttctcctcagatgatgattattccccaccttctaagagacaaagaccaacgagccaccacagccaccagtcccagaacctgccaatgctggggaacggaaaatgagggagttcaactctgtgccctcacaatccagtggaggagacgcaactcatctgcctctgtccctctgggcacgcctcatgccaggtgcatctgtggacaggggccatgctcctgggcttccaaagttggagaaagctgccaggctcaggtctgaaggccagaattctacagtaagtcctactgagtcaaggtgggagcagggtcggtagcttccgaggctctgcgggagaatccgtttcctggccgtagaggtggcctgcactccgcagcttgtgctgcccgtctcgaatgactggagtttcttccttctgtcggattttccagcaccacacaaagagctgtcttcgagaccagacaccctaccccttcttccttctgcttgggtacttccttctgcttggctcccagagtgagaaactaggcattcatttgttcaatcttcaaacatagtctatttgaaaatacctctcccctattgacaccctaatgtctaaaacaccaccataaacattttcatcctccttttgtgccccctattaagaagcaaacctgtgaagctactatcgtttatcatcagtgtgaa

SEQ ID NO: 85816 - DNA, 2360 bp, Homo sapiens
gatctttggtccttctgttacccagctcctggaggcagtggctgtagcagcccttgctgctccacaccatggccacctgctggcaggccctgtgggcctatcgctcctacctgatcgtgttcttcgtgcccattctcctgctgcctctgcccatcctcgtccccagtaaggaggcctactgcgcgtatgccatcatcctcatggcgctcttctggtgcactgaggccctgcccctggccgtcactgccctcttccccttaatcctgttccctatgatgggcatcgtggatgcctctgaggttgccgtcgagtatcttaaggactccaacctcctgttcttcggggggctgctggtggccatcgcggtggaacactggaacctgcataaacgcatcgccctccgtgtcctcctcatcgttggggtgcggcctgccccgctaatcctgggcttcatgctggtcacggccttcctgtccatgtggatcagcaacacggccacctcagccatgatggtgcccatcgcacatgccgtcctggaccagctgcacagctcgcaagccagcagcaacgtcgaggagggcagcaacaaccccaccttcgagctccaggaaccaagtccccagaaggaggtgaccaagcttgataatgggcaggccctccctgtcacgtctgcctcttcggaggggagggcacatctcagccagaagcatctccacctcacccagtgcatgagcctgtgcgtgtgctactccgccagcatcgggggcatcgccacgctgactggcaccgcacccaacctggtgctgcaaggccagatcaactcgctcttcccccaaaacggcaacgtggtgaacttcgcctcctggttcagcttcgccttccccaccatggtcatcttgctgctgctggcctggttgtggctgcagatcctcttcctgggcttcaacttccggaagaactttggcattggggaaaagatgcaggagcaacagcaggcagcctactgcgtcatccagaccgagcacaggctgctgggccccatgacctttgcagaaaaggccatcagcatcctattcgtcatcctggtgctgctctggttcacccgggagccgggcttttttcttggctggggcaatttggcttttcccaatgccaagggggagagcatggtgtccgatgggacagtggccatcttcatcggcataattatgttcatcataccctccaagttcccagggctgacccaggacccagaaaacccagggaagctgaaggcccctcttggcctcctcgactggaagacggtgaaccagaagatgccgtggaatatcgtgttattgctgggtggtggctatgccctggccaagggcagtgagcgatcgggcctgtcagagtggctgggaaacaagctgaccccactgcagagtgtgccagctccagccattgccatcatcctctccctcctggtggccaccttcaccgagtgcactagcaacgtggccaccactacgatcttcctgcccatcctagcctccatggcccaggccatctgcctccaccctctctacgtcatgctcccctgcactctggccacctccctggccttcatgttgcctgtggccaccccgcccaatgccatcgtcttctctttcggggacctcaaagtgttggatatggcccgggcaggattcctcctcaacatcattggagtcctgatcatcgcactggccatcaacagctggggcatccccctcttcagcctgcactctttcccctcctgggcacagtccaacaccacagcccagtgcctgccaagcctggccaacaccaccacaccaagcccctaggctggggcacagcctggccatgcccaggaagacccaccccattcccactcctctgagcccggaggggacaccccaagctccaagctccaagctccaggccaaaggctgaaaggcacgtgtgtacataatctcttgcgtgtctgtaaggaaggggtgtatgctcagtttcctatgtgctggaataaaaggtgtgtgcatgtgtgtgtgcgcatatgtgtgcgcctgcatggatgtgaggggtgtgtgacgtgaggctatctgaggggggctgtgtgcatgcacatgatcctaggtatgtatgttggacagtgcacacgtgtgtgttcacagacaatacaacatgccctctctggtgccccaggtcttggtatccccagcttagtgaccagacttacttgcactgtatttattgaaattcaggcttggagtggcctgggaggagggcctgccagcagctgccacgggaacagcctctgggctgttaaagtcacattaaagtctttttcagtaaag

SEQ ID NO: 85817 - DNA, 385 bp, Homo sapiens
cgcccggccgagcgcggtagcctttgtgagcggggtcttggcgttgctgcgcattactctctccgcctcgccgaagagtggatggaggctccgcgggtaaaattgccgagaatgaggtgggtcatccgagaggggattggaatccatccaggcttttccgactctaaggcctgcagtaaaacctctgcagtgtcaagtgcaaatggagatggcgccctaggcatcacgctttatgcaaacgaaatatcgggaacgttttgtagtggttttatcaattaaccagcctatctgaaatgacataatttcgcacgtatatagcggcctgaaaatggcaacttagtgttggttatgcggttcggttctcctcctgaattcttccttttct

SEQ ID NO: 85818 - DNA, 705 bp, Homo sapiens
atgagaatataaacatcactattcagtcttgaaggttaagacaccagttctgtaatgagctaggtttgttataacaaaaacccccacttccttcaacaaattctcaggagaaaaataacattcctttttaaaagtatgtttatgcaaacaatgggtttaaagggtggtttgatcacttttttaaaataaacttaaaactgagctctgagtttcagagactgggcaagatcatagtaacacaataagggagtgaattggatgaattggtgcctcatgcctttttgatcagcagaatttagtcactaatcctttcaatagaagattaatctgaaggtttcatttccctgaaggaagtttgcttctttcaaagtttgtgctttttcactgaggttagaaactggaaacatcctaacttcctaatacaacagatatctactgctggaggctcaccagctccttccttcacttcactatttgcccaacgaagacagattctgatcaaagagggacaagccagttgagaaattgctgcagcacattctccccatgcccttagaaattgttatgattgtcccagaaatccaggcttaaatgatactcaggtgtaatattcaagataagggtctgggagaatataaaatattaatttgagggtgaatcaatctaattcagtcattgtcttggattgtccactaagtataatgt

SEQ ID NO: 85819 - DNA, 713 bp, Homo sapiens
ttctgaacttgcctccaccattctcccctttcctaccatgttctcccttcatggtgagtcactggctcattcctgcctcaaggcttttgcccttgtctttctctgttcctggcacactcttcatctgattggttccttctcctaattcagacttgggccaggtgtcacctcctcagggagaccttctctgactccacctaatgcaggagtagccccagctcttgttcattgccttgtttggttttgtttcaagcactcactgctctgtttgtctgtttccttttctgttggcagcctttccccgtggaaggtgacctgggttgggacttggtttgacttgtacctgtgcctagctcagtgcttgacacacagtggacactagaccttatttgaaaaatgggtgaaggaatgaatgcttgagcagagcaatgcataagtgaccagagactggttctaggaggcatcttacagtattacagaaactataaaacgataacaaaaaagacacttcatgcaaatactacagggaaagggaactctatgtttgccactttgacatctgtgctctggcctcgggcttgttttcctacttgttctggtgctggacaccttatctctgaggaccttgtagctagggaatgaagaaggcatagttaaggagatcttaccatagataccaaaagcagaaagtgtctttactcacacgtttgcta

SEQ ID NO: 85820 - DNA, 219 bp, Homo sapiens
ggcctatatttattagacaaattgaatcagtaagtaataaccttccaaaaaagacagtaccgggaccaaacggcttcactggtaatttttaccaaacatttaaggaagacgtgataccaattccccacagtctcttccagaaaatatgtcagtcctcctttatctgcagttttgctttcttcagttttaggcacgtacagtcaactgcagctgtgctat

SEQ ID NO: 85821 - DNA, 747 bp, Homo sapiens
aacgcaggcggtacggcccgaagtcgttgggatatggttcaaagagaaaaagcacgtgataactttgaaggaggctgcctggctgagctgatcggatcacctagagactggaaatgctttctggtctgaagtcacctgccctatctggacattccatagactaccacttttacccacgacttcgatgtggcatgctcattggaccagataagcaagcagtggcaagtggattggaggtcttggaatatgaaggcctggccctcgtctcagcttggaataaatctgaaggcccatcacagcttcagagatgcttggagaaggctgaggtctcccctgcaaccttatgagaaccttgagttgttgaactcattaattctttgggaccatcttcctgatgttcaagtttgcgaaacaggctttccctttaagatttgttttcctcaaaatacaagactattgatgcttcagttttgaagtggattctgcactcaagaaatgtaccattgaagaatgggactggtaggaagggaaaaaaactaaaaggaaacgcattttcgagttgcacatcatgatcaggcacagagtccagatacacttggagtagcaagcatccatccttgtggagacgcacatgaaccaggactctctgcacccacccctctcaagttttattttccgacggctgtaatgttccaggacacctgccatcatggagggttatccagcacctggaggatacctgctacc

SEQ ID NO: 85822 - DNA, 739 bp, Homo sapiens
ctgctttccctctatgagagcttgagaccaaatgtggcatctcgtgggggctcagaggagggggcagcagtgagttctgtgatagtgtcatgaggcccttgtcccgtggacaagtgacccagagaacctgcccatggggccccaggctccaaccagtcgagcccccaccatatgccagcacccaagttctctgtaaggtatttggtagaacacaacgtgtggtgtggtagcttgcttttgaggcgtatctaacttggaagcaagccattcagacaaaacactttatcttgcaggccaagaagacgctggagggaggctgttaggagggactctgagcttcacacctgtctgctgccatgggtgcagagccctagtcctgatggcccctggtggcacatatcgaatgcctagggcagaaaggaagtgggaatggcgaagatgtgacattcctcggtgttagatcctgttttttcttaacaagttgaggcgtgggtagagcaggaattggttttccagcattgtgtccgtaaacctgagttagaataagatgtaacggaagccacgataaagactcggtcaaatcctgcagcctggggcttactgtgtgcagactgcaacatgtgggtcttggcctctctgagatggaatggggcccagagcctttcccccaaagctggcagggctgggacttggggacaccctgcctcaaggtccccgttttaaaacactctcactaagg

SEQ ID NO: 85823 - DNA, 326 bp, Homo sapiens
tttatagcggccgcctactactactatacgggtgcgattagacgacagaagggaggctgttaggagggactctgagcttcacacctgtctgctgccatgggtgcagagccctagtcctgatggcccctggtggcacatatcgaatgcctagggcagaaaggaagtgggaatggcgaagatgtgacattcctcggtgttagatcctgttttttcttaacaagttgaggcgtgggtagagcaggaattggttttccagcattgtgtccgtaaacctgagttagaataagatgtaacggaagccacgataaagactcggtcaaatcctg

SEQ ID NO: 85824 - DNA, 613 bp, Homo sapiens
aaagcctggccaattaagaagttcaggaaaggttatgggcggaagcgccgacctatcaagctgtttgacaccggaagaggacggacctaagatggcggcctccagggggctgggaatagccgctcatgtcggctaacggagcggtgtggggccgcgtgcgaagccgcctccgcgccttccccgagcggctggccgcctgcggggccgaggccgcggcgtacggcaggtgcgtgcaggcctccacggccccgggcggccgcctgagtaaggacttctgcgcgcgggagttcgaggccctgcggagctgcttcgccgctgcggccaagaagacgctggagggaggctgttaggagggactctgagcttcacacctgtctgctgccatgggtgcagagccctagtcctgatggcccctggtggcacatatcgaatgcctagggcagaaaggaagtgggaatggcgaagatgtgacattcctcggtgttagatcctgttttttcttaacaagttgaggcgtgggtagagcaggaattggttttccagcattgtgtccgtaaacctgagttagaataagatgtaacggaagccacgataaagactcggtcaaatcctg

SEQ ID NO: 85825 - DNA, 593 bp, Homo sapiens
tgggtagagcaggaattggttttccagcattgtgtccgtaaacctgagttagaataagatgtggacctaagatggcggcctccagggggctgggaatagccgctcatgtcggctaacggagcggtgtggggccgcgtgcgaagccgcctccgcgccttccccgagcggctggccgcctgcggggccgaggccgcggcgtacggcaggtgcgtgcaggcctccacggccccgggcggccgcctgagtaaggacttctgcgcgcgggagttcgaggccctgcggagctgcttcgccgctgcggccaagaagacgctggagggaggctgttaggagggactctgagcttcacacctgtctgctgccatgggtgcagagccctagtcctgatggcccctggtggcacatatcgaatgcctagggcagaaaggaagtgggaatggcgaagatgtgacattcctcggtgttagatcctgttttttcttaacaagttgaggcgtgggtagagcaggaattggttttccagcattgtgtccgtaaacctgagttagaataagatgtaacggaagccacgataaagactcggtcaaatcctg

SEQ ID NO: 85826 - DNA, 1130 bp, Homo sapiens
ccccaccagtttccggccgggcacagatggaagagtgctgtcttgtgtatccccttcggacagacagagttggcccagtcccgcggtgaaaggaaggttcaagtctcagctgccagatctaagtggccttcacagctacagtccggggagaaacagcgtggctggaagcaacccgcaaaagccaggcctgggcagtcctgggcgctacagccccgtgcacgggagccagctccgcaggatggcgcgcctggctgagcttgccgccctgtaggcttggcgctgggctctcggtttgttcttcatttttaaagaaggaagggtcatatgtttattgggacctaagatggcggcctccagggggctgggaatagccgctcatgtcggctaacggagcggtgtggggccgcgtgcgaagccgcctccgcgccttccccgagcggctggccgcctgcggggccgaggccgcggcgtacggcaggtgcgtgcaggcctccacggccccgggcggccgcctgagtaaggacttctgcgcgcgggagttcgaggccctgcggagctgcttcgccgctgcggtaggtgggcgcgggccccttccccccttcccagcccttcccctccaagagccagcgggccccggctttcctttgctttcccgttggttcaaggtttgagcgcctgccgcgtgctttagacgccggctgacaaaatcaccgagccatcgacgagcccgcgaaacctcggccgtcctgggcttgtccctgcatgtttgtaaagcgggactggcaccaacctcagaaaggatgggagatgtgtgcaaaaaagcgccttgtaaaacgcgccaagaagacgctggagggaggctgttaggagggactctgagcttcacacctgtctgctgccatgggtgcagagccctagtcctgatggcccctggtggcacatatcgaatgcctagggcagaaaggaagtgggaatggcgaagatgtgacattcctcggtgttagatcctgttttttcttaacaagttgaggcgtgggtagagcaggaattggttttccagcattgtgtccgtaaacctgagttagaataagatgtaacggaagccacgataaagactcggtcaaatcctg

SEQ ID NO: 85827 - DNA, 1018 bp, Homo sapiens
ccccaccagtttccggccgggcacagatggaagagtgctgtcttgtgtatccccttcggacagacagagttggcccagtcccgcggtgaaaggaaggttcaagtctcagctgccagatctaagtggccttcacagctacagtccggggagaaacagcgtggctggaagcaacccgcaaaagccaggcctgggcagtcctgggcgctacagccccgtgcacgggagccagctccgcaggatggcgcgcctggctgagcttgccgccctgtaggcttggcgctgggctctcggtttgttcttcatttttaaagaaggaagggtcatatgtttattgggacctaagatggcggcctccagggggctgggaatagccgctcatgtcggctaacggagcggtgtggggccgcgtgcgaagccgcctccgcgccttccccgagcggctggccgcctgcggggccgaggccgcggcgtacggcaggtgcgtgcaggcctccacggccccgggcggccgcctgagtaaggacttctgcgcgcgggagttcgaggccctgcggagctgcttcgccgctgcggccaagaagacgctggagggaggctgttaggagggactctgagcttcacacctgtctgctgccatgggtgcagagccctagtcctgatggcccctggtggcacatatcgaatgcctagggcagaaaggaagtgggaatggcgaagatgtgacattcctcggtgttagatcctgttttttcttaacaagttgaggcgtgggtagagcaggaattggttttccagcattgtgtccgtaaacctgagttagaataagatgtaacggaagccacgataaagactcggtcaaatcctgcagcctggggcttactgtgtgcagactgcaacatgtgggtcttggcctctctgagatggaatggggcccagagcctttcccccaaagctggcagggctgggacttggggacaccctgcctcaaggtccccgttttaaaacactctcactaagg

SEQ ID NO: 85828 - DNA, 586 bp, Homo sapiens
ctgctttccctctatgagagcttgagaccaaatgtggcatctcgtgggggctcagaggagggggcagcagtgagttctgtgatagtgtcatgaggcccttgtcccgtggacaagtgacccagagaacctgcccatggggccccaggctccaaccagtcgagcccccaccatatgccagcacccaagttctctgtaaggtatttggtagaacacaacgtgtggtgtggtagcttgcttttgaggcgtatctaacttggaagcaagccattcagacaaaacactttatcttgcaggccaagaagacgctggagggaggctgttaggagggactctgagcttcacacctgtctgctgccatgggtgcagagccctagtcctgatggcccctggtggcacatatcgaatgcctagggcagaaaggaagtgggaatggcgaagatgtgacattcctcggtgttagatcctgttttttcttaacaagttgaggcgtgggtagagcaggaattggttttccagcattgtgtccgtaaacctgagttagaataagatgtaacggaagccacgataaagactcggtcaaatcctg

SEQ ID NO: 85829 - DNA, 1401 bp, Homo sapiens
ccccaccagtttccggccgggcacagatggaagagtgctgtcttgtgtatccccttcggacagacagagttggcccagtcccgcggtgaaaggaaggttcaagtctcagctgccagatctaagtggccttcacagctacagtccggggagaaacagcgtggctggaagcaacccgcaaaagccaggcctgggcagtcctgggcgctacagccccgtgcacgggagccagctccgcaggatggcgcgcctggctgagcttgccgccctgtaggcttggcgctgggctctcggtttgttcttcatttttaaagaaggaagggtcatatgtttattgggacctaagatggcggcctccagggggctgggaatagccgctcatgtcggctaacggagcggtgtggggccgcgtgcgaagccgcctccgcgccttccccgagcggctggccgcctgcggggccgaggccgcggcgtacggcaggtgcgtgcaggcctccacggccccgggcggccgcctgagtaaggacttctgcgcgcgggagttcgaggccctgcggagctgcttcgccgctgcggtaggtgggcgcgggccccttccccccttcccagcccttcccctccaagagccagcgggccccggctttcctttgctttcccgttggttcaaggtttgagcgcctgccgcgtgctttagacgccggctgacaaaatcaccgagccatcgacgagcccgcgaaacctcggccgtcctgggcttgtccctgcatgtttgtaaagcgggactggcaccaacctcagaaaggatgggagatgtgtgcaaaaaagcgccttgtaaaacgcgtaagctttcgtgttagcactgccgccggggggtgtcatgccaggattgacccaacacaggactcccggaaagtgcccagcaccttccgggtcttcacctccctggcacttgcagcccctgtgcacctgcagtggtggattccttcagcacgtgtcctgcggggaacccccagccaccctcacaactggcacgatagggcttcttgcccgtggggctttaagtcattctgaggctggttccctaagtgtcagccgcaccgggtaccacctcagtgtatctgggtaggccttgatgccagtgctgactctgtttactgggagctgttaatccggagatttggaccagagaaagggtatttgaacaagagttccacggccttcatccctacccggccccagcagccttggatccaggggtggacaactcatcagaagttgcactttttgctgggtgtggtggcgcgtgcctgtaatcctaccgctttgggaggctgaggtgggtggattgcttaggcctagaagtttgagaccagcctgggcaacatatggagaccccgtctctac

SEQ ID NO: 85830 - DNA, 978 bp, Homo sapiens
  misc_feature (869)..(869): n is a, c, g, or t
ccccaccagtttccggccgggcacagatggaagagtgctgtcttgtgtatccccttcggacagacagagttggcccagtcccgcggtgaaaggaaggttcaagtctcagctgccagatctaagtggccttcacagctacagtccggggagaaacagcgtggctggaagcaacccgcaaaagccaggcctgggcagtcctgggcgctacagccccgtgcacgggagccagctccgcaggatggcgcgcctggctgagcttgccgccctgtaggcttggcgctgggctctcggtttgttcttcatttttaaagaaggaagggtcatatgtttattgggacctaagatggcggcctccagggggctgggaatagccgctcatgtcggctaacggagcggtgtggggccgcgtgcgaagccgcctccgcgccttccccgagcggctggccgcctgcggggccgaggccgcggcgtacggcaggtgcgtgcaggcctccacggccccgggcggccgcctgagtaaggacttctgcgcgcgggagttcgaggccctgcggagctgcttcgccgctgcggccaagaagacgctggagggaggctgttaggagggactctgagcttcacacctgtctgctgccatgggtgcagagccctagtcctgatggcccctggtggcacatatcgaatgcctagggcagaaaggaagtgggaatggcgaagatgtgacattcctcggtgttagatcctgttttttcttaacaagttgaggcgtgggtagagcaggaattggttttccagcattgtgtccgtaaacctgagttagaataagatgtaacggaagccacgataaagactcggtcaaatcctgaaanaaaatatctctttatcccctatttcttatatcatatcatcctcctcctctctcccctcctttcaacatataaaattaactggcccgcgtttaccaacgtggcaactggt

SEQ ID NO: 85831 - DNA, 1561 bp, Homo sapiens
ccccaccagtttccggccgggcacagatggaagagtgctgtcttgtgtatccccttcggacagacagagttggcccagtcccgcggtgaaaggaaggttcaagtctcagctgccagatctaagtggccttcacagctacagtccggggagaaacagcgtggctggaagcaacccgcaaaagccaggcctgggcagtcctgggcgctacagccccgtgcacgggagccagctccgcaggatggcgcgcctggctgagcttgccgccctgtaggcttggcgctgggctctcggtttgttcttcatttttaaagaaggaagggtcatatgtttattgggacctaagatggcggcctccagggggctgggaatagccgctcatgtcggctaacggagcggtgtggggccgcgtgcgaagccgcctccgcgccttccccgagcggctggccgcctgcggggccgaggccgcggcgtacggcaggtgcgtgcaggcctccacggccccgggcggccgcctgagtaaggacttctgcgcgcgggagttcgaggccctgcggagctgcttcgccgctgcggccaagaagacgctggagggaggctgttaggagggactctgagcttcacacctgtctgctgccatgggtgcagagccctagtcctgatggcccctggtggcacatatcgaatgcctagggcagaaaggaagtgggaatggcgaagatgtgacattcctcggtgttagatcctgttttttcttaacaagttgaggcgtgggtagagcaggaattggttttccagcattgtgtccgtaaacctgagttagaataagatgtaacggaagccacgataaagactcggtcaaatcctgaaaaaaaaaaaaaaaaaaaaaaaaaaaaaaaaaaaaaaaaaaaaaaaaaaaaaaaaaaaaaacaaaaaaaaaaaaaaagaaaaagaaaaaaaaaaaaaaaaaaaaaaacaaaaaaagaaaaataaaaaaaaaaaaaacaaaaaaagagagagagggcgggggcgaccctcgaaccacccctcctcgatggaggcgcacacaaaagaagaagcacacacatacatcgcctaacacgcggcaccacagagagataggggtgatctattattcataaacatcggcagctctccactatcttgtacacatcaaaccacaaaaatagactgggaagcaaaaacagcatacgacgagaaagaagcaaaaaacaatgagagaagagaaacaacatcactaatagagagggatggacgaagagagaaacagacaataggagagaaacgagaccgacaacaactaaagaaagatagcaacaagctaaatataaagagcagcaatcgtgaagataagtagtaggattggagacaaaacaatatatagagaagatgatagaaacgaaagagacgaaacgagaactcaaagcaacacaacaaacacacagctagatgatcatataattgataagaagataaagaatagtagagcataaactacgaaccatgaaaaatgagaagaacatatcgtaatccacctacacac

SEQ ID NO: 85832 - DNA, 1034 bp, Homo sapiens
  misc_feature (879)..(879): n is a, c, g, or t
  misc_feature (895)..(895): n is a, c, g, or t
ccccaccagtttccggccgggcacagatggaagagtgctgtcttgtgtatccccttcggacagacagagttggcccagtcccgcggtgaaaggaaggttcaagtctcagctgccagatctaagtggccttcacagctacagtccggggagaaacagcgtggctggaagcaacccgcaaaagccaggcctgggcagtcctgggcgctacagccccgtgcacgggagccagctccgcaggatggcgcgcctggctgagcttgccgccctgtaggcttggcgctgggctctcggtttgttcttcatttttaaagaaggaagggtcatatgtttattgggacctaagatggcggcctccagggggctgggaatagccgctcatgtcggctaacggagcggtgtggggccgcgtgcgaagccgcctccgcgccttccccgagcggctggccgcctgcggggccgaggccgcggcgtacggcaggtgcgtgcaggcctccacggccccgggcggccgcctgagtaaggacttctgcgcgcgggagttcgaggccctgcggagctgcttcgccgctgcggccaagaagacgctggagggaggctgttaggagggactctgagcttcacacctgtctgctgccatgggtgcagagccctagtcctgatggcccctggtggcacatatcgaatgcctagggcagaaaggaagtgggaatggcgaagatgtgacattcctcggtgttagatcctgttttttcttaacaagttgaggcgtgggtagagcaggaattggttttccagcattgtgtccgtaaacctgagttagaataagatgtaacggaagccacgataaagactcggtcaaatcctgaaaaaaaaaaaacntcagggggggcccggnacccaaattcgccctatagagagtccgattacaattcaactggcagtaataaaacatccggggtgggccccggaacccaatcggccctaaaggggagcgttacaatcacttgcccgtgtttcaaaacggcgtaattggg

SEQ ID NO: 85833 - DNA, 946 bp, Homo sapiens
  misc_feature (866)..(866): n is a, c, g, or t
  misc_feature (881)..(881): n is a, c, g, or t
  misc_feature (883)..(883): n is a, c, g, or t
  misc_feature (885)..(886): n is a, c, g, or t
ccccaccagtttccggccgggcacagatggaagagtgctgtcttgtgtatccccttcggacagacagagttggcccagtcccgcggtgaaaggaaggttcaagtctcagctgccagatctaagtggccttcacagctacagtccggggagaaacagcgtggctggaagcaacccgcaaaagccaggcctgggcagtcctgggcgctacagccccgtgcacgggagccagctccgcaggatggcgcgcctggctgagcttgccgccctgtaggcttggcgctgggctctcggtttgttcttcatttttaaagaaggaagggtcatatgtttattgggacctaagatggcggcctccagggggctgggaatagccgctcatgtcggctaacggagcggtgtggggccgcgtgcgaagccgcctccgcgccttccccgagcggctggccgcctgcggggccgaggccgcggcgtacggcaggtgcgtgcaggcctccacggccccgggcggccgcctgagtaaggacttctgcgcgcgggagttcgaggccctgcggagctgcttcgccgctgcggccaagaagacgctggagggaggctgttaggagggactctgagcttcacacctgtctgctgccatgggtgcagagccctagtcctgatggcccctggtggcacatatcgaatgcctagggcagaaaggaagtgggaatggcgaagatgtgacattcctcggtgttagatcctgttttttcttaacaagttgaggcgtgggtagagcaggaattggttttccagcattgtgtccgtaaacctgagttagaataagatgtaacggaagccacgataaagactcggtcaaatcctgnacaaagaaaactaantnannaaaagaagaaaatggaaacttacaactcaattttccactcagcatattaaaataaaaaaa

SEQ ID NO: 85834 - DNA, 411 bp, Homo sapiens
ggcctgcatgcacctgccgtacgccgcggcctcggccccgcaggcggccagccgctcggggaaggcgcggaggcggcttcgcacgcggccccacaccgctccgttagccgacatgagcggctattcccagccccctggaggctgttaggagggactctgagcttcacacctgtctgctgccatgggtgcagagccctagtcctgatggcccctggtggcacatatcgaatgcctagggcagaaaggaagtgggaatggcgaagatgtgacattcctcggtgttagatcctgttttttcttaacaagttgaggcgtgggtagagcaggaattggttttccagcattgtgtccgtaaacctgagttagaataagatgtaacggaagccacgataaagactcggtcaaatcctg

SEQ ID NO: 85835 - DNA, 865 bp, Homo sapiens
ccccaccagtttccggccgggcacagatggaagagtgctgtcttgtgtatccccttcggacagacagagttggcccagtcccgcggtgaaaggaaggttcaagtctcagctgccagatctaagtggccttcacagctacagtccggggagaaacagcgtggctggaagcaacccgcaaaagccaggcctgggcagtcctgggcgctacagccccgtgcacgggagccagctccgcaggatggcgcgcctggctgagcttgccgccctgtaggcttggcgctgggctctcggtttgttcttcatttttaaagaaggaagggtcatatgtttattgggacctaagatggcggcctccagggggctgggaatagccgctcatgtcggctaacggagcggtgtggggccgcgtgcgaagccgcctccgcgccttccccgagcggctggccgcctgcggggccgaggccgcggcgtacggcaggtgcgtgcaggcctccacggccccgggcggccgcctgagtaaggacttctgcgcgcgggagttcgaggccctgcggagctgcttcgccgctgcggccaagaagacgctggagggaggctgttaggagggactctgagcttcacacctgtctgctgccatgggtgcagagccctagtcctgatggcccctggtggcacatatcgaatgcctagggcagaaaggaagtgggaatggcgaagatgtgacattcctcggtgttagatcctgttttttcttaacaagttgaggcgtgggtagagcaggaattggttttccagcattgtgtccgtaaacctgagttagaataagatgtaacggaagccacgataaagactcggtcaaatcctg

SEQ ID NO: 85836 - DNA, 1037 bp, Homo sapiens
ccccaccagtttccggccgggcacagatggaagagtgctgtcttgtgtatccccttcggacagacagagttggcccagtcccgcggtgaaaggaaggttcaagtctcagctgccagatctaagtggccttcacagctacagtccggggagaaacagcgtggctggaagcaacccgcaaaagccaggcctgggcagtcctgggcgctacagccccgtgcacgggagccagctccgcaggatggcgcgcctggctgagcttgccgccctgtaggcttggcgctgggctctcggtttgttcttcatttttaaagaaggaagggtcatatgtttattgggacctaagatggcggcctccagggggctgggaatagccgctcatgtcggctaacggagcggtgtggggccgcgtgcgaagccgcctccgcgccttccccgagcggctggccgcctgcggggccgaggccgcggcgtacggcaggtgcgtgcaggcctccacggccccgggcggccgcctgagtaaggacttctgcgcgcgggagttcgaggccctgcggagctgcttcgccgctgcggtttgagcgcctgccgcgtgctttagacgccggctgacaaaatcaccgagccatcgacgagcccgcgaaacctcggccgtcctgggcttgtccctgcatgtttgtaaagcgggactggcaccaacctcagaaaggatgggagatgtgtgcaaaaaagcgccttgtaaaacgcgccaagaagacgctggagggaggctgttaggagggactctgagcttcacacctgtctgctgccatgggtgcagagccctagtcctgatggcccctggtggcacatatcgaatgcctagggcagaaaggaagtgggaatggcgaagatgtgacattcctcggtgttagatcctgttttttcttaacaagttgaggcgtgggtagagcaggaattggttttccagcattgtgtccgtaaacctgagttagaataagatgtaacggaagccacgataaagactcggtcaaatcctg

SEQ ID NO: 85837 - DNA, 1063 bp, Homo sapiens
  misc_feature (898)..(898): n is a, c, g, or t
ccccaccagtttccggccgggcacagatggaagagtgctgtcttgtgtatccccttcggacagacagagttggcccagtcccgcggtgaaaggaaggttcaagtctcagctgccagatctaagtggccttcacagctacagtccggggagaaacagcgtggctggaagcaacccgcaaaagccaggcctgggcagtcctgggcgctacagccccgtgcacgggagccagctccgcaggatggcgcgcctggctgagcttgccgccctgtaggcttggcgctgggctctcggtttgttcttcatttttaaagaaggaagggtcatatgtttattgggacctaagatggcggcctccagggggctgggaatagccgctcatgtcggctaacggagcggtgtggggccgcgtgcgaagccgcctccgcgccttccccgagcggctggccgcctgcggggccgaggccgcggcgtacggcaggtgcgtgcaggcctccacggccccgggcggccgcctgagtaaggacttctgcgcgcgggagttcgaggccctgcggagctgcttcgccgctgcggccaagaagacgctggagggaggctgttaggagggactctgagcttcacacctgtctgctgccatgggtgcagagccctagtcctgatggcccctggtggcacatatcgaatgcctagggcagaaaggaagtgggaatggcgaagatgtgacattcctcggtgttagatcctgttttttcttaacaagttgaggcgtgggtagagcaggaattggttttccagcattgtgtccgtaaacctgagttagaataagatgtaacggaagccacgataaagactcggtcaaatcctgaaaaaaaaaaaaaaaaaaaaaaaaaaaaacttncggagggaataaaaatgagggggggcggagaaaaagagagggattgaaatgggggcattgggcaataattggttccgtaaaccaagtttttttggcacaagtgggaaattggggggacccaaatagggaggagaataaatcagataagcagtgtacttgtagaag

SEQ ID NO: 85838 - DNA, 496 bp, Homo sapiens
agagagagcaggagggatgatactctgtcctgtgaatatctcagcttctctaggggtgaatagggctccctgttctgctctgcccaaggtactctgtaaattgatcaaagaccctggaatccttccattctgggtcagctgggagctctgctaactggcagctccccataccaaaccctagaaatagcttatctgtaggaagcccaagttttctaaagttattagaaaattgctggctcttacttttgaccagatatcattctgcccttctgcttctctcttctataaatctgggtaaatgggacacttttgttcttagagatctcactctatcccaaatggtcactgaaatattgacaattcatcccattggaagatcaggggcttatttctaaaatggggaactgccaggatcttctgcaggttggatgaaagcccctgtccagatttgaaagtggatcccacgttctgcagggagagcttcagattcatcctc

SEQ ID NO: 85839 - DNA, 1446 bp, Homo sapiens
tcctttgcacccttactgaggaagtatcttgaggaaattctccagcaaaatgaggatgaaaaccaggaaagaagaagaaatgggatccataaaacagtggaccttacttaggatgtctcattctagagtgacagccaaaagggtatctcaccctagagtgacagctatccagcagactaatttcagatgagagcatactgtctcgggctttctgggaagaatgtgcattcagtgccatagatagtatcattgaagagctgggatgcttgagaagattatttagtcaagaaaaaagaaagacaaatcaacaatatgtcaaaaaattcaggtccaattatagagcaaaataaaatgaggcatgattttgagttattcatgaagaataagaagaggcttgataggtacatttccttttctatggcacaggcatgatgatattgggtgtgtagggaagaaaatatcctagcttatactaggctcccagtaagaagtatttaaatagccaaaataatgtggatatcatttattagtattcagtgttcagatcagcctattaacaaagtgtgaaaggtttcattttttattcagaactgaagttgaaagtaattaatgctgacaaagggaaagaaagcagaaagagattgagaattagaggaagagaagtggaatcaaaggtagagatacttatatattcaaagtggggatgaaaagatcttcagttaatggaacaagaactagaggattagtgtattgttcaaagctataaaatcaaaccaatagatgtattaaaaagtgatgtaactatcagacatttggagagagatggacaaaggaaagtggcgatagtgtaagttaaatccttatcttttgtaatggggaattattaaagatgttgtaaagtcagtaagtcaagaaattattgctcaaacatattatttaaagttagaaagttagttaccagacgatctaaaataaatattgttaaaagcattacctctagggaatgggatttagatttaaaaagggtgggatgggaaactgtgtttttcattttaagtccttctgtactatttaattttttaccttgtgcatgtattactttgaaaaaatttttaataaacccaaataaaaatcttccagtgacttcccattgattaagatgcaacccagctaaagcctttaaaatggttttcaaggtcctcaagtatctaggtccacttgatgtgtccaggctcatgatatctccccacaagtctctatttccagccagattaagtatcttccagttattaaaacacacttcacattcttttgtttgtataggtgttccacaaaaaacaaagcctactgctgatctcaccatgtctgctgagtaagcttaccatctagtgggttttaatatttgttgaatgaaggaatgtccaatacagcattgaatgaagtttg

SEQ ID NO: 85840 - DNA, 327 bp, Homo sapiens
cagcttattaccctgtgtatatggcagtgttctcaggtttacctgcttctccatgatggggaaatcctggcatcggttattattgtgcccaataaaatgctattttgatgagatgccaaaatatttatcatctttactatgtagaagtgaatggttgcacaatttttgttttagttgctggctaggacttagaaaggatggatggaataaaaagtgaacttggtgcagaatgtccctccaggtggctgtaaccaccagtcctgctccttggtccagtggcgtcagggtttctcatacccacacagtggaacagtagagcctgctgtg

SEQ ID NO: 85841 - DNA, 2235 bp, Homo sapiens
  misc_feature (2)..(3): n is a, c, g, or t
  misc_feature (5)..(6): n is a, c, g, or t
  misc_feature (8)..(8): n is a, c, g, or t
  misc_feature (1747)..(1747): n is a, c, g, or t
  misc_feature (1765)..(1765): n is a, c, g, or t
  misc_feature (2191)..(2191): n is a, c, g, or t
gnnannangttcatagaaacaaaatgatcacacttctataattatagaactaaagtaatggttacctttggtaggattattgactaagggagctttctgtatcttggtctggatggtagttacatggatttatactcatgagaagacttcaaaaagtccatggaaaacatacttaaaagatacaaataaaaaatataaactttatttctcaacataagttccatcaagttcaagacacctttgtaagtgatgataccagccatttagttcatccctaaagaactgagtgtcctgggaatttaaccatgtcaattaagtcttttttacattataaactgaagaaaaatgcatgccttttacagattttaatattaagaaacaaaaaagtcagagccaaatcaagactgtaagatggatttcccatctaaacttgcaaaattgcctttgtttgatgagaggaatgagcaggagtatcattgtggtggaaaaggattctctggtggagctttcctaggtgtttttctgctcaagctttggcttgctcaaaacactttcatagtaagcaggcgggtcatttttggtcctccagaaagtcaacaagcaaaatgtcttgatcaccccagaaaactgttgccatgatgcttgctcttgactagtccacttttgctgtgactggactatttccacctcttggtagcccttgctttggttgtgctttgtcttcaggattgtactggtaaagccatgtttcatcccattaccattcttcaaagaaatgctccaggatccgaatcctactcattttgttttaaattttcattgaaagcatttctcttttctgcagctgatctggggacaatggttttggcacccatttagtggaaagtttgcccccattttaatttttcagtcataattgtgaaagcagaacccattgagacatctgtcatgttggctcttgtttgtgctgttatcatttgtccttttcaattgggatacaaacaagatgaatttttgtggatggtctgccactgcaggcttcaacactgtctcatcccttcttaaaacaagttatccatttgtaaaccgccgatttctttagcgtattgtctctgatatgatttggctgtgtccccacccaaaactcattttgaatcatagctcccacaattcccaagtgttgtgggagggacccagtgggaggtaattgaatcatggaggcaggtctttcctgtgctgttctcatgatagcgaataaatctcttgatttctcatggttttataaaggggagtatgtcatgtaagaggtgacttgctcctccttgccttctgccatgattgtgaggcccccagccatgtggaactgtgagtacattaaacctcttctcctgtgtaaattacccagtctagggtacgtctttattagcagtgtgaaaatggactaataacagtctccataaatgttttgtaaaaatcagtgattttactattcttccacccaggcttcaccataactttgctgtttatccttgcttcaattttagcagaattcatgttgctctgatgagggcttttttcacactaatgtcttgttcttaatgcctcaaactatatcctgttcagacatcttataataagttagtatgaatttattttgatgcaaaaaatttttgaaattcatccatagttttttcataagatgcatttcaatgaactttttgaagactctcacatgtataaaaataantaagctatacaccaaagntttatatactctatatatgtaaatcataccagtttttaaaatatataaaatgtggcagggcacagtggcttacacctgtaatctcagcactttgggaggacaaggtgggtggatcacttgaggtcaggagttcgagaccagcctgaacaacatggtgaaaccccgtctctactaaaaatacaaaaattggccaggtgcagtggctgacacctgtaatcccagcacgttgagaggctgaggcagacgaatcacgaggtcaggagttcaagaccagcctggccaacatggtgaaactccgtctctactaaaaatacaaaaacttagctgggcgtggtggcaggggcctgtaatcccagctactcgggaggctgaggcacagagaatcccttgaacccgggaggtggaggttgcagtgagctgagatcntgccactgcactccagcctgggcaacaaggcgggactccttatc

SEQ ID NO: 85842 - DNA, 319 bp, Homo sapiens
aataataagcacagctaaagatgctcaaaatcgttaaccatttggtaaatgcaaatcaaaaccatgagatactacctcacactcaattagggtgtcaactaccagaacgagtgagtataacaagtgttggcaaggatatggagaaattggagctcttgtgcaatgctggtaggaatgtaaaatggtgcagtcactctagaaaacagttcctcaaaaaatttggccgcatatggtggctcatgcctataatcccagcactttgggaggccaaggtgggtggatcacctgaaatcaggagttcgagaccagcctggccaat

SEQ ID NO: 85843 - DNA, 4368 bp, Homo sapiens
  misc_feature (791)..(791): n is a, c, g, or t
  misc_feature (3480)..(3480): n is a, c, g, or t
tctttcttcactctgaagccaagagccgaccttctgagccctcaagaaagatcagaacagattcatgggtgatttagcctatctgtcccaggccagcgtggctgagtgtgctggctggaggcctctctctctgcttcgagggtagctgagatccaccccggaaaccggcaggatgaagggggcaagtgaggagaagctggcatctgtgtccaacctggtcactgtgtttgagaatagcaggtatgggcagctggggtgggagggtcaccatggtgggctggcagccaccctccagcctttctggcagctctctccctgggccctgccccggaccctcctcctgcaggggcagccccgcgttcctcggtcacggattccttggagcatgggagagtgtcggtgggacaccaggagccaggcaggggtgagagtgccagtgtgtgttgggagagtccagacaggtgtggttacgagcaagcatgggcagaccaaagcctgtgtgtgggcacaggaccccacccagtgcctgccagcacctctcagaaaaggtagctgatactcaccaagaatttacgccctatgattaggataaccatataatttatcattcagcacacaattgaaactgaaagtaaatgccaaataaaatgtggtggttgtgggggaggcattacaggtaaagctgggaccgtatgaggcaaaccaggatgtacgggcagcatcctgatggggtactccctactctaagttcatgtccttacttatttaatttagtcatcgaacagcctaanaggggtagattctgtttctgttcccgtcttatagatgaggaaatggagacacagagaggtgaggatgccaagtgctttaagtatctggggcaatgctggggcgtctgtctggagggaaaaggctgggccagatgcgtggagtcattggtagccctgggagcatgtgtgtttgtgtgtgtgcgcgtgtgtgtatgtgtgtgttgtgtgttatgtgtggcatcaatccattctgcaggcatttcttaagctcaggactgtgttaggggctgtcccaggtagggttttctggaaatagactcagacagaggtttgcctcaggtgatttatcagggagagcttttgggaacaacagctgtgggtgtgagggaagcagggccgggcagggggagatgctgaactgcagtgcacctgccacagaggcctcagcctgtcccagggagctctggagctgggatgcctctcggttgttccagctgaggaagagggctgggtatttgtatctccatgtggactggacaagagactctgggtgaggcagctctctcttccagagagtgattcccagagagggactcagccaataaattacccggcagcccccagtactaccagtagctggtggggatggtgtggggaggcctcattcctgaaggagggacatgggtggcacagcacagcatcctacaggaactgtagaggatgaagaagggtttcagtatttggatgctgagctcatcgaataactatgatgcaaggtcatagacagtagatgtcctaggaatggcccggatgctgtattgagggcactcatggcaggcaatgtttcctgtaggcttcagggtggagatggcatagatgtagacctagaagtcttcaacttcctgagctgggtgattctcccctgcctctcccgggatctttgccaagctcgtcctgttcagcaccaaagacagctcttgggtgccgccttcctggcccaccacccccttgggtgtgggtggatggtaccacctcactcaacatgcttgacgtggactaggcacacctgggtggagcccctcagcatgctgtgctctgcccaggcaataaccctggcaggagtgggcagcccttagacgggagttaggtcccagcaggcatcaagagggtgagagccactccttactgagtgaggggacccataccaactgccttggcctgggcttccttatgaggtctccagcacctcagctgatctgaaactgaggggcaaagaggaaacagaagctggccaggggccctagaacagaaatgcagaacctgaaaccaaatgtagaacagaaagcctgagaaccagctacgcccatgagctgcagacccatgggctgagaaaccagggactggggtgccagggaggggtgggagagcctgggagtagccacacagcactaggtcccaatgctttcgctgccacaaacccaattgtgtcacttggggcaagtcactttgactccgcggacctgtttctcctttactcaaatggggaggggcaggttagagtgaaggctcaggaagcagtcgcctgatttgaatcccacctctgccacttccgagccgcatgttactcatcctgtccagacctcagtttccttgagtgcaaaatatgggtaatgaaaacctttctcacggagttttggagatttcgtatttgtttggccttccatttcctggcctgtctttctcataaggatgcctgccctgttctgtcatcacaagcccttccacaccaagggcaacgttgggtgtattcatcaagggtgggccctgttgtctaaggaatttgactggcttgcagaacccagtacacagggtaataaaggtgacctacgaaggcccgtccctgggagaacagagcatctgctgctgggctggctctccctgcttctggacgtgtggaggatgtcgatcccattgagaagccccagcttttgcaggcctgctctcactttatattgttctgtggctcctaccttcccttgatgtataggttactgatgtggaaactgaaaacagaggtgaggtccaaaggtgaggataatccagggggtaccactcaaaaacccctatatacagaaaggattcctggacactgtggcttcattttaaacaaggaagtatgcagttccccagaaaataaaatatagtccaccctgactcattttgaacactgagttccctccaagaatgtgttgggagagaagtgaaagtcttactcagcatgttcccaaagaaagccaggcacccaggggcccctgcactggggatttgcaccaggcaacccaaatccacaccagggacttgctgctgttttccctgttctccagggaggaagccctcaggtctgtctcttctcctcaggaccccagaagcagcacccagaggccagaggctagaggacgtgcatcaccgccctgagtgcaggcctcccgagtccccaggaccacgggagaagacgaatgtcggggaggccgtggggtctgagcccaggacagtcagcaggaggtacctgaactccctgaagaacaagctgtccagcgaagcctggaggaaatcttgccagcctgtgaccctctcaggatcggggacgcaggtgcctgagggctgaggtagaggtgtggggtgctggggtggggagctctccctgacctcncctccacacatgctttcctagccagagccagcagttccccaggtgggggtatggtgtgatcagaggtcagctgggagctagatttccccatgcttaatggcctttgattcactaactgcctgctacgcaccgtgctggattacttcgcgagtccctcgtgtaggagttttttggacaaggaagttgaaacacagttttaaggaacttattcaaggccacacagcttggaacagtctccatcttgtgaacctaatactcttctcaggtggggcctcagtttacccactggaggagacaacaatctcaacctagaaatagaggtctgagtgtgaactgtcctgcccttagactaaagcccagtctgatctcttctgtggcttgcagttttctcatctgcagagttcaagggttggcatgcagatactgtgcacccaaattccctggagtcacatcccagcacgtctgcttactaactgtgtgtccttgggcaagtcacttgagtctctttgtgccagtttcctcatttgtaaaatggggatagtggttatagtaatgcgtcctggttttcaatcgctgctgaacaaacctatcaaaaatgtagcggctggccgggtgcagtaactcacgcctgtaatcccagcactttgggaggccgaggtgggcagatcacctgaggtcaggagttcaagaccagcctggccaacatagggaaacactgtctcaactaaaaatacaaaaattagttgggcatggtggtgggcgcctgtaatcccagctactcagtaggctgagacaggagaatcacttgaatccaggaggaggaggttgcagtgagccgagattgcgccactccactctagcctgggtgacagagcgagactctgtctc

SEQ ID NO: 85844 - DNA, 1048 bp, Homo sapiens
tctttcttcactctgaagccaagagccgaccttctgagccctcaagaaagatcagaacagattcatgggtgatttagcctatctgtcccaggccagcgtggctgagtgtgctggctggaggcctctctctctgcttcgagggtagctgagatccaccccggaaaccggcaggatgaagggggcaagtgaggagaagctggcatctgtgtccaacctggtcactgtgtttgagaatagcaggaccccagaagcagcacccagaggccagaggctagaggacgtgcatcaccgccctgagtgcaggcctcccgagtccccaggaccacgggagaagacgaatgtcggggaggccgtggggtctgagcccaggacagtcagcaggaggtacctgaactccctgaagaacaagctgtccagcgaagcctggaggaaatcttgccagcctgtgaccctctcaggatcggggacgcaggagccagagaagaagatcgtccaggagctgctggagacagagcaggcctatgtggcgcgcctccacctgctagaccaggtgtttttccaggagctgctgaagacagcccgcagcagcaaggccttcccagaggatgtggtcagggtcatcttctccaacatctcctccatctatcagttccattctcagttcttcctcccagagctgcagcggcgcctggacgactggacagctaacccccgcatcggtgacgtgatccagaagctggcccccttcctgaagatgtacagtgagtatgtcaagaactttgagcgagcggctgagctgctggccacctggaccgacaagtctccactcttccaggaggttctcactcgcatccaggtgaggctgggggagggctggagtcagcattgccactcccagcatgcagtggctcaggttgccttgagtgattccgggcatctcccaggctcagctgcttccataggcccctgcctactcgtccggccctcaggagcagcctgacccacctcccttctctcaccctctccgtgttgctcccccatccctccc

SEQ ID NO: 85845 - DNA, 492 bp, Homo sapiens
atgacacccccgtaccccgcccacacccagaattgccgtggaaagttgctttgggggattcagggagcctggcctcacctggccctatctagagtcgagaggaggtctctaggctgagggcaatccctgtgcccctcctgcaggacagctaacccccgcatcggtgacgtgatccagaagctggcccccttcctgaagatgtacagtgagtatgtcaagaactttgagcgagcggctgagctgctggccacctggaccgacaagtctccactcttccaggaggttctcactcgcatccaggtgaggctgggggagggctggagtcagcattgccactcccagcatgcagtggctcaggttgccttgagtgattccgggcatctcccaggctcagctgcttccataggcccctgcctactcgtccggccctcaggagcagcctgacccacctcccttctctcaccctctccgtgttgctcccccatccctccc

SEQ ID NO: 85846 - DNA, 403 bp, Homo sapiens
aaacttcatttccccttgacttcttatgacagtgttcagttttggttcttaattctttagtactgtatgggttctggcaccaaattgtctgagcctgaatcccagtgtcatcacttagtagtaaccttggctaggttagttatctagcccctctagccttgataattcatctttaaaagcaggttactagtagtaattaccccagagggtagttttaaggaataagtgaaatgcacataaaatgctttgaaaagtgctgggacacacacaggaagcaataaattaaagtttgcttttatcgttatgatgattattattttcagacttctttgtggtcttttcttcctggatttactcatttaaatgttgatgttccttgggttctctcagattgcggtgtttt

SEQ ID NO: 85847 - DNA, 655 bp, Homo sapiens
attaatagcctctccctgggaatgggcgggcctgggtccagtccacagggcccctcgtgggccctgatgaaggaaagagttgagatgggggcagcgctggaccccagggcccctgcctgcctcctggagagcccggtgacccaggcagccctggtgaggctgtgggtgcctgggccatagcgaggcccgcgagctcccacaggacagatgcggacagtgaggccggggaggccctgctgccctccgaactgtccctccagcccccagctttctgtggttctctgggccccctctgcagaggggcaggggagcccaccctggatcctgagacgccaagcttgagggacccccagagctctagcgaggctgcttcctttgcggatggtgaagctgaggtccagaggagggcaggggcaggtcctgggcgctccctaggcaaagggagccgatctccgggaggcggtcacagggagcgctcctgcgacttctagggcccgaaagctggggaggatgagagaccaggggcctttcgtcgtcccctgggctgggcagaggctcagcctgtgccgcaaccctaagcggcttctggcaagtccgagccgcggtccctttaagagggggtggagcttcaacctggcactagggatgctgctag

SEQ ID NO: 85848 - DNA, 113 bp, Homo sapiens
gatcaacagttctattacagattagaatgtttcacttcacagttctttgtaaatcatgtcaatttttatgatagctgtcaatttgggaaaatctgtattaaaatttttaaatg

SEQ ID NO: 85849 - DNA, 244 bp, Homo sapiens
cgagtagctgggactacaggtgcgcgccaccacgcccagctaattttttgtatttttagtagagacggggtttcaccgtgttagccaggatggtctcgacctcctgacctcgtgattcatctgccttggcctcccaaagtgctgggattacaggcgtgagccactgcgcctggccttatacagagttttaatgacataaaagggttaatcatttaaaactcagtcaggaaggaataaaacacat

SEQ ID NO: 85850 - DNA, 1267 bp, Homo sapiens
tccaattctttaggcttcttcattttaaacttcatgcagactctctttcttcagatgttataatacagttgattgggtttaaacttactggttaacagtctctttatatttctctcttgctaaaaattaagaacaaatcaacatgtttagaatttagggtgttttgaaaactctcttgagtctttataagtcctttgggttaactctaaaagtagttaaagttgtctgtattgatttcatagtttaagctccagagtattccctaattttctccttcttgttcctttgtgggcatcttcctattgcctcttgcataaactatacttgcttgtttctaagaccaatattgagcttttggttgaaatagtttgagaatttcttgggtacaaatttttgtcagatacttttcctacccatcactttttatatcattaaaattaataatacacatgtattgagattaaaagagggaagatttttgaaagatgcaacgtgaaccttttataactagagcagaaagatttttagcctctttaaaggaaatcctggcatttaagaaaatgtgttttcataacaacatgtttcattctctcattaacaatttcttactccataaataattattgaggtagttgtgaaaaatgcttaccagttgaggatctcttttatttgtcttaaccgtgaaactaattttgagttaaaaagcccatttggagttcttaccacacctcaaagctgtctgttttaatactttgagaatgtgaggaagtgtatttgatagactaagtctatcaaatactctttagggacttaatttttttttttttttttttgagatggaatctcgctttgtcgccaggctggaatgtagtggcgcaatctcagctcactgcagcctccgcctcccaagttcaagtgattctccttcctcagccttcagagtagctgggattacaggcacgtgccaccacacccagctaatttttgtatttttagtagagaaagggtttcaccatgttggccaggatggtctctatctcttgacctagtgatccgcccacctcggcctccaaaagtgctgagattacaggcgtgagccactgtgccacagccagggacttaattttttttaatgagtatctttttaacctgagatgcttaaaatactaaattttttattgtggtcctggaacttgttatatattagttttgaaaatggctaatttttacatctctgtttttagaaaagatatatgtgaactggaaa

SEQ ID NO: 85851 - DNA, 364 bp, Homo sapiens
gtggcgggcgcctgtcgtctcagctactcgggaggctgaggcaggagaatggtgtgaacccgggaggcagagcttgcagtgagccgagatcgcgccgctgcactccagcctggcggacagagagagactccgcctcaaaaaaaaaaaaaagaaaaaagaaaaaagaaaaaaaaatgatccaaaagaatttttcaaatgatacaaactagaaatacacagaagaaatataaaaaggcccattgaaaactttataagtaggccgagcgcgatgcctgtaatcccagtgctttcggagatgaggcacgaggatcacttgagaccaggaattcgagaccagcctgggcagcgtaacaagaccctctac

SEQ ID NO: 85852 - DNA, 1200 bp, Homo sapiens
aataagtctaaatttttttctgttcctggagatgaaggagctctgcagaataggccacgtcttcatttacctttatctctagtagccaaaagtcttgatttttatataactggaaaaaccacgcagcataatgcttatacacacacgcgcgcatgcatgcacacacacgcacgcacacacgatgcacacgcatgcacacacgcacacatgcacacacacgcatgtgcgcgcacacaccacacatgcacacacgtacacaatgcacacatgcacacacgcacacacatgcacacacgcacacgcatgcacacacgtgcgcacgcacacacacacactgagcaccgttgagctttggtagaaaatggcaaaattacgatgtttttctcatttctggtgattggcttccgagtgttatttagagagcggagtggagagggctctttgcagccctgcggtagtgtcttgtgctcaccaagaggctcacgggaaacatgtcctccaacatgaaggtgtttgctaagattccaaccaggacccagtcttgggccacagaacactgactgctcccccaagcccctcgcagaccgcagggatattttcccttcagaacctgttgcatcagaatggggaaagcgagggctgagaatcccagaggaggccgtgaactgttctggaaaagcgagggctttgcagtcagaccttcatatgcactttgttctatctgttgcgctctgcctaaatgaccacgggccagtgactttacctctctgatccctgctccttgcctagatagtggggatcacgtcgtaatgtatgtaaagaaccgggtgcgggacttggcacctgggaagtgtcttaatacatgtctgtcgagaaaaggaagggtctcgacgtgcggaaacaagacggatgccaggaaatacgtctgcccacctccacgcccctgacagcggaggctcctggaggtctggtgagaggccccacgtgctccagccccctccgctctgtgctgagctctgcctttaagagactgcagctcctgcctctaaaaagcctttcaaaattctttattaaattttcatggcgcataaagtcaaggttctgttacttggcctcagttgtcttggcaacttcataaaacgcaataataaaacgaagctgagtgttgctaaacacaggctcattgtataaacgaaaaaa

SEQ ID NO: 85853 - DNA, 199 bp, Homo sapiens
tagtgtgggatgctgacagtaggaagcttgggtgtttatgagggcaggatatgtataagaactctcagcatattcagtcctcacaacaaccctatgtgtccaacatatccaagatattatcatctcaaaatgtaaccaatattttaaaaatttaaatagttttggctgggcacagtggctcacgcctgtaatcccagca

SEQ ID NO: 85854 - DNA, 528 bp, Homo sapiens
aaggtaaaattcaacagtctggaattcaataaaacattagtcctgcccagaagaattcaaaactatttatgtatacactccaccctcaaggagggtgctccccactccttacacatggactatgcatagtgacttccttcaaaacagcaccagtatgaaaatgaggggaaagattactttacagtggagaaatgtgacaagcattatctcaggcaggtgatcaaggataacatcaatagtaataaatcatgtcagtaataggtatccttgatatgatgtgatgacaccagcagttttcctctcaaaaacagaaaatcccagtgtaatcatgagaaaaacatcagaaaaatgtcagttgagggacattctacaaaatacctgacttgtactcctcaaacctatcaaggtcatcaaaaacaggaaaagtctgagaaactgtcatagccaaaaacagcctaaggtcatgtgactgctgaatgtgatttggtatcctagatatgactattaggatcagaaaaagacactgta

SEQ ID NO: 85855 - DNA, 700 bp, Homo sapiens
gttgacacagtctatacatgcattaagagatccactaagaagaatttaaaaagtagtttagaaaagaggagctgtcctgctttccttcttatagatagcattttggagaattttttaagctttaccatggtaactaaattgatcagtataccctgagatgtgagtctcctccattactggcctatgaatttcatccttccaagttcttaattccttgttataccagggacaatggaggaaaagtgtgaaaccagatcaaagacatcaaatcaagaacaagaacaactttgagtgtaaatatgtaactctactgcagcatcacctgtgttttccagatcagtcacctatcaaagataaaaacttatcaggcaaaagaaggtaatggaggcaaaagtgatggtacaattagtgccaacactggatgaaaagaaagatcttaaattagttgagtattaagaaaacagttccaacgaagcattagcccaggccagatactcgaaaattacatacctgtgtggctagtagtctgtgggacactcaaataagctaaagtttttggccaggcacagtggcacatgcctgtaatcccagcattttgggaggccgagccaggtggatcacttgaggtcaggagtttcgagaccagcctggacaacgtggtgaaacctcatctctactaaaaatacaaaaaaattagcca

SEQ ID NO: 85856 - DNA, 252 bp, Homo sapiens
gggattacaggcatgagccactgcacccagcccgtcgtgttctttcttgtcgtcattctgttctgaagttgtttcattttataagccttaagttttgaacagggcagtactcactgacaccctcttaacagactcagaaagatgtgttaattcattttttagggggagaggggagatatttgtgttccagcagcttatttaggtcacatacctcctgataggtcttcccattctttgaaatcatgacattga

SEQ ID NO: 85857 - DNA, 534 bp, Homo sapiens
ccatgattgctattgtcccattggccaaaccaagttacgtggccaagcccggagaaaatatgggagatcattacccagtgatatggatattgatattgggaggcaacaggctacaacaaatagtggtagacttatttaccatatcaggcaagagctccatgtttaaggtagtgacaaaagatgtgtttggcagaatgtgcattaaatctgattttatcactttctttagagaaaacaatcacttatctattatttatgttttaggttcaacatttgttggatttaagaatgtttgttcaggggaaactaatgttatattcattactaaccctttaaatgaggatttacagcatccaatccatgtgaagaatataaaactggttgataccactgaacaatcaaaaatatttatacataggcctgatataaggtaaaatacataaaaattgtggtttttctatctttatagtttttcattctcacttcctcctgctcaagatctgagaaagttggcatattaaaataactgccagt

SEQ ID NO: 85858 - DNA, 380 bp, Homo sapiens
  misc_feature (184)..(184): n is a, c, g, or t
cattgaattgacagacataccagccaatagctttccaactatcagttaacagaatgatgctatcttactgtgaggattctgggcttacagcattcgtttccagcataacagtgatgatatgctttatttattgagtttcctcataataacatgttaaatatacatttcatatttactttttatnattatggaagtaatgtactaacccttcatgaaaaaatgaaaaaatatcaggacgatgtaaaggcaaaaagacacatcacacatctcattcaaaaatgagttatattagtatatttcatattaatatttttctttcacaaatattgatttatagttatattttataacattagagctataatatacaataacttagg

SEQ ID NO: 85859 - DNA, 382 bp, Homo sapiens
agcgacagacaagtgagcatcactaccagagctctgcctcctgtcagatcagtagcgactttagattgtcataggaccatgaaccctgtgcatgcgagggatgtgggttgcacactccttatgagaatctaatgcctgatgatctgaggtggaacagtttcatcctgaagccatccctgtgcccctacctgtggaaaaattgtattccatgaaaccagtttttggggccaaaaagattgaggaccgctgctctataagaaactattactgaaataaggtataaagtctttatcttacttatatttatatcctctatggtgtccacacacaaggtgctttttacacttaagttgttaaactaaaatatttctttaaacttaat

SEQ ID NO: 85860 - DNA, 555 bp, Homo sapiens
cactcggcaatggaacagttggtttaaattaggtttccatgtgaaatatggtatcgctgtttttttcctagcattgtgggaaagtatatggaaaatgatttgactgataggaaataaatctggatgagtgatcaggattgtgacacaaaccaagtggtggtctccacctgccctgtgaagcagacctctccagggggaggtgagttaaccctttccagccactggactagtaagtcaatgcatggtatcagaacagcctgaaagaatgacaactttccagagaccctgatttgccatcaatttcaactagaaaggagctaaagccatagagacaatatagccagaggcctcaacaactaatgagttgggtggctttgagaaactgtttttttacttttcaggatctcatttttatttgtgagaagtgtttgaatttccaactcaaagagtcagtagggttatgatgctaagtgtttgctgatggtttcccattttaggatagggctcatcaaaagccagtcagactaaaggaagaattagatggatgcaccaatg

SEQ ID NO: 85861 - DNA, 341 bp, Homo sapiens
cctgggcagacactcacaacctccccggccaggacaccgcgcctcctcctaagtggctggaagcagggggcttggaaggtgagtgtcctagactcacccaggaatggcggtccctctcctgtcccagtgggccacgctccagcagcctctcatgagaacacaggagggggagccgacccaaagccccctggaggtgctctgctcaatgtacaggagggaacgcaggagctgggtggagaccagagcccctttgaggccgccccgaccagcccctgacaatgcagaccccgggcctacccagcagggagccctccacggctcatgtttgggtgaacacctgt

SEQ ID NO: 85862 - DNA, 380 bp, Homo sapiens
aggcatttgcaatgaatctcacattgctttttcttgttattgaatatgagatcgtctctctcaaatcagaatataagaagccccttgaagactacatcaagtgttattcattcctagtaccctcccttccttccgaatgttgtccttctttgtcttactcccaccccacaaaacacaaacacaaacacacacacacacacacacacacacacacacacatttgtagacagggaggtatgatggcattctagatgcttggtggaaaacaatttggagaatgaaaagacaagccacgaacttggagaaaattttgcaaaacacattatctgataaaagacttctgtccaaaagatacaaagaacttttaaaagtcaacaccc

SEQ ID NO: 85863 - DNA, 285 bp, Homo sapiens
caagaagaataagataaatatggtggggatgggggaggaaggagggaagagagggaaaatccctaggcatattatatttgaattgctgcaaatcagaggcagaggaagaaaaggagcattatatacacacagatttcttgtcagaaaccatttaaatcataagaaaaaaagtgacatctttttttattttttgagatggagtcttgctctgttgccaggctggagtgcagtggcgtgatctgggctactgcaacctctgcctcccgggtttaagtgattttcctg

SEQ ID NO: 85864 - DNA, 194 bp, Homo sapiens
acatcagcctatggttttgatattccgtcaaatctaatgtgtatttggctcagagctagaaacgtgacccattttttcaagtctcagctcaggagtcacctcttctgtttgacacacttgtttgttcatttgcccaacaaatagagacaccgcatctactgtgtgccagttactattccgagtgctgtggtttc

SEQ ID NO: 85865 - DNA, 262 bp, Homo sapiens
gatagagcccaacagtaatattttctgaccaagacaaccaaatattaaaattaaggtgcactacttgtctaataaaaccagttaaagaaatctgcatcttaaacatctcggtaattactgaaggtcctgtggtatcaaaatattacctaggcattatttactaagaattgatgcttgtaattagctgggtgtggtggggtgcgcctgtactcccagctacttgggaggctgaggcaggagaatcgcttgaacccaggaggcg

SEQ ID NO: 85866 - DNA, 409 bp, Homo sapiens
tgggatatctgaatagaggtgtttggtgggcagacagctgtacagtctcatgcacagttaaagaactgggctggagaaaaaggctcagcagtcatcagcttgtgggttacagtttgatgtcataggaaatgtcagagtttccaagggacatatgtagactgagaagaaactaagtcatcagtctttcagggatgttgggaaaagaggaagccacaatagtatatgattttaaaaagttgcgggggagtaagaaaatgaagagccagtggcagctccagaactaattgagtgtttcaagaagaagcttgcggttagtggcattaacctgctgtgagttgatttaagatgtgactaacatcatggatttaaataaagagggtggcctctgggtagagtcttaagggcaaaa

SEQ ID NO: 85867 - DNA, 359 bp, Homo sapiens
gaagagaatgtgccagcaagtgcagtatatcaggtatttgagactcatgaaggaaatagtaaatttaagaataacagaattgaatggccaagtgccactaatgctctgtagaaagagggcttctttggttgcatacaaatctcatctagaatttaatagtccaagtagccaaactggtatttgtccttaagaataaatactggaagatcaagcacagaaagtctagaatagaggcatgtgaatggacatacttgtgtcaagtatgtacatgaactgtgaaggtctctgtattacgtgcagtgcccaccagagagcattcagtactgaagagtctctaaacaataaagcaaactaaacac

SEQ ID NO: 85868 - DNA, 301 bp, Homo sapiens
ttattcacaggtctgtgagggactgcgaagcttactcaggaaatgaaaacaaatgatggtcatgttgcagttttttccttgaaggacaaccgaaccatagcctctaaagttcaagtgcactgaggtgtcggaacgctgaaagcatgaggaaacgaggacgtagggtgtgactgaatggtggctagattagtgggagcagttcacctggatgaagattgagagcatcgtctttgagaagtgaaagactagcaagaataaaataaattaagtccagtgtttgagccaaggttgccacctgtct

SEQ ID NO: 85869 - DNA, 361 bp, Homo sapiens
tgtaattagcgacacacacaccagccggtccctttgcctggttgggaaagggacagctttttggcaagaaaagatcacccagaacacccagaactaaatattctctggttcctattagccctgggcttcttacagcactaattaaaccactgttttgtcttcttagccattaatatgctgagatcacagcccccgggttgggggaggaaggatagtgcagaaaaaaacggtaattccctccctcaatcaataggtgcctgtacgaggaggcagagcccagggcacacatgcacacacacaacagccagatttctgctctcaaaggcagcggatttcaggggcatagccaagggattttgca

SEQ ID NO: 85870 - DNA, 689 bp, Homo sapiens
ctcttatatgaaatgcatatatatggtatacagttccagtaccattcaaatcagtaacaaatgagatgtttgctctgtttagggaataaggaagaagggaaaaaaaatgacaaaattatacccagcggttgaatatgtagacaaaggagtttgcaaatttaagattttttttttttctgccaggcaagaccaataaatggcattaggagcactgacctacacatttattatttagtatcagatgatgtttgtgagtcctgtagttaaagactttagaacacagaaaaggtacgtgtgtttgtaatctgtgtatttcctccaacggagttccaggatttacgctcattttaaaatataagggtacgaacattttctgtggcagtgtatgtcatctccccaatgaccactacatgtcagaacagttcaagattactctcttggcagtaagaatacatgtatttcctttaaacttcttcttttgttttcctttatcttctactaaattaaatttagtcaacaaatacttatcataaaagggttgggaaatgctgactaaataaaatggaatatgtttatgaatatatgtaatatacatagtcatacatatgtacatatacatatgtagatttacagattttctcagtgccctcttgcactaatttacactgtggatttctaagagggaaacc

SEQ ID NO: 85871 - DNA, 454 bp, Homo sapiens
tcccatgattcaattacctcctaccgggtccctcccatgacacttgggaattatgggagcaacaactcaagatgagatttgggtggggacacagccaaaccatatgaaacagtgaactgggaaatagaccaatagaaatcaccagtcagaacaacagagagaaaatagactgaaaacaaaaatgaacagagcctaagggacccacgggaccataacaaaaaagatttaacattcttgtgattggtcaccccaaaagaaaggagaaagagggtgaggttaataaaatactcagagaaacaatggctgaaaactttccaaatttggaaaataaaccaacagatttagaaagctatgtgaacctgaaacagtacaaaaccaaagaaatccatgccaagatgtagcattattaaatttctgaaaattaatggcaaaagaaaaaaaactgaaagcagcc

SEQ ID NO: 85872 - DNA, 387 bp, Homo sapiens
ttctaaaacgagtccagttctagtaacctaaagtaaatttgttaaccaaaatgataggtaaaaagatctatacatcttaatgaaataaaacattcctgcttttagttattatgtatgtacaccatatatgaataaacagtttccaaaaacttaaaatacaaaatatattttaccaaaaattatactgaatataatttaaccttggggaatccagaatacttagtattttcacatgaaactacaaatcatagactctgacactttgatttttaaagtactctgtccataaaagatttgtactgtttagatgggagaaacctctagagagagtaaaaatgaattacactgtatcttatatgaagtaaaaaataaatcagaggtgagaat

SEQ ID NO: 85873 - DNA, 337 bp, Homo sapiens
tagtcttagtctaaactctgcacactaggattctagaaatatacactctaaggagatgcactattagtggcttcttaaaggaaaatacacttgtttaaacctttttcttcacagctatcttctcatcaatactcaaacaggtcatgatacaaatgcaggccctagtttacttttaagtatcacagtttgtactccattaatattttccagaaatttcatttatactcaaacactgcaacaggcaatacacagtataaaagctaataaaggctttcttaataaatgtaaaacagatcatctaagactcaaatgcacaaattccactatcaaatatccc

SEQ ID NO: 85874 - DNA, 345 bp, Homo sapiens
ttggttgttcaatgtcttgctaatcaataacttctccttcacattagctactgtttcagcacattataggtttagtgtgaggtttattgttaatgagtaaatgtaaatatattttaactggtctgctgatgcatttgatctttttttttttggttgacttgttatatctggttagattgccatgcaaattttacttcatactgtagctaactgataaaatttgtgtattaagagtaagatatttgtattgccagttattagtaccagtattattagtcttatgtggggttttttttgccaattatttgcaggaatgatactatgaataaactcttattagtatat

SEQ ID NO: 85875 - DNA, 2669 bp, Homo sapiens
aacgccagagcacagaacacacagttcaagtttaaattattaaattgtatgcaagaaattattgccatagcatagtcttgaggagaacacctctacagtatttcttgatctaagaacctgaacatatgttaatgaaattattagagtaagttctatctcaaaaatttcttattttatgaatgttttcttcacctaataaacaatactaaaatccataacagctgtctggcaacagtgtaattagagcttcttttatgttagagattccatctacctctgcatcttatctagctagatacagtctttctaaactttctcctttattcccatgtagagaacaaacaaaaatcacacctaaattaaagatctgtggtgaaggggaagaggggttgctattaggagttttcccggtaaaactgtaaaaacagtaatctgcattcagtatttgtttgcctagttcatcaagatatttaccctaaaaacacattttaataaaaatttgggtaaactcatgtatcgcagtaaaatcttttatgaattgggtgggccctaaaaacatctgtagtacgtgatgtgtttggttagattcagccaaaccgacacccgtatgctaagactgcattgtcattctgacaggaggcaggcctcagtagttgcagtgagtgcatttactaatataaggatccttctttgtagtgacaacaaaaatgagattgtaacttaatcaaatatgagtcagatatagtaattcctgatattgcagatgaaagagcagggtcttttcaagtgcttgctacaactgactaaatttgaagctttttatgtaaaagttcttctcccagatattttaaaccagtatgttaattatttcctagaatgaataattctccttttttgatagatttttgaaattgttttacttactacttacatactttgaacaaatatgtttttctaatcccagcattaaattgaaacaaatatttaaaataagattgttggaataaaagttatagatagtcacttgttgctaataaaagacattccttggcaacagccacatccagctaacttttgcaagaattttttaagggattagatttaggggttaatgtttagaattatttttaaaatataaattatattttaggctgtatttttgtgatttttaagtgaaaaaaataaaatgtagttgtcttgtttattctatagatatcttaatgaccactgaacaaatgatcatattgccacatggtctatcaactatggttactatgatagtgaaataaagaggatagttttgcttgacacctaaatgatccaaacagttgtttttacatgacttaaatcatggctgtattatttcatttttaaagaaaataaagtataaaataatacatttaaaatacctgtcaaagttttaaaatataagatagaaccttctttttttgccttcttacacatgaatgtacttaaagtattgttatgtgatcttgggatacttatttatttttgaaatttttgtatatatagcatttctgaacttagcaaataatatgtgtaaaggaattaaccaaaaatgaaagaactggcattttcatatggatacatattttgcttaaactaaataaaataacttagatttatttaaatcaggaatattttacgtgttgatcatttttaaagtatatttgttcaaatattcctaattgtttttcagcacacttgtttaagttcttgcctttcaggtatactacagcgttatatgaacataatgttttaaaaaaatcttggttgtagtttctaattttcactgcataacaaatttgaaaccaaatgttgaatttctctgtgagggtacttattttgcctacagtttcaaatatattttcaaattcatctctttcttactagactgtgagctccttgtggacaaggatgttattttagttataatgacaactttaatatctagcaaagtgccaggcatagagtattcctttattgaaatgaattgatagatattgattattaaaatgctactacagtattctacgatgcaggctgaatgtatattacagtaattctctggctaattttaaaagtaagacatagaaaacaaaacacctgtagcattttctttatttaaaattgaaactctgttttgaatcctttttattttgtcaaacattctatgcaaatattgaaatatgcaacagctaaactttatggtacatattaattagttttattttcttttcaaaatcagaaatgctgtatttaagcttcctggaaatgtcgacaatcattttaatgaccaaaggtgctacttatttttcaacattgaccttgatcataagtgcttctatctgctgagctttatttattgtttttggacagaaagtttggtgggaaggttgcaataaaatcagaatctctcttgtctgaattatgcagtttaaccctgtccatgttcctctgtactctattcttactgtattttagttattgtttcttacttatcactaatttttactgcaggtctgtgctgtttcttagaaagtacatgcatatatatttctataatatgtaagaaaaaacctgtattgcttattaaattaaaattaaaataaaaaaattcatgttaaatttttgaaatgaaatctata

SEQ ID NO: 85876 - DNA, 268 bp, Homo sapiens
tttaaaaagtccatcctttattaattcaacaaatacttaaggagtctattacctaccaggcactatgcttagcactgaggtgcagctgtgaacaagaaacagtccctgctgccaatgggcttccagctcattgaggaagatggcaaggaaacagaggacacagcacagagtggcaagttctgtgacggaattaaatttgtgttgctttggaaacatttaagaggggatacccagtccagactacggggaaggagactggtttctgatc

SEQ ID NO: 85877 - DNA, 898 bp, Homo sapiens
cccgactgctgagccccctggtgaaaatccccccacagtacaagggcagcctgtatcccatcaatccccaggatcacccaggccctctgcactgcacagaaactgcaggaaacgcctccccaccagcttcgcctcctcctccagtttccgcaggcctgtggctccctcacacccctcctctctctttgctgttattttaaagaaaagcagaagcgagaaatctctcaaaatgtcccaaccttgggtcaaaccacagacctttcctcctgaccccttgtgagttgagggcttttcctctggttaagccagttcccgttcctgcgcaggatccctcctgacttctcaggaagtctttgccatccctgccctttcttgtgcctaacatttcccccttccctcagctgaggctggaccagtccagtttatcacatcacccaccaaaaatgagccccacctgctgccttgttctccccttcgtgaccacgcacacacacttgcacacacatacacatatgcacacacatatacacacgtgcacacacacgcacacatggtccccatttcgtcacgtccacctcactcgtcagcccctccattgtggcttctgccccatccctctgctgaagtagctctttgtaaagtcatggatgatgaacacaaggtcactaaacccagggcgcattttcattttccttgagctggacccctgagctgtggtcagctggccgctgcctgcttttgtcataactgtgactactcctccttcggttgcctcaggcttgcacttgaggtccttcccttctcagccatggtgtctccctgcgtggttccttctgcacccaggcatcagtgccatcctcttctgtcagagtcaagccacttccgagctccaggccca

SEQ ID NO: 85878 - DNA, 1874 bp, Homo sapiens
ttagaggatcccctcgaatcgacggtttctccatgttagtcgtggctggtcttgaactcctgacctcaggtgatccacctgtctcgacctcccaaagtgctgggattataggcgtgagccactgcgcctgaccacctacctgctgggttttctttgtatgtcagcatggagtttttcccaaagaaagggaatatggatggagagagagaggttatgaacaggttatgttacagaggttattgcctttgaaactgggccctcatcattctagacttgcttgctttgttataaattagaagaaaccagagggagatgtgccaagtaaacattcgaatgactgtttagaatatggttttcttaattagcagtcatggggaaaacatgcatttttaatttggaaaaaacctgacagttaacatggttctgtttaccttgattagtgaagtaatttgctgcagtgttacagaggagcagaatcacttgggtctcaaaatagactgaaaatttaactccccaaaccaaatttaacaaacagaattggttattagagatttataggcaaaaatatcagtttggaaattaaccttggctactggccaccttagctaggttttctccacagatctgttttctccacagatctgagtacttaacacttcccagatgattggagaatattctgggctgttggggatgacaggaaaatgtgagggggagtagcctaggtaagggtgatgatgaaattgttctatctgctgtcaaataatcttttcctgtttgcaatgtttttattttttctgagtccctttgggaaccaggtgctaacaagaagctgttatgtgtgggatttcggagccttactttaacgatagaggaaccaagtatcattttagatatcttttatttatgttctcggtgcatatgttgactttaatccctcttcccccacacctcgcccattaaggggaaggaggttaactctgcagatgatattcaggcccaaccagctcactctctggggtggctactgactaaaggcagagaatgtccatccaacatgcccttctgactatacagtcaccacttttttgggggaattctttagcagatcttattgttctttctgcagaagctatcattcctacctccccaacccccaaaatctctaatacaggccaagtcattttttatgatgggtctctgagatagggcagtttgttagaggagaggctagggtagagagggagagaatggaggtatctgaaaataagtaagaaaaaggcattgatttttatttactcggaacggtcctcttggcatcccagataagggaaataggatttgatctccaattgtattgccatggagagaatggcaggtgaggatgctttgaagtagttagaaattaaatattgaatacattaatggcaataccatttcatgactttgcatatctttctggattagtcatggaagttggggaaatattgcttagatcttctgggttagaggattccaactgtttattggcaaggttggattattaagaatcaaatagcagacaaaaatggctgggcacggtggctcacgcctgtaatcccagcactttgagaggctgaggtgggtggatcacttgaggtgaggagttcgagaccagcctggccgacatggcaaaaccctgtctctaccaaaatacaaaaattagttgggcatgatggcatacgcctgtagtcccagctactctggaggctgaaacaggagaattgcttgaacccaaaaggtggagtttacagtgagctgagattgtgccactgcactccagcctgggcaatagagcgagactctgtctcaaaaaaaaaaaaaaaagaaggaaa

SEQ ID NO: 85879 - DNA, 1857 bp, Homo sapiens
ttagaggatcccctcgaatcgacggtttctccatgttagtcgtggctggtcttgaactcctgacctcaggtgatccacctgtctcgacctcccaaagtgctgggattataggcgtgagccactgcgcctgaccacctacctgctgggttttctttgtatgtcagcatggagtttttcccaaagaaagggaatatggatggagagagagaggttatgaacaggttatgttacagaggttattgcctttgaaactgggccctcatcattctagacttgcttgctttgttataaattagaagaaaccagagggagatgtgccaagtaaacattcgaatgactgtttagaatatggttttcttaattagcagtcatggggaaaacatgcatttttaatttggaaaaaacctgacagttaacatggttctgtttaccttgattagtgaagtaatttgctgcagtgttacagaggagcagaatcacttgggtctcaaaatagactgaaaatttaactccccaaaccaaatttaacaaacagaattggttattagagatttataggcaaaaatatcagtttggaaattaaccttggctactggccaccttagctaggttttctccacagatctgagtacttaacacttcccagatgattggagaatattctgggctgttggggatgacaggaaaatgtgagggggagtagcctaggtaagggtgatgatgaaattgttctatctgctgtcaaataatcttttcctgtttgcaatgtttttattttttctgagtccctttgggaaccaggtgctaacaagaagctgttatgtgtgggatttcggagccttactttaacgatagaggaaccaagtatcattttagatatcttttatttatgttctcggtgcatatgttgactttaatccctcttcccccacacctcgcccattaaggggaaggaggttaactctgcagatgatattcaggcccaaccagctcactctctggggtggctactgactaaaggcagagaatgtccatccaacatgcccttctgactatacagtcaccacttttttgggggaattctttagcagatcttattgttctttctgcagaagctatcattcctacctccccaacccccaaaatctctaatacaggccaagtcattttttatgatgggtctctgagatagggcagtttgttagaggagaggctagggtagagagggagagaatggaggtatctgaaaataagtaagaaaaaggcattgatttttatttactcggaacggtcctcttggcatcccagataagggaaataggatttgatctccaattgtattgccatggagagaatggcaggtgaggatgctttgaagtagttagaaattaaatattgaatacattaatggcaataccatttcatgactttgcatatctttctggattagtcatggaagttggggaaatattgcttagatcttctgggttagaggattccaactgtttattggcaaggttggattattaagaatcaaatagcagacaaaaatggctgggcacggtggctcacgcctgtaatcccagcactttgagaggctgaggtgggtggatcacttgaggtgaggagttcgagaccagcctggccgacatggcaaaaccctgtctctaccaaaatacaaaaattagttgggcatgatggcatacgcctgtagtcccagctactctggaggctgaaacaggagaattgcttgaacccaaaaggtggagtttacagtgagctgagattgtgccactgcactccagcctgggcaatagagcgagactctgtctcaaaaaaaaaaaaaaaagaaggaaa

SEQ ID NO: 85880 - DNA, 1594 bp, Homo sapiens
aagaaagagcaggaagcagaacagtaccgtcttaagctggaggccatagcccgacagcagcccaatggagttgatttcaccatggttgaagaggtggctgaggtagatgctgtagtagtcacagagggggagttggaagagagagagacaaaagtgactgggtcagcagggaccacagagcctcacactagagtttccatggcaactgtttcatcttaatatgcaagggccacaatttgcactgtgttcatattaatcctcttttaaaaaaggaaatatacagaagacaaacattgtataaaaactaagagtgtctttaagaagaaaactatagcagggtacaatgcttgggctcaggaagtttctctgtgcaactagaaaattcaaagccatatttagggaacattttttctgaggggccaaaagaataaaggaccaaatttcttagctcatatcattgctttaaacatagaagtaaaagaatactgcatgttgtgggttgattttttttttttaaataactgactttctcacaaaagattttaagataacatttctaatatatatgcaccaatatatatgcctttaataattataccatcaagtgacctgaaaatgccccttagatttatgatgcgtatctgttggaaaaaccaattggaagggaggttagacaagctttggggaagagaaaaggaatatagtccatttccaaaggagcaggaactcccaaccttaagttaatttcactgaagagaattttccctttttttttttttttttgagacacggtctgactctgtcacccaggctagagtacagtggtgcaatcttggctcactgcaacctccgcctccagggcgcagcctcctgagtagctgggaggacaggcatatgccaccacatcactgagaagaaatttttgattgtctgacagatacttatccattatgtgtctatagttcagatgcttgtgtaagaaactgaaataagctgcgtgtggtggctcacacctgtaatcccaacactttgggacgttgaaatgggagaattgcttgagtccaggagtttgagatgcgcctgggcaacatagaaacctgtgtctacaaaaaatttaaaaattagccaagtatggtgacaggcacctatggttccagctactcaggaggctgaggtgggaggatcgcttgtgccttggaggtcaaaactgcagtgagccatggttgcaccactgctctccaggcttgagtgacagagcaagactgtatctcaaaggaaaaaggaaactaggccaggcgtggtggctcacgcctgtaatcccagcactttgagaggctgaggtgggtggatcacttgaggtgaggagttcgagaccagcctggccgacatggcaaaaccctgtctctaccaaaatacaaaaattagttgggcatgatggcatacgcctgtagtcccagctactctggaggctgaaacaggagaattgcttgaacccaaaaggtggagtttacagtgagctgagattgtgccactgcactccagcctgggcaatagagcgagactctgtctcaaaaaaaaaaaaaaaagaaggaaa

SEQ ID NO: 85881 - DNA, 3296 bp, Homo sapiens
cgcacgcagagacacacggtcactggaattccattagaaaaaagtgagccgagcaagggttagcgggagaagatttttttgaatcttgtcttcgtcttggtgcgaaagaagcgactccagtctctcgtcctcgaagctccgactggattgttcttgggcgctgacacccgtctgtggatttcttttctatttgcattttattccgaccccctccctcgccgcttccttccagcccttcactcgcaaatcgcctctctccccacctccccaggcccctcctgggaagcgcaggggaattggacccgcggggactcacgccttcccggacgattggaggggagggctgaccccaggactgggctgttggcttagaaagccgatacacagatacgcgtatatttgattgtagcgggcaaggggggcgtcgagaggcagcagcccatcgcccgcctctcaccccaccccctccagccagaggcgagaatcgcaggactcgggatcttcatcgggtggactagctgggatctccgcattggatttggggctgattaccactgcttgcctattattattgttgttgttactactattatttttttttacccaagggagaaagacaaaaaaacggtgggatttatttaacatgatcttggcaaacgtcttctgcctcttcttctttctagacgagaccctccgctctttggccagcccttcctccctgcagggccccgagctccacggctggcgccccccagtggactgtgtccgggccaatgagctgtgtgccgccgaatccaactgcagctctcgctaccgcactctgcggcagtgcctggcaggccgcgaccgcaacaccatgctggccaacaaggagtgccaggcggccttggaggtcttgcaggagagcccgctgtacgactgccgctgcaagcggggcatgaagaaggagctgcagtgtctgcagatctactggagcatccacctggggctgaccgagggtgaggagttctacgaagcctccccctatgagccggtgacctcccgcctctcggacatcttcaggcttgcttcaatcttctcagggacaggggcagacccggtggtcagcgccaagagcaaccattgcctggatgctgccaaggcctgcaacctgaatgacaactgcaagaagctgcgctcctcctacatctccatctgcaaccgcgagatctcgcccaccgagcgctgcaaccgccgcaagtgccacaaggccctgcgccagttcttcgaccgggtgcccagcgagtacacctaccgcatgctcttctgctcctgccaagaccaggcgtgcgctgagcgccgccggcaaaccatcctgcccagctgctcctatgaggacaaggagaagcccaactgcctggacctgcgtggcgtgtgccggactgaccacctgtgtcggtcccggctggccgacttccatgccaattgtcgagcctcctaccagacggtcaccagctgccctgcggacaattaccaggcgtgtctgggctcttatgctggcatgattgggtttgacatgacacctaactatgtggactccagccccactggcatcgtggtgtccccctggtgcagctgtcgtggcagcgggaacatggaggaggagtgtgagaagttcctcagggacttcaccgagaacccatgcctccggaacgccatccaggcctttggcaacggcacggacgtgaacgtgtccccaaaaggcccctcgttccaggccacccaggcccctcgggtggagaagacgccttctttgccagatgacctcagtgacagtaccagcttggggaccagtgtcatcaccacctgcacgtctgtccaggagcaggggctgaaggccaacaactccaaagagttaagcatgtgcttcacagagctcacgacaaatatcatcccagggagtaacaaggtgatcaaacctaactcaggccccagcagagccagaccgtcggctgccttgaccgtgctgtctgtcctgatgctgaaactggccttgtaggctgtgggaaccgagtcagaatatttttgaaagctacgcagacaagaacagccgcctgacgaaatggaaacacacacagacacacacacaccttgcaaaaaaaaaattgtttttcccaccttgtcgctgaacctgtctcctcccaggtttcttctctggagaagtttttgtaaaccaaacagacaagcaggcaggcagcctgagagctggcccaggggtcccctggcaggggaaactctggtgccggggagggcacgaggctctagaaatgcccttcactttctcctggtgtttttctctctggacccttctgaagcagagaccggacaagagcctgcagcggaagggactctgggctgtgcctgaggctggctgggggcaggacaacacagctgcttccccaggctgcccactctggggacccgctgggggctggcagagggcatcggtcagcggggcagcggggctggccatgagggtccaccttcagccctttggcttcaaggatggagatggttttgccctccctctctgccctcgggtggggctggtgggtctgcagctggtgtgggaacttccccacggatggcggtggagggggttcgcaccgtgctgggctccccctgactgtagcacggagtgttggggctgggggccagctccaggagggcttgagagctcagcctgcctgggagagcccttgtggcgaggcattaaaacttgggcaccagcttctttctcggtggcagaaattttgaagtcagagagaaacggtcctttgttggcttctttgctttctcgtgggtcctttggcaggcctccctttggggagagggaggggagagaccacagccgggtgtgtgtctgcagcaccgtgggccctcaagctttcctgctgtcttctccctcctcctcctttcccctttctctttcctcatttcctagacgtacgtcaactgtatgtacataccggggctcctctcctaacatatatgtatatacacatccatatacatatattgtgtggtttcccctttctttcctttttttaagcaacaaaactatggaaataataccccaacagatgagcgaaaatgtattattgtaaagtttattttttttaatactgttgtctataatggggaaaaaggacattggccccgcagtgccctgccccagtcagcctggctgggctctggtgggggctcctgatccgcatccaagcttaaccaaggctccaataaacgtgctaggaagc

SEQ ID NO: 85882 - DNA, 240 bp, Homo sapiens
tcaccaagaccctgcgcgcgcgggcagaagcaggaagcaaaggctttgatgaatacatgaaggagctaggagtgggaatagctttgcgaaaaatgggcgcaatggccaagccagattgtatcatcacttgtgatggtaaaaacctcaccataaaaactgagagcactttgaaaacaacacagttttcttgtactggcagaagcagaagcggcagaagcaggaagcggcagaagcaggaag

SEQ ID NO: 85883 - DNA, 615 bp, Homo sapiens
tcaccaagaccctgcgcgcgcgggcagaagcaggaagcaaaggctttgatgaatacatgaaggagctaggagtgggaatagctttgcgaaaaatgggcgcaatggccaagccagattgtatcatcacttgtgatggtaaaaacctcaccataaaaactgagagcactttgaaaacaacacagttttcttgtaccctgggagagaagtttgaagaaaccacagctgatggcagaaaaactcagactgtctgcaactttacagatggtgcattggttcagcatcaggagtgggatgggaaggaaagcacaataacaagaaaattgaaagatgggaaattagtggtggagtgtgtcatgaacaatgtcacctgtactcggatctatgaaaaagtagaataaaaattccatcatcactttggacaggagttaattaagagaatgaccaagctcagttcaatgagcaaatctccatactgtttctttcttttttttttcattactgtgttcaattatctttatcataaacattttacatgcagctatttcaaagtgtgttggattaattaggatcatccctttggttaataaataaatgtgtttgtgctaatataaaaaa

SEQ ID NO: 85884 - DNA, 832 bp, Homo sapiens
aggcacagcacatctttatggcgttaactcggctgccagctctcaccagcaggcaagtgcccacgcgtccagaagaactcagggaacccggcagggagggaaccagaggatgtttcaagtaaccccaggagctcctgccaccttccctttagggctgggtgatgccctggattgctctgtgggcagacctgtcttatctgatgccaggaagggcctgttctgagcccctgagccaaagaagggggcggggggcagccccagaaacacgggcaggacacggcattcgactccttggaagagaacctctgcccataaacagtagttcaggaaccattttacaagaggaatgcaagccgggtctctgcatcgggctttaggaacgacctgctgcagtgatgcctcggcaaccacagtcccacgatgaaggacaactgagaaccagatgtgcacagaaccaccgttcagggagtctggacccagccctgtctgcacgttatctaaacggtgacggcagcagctttggagtcccctctgccggctccaccaccacgttgctgctgggcctcggcatcaagccctgccaggtggccagaaaggcaggtggccgggcaggcaggcatcacttaacctagcgacaatcaagcctgtgcctggcatgaagtcaggcccccggaggtgctggctgaacctgaggcctttcctagccgtcaggttttgctgggcactgtgctctcaacatgctccggggcgacacaccatcctccctcctgcttcaacacagggcagctctgcagggggcaaacacaggaagccacagtcaccacagtgagcc

SEQ ID NO: 85885 - DNA, 119 bp, Homo sapiens
aaagaaaagggggggattaaaagctgagtttacagtgactaacaaccaccaacaggaaggggccctagagtaatatttaggaaatcgaagcattacatttatacaatggtctctggcta

SEQ ID NO: 85886 - DNA, 557 bp, Homo sapiens
taagtctggatgccacatcaaactgtttgtggtacttctaaacttcgtggaagagccctgtttcataaatctgagacagccttggtctgagggagcaaagacagagaattcacgtgctgcccaggcatagccacatagcaggtggacatccctggacacttttctggtttaatgaagccagctgtcatgttgatgagactcatgtgtcaaggaactgaagatggtccatagccaacagccagccaggaactgattggctagtagtccttgaggaactgaatctcaccaacaaccatatagtgaacttgcaaatggtgcttcctcagttgaaactaaagatgagactgaagtcctagttaacactttgtttgccaccttgtaagattgtgaaacagaggcctgagctaagccatgcccagattcttgatccacagaaactgtgagataataaatgtgcattgatttaagcctcagattttgtggtaatgctttacaaagcaataagtaactaatgcagtattcaacaaattttttgaaaaaaaaaagatgcttgaaga

SEQ ID NO: 85887 - DNA, 299 bp, Homo sapiens
taagtctggatgccacatcaaactgtttgtggtacttctaaacttcgtggaagagccctgtttcataaatctgagacagccttggtctgagggagcaaagacagagaattcacgtgctgcccaggcatagccacatagcaggtggacatccctggacacttttctgagattttatgtcatagaccctcattggattttcctggaagtacggagagttacatccagagaactctgaacattttggaaggaccccaatcctgcaaacaatgaatggcaataaatcctgggactggaaaggt

SEQ ID NO: 85888 - DNA, 562 bp, Homo sapiens
agtatgtatttcttgagtcattaacatacaacatatataggacttcctctgaggatacaataatgtatatgatggacaagatacgtaaaagtgccttgaagagacttggtcttgtgaggggacagacaggaaacaggcaattatcacctaacttaggtctgttgtttcaaggtttaatgaagccagctgtcatgttgatgagactcatgtgtcaaggaactgaagatggtccatagccaacagccagccaggaactgattggctagtagtccttgaggaactgaatctcaccaacaaccatatagtgaacttgcaaatggtgcttcctcagttgaaactaaagatgagactgaagtcctagttaacactttgtttgccaccttgtaagattgtgaaacagaggcctgagctaagccatgcccagattcttgatccacagaaactgtgagataataaatgtgcattgatttaagcctcagattttgtggtaatgctttacaaagcaataagtaactaatgcagtattcaacaaattttttgaaaaaaaaaagatgcttgaaga

SEQ ID NO: 85889 - DNA, 411 bp, Homo sapiens
taagtctggatgccacatcaaactgtttgtggtacttctaaacttcgtggaagagccctgtttcataaatctgagacagccttggtctgagggagcaaagacagagaattcacgtgctgcccaggcatagccacatagcaggtggacatccctggacacttttctgacaaagcacgcaatgtggggacaacacagaaatccaagaaaggcaagaccaatttcaaggcactaaataagtggactgagacaagaagtacacagatacttcccagaacaaaagattttatgtcatagaccctcattggattttcctggaagtacggagagttacatccagagaactctgaacattttggaaggaccccaatcctgcaaacaatgaatggcaataaatcctgggactggaaaggt

SEQ ID NO: 85890 - DNA, 1348 bp, Homo sapiens
  misc_feature (62)..(62): n is a, c, g, or t
  misc_feature (286)..(287): n is a, c, g, or t
  misc_feature (325)..(326): n is a, c, g, or t
  misc_feature (537)..(537): n is a, c, g, or t
  misc_feature (770)..(770): n is a, c, g, or t
  misc_feature (772)..(772): n is a, c, g, or t
gcctcaagtccaaggcctcatctttggagaaggcaaggaaggaggcggtgacagacgggctnaagcaagcccccaggagttttcggaacgcacttggaaattgtattctggacagagactacttgaggtcactaaacaagcttccacgccagctgcctcttgaagtggattaaactaaagcaaagagacaagattttgaaccatctgtggaagaggcaagatacaacagctgccaactgaacatggccctgggatacccacagcttcaagatgtgacctccccttnnagatcaagccacgttgtgattcagggggacaaggactnnagcttcctgacttctgagctcatccactattggtgagagaggccacgaaccagcagaagttctggcaaaagcagctgctgcagcagttctgggagcagatggagaaacagcaagtccacaccttttccccatcagttgagaagagtgaggagactcttggagacaactctgaaatgtgggatgtgactccagatgcaggggatggtgtggncaagccttgtctagagaagaaccaccccagacctctgacacaccagccttgaacaaccagatggtgacccagaacaggactccacacagcctttgctgtcagaaaccacaagcaaaatctggaccttgagacctccaaacttacagcactgaccaatgcataacaggaaactgggaatctcataggaagggccaggacatgaagaaaaggaaattggatccatcttaactgancntctggccacatcattggactctgtcgcaaagggactttggaaaactactttttagtcatgaagttgttcatcactcgtgaagaattacctttattgctaaggatttatcttgcttcattctgaacctcatcaataggatctgactgagagcccactgcagttagagctgagcacttttaaaaacctcatcccacactctagctgggagacgctccggacagatgaaataccttttctttggcctgtgaggcttcccactatttatttctaaactattatgttaacaccaatggacattttaggaatcaccaatggctgcttgccctcaagcaatataggccggacttattactaaccacctgcctcagcaattacctacattcaattgctttgcataacctctgccttctttcctttagggtacaaggcctttaatgttgtccacgttaagcaatgaggatcatgacaggaaaaaggttggagtattgctttttattgctttgtatcaatccaggctacaatcttcatttgatataaataaactcacttatgggtttatgacataaaaaaataggg

SEQ ID NO: 85891 - DNA, 399 bp, Homo sapiens
ccagttatattaggtctccccttttaatcggtccaggaagaatcctaagaaactggccgactcacttgataacacatgccaccaatgtgaaggccacccagcaaccacacaataaacatcctagacctgaaacacaagcattgtggaatccatcctctcactgagattacattttgtcccttcactttgtaccaactcatccagatctgctccagaagaacccacaacatttagaaaagccaacaagagtactcaaataaatgtaatgccattgtcacagcaaatccctgtagctatgaattacaatacataaaaattatattttatgcctttggggaaatattgtcaaaatagcaaggaaaaaccatctcaacataaaatttaattatggctccatgt

SEQ ID NO: 85892 - DNA, 819 bp, Homo sapiens
caacaggcgtattcgggcgtattcggcttgagacgtggcctgcaagaccccgtcagaacagaagagcaagagaaaccaaggagaagagaccaagaagaatgagaagagatgaaggtgaagagacagaaccttctgagctactccttccctgctaaatcccaggcacatgctccagattccttaggcaaaggaagaaatgaaaggagagaaagagaccaaaattttaaactctattaaaaaggactgcactgatatttataccccaaagaaccaatgatgccatgggatctaactaagatattaacagatatgaaaagagattcaacagagtagaggtgagagcagttgttagagaaaagtatacatatttcacttgtatacctacagggttcagacttcattatagacttcatggttgcatgtggggatttcttgcagagtatacttaatagttttaaaaggtaaaaaaagtaagttgagtataaaataaaaatgtgtttagttcaaaatctttgaaaataaagcacataaaaattgcagttgtggctgggtgcggtggctcatgcctgtgatcccagcactttgggaggctgaggtgggcagatcacaaggtcaggagtttgagactagcctggccaacatagtgaaaccccgtctctaataaaaatacaaaaaaatctgcagggtgtggtggcacgcacctgtaatcccagctacttggggggctgaggcaaggagaattgcttgaacctggaaggcagaggttgcagtgagccaagatcatgccactgcactccagccctggcaacagtgcgagac

SEQ ID NO: 85893 - DNA, 554 bp, Homo sapiens
tagatcccttttcacttaaaagatcttgaaggttagtcctttgttacataagccacctttcttctctttaatttactgtataataaagttctattatatggaagttccatctttaggagtagaaatctttagctaatggtatctactgtgtcctcattatgtcacctaatagtttaaatatgccagtatttatttattggttttagtgttttatttaacaaaaccaggattgagttttatatactccactaagttctccttctttcatactttctcacattgctttattgagctgtaactcacatacaatacacttctcctttctgtagtatacaaatgcagggttagtgctcttccctttcaccgagctcttcagaaataaagtggatttttatatgaacattgaaaatgacacaatctatggcaataaatgaaaaattatcaatgttttcctcaagtctgaagctttgtgattggctagtcactgacatttataataataaactttatatgcattaaaacctcttgtagcctcttgactttaggtattaact

SEQ ID NO: 85894 - DNA, 435 bp, Homo sapiens
ttctgtggtaaatagtttcacactatgtatttctgagtccttaggatgatgatctcattttttgttccctgtgctatccacccacctgcagcaagcacaattttgttagttttattttctctttattaaatcctaatatatttactgactgcttcctagagatacataggtaaattagacagactttattctgtgtttgttttctggattttaatttttctccactcagttaattgcatctaatcatcaacacatctgccatttatttatttatttttgccatttgcttgtctgttcgggtagttgatcttggacttcctaggctccaaatctgtgagaaagaagagaactaggcacctagtttatggtattttgttatagcagaccgaatgggccaagaaaatgttaaacaaattacttacattctgtctctgt

SEQ ID NO: 85895 - DNA, 281 bp, Homo sapiens
attgaagcagtcttgcattcccaggaaaaacccacttggttatggtgtattccaaggactacataaacacacacacacacacacacacacacacacacacacacacacgcacacattccagaagtagcacaagttcaaaatacaaaactcaatttcatttgtatatactaacaataactaacagaaaatcaacattttaaaataattgcatttgtactatctctgaaaaaatgattaagtctatataagatctgtatgctgaaaatgtacaaaatgctgta

SEQ ID NO: 85896 - DNA, 1080 bp, Homo sapiens
  misc_feature (128)..(128): n is a, c, g, or t
  misc_feature (256)..(256): n is a, c, g, or t
  misc_feature (952)..(953): n is a, c, g, or t
  misc_feature (1065)..(1065): n is a, c, g, or t
gttatttttttgctaacactttggctaacttttaaaaaacattctcataataagcagatgttatcattctttagctcttcagaaaatcaacaagtgaaacgccccgggcatcacgaaaacctgttgcngcgacctttgctattgaccagtccatttgtgttttgactggaccacttccacctcttggtagctgttgtttttactatgctttgtattctggattgtactggtaaagctatgtttcttctcctgttanaattcttcaaagaaatgcttcaggatctttatccaacttgtttacagtttctgttgaaagctctgatcttatctgcagccgatctgggagaaactgtttttgcacccactgagtgaaaagtttgctcaactttaatttgccagtcagaatgttgtaagctgaactaatggagatgtttttggtgttggctattgtttctgctgttaatgtcagtcctttttcaattaaggcattaacaagattagtttatttctcacaaattaatgtggatggtctgccattgcaggcttcatcttcagcgttgtctcctcccttgttaaaacaagttatccatttgtaaactattagtttatttggaacattgtcctcataaactttttgtaaaggatcagtgatttcaccattcttccacccaagcttcaccatcaatttgatgtttcttcttgcttccattttaacaaaattcatgttgcttttataggggctcttttcaaaccgatgtcttattcttaatgcctcagagtagatcatgtcagacatgttataacaagttagtacagttttattttggtgcaaaaaattgaaatccatgaatagttttttcatactatgcattttccctgaattttctgaacacccttcaattaatctaaggtaactctgcctctaagtttttgagacagggtcttaccctgnnacccaggatagagtgcattggcaagatcatggctcactgtaccttcagacttctgggctcaagtgatcctcttgccttagcctcttgagcagctaaaactacagacatgtgncatcacacccaggta

SEQ ID NO: 85897 - DNA, 863 bp, Homo sapiens
tagagttgctttattcagcagtacacattgcgaagctgctccctgctataatacagtgtcattgttgatgtaagcactttcaagggttcttttttgtgtttatacaggcatgccagaatcactcttgtactgctccctgcacgatccagtcagcccctgcccggctggttatgtaacaaacaaggtgtgttttcagaagggtctccaaggctgcagctttgtcccaggaagtcagcctatggtgtatccctcagatgctcagatcccactgtctgggatgatcccttataccttttccttatttcgataattatagtgggatgggatggtttataagacttagagtagggctgcctaaggatgaggttaagatgaagaacactgtatcctcagcattttcattgttgcaaaaaaatttgagggtagaggagggtcaaatacatgccaaaaaaagaaattgctatgataggggaaaacgatagtctttcggcgccatgctttgttggatttttaacaacttcaggaagagtggggaaagttgctgatgagtattatcacatgtataactatatatagtagaatctcaatataatattgtctgctgggtctacagccagagattttgtctagtgaagaacagtatcaaaagcacctcattaaaagtgttaggctgagaggtggccccattggcattatccctgaggacagcattctggcaaagcttcagtgtgtactgctactttacaaacgcaaatacttttcctgcactcactttattaatgtcagcaatatttattaattgtgcccctcagaacactgtttttactcattctcctgttttaagtttctatttattttgtagt

SEQ ID NO: 85898 - DNA, 740 bp, Homo sapiens
gcactggaggcagtgattttggggcagagaattttgcaacacgtggtagtgaactgtgaggagtttgaggggtctgaagactgaaagagtcgaatggtttgttggcaggacctagaagaatcccttaggatgaagctgagtcttaccaaggtagttaatggctgtcgcctaggaaaaataaaaaacctgggcaaaacaggggaccacaccatggatattccaggctgccttctgtataccaagactggctccgccccacacctcacccatcacacgctgcataatatccacggggttcctgccatggctcagcttacgctgtcatccctagcagaacatcatgaagtcttgacagaatataaagaaggagttggaaagtttataggtaaaaattaagttacttatatgtgccttgtgatgtgttaatttggagtttggaggtgctgttacctctttgatctttcattcatatgtttgtttattcataaatttaataagtattatttgaacatctaagagccaggcattggcaagtcaagattgaataggaaacagttgctgctctcatggaatttggagcctagctgggataaagatagagaattctagtaaaaattgtggttactgctttacaggattagggatatgtatggatatcatgacaggccagagggcagagcatataacctgctctagggtatatgtgcaaggtggtcagaataaaaaacggattctttttt

SEQ ID NO: 85899 - DNA, 4069 bp, Homo sapiens
cggacgcgtgggctagttctagatcgcgatctagaactaaggcagagaattttgcaacacgtggtagtgaactgtgaggagtttgaggggtctgaagactgaaagagtcgaatggtttgttggcagggtgtcctggtggattggtttctgtaagttcagattctcataaatcgtgtgagcgtcgccgacacctctgagataaaagggcccctttcgactagcctctgctgaaaggacctagaagaatcccttaggatgaagctgagtcttaccaaggtagttaatggctgtcgcctaggaaaaataaaaaacctgggcaaaacaggggaccacaccatggatattccaggctgccttctgtataccaagactggctccgccccacacctcacccatcacacgctgcataatatccacggggttcctgccatggctcagcttacgctgtcatccctagcagaacatcatgaagtcttgacagaatataaagaaggagttggaaagtttataggcatgccagaatcactcttgtactgctccctgcacgatccagtcagcccctgcccggctggttatgtaacaaacaagtctgtgtctgtgtggagtgttgcaggacgagtggaaatgactgtttccaagttcatggcaattcagaaggcccttcagccagactggttccagtgcctctccgatggagaagtatcttgtaaggaagcaacttccataaaaagggtcagaaagtctgttgaccgatcacttcttttcttggataactgtctgcggctgcaggaagagtcagaggttcttcagaagagtgtgatcattggagtgattgaaggtggagatgtgatggaagagaggctgaggtcagcacgagagacagccaagcggcctgtgggtggcttccttctggatggttttcaaggaaatccaacaaccctggaggctagactacgcttgctgtcatcagtcactgcagagctgccggaggacaagccaaggctcatatctggtgttagtcggccagatgaggtgctcgagtgtattgaaagaggagtggacttatttgagagttttttcccttatcaagtaacagagcggggatgtgccctgactttcagttttgattaccagccgaatcctgaagagacacgataaattctcaggagtgaaattacagagtcaaagatcatgaaataataactaaaataaaatgtttccaatggccacttcttatctgatcatcattcaagcctttttattggtttgtccttcagtactacaacaaaatggaacacaagaagaaataaaatgtatggatcaaataaagaaaattgaaacaactggttgcaaccaagaaataacatcatttgaaattaatctgaaggaaaaaaagtaccaggaggactttaacccgctggtgagaggatgttcctgttactgctgtaagaatcacactcgggcatacatccaccatctgctggtgaccaatgagctgctggccggagtcctgcttatgatgcacaactttgaacactactttgggtttttccattacatccgggaagcactaaaaagtgacaaactggcacagttgaaagagctcatccacaggcaagcatcttgagatcttgcaaatacaagtctcactcttcacactgagcctgtaccactgttgtaacatgggaagacgtgaagaagaaataatctgagctttaattatttatatttggatataaggtctgcttaaataaagaatctttgtaccaaactgcccacatgagggtgaagagatttcctcaaaagacttaaatgacctggattgatcagagagaattgaactgtgacctttaaaacttctagactaattcttttagttgatagagattcatttagtcaaagacaaaagctttaactgtgagggcacagccttgaagtgggagtgatgagattctgagggacccatgaattggattgaggcttgaggggaaatggtgtgagacgaatgggctctggacatatgcctgttgatttgagaagaaatctggctggtttgagggtttcctttagttcaccctcatactctcaggagactcttctggatacttttgtcttccaccctgccctggcagtgcagccaatcagaaatggctcttgtgacttaactgggcttggatatccctggaatgtggggcttgaacattgctcctgtgatgatcatctgtcccaggtcacactccttcatttgaccacatgcgcctatttgcaacttctttttagagccaatgtaattgcctgttaggagccagaagtttgcccagctgctttcttctggttgtacagatccattgtggtctgccttccaggctcattaatagtctaactacgtaataactgaagacctatctcttgtgaagattcattctcaatgtgttcacttggacagagccctgcctggcctaacgattagagggttagtctccatcctgctcagatatgactcctgggcaattcacttaacttctccatggctgcttcctgctgaataaatagggacaggcataatggataggaatgaatgaacttttaagatactgtctagctctaaaattggaagaacaaaaagttttagattagagtcatagccttaatagccctagttgtcatcctgggagacaggcaacagtagagatatttgagagcctaaagagaggtttggcctgtgggtttttaagtggttattgaattggtatcaggagatcctgaggctggtaggggaaggtaattctttctaagttacctctgtatttttcaagttttctataaggaatacacatacacccacatgcacacaccatagtttttatacaaacagcaataacaaaaccaaaaagatgcccctttttttgtagggataagaaatacatttgttttatacttctatgctatattttgctattcaaaatttagtgggcattacttaacattgtttctaattattttgtggctgctgtatgttttatgtgttgggagcccattgtattaggccgttcttggattgctataaagaaatacctgagactgggtaatttggttttttggttttttggggttttttttgagacggagccttgctctgtcgcccaggctggagtgcagtggcgcgatctcggctctatgcaacctccacctcctgggttcatgccattctcctgcctcagcctcccgagtagctgggactacaggcgcccgccaccatgcctggctaattttttatatttttagtagagatggggtttcaccgtatgagccaggatggtctcgatctcctgacctcatgatccacaagactgggtaatctgtaaagaaaagaggtttaattggctcatggctctgcaggctttacaggaagcatggtactggcatctgcttggtttctggggaggcctccggaagcttatagtcatggcagaaggtgaagggggagcaggcacatcacatgacaaaagcaggaacaagactcagagcaagaagtcacttatcaccaaggggatggcccaggccattcatgagggatccacctttgtgctccaaacacctcccaccaggccccacctccagtattggggattacatttcaacttgaggtttgggcgggaacaaatagtcaaattatattacccatctacatggttttctttttcttagtatgggagtgtccatgaataaattcatgggcatcctcataactcttccatgaatggcaaggggtacttatggaaaacagttttccaaagatctgattgttttgaaatgtgttagattggacttgttcaaatgttcatatttttgttctatgctaaatgcatcgttaggggagtagtggtaaatattccagaatccatatgaaattcatgagtttatttatgtctaaaacactgaaaactgtgtccaatatcgttcagtttcctgggtctttttcttattagcacatttgagaaaaatattcctttcctttattgtagtaaatctattaaaggcaatagccaataaaacatttttaatttta

SEQ ID NO: 85900 - DNA, 3837 bp, Homo sapiens
cggacgcgtgggctagttctagatcgcgatctagaactaaggcagagaattttgcaacacgtggtagtgaactgtgaggagtttgaggggtctgaagactgaaagagtcgaatggtttgttggcaggacctagaagaatcccttaggatgaagctgagtcttaccaaggtagttaatggctgtcgcctaggaaaaataaaaaacctgggcaaaacaggggaccacaccatggatattccaggctgccttctgtataccaagactggctccgccccacacctcacccatcacacgctgcataatatccacggggttcctgccatggctcagcttacgctgtcatccctagcagaacatcatgaagtcttgacagaatataaagaaggagttggaaagtttataggcatgccagaatcactcttgtactgctccctgcacgatccagtcagcccctgcccggctggttatgtaacaaacaagtctgtgtctgtgtggagtgttgcaggacgagtggaaatgactgtttccaagttcatggcaattcagaaggcccttcagccagactggttccagtgcctctccgatggagaagtatcttgtaaggaagcaacttccataaaaagggtcagaaagtctgttgaccgatcacttcttttcttggataactgtctgcggctgcaggaagagtcagaggttcttcagaagagtgtgatcattggagtgattgaaggtggagatgtgatggaagagaggctgaggtcagcacgagagacagccaagcggcctgtgggtggcttccttctggatggttttcaaggaaatccaacaaccctggaggctagactacgcttgctgtcatcagtcactgcagagctgccggaggacaagccaaggctcatatctggtgttagtcggccagatgaggtgctcgagtgtattgaaagaggagtggacttatttgagagttttttcccttatcaagtaacagagcggggatgtgccctgactttcagttttgattaccagccgaatcctgaagagacactactacaacaaaatggaacacaagaagaaataaaatgtatggatcaaataaagaaaattgaaacaactggttgcaaccaagaaataacatcatttgaaattaatctgaaggaaaaaaagtaccaggaggactttaacccgctggtgagaggatgttcctgttactgctgtaagaatcacactcgggcatacatccaccatctgctggtgaccaatgagctgctggccggagtcctgcttatgatgcacaactttgaacactactttgggtttttccattacatccgggaagcactaaaaagtgacaaactggcacagttgaaagagctcatccacaggcaagcatcttgagatcttgcaaatacaagtctcactcttcacactgagcctgtaccactgttgtaacatgggaagacgtgaagaagaaataatctgagctttaattatttatatttggatataaggtctgcttaaataaagaatctttgtaccaaactgcccacatgagggtgaagagatttcctcaaaagacttaaatgacctggattgatcagagagaattgaactgtgacctttaaaacttctagactaattcttttagttgatagagattcatttagtcaaagacaaaagctttaactgtgagggcacagccttgaagtgggagtgatgagattctgagggacccatgaattggattgaggcttgaggggaaatggtgtgagacgaatgggctctggacatatgcctgttgatttgagaagaaatctggctggtttgagggtttcctttagttcaccctcatactctcaggagactcttctggatacttttgtcttccaccctgccctggcagtgcagccaatcagaaatggctcttgtgacttaactgggcttggatatccctggaatgtggggcttgaacattgctcctgtgatgatcatctgtcccaggtcacactccttcatttgaccacatgcgcctatttgcaacttctttttagagccaatgtaattgcctgttaggagccagaagtttgcccagctgctttcttctggttgtacagatccattgtggtctgccttccaggctcattaatagtctaactacgtaataactgaagacctatctcttgtgaagattcattctcaatgtgttcacttggacagagccctgcctggcctaacgattagagggttagtctccatcctgctcagatatgactcctgggcaattcacttaacttctccatggctgcttcctgctgaataaatagggacaggcataatggataggaatgaatgaacttttaagatactgtctagctctaaaattggaagaacaaaaagttttagattagagtcatagccttaatagccctagttgtcatcctgggagacaggcaacagtagagatatttgagagcctaaagagaggtttggcctgtgggtttttaagtggttattgaattggtatcaggagatcctgaggctggtaggggaaggtaattctttctaagttacctctgtatttttcaagttttctataaggaatacacatacacccacatgcacacaccatagtttttatacaaacagcaataacaaaaccaaaaagatgcccctttttttgtagggataagaaatacatttgttttatacttctatgctatattttgctattcaaaatttagtgggcattacttaacattgtttctaattattttgtggctgctgtatgttttatgtgttgggagcccattgtattaggccgttcttggattgctataaagaaatacctgagactgggtaatttggttttttggttttttggggttttttttgagacggagccttgctctgtcgcccaggctggagtgcagtggcgcgatctcggctctatgcaacctccacctcctgggttcatgccattctcctgcctcagcctcccgagtagctgggactacaggcgcccgccaccatgcctggctaattttttatatttttagtagagatggggtttcaccgtatgagccaggatggtctcgatctcctgacctcatgatccacaagactgggtaatctgtaaagaaaagaggtttaattggctcatggctctgcaggctttacaggaagcatggtactggcatctgcttggtttctggggaggcctccggaagcttatagtcatggcagaaggtgaagggggagcaggcacatcacatgacaaaagcaggaacaagactcagagcaagaagtcacttatcaccaaggggatggcccaggccattcatgagggatccacctttgtgctccaaacacctcccaccaggccccacctccagtattggggattacatttcaacttgaggtttgggcgggaacaaatagtcaaattatattacccatctacatggttttctttttcttagtatgggagtgtccatgaataaattcatgggcatcctcataactcttccatgaatggcaaggggtacttatggaaaacagttttccaaagatctgattgttttgaaatgtgttagattggacttgttcaaatgttcatatttttgttctatgctaaatgcatcgttaggggagtagtggtaaatattccagaatccatatgaaattcatgagtttatttatgtctaaaacactgaaaactgtgtccaatatcgttcagtttcctgggtctttttcttattagcacatttgagaaaaatattcctttcctttattgtagtaaatctattaaaggcaatagccaataaaacatttttaatttta

SEQ ID NO: 85901 - DNA, 1840 bp, Homo sapiens
tactctagaggcgccccgctttggatgcgcctatttgcaacttctttttagagccaatgtaattgcctgttaggagccagaagtttgcccagctgctttcttctggttgtacagatccattgtggtctgccttccaggctcattaatagtctaactacgtaataactgaagacctatctcttgtgaagattcattctcaatgtgttcacttggacagagccctgcctggcctaacgattagagggttagtctccatcctgctcagatatgactcctgggcaattcacttaacttctccatggctgcttcctgctgaataaatagggacaggcataatggataggaatgaatgaacttttaagatactgtctagctctaaaattggaagaacaaaaagttttagattagagtcatagccttaatagccctagttgtcatcctgggagacaggcaacagtagagatatttgagagcctaaagagaggtttggcctgtgggtttttaagtggttattgaattggtatcaggagatcctgaggctggtaggggaaggtaattctttctaagttacctctgtatttttcaagttttctataaggaatacacatacacccacatgcacacaccatagtttttatacaaacagcaataacaaaaccaaaaagatgcccctttttttgtagggataagaaatacatttgttttatacttctatgctatattttgctattcaaaatttagtgggcattacttaacattgtttctaattattttgtggctgctgtatgttttatgtgttgggagcccattgtattaggccgttcttggattgctataaagaaatacctgagactgggtaatttggttttttggttttttggggttttttttgagacggagccttgctctgtcgcccaggctggagtgcagtggcgcgatctcggctctatgcaacctccacctcctgggttcatgccattctcctgcctcagcctcccgagtagctgggactacaggcgcccgccaccatgcctggctaattttttatatttttagtagagatggggtttcaccgtatgagccaggatggtctcgatctcctgacctcatgatccacaagactgggtaatctgtaaagaaaagaggtttaattggctcatggctctgcaggctttacaggaagcatggtactggcatctgcttggtttctggggaggcctccggaagcttatagtcatggcagaaggtgaagggggagcaggcacatcacatgacaaaagcaggaacaagactcagagcaagaagtcacttatcaccaaggggatggcccaggccattcatgagggatccacctttgtgctccaaacacctcccaccaggccccacctccagtattggggattacatttcaacttgaggtttgggcgggaacaaatagtcaaattatattacccatctacatggttttctttttcttagtatgggagtgtccatgaataaattcatgggcatcctcataactcttccatgaatggcaaggggtacttatggaaaacagttttccaaagatctgattgttttgaaatgtgttagattggacttgttcaaatgttcatatttttgttctatgctaaatgcatcgttaggggagtagtggtaaatattccagaatccatatgaaattcatgagtttatttatgtctaaaacactgaaaactgtgtccaatatcgttcagtttcctgggtctttttcttattagcacatttgagaaaaatattcctttcctttattgtagtaaatctattaaaggcaatagccaataaaacatttttaatttta

SEQ ID NO: 85902 - DNA, 3965 bp, Homo sapiens
cggacgcgtgggctagttctagatcgcgatctagaactaaggcagagaattttgcaacacgtggtagtgaactgtgaggagtttgaggggtctgaagactgaaagagtcgaatggtttgttggcagggtgtcctggtggattggtttctgtaagttcagattctcataaatcgtgtgagcgtcgccgacacctctgagataaaagggcccctttcgactagcctctgctgaaaggacctagaagaatcccttaggatgaagctgagtcttaccaaggtagttaatggctgtcgcctaggaaaaataaaaaacctgggcaaaacaggggaccacaccatggatattccaggctgccttctgtataccaagactggctccgccccacacctcacccatcacacgctgcataatatccacggggttcctgccatggctcagcttacgctgtcatccctagcagaacatcatgaagtcttgacagaatataaagaaggagttggaaagtttataggcatgccagaatcactcttgtactgctccctgcacgatccagtcagcccctgcccggctggttatgtaacaaacaagtctgtgtctgtgtggagtgttgcaggacgagtggaaatgactgtttccaagttcatggcaattcagaaggcccttcagccagactggttccagtgcctctccgatggagaagtatcttgtaaggaagcaacttccataaaaagggtcagaaagtctgttgaccgatcacttcttttcttggataactgtctgcggctgcaggaagagtcagaggttcttcagaagagtgtgatcattggagtgattgaaggtggagatgtgatggaagagaggctgaggtcagcacgagagacagccaagcggcctgtgggtggcttccttctggatggttttcaaggaaatccaacaaccctggaggctagactacgcttgctgtcatcagtcactgcagagctgccggaggacaagccaaggctcatatctggtgttagtcggccagatgaggtgctcgagtgtattgaaagaggagtggacttatttgagagttttttcccttatcaagtaacagagcggggatgtgccctgactttcagttttgattaccagccgaatcctgaagagacactactacaacaaaatggaacacaagaagaaataaaatgtatggatcaaataaagaaaattgaaacaactggttgcaaccaagaaataacatcatttgaaattaatctgaaggaaaaaaagtaccaggaggactttaacccgctggtgagaggatgttcctgttactgctgtaagaatcacactcgggcatacatccaccatctgctggtgaccaatgagctgctggccggagtcctgcttatgatgcacaactttgaacactactttgggtttttccattacatccgggaagcactaaaaagtgacaaactggcacagttgaaagagctcatccacaggcaagcatcttgagatcttgcaaatacaagtctcactcttcacactgagcctgtaccactgttgtaacatgggaagacgtgaagaagaaataatctgagctttaattatttatatttggatataaggtctgcttaaataaagaatctttgtaccaaactgcccacatgagggtgaagagatttcctcaaaagacttaaatgacctggattgatcagagagaattgaactgtgacctttaaaacttctagactaattcttttagttgatagagattcatttagtcaaagacaaaagctttaactgtgagggcacagccttgaagtgggagtgatgagattctgagggacccatgaattggattgaggcttgaggggaaatggtgtgagacgaatgggctctggacatatgcctgttgatttgagaagaaatctggctggtttgagggtttcctttagttcaccctcatactctcaggagactcttctggatacttttgtcttccaccctgccctggcagtgcagccaatcagaaatggctcttgtgacttaactgggcttggatatccctggaatgtggggcttgaacattgctcctgtgatgatcatctgtcccaggtcacactccttcatttgaccacatgcgcctatttgcaacttctttttagagccaatgtaattgcctgttaggagccagaagtttgcccagctgctttcttctggttgtacagatccattgtggtctgccttccaggctcattaatagtctaactacgtaataactgaagacctatctcttgtgaagattcattctcaatgtgttcacttggacagagccctgcctggcctaacgattagagggttagtctccatcctgctcagatatgactcctgggcaattcacttaacttctccatggctgcttcctgctgaataaatagggacaggcataatggataggaatgaatgaacttttaagatactgtctagctctaaaattggaagaacaaaaagttttagattagagtcatagccttaatagccctagttgtcatcctgggagacaggcaacagtagagatatttgagagcctaaagagaggtttggcctgtgggtttttaagtggttattgaattggtatcaggagatcctgaggctggtaggggaaggtaattctttctaagttacctctgtatttttcaagttttctataaggaatacacatacacccacatgcacacaccatagtttttatacaaacagcaataacaaaaccaaaaagatgcccctttttttgtagggataagaaatacatttgttttatacttctatgctatattttgctattcaaaatttagtgggcattacttaacattgtttctaattattttgtggctgctgtatgttttatgtgttgggagcccattgtattaggccgttcttggattgctataaagaaatacctgagactgggtaatttggttttttggttttttggggttttttttgagacggagccttgctctgtcgcccaggctggagtgcagtggcgcgatctcggctctatgcaacctccacctcctgggttcatgccattctcctgcctcagcctcccgagtagctgggactacaggcgcccgccaccatgcctggctaattttttatatttttagtagagatggggtttcaccgtatgagccaggatggtctcgatctcctgacctcatgatccacaagactgggtaatctgtaaagaaaagaggtttaattggctcatggctctgcaggctttacaggaagcatggtactggcatctgcttggtttctggggaggcctccggaagcttatagtcatggcagaaggtgaagggggagcaggcacatcacatgacaaaagcaggaacaagactcagagcaagaagtcacttatcaccaaggggatggcccaggccattcatgagggatccacctttgtgctccaaacacctcccaccaggccccacctccagtattggggattacatttcaacttgaggtttgggcgggaacaaatagtcaaattatattacccatctacatggttttctttttcttagtatgggagtgtccatgaataaattcatgggcatcctcataactcttccatgaatggcaaggggtacttatggaaaacagttttccaaagatctgattgttttgaaatgtgttagattggacttgttcaaatgttcatatttttgttctatgctaaatgcatcgttaggggagtagtggtaaatattccagaatccatatgaaattcatgagtttatttatgtctaaaacactgaaaactgtgtccaatatcgttcagtttcctgggtctttttcttattagcacatttgagaaaaatattcctttcctttacctccaaccctctcaagaccatgccccaatcaacatagtgccaatcaacatagtgccaatcaacatagtg

SEQ ID NO: 85903 - DNA, 1350 bp, Homo sapiens
gaacgcccatgtgttggtaccaggaatcgcggccgcgtccatcctgaggctggtaggggaaggtaattctttctaagttacctctgtatttttcaagttttctataaggaatacacatacacccacatgcacacaccatagtttttatacaaacagcaataacaaaaccaaaaagatgcccctttttttgtagggataagaaatacatttgttttatacttctatgctatattttgctattcaaaatttagtgggcattacttaacattgtttctaattattttgtggctgctgtatgttttatgtgttgggagcccattgtattaggccgttcttggattgctataaagaaatacctgagactgggtaatttggttttttggttttttggggttttttttgagacggagccttgctctgtcgcccaggctggagtgcagtggcgcgatctcggctctatgcaacctccacctcctgggttcatgccattctcctgcctcagcctcccgagtagctgggactacaggcgcccgccaccatgcctggctaattttttatatttttagtagagatggggtttcaccgtatgagccaggatggtctcgatctcctgacctcatgatccacaagactgggtaatctgtaaagaaaagaggtttaattggctcatggctctgcaggctttacaggaagcatggtactggcatctgcttggtttctggggaggcctccggaagcttatagtcatggcagaaggtgaagggggagcaggcacatcacatgacaaaagcaggaacaagactcagagcaagaagtcacttatcaccaaggggatggcccaggccattcatgagggatccacctttgtgctccaaacacctcccaccaggccccacctccagtattggggattacatttcaacttgaggtttgggcgggaacaaatagtcaaattatattacccatctacatggttttctttttcttagtatgggagtgtccatgaataaattcatgggcatcctcataactcttccatgaatggcaaggggtacttatggaaaacagttttccaaagatctgattgttttgaaatgtgttagattggacttgttcaaatgttcatatttttgttctatgctaaatgcatcgttaggggagtagtggtaaatattccagaatccatatgaaattcatgagtttatttatgtctaaaacactgaaaactgtgtccaatatcgttcagtttcctgggtctttttcttattagcacatttgagaaaaatattcctttcctttattgtagtaaatctattaaaggcaatagccaataaaacatttttaatttta

SEQ ID NO: 85904 - DNA, 1089 bp, Homo sapiens
cggacgcgtgggctagttctagatcgcgatctagaactaaggcagagaattttgcaacacgtggtagtgaactgtgaggagtttgaggggtctgaagactgaaagagtcgaatggtttgttggcagggtgtcctggtggattggtttctgtaagttcagattctcataaatcgtgtgagcgtcgccgacacctctgagataaaagggcccctttcgactagcctctgctgaaaggacctagaagaatcccttaggatgaagctgagtcttaccaaggtagttaatggctgtcgcctaggaaaaataaaaaacctgggcaaaacaggggaccacaccatggatattccaggctgccttctgtataccaagactggctccgccccacacctcacccatcacacgctgcataatatccacggggttcctgccatggctcagcttacgctgtcatccctagcagaacatcatgaagtcttgacagaatataaagaaggagttggaaagtttataggcatgccagaatcactcttgtactgctccctgcacgatccagtcagcccctgcccggctggttatgtaacaaacaagtctgtgtctgtgtggagtgttgcaggacgagtggaaatgactgtttccaagttcatggcaattcagaaggcccttcagccagactggttccagtgcctctccgatggagaagtatcttgtaaggaagcaacttccataaaaagggtcagaaagtctgttgaccgatcacttcttttcttggataactgtctgcggctgcaggaagagtcagaggttcttcagaagagtgtgatcattggagtgattgaaggtggagatgtgatggaagagaggctgaggtcagcacgagagacagccaagcggcctgtgggtggcttccttctggatggttttcaaggaaatccaacaaccctggaggctagactacgcttgctgtcatcagtcactgcagagctgccggaggacaagccaaggccagtgttcggttaggacacaggctggcctcaagggatgcagggaaggagtgctggccgattgtatattaaatagtgtctgtgcata

SEQ ID NO: 85905 - DNA, 3945 bp, Homo sapiens
cggacgcgtgggctagttctagatcgcgatctagaactaaggcagagaattttgcaacacgtggtagtgaactgtgaggagtttgaggggtctgaagactgaaagagtcgaatggtttgttggcagggtgtcctggtggattggtttctgtaagttcagattctcataaatcgtgtgagcgtcgccgacacctctgagataaaagggcccctttcgactagcctctgctgaaaggacctagaagaatcccttaggatgaagctgagtcttaccaaggtagttaatggctgtcgcctaggaaaaataaaaaacctgggcaaaacaggggaccacaccatggatattccaggctgccttctgtataccaagactggctccgccccacacctcacccatcacacgctgcataatatccacggggttcctgccatggctcagcttacgctgtcatccctagcagaacatcatgaagtcttgacagaatataaagaaggagttggaaagtttataggcatgccagaatcactcttgtactgctccctgcacgatccagtcagcccctgcccggctggttatgtaacaaacaagtctgtgtctgtgtggagtgttgcaggacgagtggaaatgactgtttccaagttcatggcaattcagaaggcccttcagccagactggttccagtgcctctccgatggagaagtatcttgtaaggaagcaacttccataaaaagggtcagaaagtctgttgaccgatcacttcttttcttggataactgtctgcggctgcaggaagagtcagaggttcttcagaagagtgtgatcattggagtgattgaaggtggagatgtgatggaagagaggctgaggtcagcacgagagacagccaagcggcctgtgggtggcttccttctggatggttttcaaggaaatccaacaaccctggaggctagactacgcttgctgtcatcagtcactgcagagctgccggaggacaagccaaggctcatatctggtgttagtcggccagatgaggtgctcgagtgtattgaaagaggagtggacttatttgagagttttttcccttatcaagtaacagagcggggatgtgccctgactttcagttttgattaccagccgaatcctgaagagacactactacaacaaaatggaacacaagaagaaataaaatgtatggatcaaataaagaaaattgaaacaactggttgcaaccaagaaataacatcatttgaaattaatctgaaggaaaaaaagtaccaggaggactttaacccgctggtgagaggatgttcctgttactgctgtaagaatcacactcgggcatacatccaccatctgctggtgaccaatgagctgctggccggagtcctgcttatgatgcacaactttgaacactactttgggtttttccattacatccgggaagcactaaaaagtgacaaactggcacagttgaaagagctcatccacaggcaagcatcttgagatcttgcaaatacaagtctcactcttcacactgagcctgtaccactgttgtaacatgggaagacgtgaagaagaaataatctgagctttaattatttatatttggatataaggtctgcttaaataaagaatctttgtaccaaactgcccacatgagggtgaagagatttcctcaaaagacttaaatgacctggattgatcagagagaattgaactgtgacctttaaaacttctagactaattcttttagttgatagagattcatttagtcaaagacaaaagctttaactgtgagggcacagccttgaagtgggagtgatgagattctgagggacccatgaattggattgaggcttgaggggaaatggtgtgagacgaatgggctctggacatatgcctgttgatttgagaagaaatctggctggtttgagggtttcctttagttcaccctcatactctcaggagactcttctggatacttttgtcttccaccctgccctggcagtgcagccaatcagaaatggctcttgtgacttaactgggcttggatatccctggaatgtggggcttgaacattgctcctgtgatgatcatctgtcccaggtcacactccttcatttgaccacatgcgcctatttgcaacttctttttagagccaatgtaattgcctgttaggagccagaagtttgcccagctgctttcttctggttgtacagatccattgtggtctgccttccaggctcattaatagtctaactacgtaataactgaagacctatctcttgtgaagattcattctcaatgtgttcacttggacagagccctgcctggcctaacgattagagggttagtctccatcctgctcagatatgactcctgggcaattcacttaacttctccatggctgcttcctgctgaataaatagggacaggcataatggataggaatgaatgaacttttaagatactgtctagctctaaaattggaagaacaaaaagttttagattagagtcatagccttaatagccctagttgtcatcctgggagacaggcaacagtagagatatttgagagcctaaagagaggtttggcctgtgggtttttaagtggttattgaattggtatcaggagatcctgaggctggtaggggaaggtaattctttctaagttacctctgtatttttcaagttttctataaggaatacacatacacccacatgcacacaccatagtttttatacaaacagcaataacaaaaccaaaaagatgcccctttttttgtagggataagaaatacatttgttttatacttctatgctatattttgctattcaaaatttagtgggcattacttaacattgtttctaattattttgtggctgctgtatgttttatgtgttgggagcccattgtattaggccgttcttggattgctataaagaaatacctgagactgggtaatttggttttttggttttttggggttttttttgagacggagccttgctctgtcgcccaggctggagtgcagtggcgcgatctcggctctatgcaacctccacctcctgggttcatgccattctcctgcctcagcctcccgagtagctgggactacaggcgcccgccaccatgcctggctaattttttatatttttagtagagatggggtttcaccgtatgagccaggatggtctcgatctcctgacctcatgatccacaagactgggtaatctgtaaagaaaagaggtttaattggctcatggctctgcaggctttacaggaagcatggtactggcatctgcttggtttctggggaggcctccggaagcttatagtcatggcagaaggtgaagggggagcaggcacatcacatgacaaaagcaggaacaagactcagagcaagaagtcacttatcaccaaggggatggcccaggccattcatgagggatccacctttgtgctccaaacacctcccaccaggccccacctccagtattggggattacatttcaacttgaggtttgggcgggaacaaatagtcaaattatattacccatctacatggttttctttttcttagtatgggagtgtccatgaataaattcatgggcatcctcataactcttccatgaatggcaaggggtacttatggaaaacagttttccaaagatctgattgttttgaaatgtgttagattggacttgttcaaatgttcatatttttgttctatgctaaatgcatcgttaggggagtagtggtaaatattccagaatccatatgaaattcatgagtttatttatgtctaaaacactgaaaactgtgtccaatatcgttcagtttcctgggtctttttcttattagcacatttgagaaaaatattcctttcctttattgtagtaaatctattaaaggcaatagccaataaaacatttttaatttta

SEQ ID NO: 85906 - DNA, 4145 bp, Homo sapiens
cggacgcgtgggctagttctagatcgcgatctagaactaaggcagagaattttgcaacacgtggtagtgaactgtgaggagtttgaggggtctgaagactgaaagagtcgaatggtttgttggcagggtgtcctggtggattggtttctgtaagttcagattctcataaatcgtgtgagcgtcgccgacacctctgagataaaagggcccctttcgactagcctctgctgaaaggacctagaagaatcccttaggatgaagctgagtcttaccaaggtagttaatggctgtcgcctaggaaaaataaaaaacctgggcaaaacaggggaccacaccatggatattccaggctgccttctgtataccaagactggctccgccccacacctcacccatcacacgctgcataatatccacggggttcctgccatggctcagcttacgctgtcatccctagcagaacatcatgaagtcttgacagaatataaagaaggagttggaaagtttataggcatgccagaatcactcttgtactgctccctgcacgatccagtcagcccctgcccggctggttatgtaacaaacaagtctgtgtctgtgtggagtgttgcaggacgagtggaaatgactgtttccaagttcatggcaattcagaaggcccttcagccagactggttccagtgcctctccgatggagaagtatcttgtaaggaagcaacttccataaaaagggtcagaaagtctgttgaccgatcacttcttttcttggataactgtctgcggctgcaggaagagtcagaggttcttcagaagagtgtgatcattggagtgattgaaggtggagatgtgatggaagagaggctgaggtcagcacgagagacagccaagcggcctgtgggtggcttccttctggatggttttcaaggaaatccaacaaccctggaggctagactacgcttgctgtcatcagtcactgcagagctgccggaggacaagccaaggctcatatctggtgttagtcggccagatgaggtgctcgagtgtattgaaagaggagtggacttatttgagagttttttcccttatcaagtaacagagcggggatgtgccctgactttcagttttgattaccagccgaatcctgaagagacactactacaacaaaatggaacacaagaagaaataaaatgtatggatcaaataaagaaaattgaaacaactggttgcaaccaagaaataacatcatttgaaattaatctgaaggaaaaaaagtaccaggaggactttaacccgctggtgagaggatgttcctgttactgctgtaagaatcacactcgggcatacatccaccatctgctggtgaccaatgagctgctggccggagtcctgcttatgatgcacaactttgaacactactttgggtttttccattacatccgggaagcactaaaaagtgacaaactggcacagttgaaagagctcatccacaggcaagcatcttgagatcttgcaaatacaagtctcactcttcacactgagcctgtaccactgttgtaacatgggaagacgtgaagaagaaataatctgagctttaattatttatatttggatataaggtctgcttaaataaagaatctttgtaccaaactgcccacatgagggtgaagagatttcctcaaaagacttaaatgacctggattgatcagagagaattgaactgtgacctttaaaacttctagactaattcttttagttgatagagattcatttagtcaaagacaaaagctttaactgtgagggcacagccttgaagtgggagtgatgagattctgagggacccatgaattggattgaggcttgaggggaaatggtgtgagacgaatgggctctggacatatgcctgttgatttgagaagaaatctggctggtttgagggtttcctttagttcaccctcatactctcaggagactcttctggatacttttgtcttccaccctgccctggcagtgcagccaatcagaaatggctcttgtgacttaactgggcttggatatccctggaatgtggggcttgaacattgctcctgtgatgatcatctgtcccaggtcacactccttcatttgaccacatgcgcctatttgcaacttctttttagagccaatgtaattgcctgttaggagccagaagtttgcccagctgctttcttctggttgtacagatccattgtggtctgccttccaggctcattaatagtctaactacgtaataactgaagacctatctcttgtgaagattcattctcaatgtgttcacttggacagagccctgcctggcctaacgattagagggttagtctccatcctgctcagatatgactcctgggcaattcacttaacttctccatggctgcttcctgctgaataaatagggacaggcataatggataggaatgaatgaacttttaagatactgtctagctctaaaattggaagaacaaaaagttttagattagagtcatagccttaatagccctagttgtcatcctgggagacaggcaacagtagagatatttgagagcctaaagagaggtttggcctgtgggtttttaagtggttattgaattggtatcaggagatcctgaggctggtaggggaaggtaattctttctaagttacctctgtatttttcaagttttctataaggaatacacatacacccacatgcacacaccatagtttttatacaaacagcaataacaaaaccaaaaagatgcccctttttttgtagggataagaaatacatttgttttatacttctatgctatattttgctattcaaaatttagtgggcattacttaacattgtttctaattattttgtggctgctgtatgttttatgtgttgggagcccattgtattaggccgttcttggattgctataaagaaatacctgagactgggtaatttggttttttggttttttggggttttttttgagacggagccttgctctgtcgcccaggctggagtgcagtggcgcgatctcggctctatgcaacctccacctcctgggttcatgccattctcctgcctcagcctcccgagtagctgggactacaggcgcccgccaccatgcctggctaattttttatatttttagtagagatggggtttcaccgtatgagccaggatggtctcgatctcctgacctcatgatccacaagactgggtaatctgtaaagaaaagaggtttaattggctcatggctctgcaggctttacaggaagcatggtactggcatctgcttggtttctggggaggcctccggaagcttatagtcatggcagaaggtgaagggggagcaggcacatcacatgacaaaagcaggaacaagactcagagcaagaagtcacttatcaccaaggggatggcccaggccattcatgagggatccacctttgtgctccaaacacctcccaccaggccccacctccagtattggggattacatttcaacttgaggtttgggcgggaacaaatagtcaaattatattacccatctacatggttttctttttcttagtatgggagtgtccatgaataaattcatgggcatcctcataactcttccatgaatggcaaggggtacttatggaaaacagttttccaaagatctgattgttttgaaatgtgttagattggacttgttcaaatgttcatatttttgttctatgctaaatgcatcgttaggggagtagtggtaaatattccagaatccatatgaaattcatgagtttatttatgtctaaaacactgaaaactgtgtccaatatcgttcagtttcctgggtctttttcttattagcacatttgagaaaaatattcctttcctttattgtagtaaatctattaaaggcaatagccaataaaacatttttaattttaaaaatttactgtgtttggctttctgtaaatgtagtaggtctgttaaacaaaatattaaatttccatagtaccagaaatgttgtagagatttctcattggaagaaaaaaatgtttatctgtattcattgttttgagagcttccatgataaatgtaatatccaaaaagatatttaattatatacattatgaagattccctta

SEQ ID NO: 85907 - DNA, 2952 bp, Homo sapiens
cggacgcgtgggctagttctagatcgcgatctagaactaaggcagagaattttgcaacacgtggtagtgaactgtgaggagtttgaggggtctgaagactgaaagagtcgaatggtttgttggcagggtgtcctggtggattggtttctgtaagttcagattctcataaatcgtgtgagcgtcgccgacacctctgagataaaagggcccctttcgactagcctctgctgaaaggacctagaagaatcccttaggatgaagctgagtcttaccaaggtagttaatggctgtcgcctaggaaaaataaaaaacctgggcaaaacaggggaccacaccatggatattccaggctgccttctgtataccaagactggctccgccccacacctcacccatcacacgctgcataatatccacggggttcctgccatggctcagcttacgctgtcatccctagcagaacatcatgaagtcttgacagaatataaagaaggagttggaaagtttataggcatgccagaatcactcttgtactgctccctgcacgatccagtcagcccctgcccggctggttatgtaacaaacaagtctgtgtctgtgtggagtgttgcaggacgagtggaaatgactgtttccaagttcatggcaattcagaaggcccttcagccagactggttccagtgcctctccgatggagaagtatcttgtaaggaagcaacttccataaaaagggtcagaaagtctgttgaccgatcacttcttttcttggataactgtctgcggctgcaggaagagtcagaggttcttcagaagagtgtgatcattggagtgattgaaggtggagatgtgatggaagagaggctgaggtcagcacgagagacagccaagcggcctgtgggtggcttccttctggatggttttcaaggaaatccaacaaccctggaggctagactacgcttgctgtcatcagtcactgcagagctgccggaggacaagccaaggctcatatctggtgttagtcggccagatgaggtgctcgagtgtattgaaagaggagtggacttatttgagagttttttcccttatcaagtaacagagcggggatgtgccctgactttcagttttgattaccagccgaatcctgaagagacactactacaacaaaatggaacacaagaagaaataaaatgtatggatcaaataaagaaaattgaaacaactggttgcaaccaagaaataacatcatttgaaattaatctgaaggaaaaaaagtaccaggaggactttaacccgctggtgagaggatgttcctgttactgctgtaagaatcacactcgggcatacatccaccatctgctggtgaccaatgagctgctggccggagtcctgcttatgatgcacaactttgaacactactttgggtttttccattacatccgggaagcactaaaaagtgacaaactggcacagttgaaagagctcatccacaggcaagcatcttgagatcttgcaaatacaagtctcactcttcacactgagcctgtaccactgttgtaacatgggaagacgtgaagaagaaataatctgagctttaattatttatatttggatataaggtctgcttaaataaagaatctttgtaccaaactgcccacatgagggtgaagagatttcctcaaaagacttaaatgacctggattgatcagagagaattgaactgtgacctttaaaacttctagactaattcttttagttgatagagattcatttagtcaaagacaaaagctttaactgtgagggcacagccttgaagtgggagtgatgagattctgagggacccatgaattggattgaggcttgaggggaaatggtgtgagacgaatgggctctggacatatgcctgttgatttgagaagaaatctggctggtttgagggtttcctttagttcaccctcatactctcaggagactcttctggatacttttgtcttccaccctgccctggcagtgcagccaatcagaaatggctcttgtgacttaactgggcttggatatccctggaatgtggggcttgaacattgctcctgtgatgatcatctgtcccaggtcacactccttcatttgaccacatgcgcctatttgcaacttctttttagagccaatgtaattgcctgttaggagccagaagtttgcccagctgctttcttctggttgtacagatccattgtggtctgccttccaggctcattaatagtctaactacgtaataactgaagacctatctcttgtgaagattcattctcaatgtgttcacttggacagagccctgcctggcctaacgattagagggttagtctccatcctgctcagatatgactcctgggcaattcacttaacttctccatggctgcttcctgctgaataaatagggacaggcataatggataggaatgaatgaacttttaagatactgtctagctctaaaattggaagaacaaaaagttttagattagagtcatagccttaatagccctagttgtcatcctgggagacaggcaacagtagagatatttgagagcctaaagagaggtttggcctgtgggtttttaagtggttattgaattggtatcaggagatcctgaggctggtaggggaaggtaattctttctaagttacctctgtatttttcaagttttctataaggaatacacatacacccacatgcacacaccatagtttttatacaaacagcaataacaaaaccaaaaagatgcccctttttttgtagggataagaaatacatttgttttatacttctatgctatattttgctattcaaaatttagtgggcattacttaacattgtttctaattattttgtggctgctgtatgttttatgtgttgggagcccattgtattagccgcatccaaagcgggatcctcagagtcac

SEQ ID NO: 85908 - DNA, 1267 bp, Homo sapiens
cggacgcgtgggctagttctagatcgcgatctagaactaaggcagagaattttgcaacacgtggtagtgaactgtgaggagtttgaggggtctgaagactgaaagagtcgaatggtttgttggcagggtgtcctggtggattggtttctgtaagttcagattctcataaatcgtgtgagcgtcgccgacacctctgagataaaagggcccctttcgactagcctctgctgaaaggacctagaagaatcccttaggatgaagctgagtcttaccaaggtagttaatggctgtcgcctaggaaaaataaaaaacctgggcaaaacaggggaccacaccatggatattccaggctgccttctgtataccaagactggctccgccccacacctcacccatcacacgctgcataatatccacggggttcctgccatggctcagcttacgctgtcatccctagcagaacatcatgaagtcttgacagaatataaagaaggagttggaaagtttataggcatgccagaatcactcttgtactgctccctgcacgatccagtcagcccctgcccggctggttatgtaacaaacaaggtgtgttttcagaagggtctccaaggctgcagctttgtcccaggaagtcagcctatggtgtatccctcagatgctcagatcccactgtctgggatgatcccttataccttttccttatttcgataattatagtgggatgggatggtttataagacttagagtagggctgcctaaggatgaggttaagatgaagaacactgtatcctcagcattttcattgttgcaaaaaaatttgagggtagaggagggtcaaatacatgccaaaaaaagaaattgctatgataggggaaaacgatagtctttcggcgccatgctttgttggatttttaacaacttcaggaagagtggggaaagttgctgatgagtattatcacatgtataactatatatagtagaatctcaatataatattgtctgctgggtctacagccagagattttgtctagtgaagaacagtatcaaaagcacctcattaaaagtgttaggctgagaggtggccccattggcattatccctgaggacagcattctggcaaagcttcagtgtgtactgctactttacaaacgcaaatacttttcctgcactcactttattaatgtcagcaatatttattaattgtgcccctcagaacactgtttttactcattctcctgttttaagtttctatttattttgtagt

SEQ ID NO: 85909 - DNA, 403 bp, Homo sapiens
aggctgaggcaggagaatcccttgaacctgggggacagaggttgcagtgagtggagatcgcactactacactccagctcaggtgaaagagtaagactccatctcaaaaaataaaaataaaaataaaataataaaataataatctctctttaaaatatggcatggggctactctggggacctccacctcccatcagatcagccatggcatttgattctcataggagctggaaccctattgtgaaacgcgcatcccagggatctaggttgtgtgctccttacaagaagaatctaatgcctgatccgaggtggaacggtttcatcctgaaactgctccatgctctgcctatggagtagccgttctttattcctttactttcttaataaacttgctttcacgaaaaa

SEQ ID NO: 85910 - DNA, 302 bp, Homo sapiens
ggggagggagcatccgccgctccgccgtgctgagcccttggcgctgtcatctcagtcttccgtctttcgtgggtctctgtgtcttgcagtgtcaggtgcaggccttcttttgggttgaatcctcaggatgtgatgtttttgttgccattataaatcgtagttctttacaagtttcttttcttttcgtctgagtgctatcgtctacagttttgttttctcaagataaaaatcatctttcaggttggccggtgtcagccgtgcgtcatccggaaggctgccataagcctgcgtttcgcagagct

SEQ ID NO: 85911 - DNA, 342 bp, Homo sapiens
agagacaaacatctctggggcctggcaactggggaagggactgattgtcaggcaggaggtggcactcagaggctgggcacagtggcccccacctgtaatcccaacactttgggaggccaagataggagaattgcttgagcccaggaggtcctgaccagcctgggcaacatagggagaccccatttctacaaaaactgggggaaaaaaataacctgtggggtggttgagtgcctgtggtctcaccagctacttgggaggctgaggtgggaggattggttgagcccaggaggtcgaggctgcagtaagccatgcttataccacttcgctgcaacctgggaaaca

SEQ ID NO: 85912 - DNA, 685 bp, Homo sapiens
gaaagcacagagatttccctttatgctccctgccccttcatatgcccagtctctctcacagtcaaattctctcaccagagtggtacatttgttagaatcagtgaacctgcattgacacatcataatcacctaaagtccacagtttacattagggttcattcttggtgttggacaaatgtgtaaggacatgtattcgtcattatagtatcatacagagtatttttgctgccctgaaaatcttctgtgctccaccttctcatcccttcttccacacacttacattttaagtatccttttgtccttttttctagagttttattagctctatagttttaattccagtaaagttctgttaatcatcctgttttctgagctgtcaaatgcaatgttggagtttttagaagtttaaaattatttctcgcttggtaatatgtccttttacaataaaaaaaatctatttaaccacagttggccttggtagcctcactacttctaaataaatgatgaaaccctaaattcatacatatctgtatttcagctggttattctcatgggaattttctcatttcttccttcagttttgactgtgacgttataaaataatatacttcgtaagcttcaaaaaaagaagtgtgtcaagttggaaagggagagagaggctagaaggcatgttgccagctcttct

SEQ ID NO: 85913 - DNA, 1788 bp, Homo sapiens
ggtgccggtggccccgccgccactccctccggctccctccctcccgccgcggcgcgcatctcattccagccctcattccgcgcattccagcgtcctcctcgcacactcgaggccagggggcgggagggccgcagctccggcgccgccgcgtcccgccagaacgatcgccgcggccggaagagttggcgctcggggcggactccttggaactggcttagcgcacccatcccaccttcccgcaccctgggaccggtccaacgagcgctcctccaagcggagccttggagggcacggccggcaccattacctccaacgagtggagctctcccacctcccctgaggggagcaccgcctctgggggcagtcaggcactggacaagcccatcgacaatgacgcagagggcgtgtggagcccggatattgagcagagtttccaggaggccctcgccatctacccgccctgtggcaggcgcaaaatcatcctgtcggacgagggcaagatgtatggtcggaacgagctgattgcccgctacatcaagctccggacagggaagacccgcaccaggaagcaggtctccagccacatccaggtgctggctcgtcgcaaagctcgcgagatccaggccaagctaaaggaccaggcagctaaggacaaggccctgcagagcatggctgccatgtcgtctgcacagatcatctccgccacggccttccacagtagcatggccctcgcccggggccccggccgcccagcagtctcagggttttggcaaggagctttgccaggccaagccggaacgtcccatgatgtgaagcctttctctcagcaaacctatgctgtccagcctccgctgcctctgccagggtttgagtctcctgcagggcccgccccatcgccctctgcgcccccggcacccccatggcagggccgcagcgtggccagctccaagctctggatgttggagttctctgccttcctggagcagcagcaggacccggacacgtacaacaagcacctgttcgtgcacattggccagtccagcccaagctacagcgacccctacctcgaagccgtggacatccgccaaatctatgacaaattcccggagaaaaagggtggactcaaggatctcttcgaacggggaccctccaatgccttttttcttgtgaagttctgggcagacctcaacaccaacatcgaggatgaaggcagctccttctatggggtctccagccagtatgagagccccgagaacatgatcatcacctgctccacgaaggtctgctctttcggcaagcaggtggtggagaaagttgagacagagtatgctcgctatgagaatggacactactcttaccgcatccaccggtccccgctctgtgagtacatgatcaacttcatccacaagctcaagcacctccctgagaagtacatgatgaacagcgtgctggagaacttcaccatcctgcaggtggtcaccaacagagacacacaggagaccttgctgtgcattgcctatgtctttgaggtgtcagccagtgagcacggggctcagcaccacatctacaggctggtgaaagaatgagagactcggggagcagggaggggggaagagacgtgtgtgcaggaaacggggacgtggggaggggacctgcaggggccagccccctgaagtgccaagagagctgagaggagcagttgtgactctacccaggaacaaactgtgcctgaacctgaggtgcccaaccccaaataaacccaagatgctgtgtattttcagaggaaaa

SEQ ID NO: 85914 - DNA, 1693 bp, Homo sapiens
ggtgccggtggccccgccgccactccctccggctccctccctcccgccgcggcgcgcatctcattccagccctcattccgcgcattccagcgtcctcctcgcacactcgaggccagggggcgggagggccgcagctccggcgccgccgcgtcccgccagccaacgagcgctcctccaagcggagccttggagggcacggccggcaccattacctccaacgagtggagctctcccacctcccctgaggggagcaccgcctctgggggcagtcaggcactggacaagcccatcgacaatgacgcagagggcgtgtggagcccggatattgagcagagtttccaggaggccctcgccatctacccgccctgtggcaggcgcaaaatcatcctgtcggacgagggcaagatgtatggtcggaacgagctgattgcccgctacatcaagctccggacagggaagacccgcaccaggaagcaggtctccagccacatccaggtgctggctcgtcgcaaagctcgcgagatccaggccaagctaaaggaccaggcagctaaggacaaggccctgcagagcatggctgccatgtcgtctgcacagatcatctccgccacggccttccacagtagcatggccctcgcccggggccccggccgcccagcagtctcagggttttggcaaggagctttgccaggccaagccggaacgtcccatgatgtgaagcctttctctcagcaaacctatgctgtccagcctccgctgcctctgccagggtttgagtctcctgcagggcccgccccatcgccctctgcgcccccggcacccccatggcagggccgcagcgtggccagctccaagctctggatgttggagttctctgccttcctggagcagcagcaggacccggacacgtacaacaagcacctgttcgtgcacattggccagtccagcccaagctacagcgacccctacctcgaagccgtggacatccgccaaatctatgacaaattcccggagaaaaagggtggactcaaggatctcttcgaacggggaccctccaatgccttttttcttgtgaagttctgggcagacctcaacaccaacatcgaggatgaaggcagctccttctatggggtctccagccagtatgagagccccgagaacatgatcatcacctgctccacgaaggtctgctctttcggcaagcaggtggtggagaaagttgagacagagtatgctcgctatgagaatggacactactcttaccgcatccaccggtccccgctctgtgagtacatgatcaacttcatccacaagctcaagcacctccctgagaagtacatgatgaacagcgtgctggagaacttcaccatcctgcaggtggtcaccaacagagacacacaggagaccttgctgtgcattgcctatgtctttgaggtgtcagccagtgagcacggggctcagcaccacatctacaggctggtgaaagaatgagagactcggggagcagggaggggggaagagacgtgtgtgcaggaaacggggacgtggggaggggacctgcaggggccagccccctgaagtgccaagagagctgagaggagcagttgtgactctacccaggaacaaactgtgcctgaacctgaggtgcccaaccccaaataaacccaagatgctgtgtattttcagaggaaaa

SEQ ID NO: 85915 - DNA, 1659 bp, Homo sapiens
ggtgccggtggccccgccgccactccctccggctccctccctcccgccgcggcgcgcatctcattccagccctcattccgcgcattccagcgtcctcctcgcacactcgaggccagggggcgggagggccgcagctccggcgccgccgcgtcccgccagaacgatcgccgcggccggaagagttggcgctcggggcggactccttggaactggcttagcgcacccatcccaccttcccgcaccctgggaccggtccaacgagcgctcctccaagcggagccttggagggcacggccggcaccattacctccaacgagtggagctctcccacctcccctgaggggagcaccgcctctgggggcagtcaggcactggacaagcccatcgacaatgacgcagagggcgtgtggagcccggatattgagcagagtttccaggaggccctcgccatctacccgccctgtggcaggcgcaaaatcatcctgtcggacgagggcaagatgtatggtcggaacgagctgattgcccgctacatcaagctccggacagggaagacccgcaccaggaagcaggtctccagccacatccaggtgctggctcgtcgcaaagctcgcgagatccaggccaagctaaagttttggcaaggagctttgccaggccaagccggaacgtcccatgatgtgaagcctttctctcagcaaacctatgctgtccagcctccgctgcctctgccagggtttgagtctcctgcagggcccgccccatcgccctctgcgcccccggcacccccatggcagggccgcagcgtggccagctccaagctctggatgttggagttctctgccttcctggagcagcagcaggacccggacacgtacaacaagcacctgttcgtgcacattggccagtccagcccaagctacagcgacccctacctcgaagccgtggacatccgccaaatctatgacaaattcccggagaaaaagggtggactcaaggatctcttcgaacggggaccctccaatgccttttttcttgtgaagttctgggcagacctcaacaccaacatcgaggatgaaggcagctccttctatggggtctccagccagtatgagagccccgagaacatgatcatcacctgctccacgaaggtctgctctttcggcaagcaggtggtggagaaagttgagacagagtatgctcgctatgagaatggacactactcttaccgcatccaccggtccccgctctgtgagtacatgatcaacttcatccacaagctcaagcacctccctgagaagtacatgatgaacagcgtgctggagaacttcaccatcctgcaggtggtcaccaacagagacacacaggagaccttgctgtgcattgcctatgtctttgaggtgtcagccagtgagcacggggctcagcaccacatctacaggctggtgaaagaatgagagactcggggagcagggaggggggaagagacgtgtgtgcaggaaacggggacgtggggaggggacctgcaggggccagccccctgaagtgccaagagagctgagaggagcagttgtgactctacccaggaacaaactgtgcctgaacctgaggtgcccaaccccaaataaacccaagatgctgtgtattttcagaggaaaa

SEQ ID NO: 85916 - DNA, 218 bp, Homo sapiens
tgtttgttcatttaatgagagaggaaactaatgcatctaagctttgctttgtttgcaaaattcaactgctgagcatcaaccttccccattttcttaaattttgattggcagaccagattgcagtaattcctccagccctcctcttcagaaggtggcaatttaactattaattaaagataaagaatctgatccttgtttcaccttgataatcagaggca

SEQ ID NO: 85917 - DNA, 377 bp, Homo sapiens
gaggaaagctgtaagatgaaaagacatcttgcagtccttgcagcgaagcatagctaaatgtgtgcatgcataagagaagctcttgaatccccaaaccacctcattctttcttcagcttttacagaagaagcaatggtatccaaaatctttcccctgttgtctgccttcccaagggcttttaccagcagcaagagtgcagaagtgtctgctagttttgagaaatgtgtctggttctccttttcctttccttataggcttccctccaccaatcctggagctaaaagaatcatacccattggcagggaccgacattaatgtgacctgctcagggcatgtattaacatcacccagccctactcttcggcttcagggagccc

SEQ ID NO: 85918 - DNA, 150 bp, Homo sapiens
gatcagtgtttgtctgggactgaagggatgactaacaaggagcagaggaaagcttttcgggatgatggcactcttctctgtctccattacggcattggatacaagtctctagaactcccagaactcgtcactgaaaagggtgaatagtac

SEQ ID NO: 85919 - DNA, 255 bp, Homo sapiens
atgtttgttattttgtgggtgtggggtcccacagtaagagtgactaggccttgtggtgaacttaacatagccccagtggtcagtgtaaggagccccagatgcaactgggaactcaggtagtattttcactctgctgtgatagtgtcaatataccagggtccagttatttctctacaactgagattcatcacttttcaagaacaactctctggctccaggttgagcctatgtcatgcacttggcctccagagccat

SEQ ID NO: 85920 - DNA, 4708 bp, Homo sapiens
ggagtggtccgaccgcgggcggccgccggtgaggtaggggcgggaggcggggggagacatggctcggcgcggctggcggcgggcacccctccgccgtggcgtcggcagcagtccccgagcccgcaggctcatgcggcccctttggttgctcctcgcagtgggcgtctttgactgggcaggggcttcggacggcggcggcggagaggctagagccatggacgaggagatcgtgtccgagaagcaagccgaggagagccaccggcaggacagcgccaacctgctcatcttcatcctgctgctcaccctcaccattctcacaatctggctcttcaagcaccgccgggcccgcttcctgcacgaaaccggcctggctatgatttatggtcttttggtgggccttgtgcttcggtatggcattcatgttccgagtgatgtaaataatgtgaccctgagctgtgaagtgcagtcaagtccaactaccttactggtaaatgttagtggaaaattttatgagtatatgctgaaaggagagattagttcacatgaactcaataatgttcaagataatgaaatgcttagaaaggttacttttgatccagaagtatttttcaacatattacttcctcctatcatattttatgcaggttatagcctgaaaaggagacatttttttcgaaatcttgggtctatcctagcatacgcttttcttggaacagcaatttcttgtttcgttattgggtcaataatgtatggctgtgtaacgctgatgaaggtaacgggacaacttgcaggagatttttactttacagattgcctactgtttggtgccattgtatcagcaactgatccagtgactgttcttgctatattccacgagcttcaagttgatgttgaactctatgcacttctttttggtgaaagtgtcctcaatgatgctgttgccatagtgctgtcctcctcaatagtggcataccagccagctggagacaacagtcacacctttgatgtcacagcgatgttcaagtctattgggatcttccttggaatcttcagtggatcttttgcaatgggtgctgctactggagtggtgacagctttagtgacaaagttcaccaaattacgggagttccagttgttggagacaggcctgttcttcttgatgtcctggagtaccttcctcttggctgaagcatggggcttcacaggtgtagttgcagtattgttttgtggcatcacacaagcacattatacgtataataatttgtccacggagtctcagcatagaactaaacagttgtttgagcttctcaatttcttggcagagaatttcatcttctcctacatggggctgacactgttcaccttccagaaccatgtctttaacccaacatttgtagtaggagcatttgttgctattttcttgggaagagctgccaatatttaccccttgtccctcttacttaatttgggtagaagaagtaagattggatcaaattttcaacacatgatgatgtttgctggccttcgtggtgcaatggcatttgccttggccattcgagatactgccacttatgcacggcaaatgatgttcagcaccacgcttctgattgtgttttttaccgtgtgggtatttggtggtggcaccactgcaatgctgtcatgcttgcatatcagggttggtgttgattcagaccaagaacacttgggtgttcctgaaaatgaaaggagaactaccaaagcagagagtgcttggcttttccggatgtggtacaactttgatcataactatctgaagcctctgctgacccacagcgggcctccgctgacaacaacactccctgcctgctgtggacccatcgccaggtgcctcaccagcccccaggcttacgaaaaccaggaacagttgaaagatgatgattctgatcttattctcaatgatggtgacatcagtttgacatatggagattctactgtgaacactgaaccggccacatccagcgccccaaggagatttatgggaaacagttctgaagatgccttggatcgggagcttgcatttggggaccatgaactggtcattcgaggaacacgcctggttcttccaatggatgattctgaacccccgctaaatttgttagataatacgagacatggtccagcctaagcttactaatactcacttagtgatttgtaaaatttgcacatgtgattgtgaagaaatttgtactacctaaaagtcccagtgcatgtctctgaatgtgtaagctatataaatgctatttatatggcatagaaagaatataaatatcctgtacacggcagattgtgaacaaactatattcctttaagttttcctggttgcactctgtagactggatctgttttaggaagttactttcacagtgatgttgtgtgttctgttagttttatgtctcagttaaagtgtaaaaagtgacggattttctctttcttaaacttacctgacacttaaccagagtaccagttctcgtgatgtgaattaatttttttgtgtgctaggggagggagagtgaggagggagtgttatttccttgggaacctagggaggagaggttcctttgttgggaaacttttgttgatagctgctgcctttgtcctgatcgttttctttcccttttctctggtggcctgttgtggtgcaacgagctgatggcatttgatcttgccccattcaggttggggagtgaagtgtgaggacccttttcccccgcttgctgtgaaagcacagattcattgactacagtacactgttgttcagaaaagaaggctgcaaatgacttctgagactttatgtcttttcttccagaccaagaccgtagaaggagtcacatctagccggcttagccaaagtacaggtgtatatagttcagggcacttgatttagatttggaggggctggggtgggcagagagcaagaggcgagtaaagagaatggtggtttcagagatctctcttcccaaatgtgtaaatattctataccagataagtttaaataagaaatttaattgctgcttaatttttgattatgtactttatctgtatagcaggctttgtcgtcagaagtttttatatcgatttaaattgctgctctttagcagccaaacaggagcaaaatgtaaaatttttgaacttactgtgtctaatcatcatttgttagtctgtagttaatgtcaacagttaatttatgaacccacgatcgttccacactgcaccaaagtcagtcataagagaaatcgaatattctggagcactgattgcagcagggtggctcctttgtgtgcagcaggtgtagtagtcttcattttcatggtacgttttaatattaattacctaagctgccatgcatttttttttttacagttctcaaggaagagcacagaacaatttctcatttcatatttggagtatgaaagtagattctattttgtaatgctgataatacctaaagatgcattgaatgcttggaagaatgctttttgatgttgattttgacctgttcatgattcagaagaaaaacaaacttttttggattttttttccctcaggtctgagtagcattgccttaaatcttatccagttagaacattgatttatttacatgatgttcagattttccagtgaaaaatacccttctgaacaaaacatgtacttactctccgaaaggcatctatctgtgctattgcaaacactccttgagattttaggggaattctaatgttgtaccctttcgtggcagctttgactgttggcatagccatttgttatgtagtggtagcgactttcctgctatgcaggaatccctcccatgacgtgtatgttttacatgatgtgtgcctcttcacgcagtaaatagtttcttgttaatgtatgtttgaggagtttgaacgtcagtgtcacttacccacaaagttattcaagttgtaaaaggttatacaataatttaacaactaccttttttattctgtcgggttactgacctcactttatgtaaatacttcgcatgacaaattcagtaactcgtctatttcagcatgcataagacttttcactagggaaactgataaagcttgagtcaactaaatctgccttcatactttatcaaggggaaccaagcctgctgtgcttacatcagcatctggaagactttcctctcctctaatctgtgtacacatctccaagcaaggaagaaaaaacaaactctgctcagacgcctatgaaacacctgaatgaactttgatgaagtacagtctgagttaccatcatgcacaagtagaactgctcttggacttgttttcctgttgtttgtggaacctacgcgtttgaatggcttgaacgttgcatcttttaaagttattttttaaggtttcttggcatttatcctagttgtccgtgtttggcaatgtgctgttaaagtaatagacttttaatctttatgtattttttgttttctctggagtacttggacagatgttatagtggtttcttttaggaaaatctgtcattaaaaaagttatagccttgcaaataaccactcacagtatttgagtcacagtttattttagtgagacgtaaagagtgctgacttcatttatttttctacctatatacctagtggaaaaggggaagactaatgttttcaaataaacaaacagaaacctaacagaactta

SEQ ID NO: 85921 - DNA, 4583 bp, Homo sapiens
ggagtggtccgaccgcgggcggccgccggtgagtgggcgtctttgactgggcaggggcttcggacggcggcggcggagaggctagagccatggacgaggagatcgtgtccgagaagcaagccgaggagagccaccggcaggacagcgccaacctgctcatcttcatcctgctgctcaccctcaccattctcacaatctggctcttcaagcaccgccgggcccgcttcctgcacgaaaccggcctggctatgatttatggtcttttggtgggccttgtgcttcggtatggcattcatgttccgagtgatgtaaataatgtgaccctgagctgtgaagtgcagtcaagtccaactaccttactggtaaatgttagtggaaaattttatgagtatatgctgaaaggagagattagttcacatgaactcaataatgttcaagataatgaaatgcttagaaaggttacttttgatccagaagtatttttcaacatattacttcctcctatcatattttatgcaggttatagcctgaaaaggagacatttttttcgaaatcttgggtctatcctagcatacgcttttcttggaacagcaatttcttgtttcgttattgggtcaataatgtatggctgtgtaacgctgatgaaggtaacgggacaacttgcaggagatttttactttacagattgcctactgtttggtgccattgtatcagcaactgatccagtgactgttcttgctatattccacgagcttcaagttgatgttgaactctatgcacttctttttggtgaaagtgtcctcaatgatgctgttgccatagtgctgtcctcctcaatagtggcataccagccagctggagacaacagtcacacctttgatgtcacagcgatgttcaagtctattgggatcttccttggaatcttcagtggatcttttgcaatgggtgctgctactggagtggtgacagctttagtgacaaagttcaccaaattacgggagttccagttgttggagacaggcctgttcttcttgatgtcctggagtaccttcctcttggctgaagcatggggcttcacaggtgtagttgcagtattgttttgtggcatcacacaagcacattatacgtataataatttgtccacggagtctcagcatagaactaaacagttgtttgagcttctcaatttcttggcagagaatttcatcttctcctacatggggctgacactgttcaccttccagaaccatgtctttaacccaacatttgtagtaggagcatttgttgctattttcttgggaagagctgccaatatttaccccttgtccctcttacttaatttgggtagaagaagtaagattggatcaaattttcaacacatgatgatgtttgctggccttcgtggtgcaatggcatttgccttggccattcgagatactgccacttatgcacggcaaatgatgttcagcaccacgcttctgattgtgttttttaccgtgtgggtatttggtggtggcaccactgcaatgctgtcatgcttgcatatcagggttggtgttgattcagaccaagaacacttgggtgttcctgaaaatgaaaggagaactaccaaagcagagagtgcttggcttttccggatgtggtacaactttgatcataactatctgaagcctctgctgacccacagcgggcctccgctgacaacaacactccctgcctgctgtggacccatcgccaggtgcctcaccagcccccaggcttacgaaaaccaggaacagttgaaagatgatgattctgatcttattctcaatgatggtgacatcagtttgacatatggagattctactgtgaacactgaaccggccacatccagcgccccaaggagatttatgggaaacagttctgaagatgccttggatcgggagcttgcatttggggaccatgaactggtcattcgaggaacacgcctggttcttccaatggatgattctgaacccccgctaaatttgttagataatacgagacatggtccagcctaagcttactaatactcacttagtgatttgtaaaatttgcacatgtgattgtgaagaaatttgtactacctaaaagtcccagtgcatgtctctgaatgtgtaagctatataaatgctatttatatggcatagaaagaatataaatatcctgtacacggcagattgtgaacaaactatattcctttaagttttcctggttgcactctgtagactggatctgttttaggaagttactttcacagtgatgttgtgtgttctgttagttttatgtctcagttaaagtgtaaaaagtgacggattttctctttcttaaacttacctgacacttaaccagagtaccagttctcgtgatgtgaattaatttttttgtgtgctaggggagggagagtgaggagggagtgttatttccttgggaacctagggaggagaggttcctttgttgggaaacttttgttgatagctgctgcctttgtcctgatcgttttctttcccttttctctggtggcctgttgtggtgcaacgagctgatggcatttgatcttgccccattcaggttggggagtgaagtgtgaggacccttttcccccgcttgctgtgaaagcacagattcattgactacagtacactgttgttcagaaaagaaggctgcaaatgacttctgagactttatgtcttttcttccagaccaagaccgtagaaggagtcacatctagccggcttagccaaagtacaggtgtatatagttcagggcacttgatttagatttggaggggctggggtgggcagagagcaagaggcgagtaaagagaatggtggtttcagagatctctcttcccaaatgtgtaaatattctataccagataagtttaaataagaaatttaattgctgcttaatttttgattatgtactttatctgtatagcaggctttgtcgtcagaagtttttatatcgatttaaattgctgctctttagcagccaaacaggagcaaaatgtaaaatttttgaacttactgtgtctaatcatcatttgttagtctgtagttaatgtcaacagttaatttatgaacccacgatcgttccacactgcaccaaagtcagtcataagagaaatcgaatattctggagcactgattgcagcagggtggctcctttgtgtgcagcaggtgtagtagtcttcattttcatggtacgttttaatattaattacctaagctgccatgcatttttttttttacagttctcaaggaagagcacagaacaatttctcatttcatatttggagtatgaaagtagattctattttgtaatgctgataatacctaaagatgcattgaatgcttggaagaatgctttttgatgttgattttgacctgttcatgattcagaagaaaaacaaacttttttggattttttttccctcaggtctgagtagcattgccttaaatcttatccagttagaacattgatttatttacatgatgttcagattttccagtgaaaaatacccttctgaacaaaacatgtacttactctccgaaaggcatctatctgtgctattgcaaacactccttgagattttaggggaattctaatgttgtaccctttcgtggcagctttgactgttggcatagccatttgttatgtagtggtagcgactttcctgctatgcaggaatccctcccatgacgtgtatgttttacatgatgtgtgcctcttcacgcagtaaatagtttcttgttaatgtatgtttgaggagtttgaacgtcagtgtcacttacccacaaagttattcaagttgtaaaaggttatacaataatttaacaactaccttttttattctgtcgggttactgacctcactttatgtaaatacttcgcatgacaaattcagtaactcgtctatttcagcatgcataagacttttcactagggaaactgataaagcttgagtcaactaaatctgccttcatactttatcaaggggaaccaagcctgctgtgcttacatcagcatctggaagactttcctctcctctaatctgtgtacacatctccaagcaaggaagaaaaaacaaactctgctcagacgcctatgaaacacctgaatgaactttgatgaagtacagtctgagttaccatcatgcacaagtagaactgctcttggacttgttttcctgttgtttgtggaacctacgcgtttgaatggcttgaacgttgcatcttttaaagttattttttaaggtttcttggcatttatcctagttgtccgtgtttggcaatgtgctgttaaagtaatagacttttaatctttatgtattttttgttttctctggagtacttggacagatgttatagtggtttcttttaggaaaatctgtcattaaaaaagttatagccttgcaaataaccactcacagtatttgagtcacagtttattttagtgagacgtaaagagtgctgacttcatttatttttctacctatatacctagtggaaaaggggaagactaatgttttcaaataaacaaacagaaacctaacagaactta

SEQ ID NO: 85922 - DNA, 3304 bp, Homo sapiens
ggagtggtccgaccgcgggcggccgccggtgaggtaggggcgggaggcggggggagacatggctcggcgcggctggcggcgggcacccctccgccgtggcgtcggcagcagtccccgagcccgcaggctcatgcggcccctttggttgctcctcgcagtgggcgtctttgactgggcaggggcttcggacggcggcggcggagaggctagagccatggacgaggagatcgtgtccgagaagcaagccgaggagagccaccggcaggacagcgccaacctgctcatcttcatcctgctgctcaccctcaccattctcacaatctggctcttcaagcaccgccgggcccgcttcctgcacgaaaccggcctggctatgatttatggtcttttggtgggccttgtgcttcggtatggcattcatgttccgagtgatgtaaataatgtgaccctgagctgtgaagtgcagtcaagtccaactaccttactggtaaatgttagtggaaaattttatgagtatatgctgaaaggagagattagttcacatgaactcaataatgttcaagataatgaaatgcttagaaaggttacttttgatccagaagtatttttcaacatattacttcctcctatcatattttatgcaggttatagcctgaaaaggagacatttttttcgaaatcttgggtctatcctagcatacgcttttcttggaacagcaatttcttgtttcgttattgggtcaataatgtatggctgtgtaacgctgatgaaggtaacgggacaacttgcaggagatttttactttacagattgcctactgtttggtgccattgtatcagcaactgatccagtgactgttcttgctatattccacgagcttcaagttgatgttgaactctatgcacttctttttggtgaaagtgtcctcaatgatgctgttgccatagtgctgtcctcctcaatagtggcataccagccagctggagacaacagtcacacctttgatgtcacagcgatgttcaagtctattgggatcttccttggaatcttcagtggatcttttgcaatgggtgctgctactggagtggtgacagctttagtgacaaagttcaccaaattacgggagttccagttgttggagacaggcctgttcttcttgatgtcctggagtaccttcctcttggctgaagcatggggcttcacaggtgtagttgcagtattgttttgtggcatcacacaagcacattatacgtataataatttgtccacggagtctcagcatagaactaaacagttgtttgagcttctcaatttcttggcagagaatttcatcttctcctacatggggctgacactgttcaccttccagaaccatgtctttaacccaacatttgtagtaggagcatttgttgctattttcttgggaagagctgccaatatttaccccttgtccctcttacttaatttgggtagaagaagtaagattggatcaaattttcaacacatgatgatgtttgctggccttcgtggtgcaatggcatttgccttggccattcgagatactgccacttatgcacggcaaatgatgttcagcaccacgcttctgattgtgttttttaccgtgtgggtatttggtggtggcaccactgcaatgctgtcatgcttgcatatcagggttggtgttgattcagaccaagaacacttgggtgttcctgaaaatgaaaggagaactaccaaagcagagagtgcttggcttttccggatgtggtacaactttgatcataactatctgaagcctctgctgacccacagcgggcctccgctgacaacaacactccctgcctgctgtggacccatcgccaggtgcctcaccagcccccaggcttacgaaaaccaggaacagttgaaagatgatgattctgatcttattctcaatgatggtgacatcagtttgacatatggagattctactgtgaacactgaaccggccacatccagcgccccaaggagatttatgggaaacagttctgaagatgccttggatcgggagcttgcatttggggaccatgaactggtcattcgaggaacacgcctggttcttccaatggatgattctgaacccccgctaaatttgttagataatacgagacatggtccagcctaagcttactaatactcacttagtgatttgtaaaatttgcacatgtgattgtgaagaaatttgtactacctaaaagtcccagtgcatgtctctgaatgtgtaagctatataaatgctatttatatggcatagaaagaatataaatatcctgtacacggcagattgtgaacaaactatattcctttaagttttcctggttgcactctgtagactggatctgttttaggaagttactttcacagtgatgttgtgtgttctgttagttttatgtctcagttaaagtgtaaaaagtgacggattttctctttcttaaacttacctgacacttaaccagagtaccagttctcgtgatgtgaattaatttttttgtgtgctaggggagggagagtgaggagggagtgttatttccttgggaacctagggaggagaggttcctttgttgggaaacttttgttgatagctgctgcctttgtcctgatcgttttctttcccttttctctggtggcctgttgtggtgcaacgagctgatggcatttgatcttgccccattcaggttggggagtgaagtgtgaggacccttttcccccgctgctgtgcttacatcagcatctggaagactttcctctcctctaatctgtgtacacatctccaagcaaggaagaaaaaacaaactctgctcagacgcctatgaaacacctgaatgaactttgatgaagtacagtctgagttaccatcatgcacaagtagaactgctcttggacttgttttcctgttgtttgtggaacctacgcgtttgaatggcttgaacgttgcatcttttaaagttattttttaaggtttcttggcatttatcctagttgtccgtgtttggcaatgtgctgttaaagtaatagacttttaatctttatgtattttttgttttctctggagtacttggacagatgttatagtggtttcttttaggaaaatctgtcattaaaaaagttatagccttgcaaataaccactcacagtatttgagtcacagtttattttagtgagacgtaaagagtgctgacttcatttatttttctacctatatacctagtggaaaaggggaagactaatgttttcaaataaacaaacagaaacctaacagaactta

SEQ ID NO: 85923 - DNA, 4612 bp, Homo sapiens
ggagtggtccgaccgcgggcggccgccggtgaggtaggggcgggaggcggggggagacatggctcggcgcggctggcggcgggcacccctccgccgtggcgtcggcagcagtccccgagcccgcaggctcatgcggcccctttggttgctcctcgcagtgggcgtctttgactgggcaggggcttcggacggcggcggcggagaggctagagccatggacgaggagatcgtgtccgagaagcaagccgaggagagccaccggcaggacagcgccaacctgctcatcttcatcctgctgctcaccctcaccattctcacaatctggctcttcaagcaccgccgggcccgcttcctgcacgaaaccggcctggctatgatttatggtcttttggtgggccttgtgcttcggtatggcattcatgttccgagtgatgtaaataatgtgaccctgagctgtgaagtgcagtcaagtccaactaccttactggttacttttgatccagaagtatttttcaacatattacttcctcctatcatattttatgcaggttatagcctgaaaaggagacatttttttcgaaatcttgggtctatcctagcatacgcttttcttggaacagcaatttcttgtttcgttattgggtcaataatgtatggctgtgtaacgctgatgaaggtaacgggacaacttgcaggagatttttactttacagattgcctactgtttggtgccattgtatcagcaactgatccagtgactgttcttgctatattccacgagcttcaagttgatgttgaactctatgcacttctttttggtgaaagtgtcctcaatgatgctgttgccatagtgctgtcctcctcaatagtggcataccagccagctggagacaacagtcacacctttgatgtcacagcgatgttcaagtctattgggatcttccttggaatcttcagtggatcttttgcaatgggtgctgctactggagtggtgacagctttagtgacaaagttcaccaaattacgggagttccagttgttggagacaggcctgttcttcttgatgtcctggagtaccttcctcttggctgaagcatggggcttcacaggtgtagttgcagtattgttttgtggcatcacacaagcacattatacgtataataatttgtccacggagtctcagcatagaactaaacagttgtttgagcttctcaatttcttggcagagaatttcatcttctcctacatggggctgacactgttcaccttccagaaccatgtctttaacccaacatttgtagtaggagcatttgttgctattttcttgggaagagctgccaatatttaccccttgtccctcttacttaatttgggtagaagaagtaagattggatcaaattttcaacacatgatgatgtttgctggccttcgtggtgcaatggcatttgccttggccattcgagatactgccacttatgcacggcaaatgatgttcagcaccacgcttctgattgtgttttttaccgtgtgggtatttggtggtggcaccactgcaatgctgtcatgcttgcatatcagggttggtgttgattcagaccaagaacacttgggtgttcctgaaaatgaaaggagaactaccaaagcagagagtgcttggcttttccggatgtggtacaactttgatcataactatctgaagcctctgctgacccacagcgggcctccgctgacaacaacactccctgcctgctgtggacccatcgccaggtgcctcaccagcccccaggcttacgaaaaccaggaacagttgaaagatgatgattctgatcttattctcaatgatggtgacatcagtttgacatatggagattctactgtgaacactgaaccggccacatccagcgccccaaggagatttatgggaaacagttctgaagatgccttggatcgggagcttgcatttggggaccatgaactggtcattcgaggaacacgcctggttcttccaatggatgattctgaacccccgctaaatttgttagataatacgagacatggtccagcctaagcttactaatactcacttagtgatttgtaaaatttgcacatgtgattgtgaagaaatttgtactacctaaaagtcccagtgcatgtctctgaatgtgtaagctatataaatgctatttatatggcatagaaagaatataaatatcctgtacacggcagattgtgaacaaactatattcctttaagttttcctggttgcactctgtagactggatctgttttaggaagttactttcacagtgatgttgtgtgttctgttagttttatgtctcagttaaagtgtaaaaagtgacggattttctctttcttaaacttacctgacacttaaccagagtaccagttctcgtgatgtgaattaatttttttgtgtgctaggggagggagagtgaggagggagtgttatttccttgggaacctagggaggagaggttcctttgttgggaaacttttgttgatagctgctgcctttgtcctgatcgttttctttcccttttctctggtggcctgttgtggtgcaacgagctgatggcatttgatcttgccccattcaggttggggagtgaagtgtgaggacccttttcccccgcttgctgtgaaagcacagattcattgactacagtacactgttgttcagaaaagaaggctgcaaatgacttctgagactttatgtcttttcttccagaccaagaccgtagaaggagtcacatctagccggcttagccaaagtacaggtgtatatagttcagggcacttgatttagatttggaggggctggggtgggcagagagcaagaggcgagtaaagagaatggtggtttcagagatctctcttcccaaatgtgtaaatattctataccagataagtttaaataagaaatttaattgctgcttaatttttgattatgtactttatctgtatagcaggctttgtcgtcagaagtttttatatcgatttaaattgctgctctttagcagccaaacaggagcaaaatgtaaaatttttgaacttactgtgtctaatcatcatttgttagtctgtagttaatgtcaacagttaatttatgaacccacgatcgttccacactgcaccaaagtcagtcataagagaaatcgaatattctggagcactgattgcagcagggtggctcctttgtgtgcagcaggtgtagtagtcttcattttcatggtacgttttaatattaattacctaagctgccatgcatttttttttttacagttctcaaggaagagcacagaacaatttctcatttcatatttggagtatgaaagtagattctattttgtaatgctgataatacctaaagatgcattgaatgcttggaagaatgctttttgatgttgattttgacctgttcatgattcagaagaaaaacaaacttttttggattttttttccctcaggtctgagtagcattgccttaaatcttatccagttagaacattgatttatttacatgatgttcagattttccagtgaaaaatacccttctgaacaaaacatgtacttactctccgaaaggcatctatctgtgctattgcaaacactccttgagattttaggggaattctaatgttgtaccctttcgtggcagctttgactgttggcatagccatttgttatgtagtggtagcgactttcctgctatgcaggaatccctcccatgacgtgtatgttttacatgatgtgtgcctcttcacgcagtaaatagtttcttgttaatgtatgtttgaggagtttgaacgtcagtgtcacttacccacaaagttattcaagttgtaaaaggttatacaataatttaacaactaccttttttattctgtcgggttactgacctcactttatgtaaatacttcgcatgacaaattcagtaactcgtctatttcagcatgcataagacttttcactagggaaactgataaagcttgagtcaactaaatctgccttcatactttatcaaggggaaccaagcctgctgtgcttacatcagcatctggaagactttcctctcctctaatctgtgtacacatctccaagcaaggaagaaaaaacaaactctgctcagacgcctatgaaacacctgaatgaactttgatgaagtacagtctgagttaccatcatgcacaagtagaactgctcttggacttgttttcctgttgtttgtggaacctacgcgtttgaatggcttgaacgttgcatcttttaaagttattttttaaggtttcttggcatttatcctagttgtccgtgtttggcaatgtgctgttaaagtaatagacttttaatctttatgtattttttgttttctctggagtacttggacagatgttatagtggtttcttttaggaaaatctgtcattaaaaaagttatagccttgcaaataaccactcacagtatttgagtcacagtttattttagtgagacgtaaagagtgctgacttcatttatttttctacctatatacctagtggaaaaggggaagactaatgttttcaaataaacaaacagaaacctaacagaactta

SEQ ID NO: 85924 - DNA, 4566 bp, Homo sapiens
ggagtggtccgaccgcgggcggccgccggtgaggtaggggcgggaggcggggggagacatggctcggcgcggctggcggcgggcacccctccgccgtggcgtcggcagcagtccccgagcccgcaggctcatgcggcccctttggttgctcctcgcagtgggcgtctttgactgggcaggggcttcggacggcggcggcggagaggctagagccatggacgaggagatcgtgtccgagaagcaagccgaggagagccaccggcaggacagcgccaacctgctcatcttcatcctgctgctcaccctcaccattctcacaatctggctcttcaagcaccgccgggcccgcttcctgcacgaaaccggcctggctatgatttatggtcttttggtgggccttgtgcttcggtatggcattcatgttccgagtgatgtaaataatgtgaccctgagctgtgaagtgcagtcaagtccaactaccttactggtaaatgttagtggaaaattttatgagtatatgctgaaaggagagattagttcacatgaactcaataatgttcaagataatgaaatgcttagaaaggttacttttgatccagaagtatttttcaacatattacttcctcctatcatattttatgcaggttatagcctgaaaaggagacatttttttcgaaatcttgggtctatcctagcatacgcttttcttggaacagcaatttcttgtttcgttattgggtcaataatgtatggctgtgtaacgctgatgaaggtaacgggacaacttgcaggagatttttactttacagattgcctactgtttggtgccattgtatcagcaactgatccagtgactgttcttgctatattccacgagcttcaagttgatgttgaactctatgcacttctttttggtgaaagtgtcctcaatgatgctgttgccatagtgctgtcctcctcaatagtggcataccagccagctggagacaacagtcacacctttgatgtcacagcgatgttcaagtctattgggatcttccttggaatcttcagtggatcttttgcaatgggtgctgctactggagtggtgacagctttagtgacaaagttcaccaaattacgggagttccagttgttggagacaggcctgttcttcttgatgtcctggagtaccttcctcttggctgaagcatggggcttcacaggtgtagttgcagtattgttttgtggcatcacacaagcacattatacgtataataatttgtccacggagtctcagcatagaactaaacagttgtttgagcttctcaatttcttggcagagaatttcatcttctcctacatggggctgacactgttcaccttccagaaccatgtctttaacccaacatttgtagtaggagcatttgttgctattttcttgggaagagctgccaatatttaccccttgtccctcttacttaatttgggtagaagaagtaagattggatcaaattttcaacacatgatgatgtttgctggccttcgtggtgcaatggcatttgccttggccattcgagatactgccacttatgcacggcaaatgatgttcagcaccacgcttctgattgtgttttttaccgtgtgggtatttggtggtggcaccactgcaatgctgtcatgcttgcatatcagggttggtgttgattcagaccaagaacacttgggtgttcctgaaaatgaaaggagaactaccaaagcagagagtgcttggcttttccggatgtggtacaactttgatcataactatctgaagcctctgctgacccacagcgggcctccgctgacaacaacactccctgcctgctgtggacccatcgccaggtgcctcaccagcccccaggcttacgaaaaccaggaacagttgaaagatgatgattctgatcttattctcaatgatggtgacatcagtttgacatatggagattctactgtgaacactgaaccggccacatccagcgccccaaggagatttatgggaaacagttctgaagatgccttggatcgggagcttgcatttggggaccatgaactggtcattcgaggaacacgcctggttcttccaatggatgattctgaacccccgctaaatttgttagataatacgagacatggtccagcctaagcttactaatactcacttagtgatttgtaaaatttgcacatgtgattgtgaagaaatttgtactacctaaaagtcccagtgcatgtctctgaatgtgtaagctatataaatgctatttatatggcatagaaagaatataaatatcctgtacacggcagattgtgaacaaactatattcctttaagttttcctggttgcactctgtagactggatctgttttaggaagttactttcacagtgatgttgtgtgttctgttagttttatgtctcagttaaagtgtaaaaagtgacggattttctctttcttaaacttacctgacacttaaccagagtaccagttctcgtgatgtgaattaatttttttgtgtgctaggggagggagagtgaggagggagtgttatttccttgggaacctagggaggagaggttcctttgttgggaaacttttgttgatagctgctgcctttgtcctgatcgttttctttcccttttctctggtggcctgttgtggtgcaacgagctgatggcatttgatcttgccccattcaggttggggagtgaagtgtgaggacccttttcccccgcttgctgtgaaagcacagattcattgactacagtacactgttgttcagaaaagaaggctgcaaatgacttctgagactttatgtcttttcttccagaccaagaccgtagaaggagtcacatctagccggcttagccaaagtacaggtgtatatagttcagggcacttgatttagatttggaggggctggggtgggcagagagcaagaggcgagtaaagagaatggtggtttcagagatctctcttcccaaatgtgtaaatattctataccagataagtttaaataagaaatttaattgctgcttaatttttgattatgtactttatctgtatagcaggctttgtcgtcagaagtttttatatcgatttaaattgctgctctttagcagccaaacaggagcaaaatgtaaaatttttgaacttactgtgtctaatcatcatttgttagtctgtagttaatgtcaacagttaatttatgaacccacgatcgttccacactgcaccaaagtcagtcataagagaaatcgaatattctggagcactgattgcagcagggtggctcctttgtgtgcagcaggtgtagtagtcttcattttcatggtacgttttaatattaattacctaagctgccatgcatttttttttttacagttctcaaggaagagcacagaacaatttctcatttcatatttggagtatgaaagtagattctattttgtaatgctgataatacctaaagatgcattgaatgcttggaagaatgctttttgatgttgattttgacctgttcatgattcagaagaaaaacaaacttttttggattttttttccctcaggtctgagtagcattgccttaaatcttatccagttagaacattgatttatttacatgatgttcagattttccagtgaaaaatacccttctgaacaaaacatgtacttactctccgaaaggcatctatctgtgctattgcaaacactccttgagattttaggggaattctaatgttgtaccctttcgtggcagctttgactgttggcatagccatttgttatgtagtggtagcgactttcctgctatgcaggaatccctcccatgacgtgtatgttttacatgatgtgtgcctcttcacgcagtaaatagtttcttgttaatgtatgtttgaggagtttgaacgtcagtgtcacttacccacaaagttattcaagttgtaaaaggttatacaataatttaacaactaccttttttattctgtcgggttactgacctcactttatgtaaatacttcgcatgacaaattcagtaactcgtctatttcagcatgcataagacttttcactagggaaactgataaagcttgagtcaactaaatctgccttcatactttatcaaggggaaccaagcctgctgtgcttacatcagcatctggaagactttcctctcctctaatctgtgtacacatctccaagcaaggaagaaaaaacaaactctgctcagacgcctatgaaacacctgaatgaactttgatgaagtacagtctgagttaccatcatgcacaagtagaactgctcttggacttgttttcctgttgtttgtggaacctacgcgtttgaatggcttgaacgttgcatcttttaaagttattttttaaggtttcttggcatttatcctagttgtccgtgtttggcaatgtgctgttaaagtaatagacttttaatctttatgtattttttgttttctctggagtacttggacagatgttatagtggtttcttttaggaaaatctgtcattaaaaaagttatagccttgcaaata

SEQ ID NO: 85925 - DNA, 867 bp, Homo sapiens
ggagtggtccgaccgcgggcggccgccggtgaggtaggggcgggaggcggggggagacatggctcggcgcggctggcggcgggcacccctccgccgtggcgtcggcagcagtccccgagcccgcaggctcatgcggcccctttggttgctcctcgcagtgggcgtctttgactgggcaggggcttcggacggcggcggcggagaggctagagccatggacgaggagatcgtgtccgagaagcaagccgaggagagccaccggcaggacagcgccaacctgctcatcttcatcctgctgctcaccctcaccattctcacaatctggctcttcaagcaccgccgggcccgcttcctgcacgaaaccggcctggctatgatttatggtcttttggtgggccttgtgcttcggtatggcattcatgttccgagtgatgtaaataatgtgaccctgagctgtgaagtgcagtcaagtccaactaccttactggtaaatgttagtggaaaattttatgagtatatgctgaaaggagagattagttcacatgaactcaataatgttcaagataatgaaatgcttagaaaggttacttttgatccagaagtatttttcaacatattacttcctcctatcatattttatgcaggttatagcctgaaaaggagacatttttttcgaaatcttgggtctatcctagcatacgcttttcttggaacagcaatttcttgtttcgttattgggtcaataatgtatggctgtgtaacgctgatgaaggtaacgggacaacttgcaggagatttttactttacagattgcctactgtttggtgccattgtatcagcaactgatccaggtatgttttatatgag

SEQ ID NO: 85926 - DNA, 318 bp, Homo sapiens
tgggctagacaagagtttcccaaccacagcactatggaaatttggggctggatcattcttgttgtggggcctgtgccttggtggatgtttagccgtgtccaaagtctctacctaccagatgccggtggttcccctgttgccagatgtagcaaccaaaaatgcctccagatgtcccccaaagtcaaatgtcccctgtgggggaggaattgcccctggtttaggaaccctgagctatactctgttctgggacttgacatgtattatctggctcagttctcactgcaggcacagttttcccttccatttgacagagaagaa

SEQ ID NO: 85927 - DNA, 461 bp, Homo sapiens
acaaataccctttaatttattccagataaacaaatgatttatatctgctgtttggattacttcttcttcccttaactaatataaataatcacgggagagtataatggaaaaatggtttgccccttatgatgtttagccctgtaatttaaaggtgatagaggcagtatcatttttatggatgttatgccttctattcaaatattcatttgaaaaacagttatgtagccatttttataagtcaagaaagtatctgggagagggagctttcagatgaaagtagtagtgcggaggagtgaaactcatttctgactttctaagcaattagatataggaggttctggaacagaataggaacatactccctccctttgttcttagtttcgtactcttgctatgtggccattgaccaagtagtcagtaaagccagaatagaagattgctgaaacccggctgattgagtc

SEQ ID NO: 85928 - DNA, 807 bp, Homo sapiens
taattcaggcactgtttaggggctggggttatgacagtgaagaaaacagacaaaatccctgcccttatggtgtttgtattctaggggttaacagtgagtcagttactaaaaagtggtatatggtttgtatacatgtatatgtttatgtgtatatgtacgtgggtttggttttgtttaaaggtggcaaaatcattctgtgcagaattggtttttttttcaatcagtaaatcagggacatcctcccatgtcagaatatatattaataaatctatgtcatttgtagaatggactaaggttttgtctggaggtagatgcgttaccttacataacttccttttctgtttccccaaagaaaagattaaaaattaggttttgtgagctaacgcagataaacttttgaggatttagggaaaattggcatgtatctattaataattattttatgctttcacaaacctgtttaaaatcacacatataaataggttaagaagtaatgcctttcttccactcccatagtttgtgaaacaagtttattcaggctttgcacgtcttcagtgccagtatctttcacatcactcatgaagattccatcatcttagtgaagttttcagcacatttttacttcagggttatttaagataaagtactttttgaaacttttcttttttaattatactttaagttctagggtacatgttcacaacatgcaggtttgttacatatgtatacatgtgccatgttggtgtgctgcacccattaactcgtcatttacattaggtgtatctcctaatgctatccctccccctc

SEQ ID NO: 85929 - DNA, 336 bp, Homo sapiens
tttttaatatttagaacttttcctaaatcctgaattaactaagaaatgaccattaaattaatcacttttttaactttaaaaggtgaaaacctgttactttttaggtgcctggaattctgttggattgctaaagcatatgttaagtcaaaaatcatagcagaggcctttttttttttttttaactttgtacatttcatagaaagctcatacatttcttccattctttctcagaaaaaaatggcatttaacaaatgttcggtgtataaagctgtcagtttgctagtagttataatttgttgtgttcttgaataaaaatatattgggtacataaaaaag

SEQ ID NO: 85930 - DNA, 289 bp, Homo sapiens
agggcattcgtggcgataagggagagcccctctccttcgtctgggaaggcaccagcatgagtcccacacacccagccttctcatttctagaggcttccacctttttatacactcagccttccctctcccaggcaggaggacccccagaccctgttcccctgcagacctcacttctgggagacagagctacagctgggacagctccaagctaccctaacccctcctttcccaggtttctagaatagtgtctggcatgtagtagatgctcaataaacacttgttgaatgaa

SEQ ID NO: 85931 - DNA, 2264 bp, Homo sapiens
gggcggcgccctgggcggccgcggagtcatggacggcagtggacccttcagctgccccatctgcctagagccactccgggagccggtgacgctgccctgcggccacaacttctgtctcgcctgcctgggcgcgctctggccgcatcgtggcgcgagtggagccggcggacccggaggcgcggcccgctgcccgctgtgccaggagcccttccccgacggccttcagctccgcaagaaccacacgctgtccgagctgctgcagctccgccagggctcgggccccgggtccggccccggcccggcccctgccctggccccggagccctcggcacccagcgcgctgcccagtgtcccggagccgtcggccccctgcgctcccgagccgtggcccgcgggcgaagagccagtgcgctgcgacgcgtgccccgagggcgcggccctgcccgccgcgctgtcctgcctctcctgcctcgcctccttttgccccgcgcacctgggcccgcacgagcgcagccccgccctccgcggacaccgcctggtgccgccgctgcgccggctagaggagagcctgtgcccgcgccacctacggccgctcgagcgctactgccgcgcggagcgcgtgtgtctgtgcgaggcctgcgccgcacaggagcaccgcggccacgagctggtgccgctggagcaggagcgcgcgcttcaggaggctgagcagtccaaagtcctgagcgccgtggaggaccgcatggacgagctgggtgctggcattgcacagtccaggcgcacagtggccctcatcaagagtgcagccgtagcagagcgggagagggtgagccggctgtttgcagatgctgcggccgccctgcagggcttccagacccaggtgctgggcttcatcgaggagggggaagctgccatgctaggccgctcccagggtgacctgcggcgacaggaggaacagcgcagccgcctgagccgagcccgccagaatctcagccaggtccctgaagctgactcagtcagcttcctgcaggagctgctggcactaaggctggccctggaggatgggtgtggccctgggcctggacccccgagggagctcagcttcaccaaatcatcccaagctgtccgtgcagtgagagacatgctggccgtggcctgcgtcaaccagtgggagcagctgagggggccgggtggcaacgaggatgggccacagaagctggactcggaagctgatgctgagccccaagacctcgagagtacgaacctcttggagagtgaagctcccagggactatttcctcaagtttgcctatattgtggatttggacagcgacacagcagacaagttcctgcagctgtttggaaccaaaggtgtcaagagggtgctgtgtcctatcaactaccccttgtcgcccacccgcttcacccattgtgagcaggtgctgggcgagggtgccctggaccgaggcacctactactgggaggtggagattatcgagggctgggtcagcatgggggtcatggccgaagacttctccccacaagagccctacgaccgcggccggctgggccgcaacgcccactcctgctgcctgcagtggaatggacgcagcttctccgtctggtttcatgggctggaggctcccctgccccaccccttctcgcccacggttggggtctgcctggaatacgctgaccgtgccttggccttctatgctgtacgggacggcaagatgagcctcctgcggaggctgaaggcctcccggccccgccggggtggcatcccggcctcccccattgaccccttccagagccgcctggacagtcactttgcggggctcttcacccacagactcaagcctgccttcttcctggagagtgtggacgcccacttgcagatcgggcccctcaagaagtcctgcatatccgtgctgaagaggaggtgatgccgggcacgggcgctcctgctgccgtctctgctccaggaagctgcctcctctgggccctctccttcgtctgggaaggcaccagcatgagtcccacacacccagccttctcatttctagaggcttccacctttttatacactcagccttccctctcccaggcaggaggacccccagaccctgttcccctgcagacctcacttctgggagacagagctacagctgggacagctccaagctaccctaacccctcctttcccaggtttctagaatagtgtctggcatgtagtagatgctcaataaacacttgttgaatgaa

SEQ ID NO: 85932 - DNA, 2366 bp, Homo sapiens
ctatgggggtgtaggcgggagggagccgggttaggcccgcggggttccggtagcgtggctgctgctcccgcccggagggtcacgccggtctcagctcagatttgccctgggctgaggcagcagctttcgatgggtgtggcaggcggcaggagggcggcagagggcgaccgggcacacagattctctgtccagctgttccgggggccagtggtgggagcatgtgagccgcggcctctacctcccgcccccagtttcctttggcctccagcccggtcttggcgcctctggccaagggattttccgtttctcctgcctggagcagtgactcataagacctaggggatttgcccggaatcccctttttttccaggcctggactgtggatgcaggctctttgggaacagtgatcctcaggacagcttaatgcctccttgtgcagtcacccctccgccgcccacctcccaacctaactggcttactctctgcctcttccccgccggaggaagttctcaaattcatctgagcaacactgagaccagcggacggccctgtactaggcctcctgtcagagacccgaggcagacacccagtcagcctgcacgccccccaggcgttcaggaaaggcaccagcctgggctgcaggcacctctggcatattatgggacatcgtggccactccagtcccacctgatgcacagataccactccccagtcacccccttctctcccctggcaaggcctgggacccgagtgtagggctgtggcctctgccagacctcacactcatggagggtgttgtccacaggctgagcagtccaaagtcctgagcgccgtggaggaccgcatggacgagctgggtgctggcattgcacagtccaggcgcacagtggccctcatcaagagtgcagccgtagcagagcgggagagggtgagccggctgtttgcagatgctgcggccgccctgcagggcttccagacccaggtgctgggcttcatcgaggagggggaagctgccatgctaggccgctcccagggtgacctgcggcgacaggaggaacagcgcagccgcctgagccgagcccgccagaatctcagccaggtccctgaagctgactcagtcagcttcctgcaggagctgctggcactaaggctggccctggaggatgggtgtggccctgggcctggacccccgagggagctcagcttcaccaaatcatcccaagctgtccgtgcagtgagagacatgctggccgtggcctgcgtcaaccagtgggagcagctgagggggccgggtggcaacgaggatgggccacagaagctggactcggaagctgatgctgagccccaagacctcgagagtacgaacctcttggagagtgaagctcccagggactatttcctcaagtttgcctatattgtggatttggacagcgacacagcagacaagttcctgcagctgtttggaaccaaaggtgtcaagagggtgctgtgtcctatcaactaccccttgtcgcccacccgcttcacccattgtgagcaggtgctgggcgagggtgccctggaccgaggcacctactactgggaggtggagattatcgagggctgggtcagcatgggggtcatggccgaagacttctccccacaagagccctacgaccgcggccggctgggccgcaacgcccactcctgctgcctgcagtggaatggacgcagcttctccgtctggtttcatgggctggaggctcccctgccccaccccttctcgcccacggttggggtctgcctggaatacgctgaccgtgccttggccttctatgctgtacgggacggcaagatgagcctcctgcggaggctgaaggcctcccggccccgccggggtggcatcccggcctcccccattgaccccttccagagccgcctggacagtcactttgcggggctcttcacccacagactcaagcctgccttcttcctggagagtgtggacgcccacttgcagatcgggcccctcaagaagtcctgcatatccgtgctgaagaggaggtgatgccgggcacgggcgctcctgctgccgtctctgctccaggaagctgcctcctctgggccctctccttcgtctgggaaggcaccagcatgagtcccacacacccagccttctcatttctagaggcttccacctttttatacactcagccttccctctcccaggcaggaggacccccagaccctgttcccctgcagacctcacttctgggagacagagctacagctgggacagctccaagctaccctaacccctcctttcccaggtttctagaatagtgtctggcatgtagtagatgctcaataaacacttgttgaatgaa

SEQ ID NO: 85933 - DNA, 2417 bp, Homo sapiens
gggcggcgccctgggcggccgcggagtcatggacggcagtggacccttcagctgccccatctgcctagagccactccgggagccggtgacgctgccctgcggccacaacttctgtctcgcctgcctgggcgcgctctggccgcatcgtggcgcgagtggagccggcggacccggaggcgcggcccgctgcccgctgtgccaggagcccttccccgacggccttcagctccgcaagaaccacacgctgtccgagctgctgcagctccgccagggctcgggccccgggtccggccccggcccggcccctgccctggccccggagccctcggcacccagcgcgctgcccagtgtcccggagccgtcggccccctgcgctcccgagccgtggcccgcgggcgaagagccagtgcgctgcgacgcgtgccccgagggcgcggccctgcccgccgcgctgtcctgcctctcctgcctcgcctccttttgccccgcgcacctgggcccgcacgagcgcagccccgccctccgcggacaccgcctggtgccgccgctgcgccggctagaggagagcctgtgcccgcgccacctacggccgctcgagcgctactgccgcgcggagcgcgtgtgtctgtgcgaggcctgcgccgcacaggagcaccgcggccacgagctggtgccgctggagcaggagcgcgcgcttcaggaggtgggctccgggggcacactcgggtgagccggggctggtgaccgaccgcgcgcgagcgggccgaggaccttggaccccccagtcttcccgggttgggtcttaatctcctcctctaacctgaggatctttgcggtcccttccagccttgacaaggctgagcagtccaaagtcctgagcgccgtggaggaccgcatggacgagctgggtgctggcattgcacagtccaggcgcacagtggccctcatcaagagtgcagccgtagcagagcgggagagggtgagccggctgtttgcagatgctgcggccgccctgcagggcttccagacccaggtgctgggcttcatcgaggagggggaagctgccatgctaggccgctcccagggtgacctgcggcgacaggaggaacagcgcagccgcctgagccgagcccgccagaatctcagccaggtccctgaagctgactcagtcagcttcctgcaggagctgctggcactaaggctggccctggaggatgggtgtggccctgggcctggacccccgagggagctcagcttcaccaaatcatcccaagctgtccgtgcagtgagagacatgctggccgtggcctgcgtcaaccagtgggagcagctgagggggccgggtggcaacgaggatgggccacagaagctggactcggaagctgatgctgagccccaagacctcgagagtacgaacctcttggagagtgaagctcccagggactatttcctcaagtttgcctatattgtggatttggacagcgacacagcagacaagttcctgcagctgtttggaaccaaaggtgtcaagagggtgctgtgtcctatcaactaccccttgtcgcccacccgcttcacccattgtgagcaggtgctgggcgagggtgccctggaccgaggcacctactactgggaggtggagattatcgagggctgggtcagcatgggggtcatggccgaagacttctccccacaagagccctacgaccgcggccggctgggccgcaacgcccactcctgctgcctgcagtggaatggacgcagcttctccgtctggtttcatgggctggaggctcccctgccccaccccttctcgcccacggttggggtctgcctggaatacgctgaccgtgccttggccttctatgctgtacgggacggcaagatgagcctcctgcggaggctgaaggcctcccggccccgccggggtggcatcccggcctcccccattgaccccttccagagccgcctggacagtcactttgcggggctcttcacccacagactcaagcctgccttcttcctggagagtgtggacgcccacttgcagatcgggcccctcaagaagtcctgcatatccgtgctgaagaggaggtgatgccgggcacgggcgctcctgctgccgtctctgctccaggaagctgcctcctctgggccctctccttcgtctgggaaggcaccagcatgagtcccacacacccagccttctcatttctagaggcttccacctttttatacactcagccttccctctcccaggcaggaggacccccagaccctgttcccctgcagacctcacttctgggagacagagctacagctgggacagctccaagctaccctaacccctcctttcccaggtttctagaatagtgtctggcatgtagtagatgctcaataaacacttgttgaatgaa

SEQ ID NO: 85934 - DNA, 2489 bp, Homo sapiens
gggcggcgccctgggcggccgcggagtcatggacggcagtggacccttcagctgccccatctgcctagagccactccgggagccggtgacgctgccctgcggccacaacttctgtctcgcctgcctgggcgcgctctggccgcatcgtggcgcgagtggagccggcggacccggaggcgcggcccgctgcccgctgtgccaggagcccttccccgacggccttcagctccgcaagaaccacacgctgtccgagctgctgcagctccgccagggctcgggccccgggtccggccccggcccggcccctgccctggccccggagccctcggcacccagcgcgctgcccagtgtcccggagccgtcggccccctgcgctcccgagccgtggcccgcgggcgaagagccagtgcgctgcgacgcgtgccccgagggcgcggccctgcccgccgcgctgtcctgcctctcctgcctcgcctccttttgccccgcgcacctgggcccgcacgagcgcagccccgccctccgcggacaccgcctggtgccgccgctgcgccggctagaggagagcctgtgcccgcgccacctacggccgctcgagcgctactgccgcgcggagcgcgtgtgtctgtgcgaggcctgcgccgcacaggagcaccgcggccacgagctggtgccgctggagcaggagcgcgcgcttcaggaggctgagcagtccaaagtcctgagcgccgtggaggaccgcatggacgagctgggtgctggcattgcacagtccaggcgcacagtggccctcatcaaggtcaaacacccctccctcagcatggaacaatccactccaaacaaaccatgcccatacctactgagcacaagtgtcccctgacctggcccagatccaggacaggctcagtctggcccctctgtcccctcaagagggccggtgggaagccggggtcagggaaggaggggggtacagtccgggacggttctttgccctcattgccccctctactgtcgtcctgtgcagagtgcagccgtagcagagcgggagagggtgagccggctgtttgcagatgctgcggccgccctgcagggcttccagacccaggtgctgggcttcatcgaggagggggaagctgccatgctaggccgctcccagggtgacctgcggcgacaggaggaacagcgcagccgcctgagccgagcccgccagaatctcagccaggtccctgaagctgactcagtcagcttcctgcaggagctgctggcactaaggctggccctggaggatgggtgtggccctgggcctggacccccgagggagctcagcttcaccaaatcatcccaagctgtccgtgcagtgagagacatgctggccgtggcctgcgtcaaccagtgggagcagctgagggggccgggtggcaacgaggatgggccacagaagctggactcggaagctgatgctgagccccaagacctcgagagtacgaacctcttggagagtgaagctcccagggactatttcctcaagtttgcctatattgtggatttggacagcgacacagcagacaagttcctgcagctgtttggaaccaaaggtgtcaagagggtgctgtgtcctatcaactaccccttgtcgcccacccgcttcacccattgtgagcaggtgctgggcgagggtgccctggaccgaggcacctactactgggaggtggagattatcgagggctgggtcagcatgggggtcatggccgaagacttctccccacaagagccctacgaccgcggccggctgggccgcaacgcccactcctgctgcctgcagtggaatggacgcagcttctccgtctggtttcatgggctggaggctcccctgccccaccccttctcgcccacggttggggtctgcctggaatacgctgaccgtgccttggccttctatgctgtacgggacggcaagatgagcctcctgcggaggctgaaggcctcccggccccgccggggtggcatcccggcctcccccattgaccccttccagagccgcctggacagtcactttgcggggctcttcacccacagactcaagcctgccttcttcctggagagtgtggacgcccacttgcagatcgggcccctcaagaagtcctgcatatccgtgctgaagaggaggtgatgccgggcacgggcgctcctgctgccgtctctgctccaggaagctgcctcctctgggccctctccttcgtctgggaaggcaccagcatgagtcccacacacccagccttctcatttctagaggcttccacctttttatacactcagccttccctctcccaggcaggaggacccccagaccctgttcccctgcagacctcacttctgggagacagagctacagctgggacagctccaagctaccctaacccctcctttcccaggtttctagaatagtgtctggcatgtagtagatgctcaataaacacttgttgaatgaa

SEQ ID NO: 85935 - DNA, 2327 bp, Homo sapiens
gggcggcgccctgggcggccgcggagtcatggacggcagtggacccttcagctgccccatctgcctagagccactccgggagccggtgacgctgccctgcggccacaacttctgtctcgcctgcctgggcgcgctctggccgcatcgtggcgcgagtggagccggcggacccggaggcgcggcccgctgcccgctgtgccaggagcccttccccgacggccttcagctccgcaagaaccacacgctgtccgagctgctgcagctccgccagggctcgggccccgggtccggccccggcccggcccctgccctggccccggagccctcggcacccagcgcgctgcccagtgtcccggagccgtcggccccctgcgctcccgagccgtggcccgcgggcgaagagccagtgcgctgcgacgcgtgccccgagggcgcggccctgcccgccgcgctgtcctgcctctcctgcctcgcctccttttgccccgcgcacctgggcccgcacgagcgcagccccgccctccgcggacaccgcctggtgccgccgctgcgccggctagaggagagcctgtgcccgcgccacctacggccgctcgagcgctactgccgcgcggagcgcgtgtgtctgtgcgaggcctgcgccgcacaggagcaccgcggccacgagctggtgccgctggagcaggagcgcgcgcttcaggaggctgagcagtccaaagtcctgagcgccgtggaggaccgcatggacgagctgggtgctggcattgcacagtccaggcgcacagtggccctcatcaagagtgcagccgtagcagagcgggagagggtgagccggctgtttgcagatgctgcggccgccctgcagggcttccagacccaggtgctgggcttcatcgaggagggggaagctgccatgctaggccgctcccagggtgacctgcggcgacaggaggaacagcgcagccgcctgagccgagcccgccagaatctcagccaggtccctgaagctgactcagtcagcttcctgcaggagctgctggcactaaggctggccctggaggatgggtgtggccctgggcctggacccccgagggagctcagcttcaccaaatcatcccaagctgtccgtgcagtgagagacatgctggccgtggcctgcgtcaaccagtgggagcagctgagggggccgggtggcaacgaggatgggccacagaagctggactcggaagctgatgctgagccccaagacctcgagagtacgaacctcttggagagtgaagctcccagggactatttcctcaagtttgcctatattgtggatttggacagcgacacagcagacaagttcctgcagctgtttggaaccaaaggtgtcaagagggtgctgtgtcctatcaactaccccttgtcgcccacccgcttcacccattgtgagcaggtgctgggcgagggtgccctggaccgaggcacctactactgggaggtggagattatcgagggctgggtcagcatgggggtcatggccgaagacttctccccacaagagccctacgaccgcggccggctgggccgcaacgcccactcctgctgcctgcagtggaatggacgcagcttctccgtctggtttcatgggctggaggctcccctgccccaccccttctcgcccacggttggggtctgcctggaatacgctgaccgtgccttggccttctatgctgtacgggacggcaagatgagcctcctgcggaggctgaaggcctcccggccccgccggggtggcatcccggcctcccccattgaccccttccagagccgcctggacagtcactttgcggggctcttcacccacagactcaagcctgccttcttcctggagagtgtggacgcccacttgcagatcgggcccctcaagaagtcctgcatatccgtgctgaagaggaggtgatgccgggcacgggcgctcctgctgccgtctctgctccaggaagctgcctcctctgggccctctccttcgtctgggaaggcaccagcatgagtcccacacacccagccttctcatttctagaggcttccacctttttatacactcagccttccctctcccaggcaggaggacccccagaccctgttcccctgcagacctcacttctgggagacagagctacagctgggacagctccaagctaccctaacccctcctttcccaggtttctagaatagtgtctggcatgtagtagatgctcaataaacacttgttgaatgaacgaggggcccgatctgcaagtggggtccgtcgaccggccgctaatttagtagtagtagtaggc

SEQ ID NO: 85936 - DNA, 1858 bp, Homo sapiens
gggcggcgccctgggcggccgcggagtcatggacggcagtggacccttcagctgccccatctgcctagagccactccgggagccggtgacgctgccctgcggccacaacttctgtctcgcctgcctgggcgcgctctggccgcatcgtggcgcgagtggagccggcggacccggaggcgcggcccgctgcccgctgtgccaggagcccttccccgacggccttcagctccgcaagaaccacacgctgtccgagctgctgcagctccgccagggctcgggccccgggtccggccccggcccggcccctgccctggccccggagccctcggcacccagcgcgctgcccagtgtcccggagccgtcggccccctgcgctcccgagccgtggcccgcgggcgaagagccagtgcgctgcgacgcgtgccccgagggcgcggccctgcccgccgcgctgtcctgcctctcctgcctcgcctccttttgccccgcgcacctgggcccgcacgagcgcagccccgccctccgcggacaccgcctggtgccgccgctgcgccggctagaggagagcctgtgcccgcgccacctacggccgctcgagcgctactgccgcgcggagcgcgtgtgtctgtgcgaggcctgcgccgcacaggagcaccgcggccacgagctggtgccgctggagcaggagcgcgcgcttcaggaggctgagcagtccaaagtcctgagcgccgtggaggaccgcatggacgagctgggtgctggcattgcacagtccaggcgcacagtggccctcatcaagagtgcagccgtagcagagcgggagagggtgagccggctgtttgcagatgctgcggccgccctgcagggcttccagacccaggtgctgggcttcatcgaggagggggaagctgccatgctaggccgctcccagggtgacctgcggcgacaggaggaacagcgcagccgcctgagccgagcccgccagaatctcagccaggtccctgaagctgactcagtcagcttcctgcaggagctgctggcactaaggctggccctggaggatgggtgtggccctgggcctggacccccgagggagctcagcttcaccaaatcatcccaagctgtccgtgcagtgagagacatgctggccgtggcctgcgtcaaccagtgggagcagctgagggggccgggtggcaacgaggatgggccacagaagctggactcggaagctgatgctgagccccaagacctcgagagtacgaacctcttggagagtgaagctcccagggactatttcctcaagtttgcctatattgtggatttggacagcgacacagcagacaagttcctgcagctgtttggaaccaaaggtgtcaagagggtgctgtgtcctatcaactaccccttgtcgcccacccgcttcacccattgtgagcaggtgctgggcgagggtgccctggaccgaggcacctactactgggaggtggagattatcgagggctgggtcagcatgggggtcatggccgaagacttctccccacaagagccctacgaccgcggccggctgggccgcaacgcccactcctgctgcctgcagtggaatggacgcagcttctccgtctggtttcatgggctggaggctcccctgccccaccccttctcgcccacgctttttatacactcagccttccctctcccaggcaggaggacccccagaccctgttcccctgcagacctcacttctgggagacagagctacagctgggacagctccaagctaccctaacccctcctttcccaggtttctagaatagtgtctggcatgtagtagatgctcaataaacacttgttgaatgaa

SEQ ID NO: 85937 - DNA, 1094 bp, Homo sapiens
gggcggcgccctgggcggccgcggagtcatggacggcagtggacccttcagctgccccatctgcctagagccactccgggagccggtgacgctgccctgcggccacaacttctgtctcgcctgcctgggcgcgctctggccgcatcgtggcgcgagtggagccggcggacccggaggcgcggcccgctgcccgctgtgccaggagcccttccccgacggccttcagctccgcaagaaccacacgctgtccgagctgctgcagctccgccagggctcgggccccgggtccggccccggcccggcccctgccctggccccggagccctcggcacccagcgcgctgcccagtgtcccggagccgtcggccccctgcgctcccgagccgtggcccgcgggcgaagagccagtgcgctgcgacgcgtgccccgagggcgcggccctgcccgccgcgctgtcctgcctctcctgcctcgcctccttttgccccgcgcacctgggcccgcacgagcgcagccccgccctccgcggacaccgcctggtgccgccgctgcgccggctagaggagagcctgtgcccgcgccacctacggccgctcgagcgctactgccgcgcggagcgcgtgtgtctgtgcgaggcctgcgccgcacaggagcaccgcggccacgagctggtgccgctggagcaggagcgcgcgcttcaggaggctgagcagtccaaagtcctgagcgccgtggaggaccgcatggacgagctgggtgctggcattgcacagtccaggcgcacagtggccctcatcaagagtgcagccgtagcagagcgggagagggtgagccggctgtttgcagatgctgcggccgccctgcagggcttccagacccaggtgctgggcttcatcgaggagggggaagctgccatgctaggccgctcccagggtgacctgcggcgacaggaggaacagcgcagccgcctgagccgagcccgccagaatctcagccaggtccctgaagctgactcagtcagcttcctgcaggagctgctggcactaaggctggcctggaggatgggtgaagctgagctccctcgggggtccaggc

SEQ ID NO: 85938 - DNA, 165 bp, Homo sapiens
cctcttggagagtgaagctcccagggactatttcctcaagtgtaagtggacgcccgtgccccctccactcacactgggccctcccagggctgctgggctggtcccagcagggccctggcacacaagggttaggattcctctccccagtttgtggggagagctagg

SEQ ID NO: 85939 - DNA, 2975 bp, Homo sapiens
gggcggcgccctgggcggccgcggagtcatggacggcagtggacccttcagctgccccatctgcctagagccactccgggagccggtgacgctgccctgcggccacaacttctgtctcgcctgcctgggcgcgctctggccgcatcgtggcgcgagtggagccggcggacccggaggcgcggcccgctgcccgctgtgccaggagcccttccccgacggccttcagctccgcaagaaccacacgctgtccgagctgctgcagctccgccagggctcgggccccgggtccggccccggcccggcccctgccctggccccggagccctcggcacccagcgcgctgcccagtgtcccggagccgtcggccccctgcgctcccgagccgtggcccgcgggcgaagagccagtgcgctgcgacgcgtgccccgagggcgcggccctgcccgccgcgctgtcctgcctctcctgcctcgcctccttttgccccgcgcacctgggcccgcacgagcgcagccccgccctccgcggacaccgcctggtgccgccgctgcgccggctagaggagagcctgtgcccgcgccacctacggccgctcgagcgctactgccgcgcggagcgcgtgtgtctgtgcgaggcctgcgccgcacaggagcaccgcggccacgagctggtgccgctggagcaggagcgcgcgcttcaggaggctgagcagtccaaagtcctgagcgccgtggaggaccgcatggacgagctgggtgctggcattgcacagtccaggcgcacagtggccctcatcaagagtgcagccgtagcagagcgggagagggtgagccggctgtttgcagatgctgcggccgccctgcagggcttccagacccaggtgctgggcttcatcgaggagggggaagctgccatgctaggccgctcccagggtgacctgcggcgacaggaggaacagcgcagccgcctgagccgagcccgccagaatctcagccaggtccctgaagctgactcagtcagcttcctgcaggagctgctggcactaaggctggccctggaggatgggtgtggccctgggcctggacccccgagggagctcagcttcaccaaatcatcccaagctgtccgtgcagtgagagacatgctggccgtggcctgcgtcaaccagtgggagcagctgagggggccgggtggcaacgaggatgggccacagaagctggactcggaagctgatgctgagccccaagacctcgagagtacgaacctcttggagagtgaagctcccagggactatttcctcaagtttgcctatattgtggatttggacagcgacacagcagacaagttcctgcagctgtttggaaccaaaggtgtcaagagggtgctgtgtcctatcaactaccccttgtcgcccacccgcttcacccattgtgagcaggtgctgggcgagggtgccctggaccgaggcacctactactgggaggtggagattatcgagggctgggtcagcatgggggtcatggccgaagacttctccccacaagagccctacgaccgcggccggctgggccgcaacgcccactcctgctgcctgcagtggaatggacgcagcttctccgtctggtttcatgggctggaggctcccctgccccaccccttctcgcccacggttggggtctgcctggaatacgctgaccgtgccttggccttctatgctgtacgggacggcaagatgagcctcctgcggaggctgaaggcctcccggccccgccggggtggcatcccggcctcccccattgaccccttccagagccgcctggacagtcactttgcggggctcttcacccacagactcaagcctgccttcttcctggagagtgtggacgcccacttgcagatcgggcccctcaagaagtcctgcatatccgtgctgaagaggaggtgatgccgggcacgggcgctcctgctgccgtctctgctccaggaagctgcctcctctgggccctctccttcgtctgggaaggcaccagcatgagtcccacacacccagccttctcatttctagaggcttccacctttttatacactcagccttccctctcccaggcaggaggacccccagaccctgttcccctgcagacctcacttctgggagacagagctacagctgggacagctccaagctaccctaacccctcctttcccaggtttctagaatagtgtctggcatgtagtagatgctcaataaacacttgttgaatgaaaaaaaaaaaaaacacaaaaaaaaaaaaaaaaacaaaaaaaaaaaaagaagagaaggggcgcgcgcgcgcgccccagaagaatttctccccgcgggggcggccccaagttcttgccccgcgctccccccggttttctttgttacccaagagggggcgcccccaataactgggaggagctcgcgtgtatatatatatatagcgccgctagggccgcgggggcgcacgcgccgtgtttcaacaaagacgcgcttgaggaagtcggggaaaaacgccgcgcgagaacacggggggaggcaccctcttgtgggagaagagaggaccccatttataccctcgtgggggggggggggggaccacaatatagtgtgtggggagacacacaactctatcccctctcaaagagagatgatatatatataagaggactctctcaagaggggggggatactaaattttcatacaccatgttgtaaaagagggtgggtatattatagcggcgtggggtgtgtacacccacacgagagagggggctggaacttatagtgtgctgtgcgggagccggcgtcgtttgaaagaaatagagttttgttgtggcgccgcttcacgagtgcgaggagcttgtagtgtcgagattgtatattctgagacgaacaatcattttttttcatataacagcggagggaggagccgcactaggtgggacaaacaacc

SEQ ID NO: 85940 - DNA, 2287 bp, Homo sapiens
gggcggcgccctgggcggccgcggagtcatggacggcagtggacccttcagctgccccatctgcctagagccactccgggagccggtgacgctgccctgcggccacaacttctgtctcgcctgcctgggcgcgctctggccgcatcgtggcgcgagtggagccggcggacccggaggcgcggcccgctgcccgctgtgccaggagcccttccccgacggccttcagctccgcaagaaccacacgctgtccgagctgctgcagctccgccagggctcgggccccgggtccggccccggcccggcccctgccctggccccggagccctcggcacccagcgcgctgcccagtgtcccggagccgtcggccccctgcgctcccgagccgtggcccgcgggcgaagagccagtgcgctgcgacgcgtgccccgagggcgcggccctgcccgccgcgctgtcctgcctctcctgcctcgcctccttttgccccgcgcacctgggcccgcacgagcgcagccccgccctccgcggacaccgcctggtgccgccgctgcgccggctagaggagagcctgtgcccgcgccacctacggccgctcgagcgctactgccgcgcggagcgcgtgtgtctgtgcgaggcctgcgccgcacaggagcaccgcggccacgagctggtgccgctggagcaggagcgcgcgcttcaggaggtgggctccgggggcacactcgggctgagcagtccaaagtcctgagcgccgtggaggaccgcatggacgagctgggtgctggcattgcacagtccaggcgcacagtggccctcatcaagagtgcagccgtagcagagcgggagagggtgagccggctgtttgcagatgctgcggccgccctgcagggcttccagacccaggtgctgggcttcatcgaggagggggaagctgccatgctaggccgctcccagggtgacctgcggcgacaggaggaacagcgcagccgcctgagccgagcccgccagaatctcagccaggtccctgaagctgactcagtcagcttcctgcaggagctgctggcactaaggctggccctggaggatgggtgtggccctgggcctggacccccgagggagctcagcttcaccaaatcatcccaagctgtccgtgcagtgagagacatgctggccgtggcctgcgtcaaccagtgggagcagctgagggggccgggtggcaacgaggatgggccacagaagctggactcggaagctgatgctgagccccaagacctcgagagtacgaacctcttggagagtgaagctcccagggactatttcctcaagtttgcctatattgtggatttggacagcgacacagcagacaagttcctgcagctgtttggaaccaaaggtgtcaagagggtgctgtgtcctatcaactaccccttgtcgcccacccgcttcacccattgtgagcaggtgctgggcgagggtgccctggaccgaggcacctactactgggaggtggagattatcgagggctgggtcagcatgggggtcatggccgaagacttctccccacaagagccctacgaccgcggccggctgggccgcaacgcccactcctgctgcctgcagtggaatggacgcagcttctccgtctggtttcatgggctggaggctcccctgccccaccccttctcgcccacggttggggtctgcctggaatacgctgaccgtgccttggccttctatgctgtacgggacggcaagatgagcctcctgcggaggctgaaggcctcccggccccgccggggtggcatcccggcctcccccattgaccccttccagagccgcctggacagtcactttgcggggctcttcacccacagactcaagcctgccttcttcctggagagtgtggacgcccacttgcagatcgggcccctcaagaagtcctgcatatccgtgctgaagaggaggtgatgccgggcacgggcgctcctgctgccgtctctgctccaggaagctgcctcctctgggccctctccttcgtctgggaaggcaccagcatgagtcccacacacccagccttctcatttctagaggcttccacctttttatacactcagccttccctctcccaggcaggaggacccccagaccctgttcccctgcagacctcacttctgggagacagagctacagctgggacagctccaagctaccctaacccctcctttcccaggtttctagaatagtgtctggcatgtagtagatgctcaataaacacttgttgaatgaa

SEQ ID NO: 85941 - DNA, 2591 bp, Homo sapiens
ctatgggggtgtaggcgggagggagccgggttaggcccgcggggttccggtagcgtggctgctgctcccgcccggagggtcacgccggtctcagctcagatttgccctgggctgaggcagcagctttcgatgggtgtggcaggcggcaggagggcggcagagggcgaccgggcacacagattctctgtccagctgttccgggggccagtggtgggagcatgtgagccgcggcctctacctcccgcccccagtttcctttggcctccagcccggtcttggcgcctctggccaagggattttccgtttctcctgcctggagcagtgactcataagacctaggggatttgcccggaatcccctttttttccaggcctggactgtggatgcaggctctttgggaacagtgatcctcaggacagcttaatgcctccttgtgcagtcacccctccgccgcccacctcccaacctaactggcttactctctgcctcttccccgccggaggaagttctcaaattcatctgagcaacactgagaccagcggacggccctgtactaggcctcctgtcagagacccgaggcagacacccagtcagcctgcacgccccccaggcgttcaggaaaggcaccagcctgggctgcaggcacctctggcatattatgggacatcgtggccactccagtcccacctgatgcacagataccactccccagtcacccccttctctcccctggcaaggcctgggacccgagtgtagggctgtggcctctgccagacctcacactcatggagggtgttgtccacaggctgagcagtccaaagtcctgagcgccgtggaggaccgcatggacgagctgggtgctggcattgcacagtccaggcgcacagtggccctcatcaaggtcaaacacccctccctcagcatggaacaatccactccaaacaaaccatgcccatacctactgagcacaagtgtcccctgacctggcccagatccaggacaggctcagtctggcccctctgtcccctcaagagggccggtgggaagccggggtcagggaaggaggggggtacagtccgggacggttctttgccctcattgccccctctactgtcgtcctgtgcagagtgcagccgtagcagagcgggagagggtgagccggctgtttgcagatgctgcggccgccctgcagggcttccagacccaggtgctgggcttcatcgaggagggggaagctgccatgctaggccgctcccagggtgacctgcggcgacaggaggaacagcgcagccgcctgagccgagcccgccagaatctcagccaggtccctgaagctgactcagtcagcttcctgcaggagctgctggcactaaggctggccctggaggatgggtgtggccctgggcctggacccccgagggagctcagcttcaccaaatcatcccaagctgtccgtgcagtgagagacatgctggccgtggcctgcgtcaaccagtgggagcagctgagggggccgggtggcaacgaggatgggccacagaagctggactcggaagctgatgctgagccccaagacctcgagagtacgaacctcttggagagtgaagctcccagggactatttcctcaagtttgcctatattgtggatttggacagcgacacagcagacaagttcctgcagctgtttggaaccaaaggtgtcaagagggtgctgtgtcctatcaactaccccttgtcgcccacccgcttcacccattgtgagcaggtgctgggcgagggtgccctggaccgaggcacctactactgggaggtggagattatcgagggctgggtcagcatgggggtcatggccgaagacttctccccacaagagccctacgaccgcggccggctgggccgcaacgcccactcctgctgcctgcagtggaatggacgcagcttctccgtctggtttcatgggctggaggctcccctgccccaccccttctcgcccacggttggggtctgcctggaatacgctgaccgtgccttggccttctatgctgtacgggacggcaagatgagcctcctgcggaggctgaaggcctcccggccccgccggggtggcatcccggcctcccccattgaccccttccagagccgcctggacagtcactttgcggggctcttcacccacagactcaagcctgccttcttcctggagagtgtggacgcccacttgcagatcgggcccctcaagaagtcctgcatatccgtgctgaagaggaggtgatgccgggcacgggcgctcctgctgccgtctctgctccaggaagctgcctcctctgggccctctccttcgtctgggaaggcaccagcatgagtcccacacacccagccttctcatttctagaggcttccacctttttatacactcagccttccctctcccaggcaggaggacccccagaccctgttcccctgcagacctcacttctgggagacagagctacagctgggacagctccaagctaccctaacccctcctttcccaggtttctagaatagtgtctggcatgtagtagatgctcaataaacacttgttgaatgaa

SEQ ID NO: 85942 - DNA, 1207 bp, Homo sapiens
ttctttaagcttgatcagacaggcggacccccgagggagctcagcttcaccaaatcatcccaagctgtccgtgcagtgagagacatgctggccgtggcctgcgtcaaccagtgggagcagctgagggggccgggtggcaacgaggatgggccacagaagctggactcggaagctgatgctgagccccaagacctcgagagtacgaacctcttggagagtgaagctcccagggactatttcctcaagtttgcctatattgtggatttggacagcgacacagcagacaagttcctgcagctgtttggaaccaaaggtgtcaagagggtgctgtgtcctatcaactaccccttgtcgcccacccgcttcacccattgtgagcaggtgctgggcgagggtgccctggaccgaggcacctactactgggaggtggagattatcgagggctgggtcagcatgggggtcatggccgaagacttctccccacaagagccctacgaccgcggccggctgggccgcaacgcccactcctgctgcctgcagtggaatggacgcagcttctccgtctggtttcatgggctggaggctcccctgccccaccccttctcgcccacggttggggtctgcctggaatacgctgaccgtgccttggccttctatgctgtacgggacggcaagatgagcctcctgcggaggctgaaggcctcccggccccgccggggtggcatcccggcctcccccattgaccccttccagagccgcctggacagtcactttgcggggctcttcacccacagactcaagcctgccttcttcctggagagtgtggacgcccacttgcagatcgggcccctcaagaagtcctgcatatccgtgctgaagaggaggtgatgccgggcacgggcgctcctgctgccgtctctgctccaggaagctgcctcctctgggccctctccttcgtctgggaaggcaccagcatgagtcccacacacccagccttctcatttctagaggcttccacctttttatacactcagccttccctctcccaggcaggaggacccccagaccctgttcccctgcagacctcacttctgggagacagagctacagctgggacagctccaagctaccctaacccctcctttcccaggtttctagaatagtgtctggcatgtagtagatgctcaataaacacttgttgaatgaa

SEQ ID NO: 85943 - DNA, 1289 bp, Homo sapiens
gggcggcgccctgggcggccgcggagtcatggacggcagtggacccttcagctgccccatctgcctagagccactccgggagccggtgacgctgccctgcggccacaacttctgtctcgcctgcctgggcgcgctctggccgcatcgtggcgcgagtggagccggcggacccggaggcgcggcccgctgcccgctgtgccaggagcccttccccgacggccttcagctccgcaagaaccacacgctgtccgagctgctgcagctccgccagggctcgggccccgggtccggccccggcccggcccctgccctggccccggagccctcggcacccagcgcgctgcccagtgtcccggagccgtcggccccctgcgctcccgagccgtggcccgcgggcgaagagccagtgcgctgcgacgcgtgccccgagggcgcggccctgcccgccgcgctgtcctgcctctcctgcctcgcctccttttgccccgcgcacctgggcccgcacgagcgcagccccgccctccgcggacaccgcctggtgccgccgctgcgccggctagaggagagcctgtgcccgcgccacctacggccgctcgagcgctactgccgcgcggagcgcgtgtgtctgtgcgaggcctgcgccgcacaggagcaccgcggccacgagctggtgccgctggagcaggagcgcgcgcttcaggaggctgagcagtccaaagtcctgagcgccgtggaggaccgcatggacgagctgggtgctggcattgcacagtccaggcgcacagtggccctcatcaagagtgcagccgtagcagagcgggagagggtgagccggctgtttgcagatgctgcggccgccctgcagggcttccagacccaggtgctgggcttcatcgaggagggggaagctgccatgctaggccgctcccagggtgacctgcggcgacaggaggaacagcgcagccgcctgagccgagcccgccagaatctcagccaggtccctgaagctgactcagtcagcttcctgcaggagctgctggcactaaggctggccctggaggatgggtgtggccctgggcctggacccccgagggagctcagcttcaccaaatcatcccaagctgtccgtgcagtgagagacatgctggccgtggcctgcgtcaaccagtgggagcagctgagggggccgggtggcaacgaggatgggccacagaagctggactcggaaggtgggcaccgccccacgcccccccgatgactcaccctctgccagcctctcgcacaggccc

SEQ ID NO: 85944 - DNA, 156 bp, Homo sapiens
tgcaaaatttctcttcaatgtgttgattctatgcacctctttttcatttttaaattatcattaattctcccccgatcccccacagtataaatcttctcttctcactatgttctgacacattaattatttaagcaaggttattattattttaaaaat

SEQ ID NO: 85945 - DNA, 390 bp, Homo sapiens
ttactcctatatgagaacagaatatcaatgcttcttgactacagtctcccctactgatacttaatgtgccaagttaaaatacttgcatagtggacaataaggcagcatggggatttcctattcctgtttcctgccaaattgacaggttgcattgcagcaggtgcacctcaaagtgattaagaatgtaagggctgacaaaacatgtgtgatgtgactgcaggcattttatgtgagtgacatgtcatggcaagtattggcctcaagagattatacttggggctctagggtgtgagggcaatctatacgtgtgtaaaagcatcattgagaaggtgagtactcaagaaaaaataaccttgactgggagtctttacataaatgaagtacattgca

SEQ ID NO: 85946 - DNA, 460 bp, Homo sapiens
ggacactgccaagggcttcctggctctaggaccgccttgggtttctgccccttcaggctgcttctccagtcctcccagtgagcctgtgtcctcctcagaccctttggcttctgtctgcaaagtaagtttctgtcctaacttagggagtgataatattcagaatttctctccattttcacggttgagattttggcgctaaaatcacaaacccaaataaaaaaataaataagaacaaatagcctctagtctatattcatataaataaataactgaatgagtgactaaatggggggaaagggcaactcttttttttcttcgaggcaagatgtcactctgtcgcccaggctggagggcagtgacatgatctcagctcactgcagcctggccgacaactctttcttgcagaattccaattaatacatatggaaggaatgagagacttggcaaatcaccactgaaa

SEQ ID NO: 85947 - DNA, 163 bp, Homo sapiens
tgtgctcctgtggtcccagctacttggaaggttgaggtgcaaggatcacttgaacctgagaggtagaggctgcaatgagtcacgatggtacctccagcttgggtgacagagcaagacactgacacacacacatacacacacatgcacacagagcaagacactg

SEQ ID NO: 85948 - DNA, 279 bp, Homo sapiens
agtcagagtcctggtggctgaagggaccactgaggcttgtggagagcagctgcgctgcatggggccctcaggtgggcactcagatggggacagagagtccggggggctcccccaaggagccaggaccagggtgagttagaggagcagggagccaggcagcttggcatccactcccctgcagccctgccgtctccgctgcggtgtcccgagcaactccccagggactgcgaggaggctgggaaggggcgcccgtgggctgcctgggctgcctgtcctggt

SEQ ID NO: 85949 - DNA, 487 bp, Homo sapiens
ccccagaaaagggaatacacacggtagtagtttcttaggttggagaatctgtccctgaaggaaataattcggcagaacagcaggaaacgaagtcaaagaggctgtggggacaaggacatgggggggccttagaggtcatgctaaggactttgtttggccttttactctgagaagtcactggagggtctggagcagaggagtgccatctggcttaggtttcaacagatcactctgcaactgcggagtgaaaggcatgagattagaagcagagaccattcaggaggcttttgccatagtccaggcagctgatgatggtggcttggagccaggtagggagagtgaagtggtgagaaatgcatacattctggatatttttaaaagatggatctggcaagatttgtcaatggattggcggtatgtgtaagagaaagaagagtcaagaatgatttgaagatttatgacctgagtaactggcaggatggaattg

SEQ ID NO: 85950 - DNA, 362 bp, Homo sapiens
aacccaggtctttctcctgaaccttctatgttgcttagaagccttgctcccaggatgagccgaacttcctatgatgtcctgttgagtgtgcgtcctagccttttaatgtataggtactctagacttgcattcgaggttatggtcagtatcacaagtgattcatacaagaaatcatccagatatcttcaccatgaaccaaagggaagggtacagactgagaagctcaactcacagaggctggcaggctgaggccggggattgtactctgagggaaaacagatagtatgccgcaaactcccaccaacaaaatgatcatttccctggtgagcaggcacacagtattaacattagccaggggccag

SEQ ID NO: 85951 - DNA, 631 bp, Homo sapiens
actggcccagcacctcctctgcatggagtaagggtctgctgcatccttgatcatatcacgtaggcaggaggcttagagctaaccacatggtctggcctccaggggaccatcaaccagcaggaagaattccccaaggcaatgcactgttggctttctcaacgttccacaaaataactgcacctgatattccccaccaactaaggcaggaggctctgctaatttcattaataacttaatgagattattaaccactacccagtgggggcagatttggtttttccttggttataggaatgtatccatttttcacacaattacagcctgagaggatcatcactgaggctgacaattgtgggcttattaggagcaatttagacacaagattggatttcctttctgcccataaccttttgttcaaagcaaatgaactggtgttcctcatattagtatattaataaaggttgtccaggaggtgtttgatctttaagattggcccagtagcagagtagtaacactgccctgggaggcagggtgccaggcttctcatgccagcttcaagcagccagcccaagccacttggtgtctctgagcctcagtttctcattacctactgtgatagaactggaccggt

SEQ ID NO: 85952 - DNA, 338 bp, Homo sapiens
cacgaaaacacccagtcacaacgaccaacccagtaaccatgaccaacccgctgccgcacggcgggtcttgaaataccgtcttgcaggaaaagaaagcagggcttcttggagacttggctgattccaggtctggagcaggacatgagtgtgaaaaatcctgactcccagacagcagaggccacaaccgccggggtcaggacacaagagcccacagaaaacacctcaaggtgcagcaactgaggtcaggagtgagattcaggagggagcatggggcaggaccaatccccacgttcacacacaaacattcagtgatgacacttgattgactgattgatttt

SEQ ID NO: 85953 - DNA, 531 bp, Homo sapiens
tacaatcgagctcggtaccgacagcatcctaaccagctcacctcccatttagttatatgatctttccatgagtatataagcacctaaaccagaggtcgtctcacctgagagacaccctattttagaggcactcagatgaggcaaacagagcatgcaaaaaacatttttaaaaatctctttttggccaggcatgatggctcatgcctgtaatcccagcactttgggaggccaaggtgagcccatcacttgaggtcaggagttccagcctggccaacatgtcgaaaccctgtctgtactaaaaaatacaaaagttagctgggtgtggtggtgcacgcctgtagtcccagctacttgggaggctgaggcaggagaattgcttgaacccgggaggcagaggctgcagtgagctgagatcatgccagtgtactccagcctggacaacagaacaagactccatctgggggggaaaaaaaaaggaaaatttggtgtattagagtgttagtacattttattgtatgcatggaagaaatc

SEQ ID NO: 85954 - DNA, 442 bp, Homo sapiens
ccactgttttcatgttcacacctaagaaagtcattcttaaacacctcctcaaggtcactgaaaacatccttagtaggaaagagaagcaatttttaaactgcctgacgtctcttctcctggacttcatccaggtgttgaaatagttcagcaaagagaccaacactttaggaggttcatgcttgagtacaaagtgactcctgaatgcttttccccctgcttccagaggccttgcttgattcagtttgtgactcacgcacagcaggccccattagtcatagtttgaatttgtttttctttcttcatggatggttctgatcaacagtttagtatttttgatgatctgaaaataaaaacaaatccctctgccctccattttgatattttttcgcacctcaggtttcaaagatcaaaggggtgggtccagattagtactgtgagcttt

SEQ ID NO: 85955 - DNA, 526 bp, Homo sapiens
taaatctattttttaaattttaattaaaaataaataaatgaattacaggcaataagtaaattacaggcaataccccaggcattgtcccattgaaacaccttagccatacaaactaaaaattcttccacgattatgcagttgagttattcctgtgtagctttctctttatgagtagctaaaactcggttaaatgtgatcatattgattcttaagacagtgattcaaatggcacctagaattaagttatcctttcccatatttaaggatttggtacctggcatcttttggggaattagagtcatatatggcttcatatcactcatgcaattttgtacatgttcttctttttgtttctttttttaatcaatgaatatttgtgcccattgataaaagatgaacaacttcttaatttggagaccataaagaaatctagttagaaaatactactaataatcaatcttaaaagaaaattcttttcatgaccaacaactggcagctgacattataacactgggagtgacagctg

SEQ ID NO: 85956 - DNA, 485 bp, Homo sapiens
gacttcctggctacttatggaatgtgtagtttactgtggaaagagaacagatggaacctcccatctcaaaggtttttatactgagcattagatcatttaacacacaaaaccctataaggaagatgtcattacccatattttacatgaaaagaaacagaagctcagggaggttaggttagttttccaaagcgacacagctattaagagtgacagccaggctgggcatggtggctcatgcctgtaatctcaggaccttggaaggctgaagtgggaggactgcttgaggctaggagtttgagaccagcctgggcaatattgcaagaccctgtctccacaaaaaatgagcgtggtggtacatgtttgtagtcccacatacttgggaggctgaggtgggaagactgcttgagcccgagaggtcaaggctgcagtaagccgagatcaagccactgcacttcagcctgagtgacagagcaagaccttgtctc

SEQ ID NO: 85957 - DNA, 426 bp, Homo sapiens
tgtggatgaagtagatgttatatctgaatagttcatttcactaggctataaaatcaattatcagcataaaaaatatttatttatttaggagacagggtctcactgtgttacccaggctggtcttgaactcttggcctcaagggatccttccaccttggcctccaaaagtgctggaattacaggcatgagccactgtacctggcctaatacaaatcgtttttaaccagatactagagaactaaagaggcaaaaagggaacagtagggtattatggacaaagcagctgtgagaattggctaccatacctatggcttggggaaccaaggaaagagattggaattattaaaaagtaggagttggaggggtttgccccatgaagctgggatactgctaggctgttactggtgcctcagaggtctgaaaaga

SEQ ID NO: 85958 - DNA, 270 bp, Homo sapiens
cacactatgtcattctgatgaagaaaccattgccactgaactacaggccgtcacagctggaagggattgaattcaactcactcgacacttgcccagttgttctggatgctggtcaaaaggcaggttagggtacaaaccttggtggggtcacttatatgaagaaggtgtgattttttttcctcctctagaggggaatttacaaactatcaggagcccccaaggatgctccaagcagctgtaggagtccagggaagcacagttagctcatta

SEQ ID NO: 85959 - DNA, 265 bp, Homo sapiens
aaacccaagtaagcaacagaaaagagataataaacattaaagcagaaatcaataacattaaaaacatgaaatcagtagagaaaaatcaattcaatcaaaagctgattctttgaaaagataattaaaatgataatcctctagccaggctaattttaaaaaaaagaagataaagagaatggatacaaactactaatattaaaaatgatgtcctttcatttttaatattagtacatgctacagatcccatgtacattgaaagtataat

SEQ ID NO: 85960 - DNA, 201 bp, Homo sapiens
tattatctcatttaacaaatgaggaaacaagttcaggtaagtgcccatagctctcctcctagctactaagccttcattgccacccactattcccgcttctcttgctttcccttgttttaaaatcagtccaggccgggcgcggtggctcctgtaatcccaacactttgggaggccgaggcaagtgggtcatttgaggtcagg

SEQ ID NO: 85961 - DNA, 375 bp, Homo sapiens
gtggggggcaccgcgggttctggtctttcccacgctcacgtccaccgcccaggcccaaaggaaatggctgtgagagcaagatgtaaagatagttacaaataccagctagggccagtgacagttgcagaaatgaggacttgtaatagttaggagtatttcttcattattttgagatgaatacatttggttatatgttaaccaatacttttcttgagaattctcgtcttccatcatcctcgctatcatattcattaataattaacttttagaaatctcaatatttaggttacaggatagcaaatatggaatgtgatctagctaaaaaaggagtgaacatcattcaaagacaaataaaagactttatcctgttgggga

SEQ ID NO: 85962 - DNA, 436 bp, Homo sapiens
gacagagttgttcagtggaaagtctggggtaagttcctgatttagaacaggctttagtgcactttaaaaggaaaacaatgaattatataaaacttttagaggacacagtggtgccagatttttgttggattcctgtgctttcctcctccaaatagttaccaaaaaatattcctttgggaattagtatcaaaaggattctatagcatctcaaaagaatcttattcactttgggaggccgaggcaggcagatcacaaggtcaggagatcgagaccatcctggctaacacggtgaaaccccatctctactaaaaatacaaaaaattagccaggcgtggtggtgggcgcctgtagtcccagctactcgggaggctgaggcaggagaatggcgtgaacccaggaggcagagcttgcagtgagccgagatcgctccactgca

SEQ ID NO: 85963 - DNA, 1055 bp, Homo sapiens
tgcaatggtgcgatctcggctcactacaacctctgcctcctgggttcatgcgattctcctgcctcagcctcccgagtagctgggattacaggcgtgtgccaccacggtggcctggctaattttgtatttttagtagagatgggaggtttccccatgttggccaggctggtctcaaactcatgatctcaagtgatccgcccgtgtaggcctcccaaagttctgggattacacccagagccactgcgcccggccagagaaaaattttgcctttttatttaggtgttgcctactgaagagaatgggagatcagtttcgaatctgcctcctcgaccaactaaaactggggagtttatgtaccgaaaaaaggaatgtaactatgtgtgaggaaaacagcaattaggaaaaggataaggaagcagtcctgacctatgaggggaaagaggtgtctggggtctcattgtcaaatggtgatttggtgagtttcagtccgttgcctgaggaaagaactcattggagacaaatataagttttaggttttaaaactggaagggtcagtttctatgtttattcaaagacctgtacatataatttctatggggaaattgagccagtttcatttatgcgcaactttttttgcctccagtcttaaaggaaaaaaaaaaaacaactgataatatttgttgcctatgataaaattccagcttccaaatgaaaaaaaaaaaaagactccactatttcccagagttacttggatcactgcctttccccataccccctttagtgaggttgtttcctgtgtttgtactgcaattagattcttttgctacattctgcgttccatcctgggattctccacctctgaaatgttttctaaaagttaacatgtactgaggctcactcttgttctctgaagttctgctggttttgaaaaatgcgtggtgccgtttacctatcattaaaatatcatacagaacaattttactacctgaaagtgtcctgtgcttcatccatttaaccctaccctccaactccagctaccactgatctggtactat

SEQ ID NO: 85964 - DNA, 274 bp, Homo sapiens
taattagctgggcacactggctgtatgcctgttgtctcagtttctcaggagggtgaggcaggaggattgtctgagcataggaggttgaggctgcagtgacctacgagtgctccgttgtactctagcctgggtgacagagcaagaccctgtctccaaaaaataaataaatatttaaaatttaaaattaggatttaaaatatgttaaagctcaaagatgaaagtgtagaatggatatcacttattattatgtagtattcagtgtgaattacgatga

SEQ ID NO: 85965 - DNA, 416 bp, Homo sapiens
tcccaggttcacgccattctcctgcctcagcctcccaagtagctgggattacaggtgcccaccaccacgcctgcttaattttgtatttttagtagagatggggtttcaccatgctggccaggctggtttcaaactcctgacctcaggtgatccactcgcctcggcattccaaagtgctgggattacaggagtgagctcccacacctggcactattttcttttcttttttttatttgtttctgttttgttttgtttgttttggtggtctaaaataaattttttaattgcacatttgtgtcttgggttatctgtggggtgagaaacctattcctcacttccaatcccagctatccaggtacaatctggtgttgtggtctggctgtgggcaaggggtacaggtgggtgcagagctggcc

SEQ ID NO: 85966 - DNA, 588 bp, Homo sapiens
gtaaggggtaaggggtaggggaggaggaggtttaccctgcatccatggaggtaaatggattaagctgaatgtctgggaagacgaggattgctgggtggaggtgtgaggcccagggctcggggataccatcagattacttgctcctcaagttttgggagctaataatacctgtgcttgcatttccctgcaaagcaagggataccttctgggataagtcccgagggaatcactcataacttatttctgcttccctcccacttatttaacataaatatagggcctagtttggggttaaattcagattttacacatttatgtctctgtcacatttcttgccaccaacttactgaagtctgaaatttctttaacaagaggaagtattccatcccatagttagaaatgtaagaatttcaatacctgttgtttaacacagcgaatgagattaggctaaacttaacagtaattggaaacgtattctgtacctgctaataactagaaaaaaaacaaagacaaacaagtaagcctttctgttttctcttgagacgtgggaattgtacagtaattacagtgggatgtaagtttcacgaa

SEQ ID NO: 85967 - DNA, 186 bp, Homo sapiens
ggtggagaggaggtgggaagaagaccacacacttacacaattaactcgcaatgcatgccacgtggccagggaatggctgcaggagcccggggctctaacatttaaaagacgtttgcttcattaattatcttttttttttttttttttttttttttttttttttttttttttttttttttttttttg

SEQ ID NO: 85968 - DNA, 772 bp, Homo sapiens
ttactactactaaatttgcggccgcgtcgacagaaatacctctttcagctgaagtaacaacggaggaaagtttttatttgagcatccagaaagatctcaccgcgctgttaactggagacactcaggcagagatttcccagataatgaataatgggaggaaaggggctgtctgtgtgcaggagccatcttgtcctttggcctccctcgggagctcagcagtgacctgccactctgcaggcagtgttggtttcttgaaagagcagaggtctgctcttgggagagagcacccagggggatgtgatcgaagcagctccatgggacgcccaggccgggtcaaacatgtggaatttcaaggagtggaaatactgtggacaggaggagacaagagagagacccagcatcctatagattttgagacatcactgcaaagaacagcctctcctgacagcaaagagtcttccaaagtgccacgccatctcatctcatcagctggtttgtgtaattcaagtagtttaactgagaatgtttgggatgaatcctggaaagctccttcagagaggcctggcactagctcggggacattttcccctgtgcgtcttgatgagagtggagaggatgaagtcttcctacaggaaaacaaacagcatcttgagaagacacctaaaccagagagagacagggaaaggatcagcgaacaagaggagcacgttaagggggaagatgaagacatccttgggcctggatatacggaggactccaccgacgtgtacag

SEQ ID NO: 85969 - DNA, 522 bp, Homo sapiens
attaggaaattcatgtaagactttttaagagtattttttaggttttcactcaatctttcctgtcacagtaacgtgaaaactgattattctttactccaagagaatgttttaacccaagcaagtatctaatactagagcattggttctgacattcattgtaaatcagtgaactgtaagatactgtctaaaaaatgtacatttgtaattagtgcctttattcatattttgaaataagttcttagttttatattatacctgttctttagaagtcatgttagcagctaattatttcagtgatgaaataatttgtgttttatatcccccttcacctccatgtattggttagcacagtttatagtaagtgaaaagcaagggacccacctacattaccttcaggagactgttctaccttttaatttgaaaacaaggaaattaaattttaacagaaatcttttaagtatgttataaccaaagtgttcaattatccttgcaagttcaaatacagcatttttcttaattttg

SEQ ID NO: 85970 - DNA, 291 bp, Homo sapiens
gttcaagctattctcatgtctcagcctcctgagtagctgggactacaggtgcacgccaccacgcctggctaatttttgtatttttagtagagatggggtttcactatgttggccaggctggtctcaaactcctgacctcaagtgatccacctgccttggcctcccaaagtgctgggattacaggtgtgagccaccacgcctggtcgttgttaatttcatgatatgaacataccttcatgcatggtttctttttgtgttttcctgatagcaaacttgagtttcccctttaaa

SEQ ID NO: 85971 - DNA, 702 bp, Homo sapiens
agccaggatggtctcaatctcctgaccttgtgatccgcccacttcggcctcccaaagtgttgggattacaggcgtgagccaccacgcccggcctgatttttctattccttgtaaatgcccagcctgggcatacccactcgcagaatattgtactactgtgttcgttattgcatcccagagtctgagcttgaataaatgctacgaaagcctccagcgtgtttgttgcatgctgctctcccatcaaggcataatcgttgtataataagggatagtgtgacatttcttatcatattgcagcatgaagactgtattttgtgcttattgtggatttcaggggtataacatttatatttgtgatacacaacatgcgtggttgttcaatgttgcccatgaaatcaaaatcctaccacttctctttcaagattttctggaccaaagtgtatcctgggactccaatgcaagttgtcatgcaaaactgtcaccatttgaagctacttagctgagtgaaaacatcactggtagggcaaatcccaagcaaaaattcacaagtaaattgaatgtgccagctgttggagggctgcatctggcttctgtaaacccctgatttcaaaagggggttcagctaaaactcttcattgttctttgtgattgagatgctcttttgtacaaatatgaactcataaaataaatgtttgctaatga

SEQ ID NO: 85972 - DNA, 403 bp, Homo sapiens
acatgattacgtcactggggtgaggaacgtcactgggatgaggaacgtactgggatgaggaacgtaaatatggtagttcttgcctcaaagatactgcacaaaattagcagactacttggtcattcgccagttcatacttataccctcccttttaatacagcactttgttcatatctctgttacagtacttacattgtaatataatttatctggtttatgtctgtcttccccactagattacaagctcctctaggaaggtggaccatgtcttattcatcattttatctttagtgcttatcacaaagccaggcttatagtgggcactcaaatgtttgttggatgaattaatgaatgaatgaatgcatatttaaatatccaatcatagagtgacaaatacctccct

SEQ ID NO: 85973 - DNA, 634 bp, Homo sapiens
tacaggttttcacccttcctcaaagccctgttatagttgacaagtatgagttctcttcagacaatttttccaagtataaagcatgtgggatttcaatacaaatcctgtctctgacataatacctttataactttgggcaaattgtttaacctatgtgagctttagtttccttgtctgtaaattggtaatggtaatagatacttcattgcttatagtgagaattagagataccgtatataaagtgactagcctattacttggtgactgacatgcactcactaagtattagtttcctgttctaccaagccttctgtctgcctcctgacaagacgtgacacctgagagggtgacaaaggcataatctcaacaatctgttctggtattttctctgaaatgacaaatgactcaagtgcattatctgagttgaacaaatacaagacttatagttattattctccaagggtagcaagaggtaatgactaacaattctgggaagatcttatttgtgttaggtgttggcagctctaagcatgcatggtaaaagtgatatggaggcccatttcctggagaatgtagactggatgtgtccactttcttctgtcacacatgaaactgctgtcagtatgctatctac

SEQ ID NO: 85974 - DNA, 364 bp, Homo sapiens
ttacatttttttataccctggcatttctgtggttaaagtaatgctaacacatattttgtgtccatacactatacttttaatgatcatttcttaagactattttgttcatttacaccatttggttttttgaacttgaaatgtcaaaagtttaatgaactatcgtaagttggaaaattaactaaaatagacagtatttgtttaccagaattcatttgagggccgtgtatcctttagtgtataaaaatctttttggtgtaaaaacatttgctataatcttttgctgattgttgtttttatgctagctcttaataggatattgttaacatctaagtctaggaattgggattcccaagatactgatata

SEQ ID NO: 85975 - DNA, 238 bp, Homo sapiens
gtatgctctggctgttccacctccgtgtgcttgttaattaacttgtaggactttgactgtaagatgtgaaaccacgtttcttgcatgatgttttagagattatttcatttacagtcttttaacctgcagctgcagcacttagttcacgttttcacaaatttcaagagtcactacactaaagacaatgccttttcatgaataagaagttttcagaaggctctagggggctgggaggcag

SEQ ID NO: 85976 - DNA, 283 bp, Homo sapiens
aggattataaatgcgtgcgtaaggggaaggcaaaaagcaaggtggcaactctcaggactaccgatgggaacctgtctgcttctgggactgggcgaggaaggacagagtgacctgatcaaggttgcaggctaatatggtttggctgtgtccccacccaaatctcatcttgaattgtagctcccacaatccccacatgtcatgggaggggcccggcaggaggtcactgaatcatggaggtgggtctttcccaggctgtccccgtgacagtaagtctcacgagatc

SEQ ID NO: 85977 - DNA, 822 bp, Homo sapiens
gctttctgcctctatagatttgactattctggacctttcacataaatggaatcatgtaatatatataataagcaaaaggtaacaacaaccaagctggcaatttggttgatgaatgaataaacaaaatgtgctgtatccatacagtggaaatattggtgcctactacatgtggatggaccttggaaacatcatgctgagtgagagagagccttggtattgtttcatctccccaggagattccaaggtgcagccaaggttgagacccactgacaagcaatggatatggttgggtgcagatgaaataaggcagccaggggcaggagggatgtctcattgaagatgactgtttgtggatgcctagcaggggtggggatgaggtatgataacagcaaccccaatctcaacacagcgtgaccgattttatcttcagtcagctgatacacctcatggggtgtggacacaggacacctctgcctcccaggttcaagcgataattcctgcctcagcctcctaagtggctgggattacaggcatgtaccaccacgcctagctaatttttatatttttagtagaaacacggtctcgtcatgttgcccagattggtctcaaatttctggcctcaaatgatccacccacctcagcctcctaaagtgctgggattacaggcgcgagcagctgcgcccggcctatatgactttatatttacctgctcccttcaccaggagatcatgggctgtgatgctgggttttcttaacagcataaggaagacttgcccccttgccctatcaaagagaatagttttggaggggagaagtgggacc

SEQ ID NO: 85978 - DNA, 543 bp, Homo sapiens
ggaatgcagcccagtagatctcagcttcattttgaagtggctacattgtctggggtatatacctgggatttgttgtctggcgccaggaaaatttaggacacagacacacatgaggagtttaagagcgaaggtttaataggcagaagaaaagaaagtaaaacagctctgcctcttgagagagaggggacttctgagaagaaagacctgccagcagtggatgggccagattttatagtcaggtttgaggaggcagtgtttgatttacatagggctcacaaattggttcgatcaggtatgatgttttcatagtgcttgtggtaagactggttgccccaccctaatcttattgtgcaaatgggctttccagttaaccagcgccatcttgtctgctccttactgtacagaagaagggaagatgggccaggcgcggtggctcacgcctgtaatcctagcactttgggaggctgaggtgggtagatcacttgaggtcaggagttcgagaccagcctgaccaacatggtgaaaccctgtctctactaaaaa

SEQ ID NO: 85979 - DNA, 661 bp, Homo sapiens
ggtgggaaaccctggctgggcatccatgggtgacgggatgaaacccgagcgtctccttcacacacatgctcttcctttgtctctacctaagaatgttcctgcctgattctagtagttgttttaagcattaaaaaaaagcaatagattctaggaaaagagacagggaaagtgacagtgattccgcttaaccccttcatcaccagagattattggaaatgcccacttttcaggcctcctcatctccatcagcaaaggcttccttgtaaggtaataagtctctctcattttacatggttctgtacatctgtctccccatctgtcagcccagcatcctgagctattagagctaggtgctacctccaccacggtattcacacgaaatggagcaggcttcaaactcaaaagtagctgaagaatacttacaatggaaatgaaagtgaccatagagcatcaatctgtaagtttatccacacacacaaaaagagggtttgtaagagttaaatgtaactggctgaagcttatagctggtgtttgttacaaagtacccaagcttttcctttccaacttcgtggctttgaagaattataggaattttatgatgtgctgttggagttatactggcagagattacagtaaaggggttaaagttggtttatggtag

SEQ ID NO: 85980 - DNA, 253 bp, Homo sapiens
gagctttccacttttccctaagtctcccatcaccactagggttatgtgaattggctgcgcgtgatggctcatacctgtaatcccagcactttcggaggccgaggcgggaggatcacttgaggtcaggagttcgagaccagcctggccaacatggggaaaccctgtctctactaaaaatacaaaaattagctgggcgtggtggctcaggcctatagtcccagctactcaggaggctgaagcatgagaatcgctt

SEQ ID NO: 85981 - DNA, 317 bp, Homo sapiens
aggtaggtattgtttccttccccacttttacagatgaggaaaatgagggtcagaggtgaaaagatctgcccaaggtctcacaactaaaaggcggccgagctcagatttaaattcaggtttgactttaaagctcatccccttggccaggtgcaatggctcacgcctataatcccaacactttcagaggccaaggagggagggttgtttgagcctaggagttcaagaccagccaggacaacatagcgagaccttatctctaccagaataaaaatactactactcagccaggtgtggtggcatgcacctgtagccccagc

SEQ ID NO: 85982 - DNA, 1162 bp, Homo sapiens
tgaaatgaaccacttctgattttctacggagaaagcaagggttaggtccaggttacctgtaaaggtgtgacttagggctccccagaagtgaaccttgctctggagaccccatttggtgaggttcttttcaaaagagattgtatatttttgacccagggattgtcgatttgttgagctcccatgtaagtatgccgccttgccattgacaggtcttcacaatgctttcttaaacgacattctttggaactgtctttcatagtcaggcgacccgccagccaggccgccaggtaggtggaagggcggcttcgggaactagatccggctggttctctgctaacatgtggtcctcgatgctctagcggattggccccaaacctcagcacacagagctttggtagggctggggatgcaggtcagcctgctgaaggcgtctagaggacttgggcgggggcgtgacttcctgctgcaccacttcctttccagccacgtgggcttctgggaccctatgacataatttctggagtggtctgttgggagttgtggcggcggcgaggcccaagcacagctggccaaggcgggtgtaaaacgcgggtcgtgtccaccccaaagctcgacgcctctagaagccatggcttttctgctgaagctagagccggacatgcaggggaaagtagatttgtttcgagcccgtatcgcccaggaggccgaggatctcgtgtccaccttctttcctcagaaggtcttggagctgaatagccgagttcaggagctccggctgcaagacctgtccagaatccattcggtgccaacctcggagcccctggccaccccaggcaacaagggagatgggcccaaccaaaatctgccagttctgctgactcagttctccatcaaggtcccagcactgcttggcagcgagggacagcttctgcggagcaaccagcatctggtggagttgactgagtgggtgaaacctgagatcaagctgctgagagagaaatgcaacacagtgcacatgtaggtgcacccgcttatcctgaaggtgcaggacggcaacaacttcagggtgtctatccaggaagacactgtggaccagctgtggaccgtggatagcacagcggcctcctctctatgcggcttctccacctactacaacacccag

SEQ ID NO: 85983 - DNA, 422 bp, Homo sapiens
aagtgggcaatttaggaagtcagagaacttttgcaaatgaggtagtacttaagttagttttaaagaagaggtgagaattcacctgctacacctaggagttactccagttagagggaacaatatgtgcaaagggactgagatttgaagcacatagtacacttcgggaactcccagtacaaggaagggaataatgggaggtagaaaaggctggagaattaggtagagccagatcatgaagggccttgtttgtcctgtatagattttttttttttttcatacagggtctcactgtgtccctcaggctgagtgcagtggtgccatcatggctgactgcagcatcaaccttctgtgctcaagtgatcctcccacctcagcctcctgagtagctgggactacaggagtgcacctccacacccgactaa

SEQ ID NO: 85984 - DNA, 191 bp, Homo sapiens
ggcagattcaggctgggaagggattgtgatacgtatcaagacattaagagacttactaagggccaggtgcggtggctcacacctgtaatcccaaaatgctgggattataggcgtgagccaccatgcctggccaaaaaagcatattttaaacaaaagtactgggacatgaagttaagggcagaacaccggtt

SEQ ID NO: 85985 - DNA, 388 bp, Homo sapiens
ggggatctctgtggacttctgccagtctcggaaaccagacctaatgtgggcaatcaagcccaactatcggactttaagtgttagagaatgaagctgtataatctaactatggtatatttgattgcttgaaataatcgctttataaatttattctgccttttaagcaaacttaacagatggctgaatctggacataactgtggagaccactttcaacacttttattgttggctaaagcatgctttgttaatgatgttcccaagttattcattcatttttaccaacctgcaaacactgttatatattagttattgaaagattctgatttcacaaaaggaaagtttcactagggattgggttagcacattgtcattccctttttgcatgct

SEQ ID NO: 85986 - DNA, 359 bp, Homo sapiens
gacacaatttctgctctaatccacaaatacttggacattctagctcttctcattgtcccaaccttttaaaacaacttcagtaatagcacctttcttaacctctggggtgataaaatggtgctacttccaatgactgtttgaggccttatctatagggtaacacacagccatcaaagtatagatcaaaagctcaaaaggtttaagttcatcagtagaaaaaccagggagtttttttctcctgttctagagaaaaaagctcacagattgcaggactgtagttaactagtatttatacttgtcctgggttgaagcaattgtaatagtatggttgacagtaggtttataaaatacacttttgt

SEQ ID NO: 85987 - DNA, 428 bp, Homo sapiens
acatagttctatgacatttcttacttttcttacttctgtccattgtaaacaaatgcatcttcctcctgtccacacagtttagaatacatccctgtcatggagggcttaatcctgaagaagtcaatatcagagaccaccatcaaatccatgttgacatttcaaaattaaaaacagaggctgggcaccatggttcatgcctgttatcccagccctttgggaggctgagggaggatcatttgaagctgtagtaagctatgattgtaccactgcattctagcctgggagacacggtgagacttttaaaatatttatgtatttattcattaatattttaaataaataaatgttgtaaaagaaattgtatcacctgcacttactatactgcatatatttcacaggccttatcaaattttcacaacagcctacga

SEQ ID NO: 85988 - DNA, 854 bp, Homo sapiens
ctgcactcgggcttctgggcgctcggctttctcatcgcgctgttctcagccttgccgcttgctctctccgatgggaatggcgaggcgagatctagcctttagggtgggaagagaatgcacagaaagcgctaaggatcaaggaggctgtcaataaacgggagttgttgctgtgaaaaaaaaaaaaaaaaaaaaaaaaaaaaaaaaaaaaaaaaaaaaaaaaaaaaaaaaaaaaaaaaaatgcaagaaaaaaacacaaaatacacaatgcaaacatacgcccatgcacagtatcaacgacccaccacagcaatcaacgaaacagaacttccaatactcatcgaccaatctcgacctgacttcaaacacatactacttcaacagaacctatacacatcacacttatcctacacactcccatcaaaccatgcactccgatcctacatcctccttatctctatcaatagctatatctataacttaaataccaactataacatatatatgaataacctgcactaataagcacgtgaagatccgacagagacccacaccagaacctgcataagtacactatacgaccccaatatctcccacgcgacaatgacgtacaacctcagcagcacttacactaacagcaaagacgccagatgatctaagtatacgacgaacatcatccatcgctatacaactactaaaattacattattacttccacgatcattccttcaccatatttcacaaccatagcacacgaaacagacaaaccctactgacagaccacatagtcacgatcacttactcaatcacgaactgcatacgcaatctcacactcactacctcacacagcaccttca

SEQ ID NO: 85989 - DNA, 408 bp, Homo sapiens
  misc_feature (279)..(279): n is a, c, g, or t
tatcatgttgtctttatgagcattgagcacacttagtagaaaggctgccacactgtgtttagccttgtcatcctggaacaagatttttcatcttgaatagtctgataccaagactgaacccatctactgcaaagacctgtgttctgggaacgcaaagaatattctgacccccttttccagtattgagctgaaatcacaaagattttgtggtatagtgataagagctgtaagatttgggtttctattcctgggcactaaccttgggagtacggggacttngggagaggtgtggtgtaggggaaacagggcaaggtcagtggctacacagagtgtggattcttgggatagggcaccatcaaaggggaccacggagctttggtaggaaatacgcattttctagggtttcac

SEQ ID NO: 85990 - DNA, 384 bp, Homo sapiens
gaagaggcaagagagggctgggagtgacagaaacccgctccaccatgactggagcgatgggtacatggatgtgcactttcgtgaaaattcaacaaactgtgcacttagaatgggaggacttggccaggcaatctgtatttccataaaaacaaacttttaaaaaatgataatttgttctcattgttcaattcccacctatgagtgagaacatgcggtgtttggttttttgtccttgcgatagtttgctgagaatgatggtttccagcttcacccatgtccctacaaaggacatgaactcatcattttttatggctgcatagtattccatggtgtatatgtgccacattttcttaatccaatctatcactgttggacatttggctt

SEQ ID NO: 85991 - DNA, 322 bp, Homo sapiens
ctcagctgctgcagatggggtgtctgcgaggtcaagcaagacaggcaggggaccggggaagccccagtgtgcaggggacggggagtcctgggtgccagcccccttgcccctgcctcatttgagcgtctgatatctctgatgtggggcctggtgatagaggcctgggagcctccttgtccccatgctgccctgtgcgtctctcaggcctgccccactggcctagaatctctccctcccgggccttctgcacttctcagcactgtgacgtccttctcccctttcttcaccgggggaactcctacctggcgggaagcaactgggg

SEQ ID NO: 85992 - DNA, 368 bp, Homo sapiens
aatctctaatatataaagagctcctacaaattgatgagactaaatttttatctaatttttaaaaagagcagataatcagtctattgtcaggaaaaaagtacatatggctcttaaaaatgtgaaaaggtgattaacttcatcctaagagaaatgcaaattaaaattgtacttgagatattttcactcatcagattggcaataatcccaaagtttaataacatactctattgaggttgtagggaaaggtcttttcttgtttttttgggtttttttttggtttggtttttttttttttgagaaggagttttgctattgttgcccaggctggagtgcaatggcatgatcttggctcaccgcaacctctgcct

SEQ ID NO: 85993 - DNA, 750 bp, Homo sapiens
ttcatcttttattccgtagcagtagtttcagggggttctccctacagcaagtgaaggttttttttccctatatatactcctgtttcctaggctttgctcctttttcttcattgttggataaaacaagatttgcactactgtctgaaaatagagatttataagaggaaaatatttttaaatctgatcattatagaattaggaggaatctactagccttcaagaacaacatgtattaaccatctcataatatatgaatctactgtggggttaataactaaaggcctaattctagaaatttattttcctgatgatcaattctgctttgaatagaaaagggggggattaaatgaggcataattataaaatatatatgcagaggttagaaaaattttgctgagtcacttgggatgactttgtgccactgctttttatgacacagctagttagtgtgacttaccacaacagagattgataaattataaaatacttgttttcatctctaaattacaatttgtgtgctggtacatatgattaaaatgtccttcatacccaaagtctgtttattgagtgactgataatactgaggataaatgcagagttacatttatttctctcatttgaatgaagtaaaggtatggtaatatcaagactctagatgtaggcagtgaggcatggagaggacactaccttgcaaaggccacacagagattgcaaaatgatgcttagaaaggtcctgctaactctacgagg

SEQ ID NO: 85994 - DNA, 189 bp, Homo sapiens
gatcttactctcttttctgctgcggatagtctatctgccccaataataattgtgctatcacttcatgtttctttcttagttcagattttcatatgcagaagatatgtggttaaatgttggcaaactgacttttactttagtgcttatttgtaaatgatgagttattaaaaataaactaaactgagaagt

SEQ ID NO: 85995 - DNA, 694 bp, Homo sapiens
tgagggcagagatcctgtcttcttttttttatgagggcatactcagggcctaatacagtgagtgcctggcacagagtaggtgctcaataaatacctctgcatgagtgaatgcaagtatcacttaccttattacataaaaatcattttcctacattgatcttacccccacatggtaagcttccagatggcaaggaaaaggaattattttgtatttagagtgcctagcccagggattcaatttttgtaagaataaaagctaaaacataaaaaaaaaaaaaaaaaaaaaaaaaaaaaaaaaaaaaaaaaaaaaaaaaaaaaaaaaaaaaaaaacaaaaaagagagggggggcgccgccacaaaagaattaccccgcgaggggggcccacatacgacgccgcaagccacgacttgtgtctgacacagggggcgccccaaatagaagaggcggttatatattaagcacaaagacggcgaggcggcgcgcggattacaacacgaccgagggcacgagggagagaaaacagatgcgcagcagcagggggaaactctgcggtgaagagagagaaaccccctcacgccgcgggggagggggaaacaaaagagtggcggaccaaccatacctcagcacaagagaatataaagaccccccggggaggaaaacaaaacacaacttgcgaagaggcgatcaaagtgg

SEQ ID NO: 85996 - DNA, 396 bp, Homo sapiens
gactggtgtatgtttccacatcctgtgtttactctgtgctttgtttattggcactgcttagtgcttggtcttgtctaaggataggttttcccaatttagacttaactgtgaccacaaattaaaagcaaatgtaggaaaaaaaattaacttgctagttatgaaagatatacaaattagagcagcattaaggtaatgttttatccctactaaattagtaaagtaaaaaatggtcaaggtctgtgtagatacagcagtgataaaactgaaggctcatttgttgcagagtgtagtataaactggtacagtcctattgaaagagaatataatgcctgtcaagagacaaaaaattgtttataccccttgagttcataatcttatttctgggaaattattcca

SEQ ID NO: 85997 - DNA, 161 bp, Homo sapiens
ggcccccatcacatgagcacaactgtttcctgtgtgtgatgtgttgttctctggctgtgcactgccaaaaaagacatcattaaaaaaaaaatctaaatataatgtaaaacctgccttgtcttaggaaaagtttttctggcagtggctcacacctataatcc

SEQ ID NO: 85998 - DNA, 297 bp, Homo sapiens
  misc_feature (59)..(59): n is a, c, g, or t
  misc_feature (66)..(66): n is a, c, g, or t
  misc_feature (136)..(136): n is a, c, g, or t
  misc_feature (212)..(212): n is a, c, g, or t
  misc_feature (214)..(214): n is a, c, g, or t
gaaacacaggaagcgctgtcagagttcagaggatttttaatgccgatagagtaagagancgtagangttatggctctcacagagcataaacgctggaggtaggtgcacgtgtgtcctcagaggaccagtgtggggncagtcattaggagaatcctgtaaacactgctccttcctcaaaccagggcagttacgccccggtgagaccacctttntntccagtcccaccctgtctgaggctggccttcatagagggtggatgcagacatggatcgcctggcatcagggcaaagttcaaat

SEQ ID NO: 85999 - DNA, 335 bp, Homo sapiens
gtttataatgggggagactgtacatgtatgggaacagggagtatatgggaaatcgctttactttcctcttaattttgctgcaaacctaaaactaccctaagaaaagtatttaagaaagtttgcaagcaaattaacacaataaatttaattcaattactcagcaaaaaaattttttagcacgtattatatgccaggtcctgtactagacagcagtcttcagctgagggcaactttccccaccccccaccctgtcccacaagggtgtggttgacaatgtctagagggtgaggatgctgctaaacaccctgcaaagcacagaacagccacccacagca

SEQ ID NO: 86000 - DNA, 181 bp, Homo sapiens
tccttggcttcccaaagtgttgggattacaggcgtgaggcaccatgcctgtccgacatgttacgttttaagatgcctattcaagatctaagtggagatgttgactaggcacttggatatacaaagctggaattcagacaaggaagtttgggctagagaggaaaagttgggagttatcagta

SEQ ID NO: 86001 - DNA, 765 bp, Homo sapiens
  misc_feature (11)..(11): n is a, c, g, or t
  misc_feature (15)..(15): n is a, c, g, or t
  misc_feature (17)..(17): n is a, c, g, or t
  misc_feature (58)..(58): n is a, c, g, or t
  misc_feature (76)..(76): n is a, c, g, or t
  misc_feature (740)..(740): n is a, c, g, or t
actactggggnacgngnttcttctgggggcccccgtcagcatttccagcagcgatgancacagagagaaaaagaanaggtttactgtttataaagttctggtttcagtgggaagaagtgaatggtttgtcttcaggagatatgcagagtttgataaactttataacactttaaaaaaacagtttcctgctatggccctgaagattcctgccaagagaatatttggtgataattttgatccagattttattaaacaaagacgagcaggactaaacgaattcattcagaacctagttaggtatccagaactttataaccatccagatgtcagagcattccttcaaatggacagtccaaaacaccagtcagatccatctgaagatgaggatgaaagaagttctcagaagctacactctacctcacagaacatcaacctgggaccgtctggaaatcctcatgccaaaccaactgactttgatttcttaaaagttattggaaaaggcagctttggcaaggttcttcttgcaaaacggaaactggatggaaaattttatgctgtcaaagtgttacagaaaaaaatagttctcaacagaaaagagcaaaaacatattatggctgaacgtaatgtgctcttgaaaaatgtgaaacatccgtttttggttggattgcattattccttccaaacaactgaaaagctttattttgttctggattttgttaatggaggggagctttttttcncttacaagggaacggcctttctgga

SEQ ID NO: 86002 - DNA, 2671 bp, Homo sapiens
agccgccagcggccgtgacgcgtcaaggaggaaacgccggcgcccggcggccctgccgggaaggaggaagcgcagtgcgttcggctccgcgcccgccgcgccgggagcagcaccgcggggccagatgaagaaactgaggcatggaaatgttaaagtgctttagcctggattgcacagcaggttgcatgatggaatttgaacattacttcaagaggttttgtattttggattagttaattgggtttgtcctctgctgactgtttcttcggatgcattttttggtgtgctcttgagggattaaatgcaaagagatcacaccatggactacaaggaaagctgcccaagtgtaagcattcccagctccgatgaacacagagagaaaaagaagaggtttactgtttataaagttctggtttcagtgggaagaagtgaatggtttgtcttcaggagatatgcagagtttgataaactttataacactttaaaaaaacagtttcctgctatggccctgaagattcctgccaagagaatatttggtgataattttgatccagattttattaaacaaagacgagcaggactaaacgaattcattcagaacctagttaggtatccagaactttataaccatccagatgtcagagcattccttcaaatggacagtccaaaacaccagtcagatccatctgaagatgaggatgaaagaagttctcagaagctacactctacctcacagaacatcaacctgggaccgtctggaaatcctcatgccaaaccaactgactttgatttcttaaaagttattggaaaaggcagctttggcaaggttcttcttgcaaaacggaaactggatggaaaattttatgctgtcaaagtgttacagaaaaaaatagttctcaacagaaaagagcaaaaacatattatggctgaacgtaatgtgctcttgaaaaatgtgaaacatccgtttttggttggattgcattattccttccaaacaactgaaaagctttattttgttctggattttgttaatggaggggagctttttttccacttacaaagagaacggtcctttcctgagcacagagctaggttttacgctgctgaaattgctagtgcattgggttacttacattccatcaaaatagtatacagagacttgaaaccagaaaatattcttttggattcagtaggacatgttgtcttaacagattttgggctttgtaaagaaggaattgctatttctgacaccactaccacattttgtgggacaccagagtatcttgcacctgaagtaattagaaaacagccctatgacaatactgtagattggtggtgccttggggctgttctgtatgaaatgctgtatggattgcctcctttttattgccgagatgttgctgaaatgtatgacaatatccttcacaaacccctaagtttgaggccaggagtgagtcttacagcctggtccattctggaagaactcctagaaaaagacaggcaaaatcgacttggtgccaaggaagactttcttgaaattcagaatcatcctttttttgaatcactcagctgggctgaccttgtacaaaagaagattccaccaccatttaatcctaatgtggctggaccagatgatatcagaaactttgacacagcatttacagaagaaacagttccatattctgtgtgtgtatcttctgactattctatagtgaatgccagtgtattggaggcagatgatgcattcgttggtttctcttatgcacctccttcagaagacttatttttgtgagcagtttgccattcagaaaccattgagcaaaataagtctatagatgggactgaaacttctatttgtgtgaatatattcaaatatgtataactagtgcctcatttttatatgtaatgatgaaaactatgaaaaaatgtattttcttctatgtgcaagaaaaatagggcatttcaaagagctgttttgattaaaatttatattcttgtttaataagcttatttttaaacaatttaaaagctattattcttagcattaacctatttttaaagaaaccttttttgctattgactgttttttccctctaagtttacactaacatctacccaagatagactgttttttaacagtcaatttcagttcagctaacatatattaatacctttgtaactctttgctatggcttttgttatcacaccaaaactatgcaattggtacatggttgtttaagaagaaaccgtatttttccatgataaatcactgtttgaaatatttggttcatggtatgatcgaaatgtaaaagcataattaacacattggctgctagttaacaattggaataactttattctgcagatcatttaagaagtaacaggccgggcgcggtggctcacgcctgtaatcccagcactttgggaggctgaggcgggcagatcacctgaggtcaggagttggagaccagcctgaccaacatggacaaaccccgtctctactaaaaatacaaaattggcagggtgtggtggcacatgcctataatcccagctacttgggaggctaaggcaggagaatcgcttgaacccgggaggcggaggttgcagtgagccgagatcgcaccattgcactcctgcctgggcaacaagagtgaaactccatctccaaaaa

SEQ ID NO: 86003 - DNA, 1250 bp, Homo sapiens
agccgccagcggccgtgacgcgtcaaggaggaaacgccggcgcccggcggccctgccgggaaggaggaagcgcagtgcgttcggctccgcgcccgccgcgccgggagcagcaccgcggggccagatgaagaaactgaggcatggaaatgttaaagtgctttagcctggattgcacagcaggttgcatgatggaatttgaacattacttcaagaggttttgtattttggattagttaattgggtttgtcctctgctgactgtttcttcggatgcattttttggtgtgctcttgagggattaaatgcaaagagatcacaccatggactacaaggaaagctgcccaagtgtaagcattcccagctccgatgaacacagagagaaaaagaagaggtttactgtttataaagttctggtttcagtgggaagaagtgaatggtttgtcttcaggagatatgcagagtttgataaactttataacactttaaaaaaacagtttcctgctatggccctgaagattcctgccaagagaatatttggtgataattttgatccagattttattaaacaaagacgagcaggactaaacgaattcattcagaacctagttaggtatccagaactttataaccatccagatgtcagagcattccttcaaatggacagtccaaaacaccagtcagatccatctgaagatgaggatgaaagaagttctcagaagctacactctacctcacagaacatcaacctgggaccgtctggaaatcctcatgccaaaccaactgactttgatttcttaaaagttattggaaaaggcagctttggcaaggttcttcttgcaaaacggaaactggatggaaaattttatgctgtcaaagtgttacagaaaaaaatagttctcaacagaaaagagcaaaaacatattatggctgaacgtaatgtgctcttgaaaaatgtgaaacatccgtttttggttggattgcattattccttccaaacaactgaaaagctttattttgttctggattttgttaatggaggggagctttttttccacttacaaagaaagagaatagctctctgttgcatagaggggtcctggagaaatgggttaccccagttgtcttatgtaaatggttacccatccgattttaatgctatcttctctttgagagctttgtaattaagaaccacttaaattactccaaagaaagactttaaaaagggaccagggaaaaggccttaataaatta

SEQ ID NO: 86004 - DNA, 2283 bp, Homo sapiens
  misc_feature (11)..(11): n is a, c, g, or t
  misc_feature (15)..(15): n is a, c, g, or t
  misc_feature (17)..(17): n is a, c, g, or t
  misc_feature (58)..(58): n is a, c, g, or t
  misc_feature (76)..(76): n is a, c, g, or t
actactggggnacgngnttcttctgggggcccccgtcagcatttccagcagcgatgancacagagagaaaaagaanaggtttactgtttataaagttctggtttcagtgggaagaagtgaatggtttgtcttcaggagatatgcagagtttgataaactttataacactttaaaaaaacagtttcctgctatggccctgaagattcctgccaagagaatatttggtgataattttgatccagtccagatgtcagagcattccttcaaatggacagtccaaaacaccagtcagatccatctgaagatgaggatgaaagaagttctcagaagctacactctacctcacagaacatcaacctgggaccgtctggaaatcctcatgccaaaccaactgactttgatttcttaaaagttattggaaaaggcagctttggcaaggttcttcttgcaaaacggaaactggatggaaaattttatgctgtcaaagtgttacagaaaaaaatagttctcaacagaaaagagcaaaaacatattatggctgaacgtaatgtgctcttgaaaaatgtgaaacatccgtttttggttggattgcattattccttccaaacaactgaaaagctttattttgttctggattttgttaatggaggggagctttttttccacttacaaagagaacggtcctttcctgagcacagagctaggttttacgctgctgaaattgctagtgcattgggttacttacattccatcaaaatagtatacagagacttgaaaccagaaaatattcttttggattcagtaggacatgttgtcttaacagattttgggctttgtaaagaaggaattgctatttctgacaccactaccacattttgtgggacaccagagtatcttgcacctgaagtaattagaaaacagccctatgacaatactgtagattggtggtgccttggggctgttctgtatgaaatgctgtatggattgcctcctttttattgccgagatgttgctgaaatgtatgacaatatccttcacaaacccctaagtttgaggccaggagtgagtcttacagcctggtccattctggaagaactcctagaaaaagacaggcaaaatcgacttggtgccaaggaagactttcttgaaattcagaatcatcctttttttgaatcactcagctgggctgaccttgtacaaaagaagattccaccaccatttaatcctaatgtggctggaccagatgatatcagaaactttgacacagcatttacagaagaaacagttccatattctgtgtgtgtatcttctgactattctatagtgaatgccagtgtattggaggcagatgatgcattcgttggtttctcttatgcacctccttcagaagacttatttttgtgagcagtttgccattcagaaaccattgagcaaaataagtctatagatgggactgaaacttctatttgtgtgaatatattcaaatatgtataactagtgcctcatttttatatgtaatgatgaaaactatgaaaaaatgtattttcttctatgtgcaagaaaaatagggcatttcaaagagctgttttgattaaaatttatattcttgtttaataagcttatttttaaacaatttaaaagctattattcttagcattaacctatttttaaagaaaccttttttgctattgactgttttttccctctaagtttacactaacatctacccaagatagactgttttttaacagtcaatttcagttcagctaacatatattaatacctttgtaactctttgctatggcttttgttatcacaccaaaactatgcaattggtacatggttgtttaagaagaaaccgtatttttccatgataaatcactgtttgaaatatttggttcatggtatgatcgaaatgtaaaagcataattaacacattggctgctagttaacaattggaataactttattctgcagatcatttaagaagtaacaggccgggcgcggtggctcacgcctgtaatcccagcactttgggaggctgaggcgggcagatcacctgaggtcaggagttggagaccagcctgaccaacatggacaaaccccgtctctactaaaaatacaaaattggcagggtgtggtggcacatgcctataatcccagctacttgggaggctaaggcaggagaatcgcttgaacccgggaggcggaggttgcagtgagccgagatcgcaccattgcactcctgcctgggcaacaagagtgaaactccatctccaaaaa

SEQ ID NO: 86005 - DNA, 1341 bp, Homo sapiens
ggcagtcatcagctcggtccaatcgatgaaatgccgtatggattgcctcctttttattgccgagatgttgctgaaatgtatgacaatatccttcacaaacccctaagtttgaggccaggagtgagtcttacagcctggtccattctggaagaactcctagaaaaagacaggcaaaatcgacttggtgccaaggaagactttcttgaaattcagaatcatcctttttttgaatcactcagctgggctgaccttgtacaaaagaagattccaccaccatttaatcctaatgtggctggaccagatgatatcagaaactttgacacagcatttacagaagaaacagttccatattctgtgtgtgtatcttctgactattctatagtgaatgccagtgtattggaggcagatgatgcattcgttggtttctcttatgcacctccttcagaagacttatttttgtgagcagtttgccattcagaaaccattgagcaaaataagtctatagatgggactgaaacttctatttgtgtgaatatattcaaatatgtataactagtgcctcatttttatatgtaatgatgaaaactatgaaaaaatgtattttcttctatgtgcaagaaaaatagggcatttcaaagagctgttttgattaaaatttatattcttgtttaataagcttatttttaaacaatttaaaagctattattcttagcattaacctatttttaaagaaaccttttttgctattgactgttttttccctctaagtttacactaacatctacccaagatagactgttttttaacagtcaatttcagttcagctaacatatattaatacctttgtaactctttgctatggcttttgttatcacaccaaaactatgcaattggtacatggttgtttaagaagaaaccgtatttttccatgataaatcactgtttgaaatatttggttcatggtatgatcgaaatgtaaaagcataattaacacattggctgctagttaacaattggaataactttattctgcagatcatttaagaagtaacaggccgggcgcggtggctcacgcctgtaatcccagcactttgggaggctgaggcgggcagatcacctgaggtcaggagttggagaccagcctgaccaacatggacaaaccccgtctctactaaaaatacaaaattggcagggtgtggtggcacatgcctataatcccagctacttgggaggctaaggcaggagaatcgcttgaacccgggaggcggaggttgcagtgagccgagatcgcaccattgcactcctgcctgggcaacaagagtgaaactccatctccaaaaa

SEQ ID NO: 86006 - DNA, 363 bp, Homo sapiens
agccgccagcggccgtgacgcgtcaaggaggaaacgccggcgcccggcggccctgccgggaaggaggaagcgcagtgcgttcggctccgcgcccgccgcgccgggagcagcaccgcggggccagatgaagaaactgaggcatggaaatgttaaagtgctttagcctggattgcacagcaggtgagaggcagagcttgaatggagggcaggtgtgtggacagtgcctggcacgtgcaggcctgtaataaacatctgtggaatgaatgactccaaatggcttcagatatcttgctctttcaaaacatgtctctcaaaataccgtagtaattgatttatgcctgagagatttccaggcctaatcca

SEQ ID NO: 86007 - DNA, 466 bp, Homo sapiens
  misc_feature (304)..(304): n is a, c, g, or t
gtgattgtgccactgcattccagcttgggcgacagagaaagatcctgtctcaaaaaaacaaaaaaattatttaaggggaaaacatgaataatgaccaaatgaacttctaaaataatctttgaaagactttccccacaaatacctacatcacctattgggaattatagattctaccttcgcgatactcttatttattttaactgtatcacagtttccaaggagaaatgcagaatacatgtattgtgaagtgttctagttgacattagctaagaaccactggtgtagaatgagaatatccaacccnactggaaatctagataatttggtttcagtatgatagcaaaaactaaaatttgttaaatctctcaattatttataaattttgtcttgatttgtttactgactgcctctaatattttattgttttctatagtatcttgcacctgaagtaattagaaaacagccc

SEQ ID NO: 86008 - DNA, 252 bp, Homo sapiens
  misc_feature (35)..(35): n is a, c, g, or t
  misc_feature (53)..(53): n is a, c, g, or t
  misc_feature (71)..(71): n is a, c, g, or t
tacccttactgagaatcaggactttgggtttcttntaacatggcaacaaaccnaaatatttgtggtacagnttataaatactttatttcaaaacattaattaatttttgaagctccaataagaatgttgtttttctttccccaccttcacagctacactctacctcacagaacatcaacctgggaccgtctggaaatcctcagtatgtttaatttgcttcaaacaattttttaactgaattttaggaagatc

SEQ ID NO: 86009 - DNA, 938 bp, Homo sapiens
agccgccagcggccgtgacgcgtcaaggaggaaacgccggcgcccggcggccctgccgggaaggaggaagcgcagtgcgttcggctccgcgcccgccgcgccgggagcagcaccgcggggccaggttgcatgatggaatttgaacattacttcaagaggttttgtattttggattagttaattgggtttgtcctctgctgactgtttcttcggatgcattttttggtgtgctcttgagggattaaatgcaaagagatcacaccatggactacaaggaaagctgcccaagtgtaagcattcccagctccgatgaacacagagagaaaaagaagaggtttactgtttataaagttctggtttcagtgggaagaagtgaatggtttgtcttcaggagatatgcagagtttgataaactttataacactttaaaaaaacagtttcctgctatggccctgaagattcctgccaagagaatatttggtgataattttgatccagattttattaaacaaagacgagcaggactaaacgaattcattcagaacctagttaggtatccagaactttataaccatccagatgtcagagcattccttcaaatggacagtccaaaacaccagtcagatccatctgaagatgaggatgaaagaagttctcagaagatggaatctctctgttgcccatgctggaatgcaatggctcaatctcggctcactgcaacctccccctcctggtttcaagtgattctcctgcctcagcctcccaagtagctgggactacaggcgcacgccaccacgccaagctaatttttgtatttttagtagagacggggtttcaccatattggccaggctggtctcgaactcttgacctcgtgatccacccgcctcggcctcccaaagtgctgggattacaggtgtgagccaccacgcctggcct

SEQ ID NO: 86010 - DNA, 2000 bp, Homo sapiens
agccgccagcggccgtgacgcgtcaaggaggaaacgccggcgcccggcggccctgccgggaaggaggaagcgcagtgcgttcggctccgcgcccgccgcgccgggagcagcaccgcggggccagatgaagaaactgaggcatggaaatgttaaagtgctttagcctggattgcacagcaggttgcatgatggaatttgaacattacttcaagaggttttgtattttggattagttaattgggtttgtcctctgctgactgtttcttcggatgcattttttggtgtgctcttgagggattaaatgcaaagagatcacaccatggactacaaggaaagctgcccaagtgtaagcattcccagctccgatgaacacagagagaaaaagaagaggtttactgtttataaagttctggtttcagtgggaagaagtgaatggtttgtcttcaggagatatgcagagtttgataaactttataacactttaaaaaaacagtttcctgctatggccctgaagattcctgccaagagaatatttggtgataattttgatccagattttattaaacaaagacgagcaggactaaacgaattcattcagaacctagttaggtatccagaactttataaccatccagatgtcagagcattccttcaaatggacagtccaaaacaccagtcagatccatctgaagatgaggatgaaagaagttctcagaagctacactctacctcacagaacatcaacctgggaccgtctggaaatcctcatgccaaaccaactgactttgatttcttaaaagttattggaaaaggcagctttggcaaggttcttcttgcaaaacggaaactggatggaaaattttatgctgtcaaagtgttacagaaaaaaatagttctcaacagaaaagagcaaaaacatattatggctgaacgtaatgtgctcttgaaaaatgtgaaacatccgtttttggttggattgcattattccttccaaacaactgaaaagctttattttgttctggattttgttaatggaggggagctttttttccacttacaaagagaacggtcctttcctgagcacagagctaggttttacgctgctgaaattgctagtgcattgggttacttacattccatcaaaatagtatacagagacttgaaaccagaaaatattcttttggattcagtaggacatgttgtcttaacagattttgggctttgtaaagaaggaattgctatttctgacaccactaccacattttgtgggacaccagagtatcttgcacctgaagtaattagaaaacagccctatgacaatactgtagattggtggtgccttggggctgttctgtatgaaatgctgtatggattgcctcctttttattgccgagatgttgctgaaatgtatgacaatatccttcacaaacccctaagtttgaggccaggagtgagtcttacagcctggtccattctggaagaactcctagaaaaagacaggcaaaatcgacttggtgccaaggaagactttcttgaaattcagaatcatcctttttttgaatcactcagctgggctgaccttgtacaaaagaagattccaccaccatttaatcctaatgtggctggaccagatgatatcagaaactttgacacagcatttacagaagaaacagttccatattctgtgtgtgtatcttctgactattctatagtgaatgccagtgtattggaggcagatgatgcattcgttggtttctcttatgcacctccttcagaagacttatttttgtgagcagtttgccattcagaaaccattgagcaaaataagtctatagatgggactgaaacttctatttgtgtgaatatattcaaatatgtataactagtgcctcatttttatatgtaatgatgaaaactatgaaaaaatgtattttcttctatgtgcaagaaaaatagggcatttcaaagagctgttttgattaaaatttatattcttgttt

SEQ ID NO: 86011 - DNA, 2485 bp, Homo sapiens
ggcgccgctgggagctggtggcgcggcgcaggtcccggccgagtgtggcgcagcagtggcggcgcttcccattcgccatgcgccgggggtgggtgcccgaaggttgcatgatggaatttgaacattacttcaagaggttttgtattttggattagttaattgggtttgtcctctgctgactgtttcttcggatgcattttttggtgtgctcttgagggattaaatgcaaagagatcacaccatggactacaaggaaagctgcccaagtgtaagcattcccagctccgatgaacacagagagaaaaagaagaggtttactgtttataaagttctggtttcagtgggaagaagtgaatggtttgtcttcaggagatatgcagagtttgataaactttataacactttaaaaaaacagtttcctgctatggccctgaagattcctgccaagagaatatttggtgataattttgatccagattttattaaacaaagacgagcaggactaaacgaattcattcagaacctagttaggtatccagaactttataaccatccagatgtcagagcattccttcaaatggacagtccaaaacaccagtcagatccatctgaagatgaggatgaaagaagttctcagaaggttcttcttgcaaaacggaaactggatggaaaattttatgctgtcaaagtgttacagaaaaaaatagttctcaacagaaaagagcaaaaacatattatggctgaacgtaatgtgctcttgaaaaatgtgaaacatccgtttttggttggattgcattattccttccaaacaactgaaaagctttattttgttctggattttgttaatggaggggagctttttttccacttacaaagagaacggtcctttcctgagcacagagctaggttttacgctgctgaaattgctagtgcattgggttacttacattccatcaaaatagtatacagagacttgaaaccagaaaatattcttttggattcagtaggacatgttgtcttaacagattttgggctttgtaaagaaggaattgctatttctgacaccactaccacattttgtgggacaccagagtatcttgcacctgaagtaattagaaaacagccctatgacaatactgtagattggtggtgccttggggctgttctgtatgaaatgctgtatggattgcctcctttttattgccgagatgttgctgaaatgtatgacaatatccttcacaaacccctaagtttgaggccaggagtgagtcttacagcctggtccattctggaagaactcctagaaaaagacaggcaaaatcgacttggtgccaaggaagactttcttgaaattcagaatcatcctttttttgaatcactcagctgggctgaccttgtacaaaagaagattccaccaccatttaatcctaatgtggctggaccagatgatatcagaaactttgacacagcatttacagaagaaacagttccatattctgtgtgtgtatcttctgactattctatagtgaatgccagtgtattggaggcagatgatgcattcgttggtttctcttatgcacctccttcagaagacttatttttgtgagcagtttgccattcagaaaccattgagcaaaataagtctatagatgggactgaaacttctatttgtgtgaatatattcaaatatgtataactagtgcctcatttttatatgtaatgatgaaaactatgaaaaaatgtattttcttctatgtgcaagaaaaatagggcatttcaaagagctgttttgattaaaatttatattcttgtttaataagcttatttttaaacaatttaaaagctattattcttagcattaacctatttttaaagaaaccttttttgctattgactgttttttccctctaagtttacactaacatctacccaagatagactgttttttaacagtcaatttcagttcagctaacatatattaatacctttgtaactctttgctatggcttttgttatcacaccaaaactatgcaattggtacatggttgtttaagaagaaaccgtatttttccatgataaatcactgtttgaaatatttggttcatggtatgatcgaaatgtaaaagcataattaacacattggctgctagttaacaattggaataactttattctgcagatcatttaagaagtaacaggccgggcgcggtggctcacgcctgtaatcccagcactttgggaggctgaggcgggcagatcacctgaggtcaggagttggagaccagcctgaccaacatggacaaaccccgtctctactaaaaatacaaaattggcagggtgtggtggcacatgcctataatcccagctacttgggaggctaaggcaggagaatcgcttgaacccgggaggcggaggttgcagtgagccgagatcgcaccattgcactcctgcctgggcaacaagagtgaaactccatctccaaaaa

SEQ ID NO: 86012 - DNA, 483 bp, Homo sapiens
cagcaggaagatcaggtggagaaggggttactgcagggagccaggagggagcagacaggaattgagattagggtagggggcttctgactgttttgaagagaatctaaaatgaacactgaaaaacccacatgcattatttttaagaatctaagtttatccctccctctcaaaagattccctctgtacttctgtaggaacagggtgcacaggaccacacaggatgagacatcaaattccatgtcatatcataggcttctcaaagtgaaaaaattaaaaattagaggaagacggccaagtgctggtggctgacacctgtaatctagcactttgagaggctgaggcggaagaatcacttgaacccaggagatcaagactaggctgagggatatagccaagacctgtctctacaaaaaatagaacaaaaaagttagctgggtatagtggtgtgcggctgtagtcccagctactctgagactacagtgg

SEQ ID NO: 86013 - DNA, 518 bp, Homo sapiens
gaaagctgtggactctgcaccaggcaacagtcagctgatactgaggaactaccaggggttcttcctggtatcagtgaggtaccagatgtctaatctccaggtcccatacatgcattcttttgggttctttgcatgaacatgggtaattcacatattttctgagcggtacaaatgccttttggctacttcctcttttatgccagtagtttgtggacacaatccctttttgttttttattttatggcttagagataatctctcccttattagtcaggattatttctgtctctggaatctggattgtaccataaaaatactgtatttgcctccttttgtggcaagaagggctagatgttttccccctcaagctctggaaggttactttttatagttgtcatgatgtacaaatgtttcatcaaatgtgggatgatgatttgatagtgaggaaactgtggtactgattgcaaaagctcctggggcttgtgggattcatagacgtaggcagtgtctctggacaa

SEQ ID NO: 86014 - DNA, 263 bp, Homo sapiens
cttggggtcattggctgggtacacttggattcccaggccctgcctgctctaaaagctcacctttcaccagcacatggcttcagggaactgggggtggagcagggagggttattccaagtcactatttccactggggtatgaattgaatgagagctgaagaagaggtaccattcatgagcacttcttgggtgccggcatggttctaagaccagtacaatgtatcctcctcacagtatggtgaggtgggcaccgctggcaccctc

SEQ ID NO: 86015 - DNA, 185 bp, Homo sapiens
gatcattggtttattttgtagtccacctttcaatcacttcatgtatataaaaagggactttgaatgtaatagtcttcatcttatttattgaaaagatgtactaaaggaatgactattttttaaaaaaactctagtatttatcaatatgactctaagggaaaaatcaagaaaattagaggaaggtt

SEQ ID NO: 86016 - DNA, 267 bp, Homo sapiens
ttttgtattttcagtagagatgggatttcaccatgttggccaggctggtctcgaactactgacctcaggtgatccacccgcctgggcctcccagagtgctgggattacaggtgtgagcccctgtgcccagcctgatttttcttttcttcattccttttcatgattttttcaccagtttccatcaattttgtggcttatgatagatttcagtggatgtggatataattttccttacatactttttcccagtttcagataaggtgtata

SEQ ID NO: 86017 - DNA, 561 bp, Homo sapiens
tgggccatggttttgttgttgctgctattgtttactttattttattttttctttgcatctactttttaaattgagatatacttaaccataaaattcatccttttaacatgtacagttcagtagtttttagtgtattcacaaagttgtgcaatcagtattatccagaatactttcattgtatgcaattgtctacctgatcagcaggtattccacattaacccctcctaaggtctttgataaatttttgtatatggagtgaggggtccaggttcattcttgcatatgagtatccagttgtcccaggacccctcctgttttgtttgttttattcaatttatttggtcattcaccaaatatgttttgaatacctactatgtatttctaagacactaatataatccatagttatatcatttgtgatccttacctagtttacaaggaaaaaaatgtgagaattaatgagaacaaatatataccaagatttcactaacattgtttttgggccattgtctaccctcttcagagaaatattaaatcctcctgtcctggcaaaaaaaaaaa

SEQ ID NO: 86018 - DNA, 393 bp, Homo sapiens
cgcaccagcatggcacatgtatacatatgtaactaacctgcacaatgtgcacatgtaccctaaaacttaaagtataataaaaaaaaaggcagttcacatttatagatgggtgaagataaaaatgggcattttacagagttatctacatgacaattaaagaaataagaatagtgatgtctttcaaaagctatttaatttatccccctacttttagacagattttttccccaaattatctttagactgttgagtatccacattagtataaacatctgctaagaaggaaattactcaaactcccctggtattctattcctgtattaacaaccctacttccaagaagctggtctttggtcatcacattgtaattagttaccagccagcatgtctatc

SEQ ID NO: 86019 - DNA, 446 bp, Homo sapiens
tttttttatatatgttttcttgaggagttttaaggttttatgtcttacatttaagtgtttcattttgagttaatttcggggtatggtataagaaaatattctacttttattctttcacttgtggatacccagtttttctggtaccatgtatcaacaagactgtattttctgcattgtatattcttggtggccttttcaaagattagtttaccttgtattctggttttgtttctgggctccctattctgttccattggcttttgtatctgtttttatgcacatacaatactcttgattactataacctttaaataaaatttgaaattaaagagtatgatgccccagcattgttctttctcaagattgctcaggttatttaaagttctttaagcttacacttaaattttacaattgtgttttctattactgtgaaaaatgcccctaaa

SEQ ID NO: 86020 - DNA, 690 bp, Homo sapiens
cagggtgatcataattaccacatcaaattttaaggactcagtgtgggtttgagctagctttttaatgctgtgaattgtgcaactgaagttgttggatttataactttattgaggaattaatttgattctgagtgagaaagcactaagaggaaaaaagtgctacttggctaaagtttgtatatggcatgattgtgaccacataggtaacaggttcatgtctaaattgatggatggctgcagtggccttgtggaaaagacgctgtcttggggatccggagacctggatttgaatcctaattcccgccccatcttcagatttgagctcgtggctttctttctatggccttgttcttcatctgcaaaacaagagtgaattagaggcaagattcttttcacttctgggattgaaagaaccagcatttgtgaagtgtttatataggaactacagtggatacattctgtttaaagatttatgatcagctgcttgttctctcctatctcttttggcgaacttgatggcatttttgcttagcagattgtacattatgtttttataacgtcttttcttcaccctcatatgtgtcctctttacaattaagatgagtttatttatacaacagtcatatgtgaagttgatttggtggatatggttttcttctctctgccagccctaaccagcaccttcttgct

SEQ ID NO: 86021 - DNA, 414 bp, Homo sapiens
tatttgaatatgcagacattagagaatgtaagacagtttatgacagattatttttcgggaactggttacagaattaggatgaggatttatgcataattgatatttgtctctattggtcttcacagatataagtgcacatatggaggattttgagacattggtgacccaaagcaattgtctttaactttttttgacttccagttcttagtgaaggcatttcagccagtggagaaaagaaattgtgtgccaatgctaagtcattcacttcttgtgttggtgtaactaaaggtttttaaacattatgattactggtattcatttgcttttttcagcttccttgaatttctaaaacagtgatttctaaatgctttagaataattatatattattatcatgcataatatcatgcccata

SEQ ID NO: 86022 - DNA, 444 bp, Homo sapiens
tcccaaaggcaaatggccttcaaacaaccccagactttcttgcaagagcatgacttttctggcaagagcaaggccatgagccctgcctgggacctggcactattctgagtgttgggggcataatggggaaaaagtggcagccacattaagattcatgaccaaggccgggtgtggtggctcacacctgcaatcctagcactttgagagactgaggcaggcagatcacttgaggccaggacaacatggcaaacttggtctctacaaaaaatgcaaaaattagccgggcgagatggcatgtgcctgtaatctcagctactcaggaggctgaagcaaggagattgcttgagcccagggaagtcaaggctacagtgagccataatcgtgccactgcactgcagcctgggtgagagagtgacagtgacagaccctgtctggggaaaaaaa

SEQ ID NO: 86023 - DNA, 418 bp, Homo sapiens
gatacacacacacggataattatttgatgctttaattgccttttgcaaagtttgttcctgtttggaatgctttgttctttgcctctaagactatctgtgggtttttcttgcttagaggaattgctctcatgtggtgtctgggtggccaatctggccctgctatttattagtatctactaagtgggctgccattttaaactgatcttctagtctgtcttcttgttctttactttgcttactttttgtccactcacatagctgggtacataacatgtattttgaaatcttgtggtcatccacctgtatgtgtaatgagtccccagcatggctaggttgtagcaagatctatgtggatgctggggatcatctgtatcactacactttttcttcagcaccttaacagtgactggttgatagg

SEQ ID NO: 86024 - DNA, 480 bp, Homo sapiens
ctgatgattagtatgtaagtgaatggagagaactgtggggttatgtgaagacatttgctagaagccatagttgacaatcgagttggaagagttgggatggtagtggtgatgggtagcagctgccatgaccaatggtccactctgggcaagggtcagccctgcatgtgttagcagttcagtgtttagaaatgatacgtggtatctggagtttggtgtctggatctatggcctatgctagtatatttaacgtaggaaacctattcaggggatgaatttagatccctttgtgtcatctagaaggaaatgttgtggcttacaatattgtatgtggttattaatctttttattgaaaaattattgtatattcagaaataagatttaaattactaaattaaatggagttaaacaagcaggcccccatcatctgtgtctgctcctcatggtttgctggggtaatggttttttaacagtttggtatga

SEQ ID NO: 86025 - DNA, 350 bp, Homo sapiens
ggggtctggctgtttgggaggtagactagggactgagcaggggtccaggctctggagtcgcacaggtttgagtttgagctctgtgtcttaccttactagctgcgtgaccttaggcagaggcaagcttttctgggcctcagtttcctcatctgtaaagaagtctgtagtaacaaactctttgagatgtggaaatctatgagataatatctgtcaagtgctcaatatagcatctgtaaacagtaggtgctcttgaagcacttagagaaaacacctgggcagccaaggagcctggctgagtctaggggcgcggaatggaggactctgagaaccctggagtgggcatgaagggg

SEQ ID NO: 86026 - DNA, 107 bp, Homo sapiens
taaatattaggttcaaggtgatgtttacagttttatattttgaaaaatgtatgtgctcatatgagaaggaattataggaaaaggttagtgattaattttgagaatat

SEQ ID NO: 86027 - DNA, 979 bp, Homo sapiens
  misc_feature (619)..(619): n is a, c, g, or t
  misc_feature (881)..(881): n is a, c, g, or t
agctgacacaacagacatatccgctggttccggttacacaattctgactgaaaaattaaagctgatcaaactttacactcaatgggtgccaaaaccattccacccagatcagctgcagacaagagcagagccttcaacggaaattttaaataagtgagatcaagatcctgaagcatttatttgaagaattgtagcaggagatgaaacatggctttaccagtatgatcctgaagacaaagcacaatcaaagcaatggctatcaagaggtggaagtggtctagtcaaagcaaaagcagatcagtcaaatgtgaaagttcatggcaacaggttttttgtttgtttggttttggttttggtttgtttgttttgagatggagtctccttctgccacccaggctggagtacaatggtgcaatctcggcttactgcaacctccccatcccaggttcaaatgattctcctgccacagcctctggagtagctgggattacaggcatccaccaccatgcccagctaatttttgtatttttagtagacacgaggttttaccatgttggtcaagctggtcttgaactcctgacctcatgatccacctgcctcagtctcccaaagtgctggnattagagcatgagccactgtgcctggccatggtaacagttttttgggatgctcaaagcattttgcttgctgactttccagaaagccaaagaacaataatatcaacttattatgagagtattttgagaaagccaaagctttagcagaaaagcacccaggagagcttcaccagagagttctccaccatgacaatgctcctgctcatttctgtcatcaaaaaagaattttgtgagagtttcaatgggaaattattaggcatccancttaccatcctgatttagcttcttctgacttcttttttgttgcctaatcttagaaaatatttgagaggcatccattttcctcagttaataaggtggaa

SEQ ID NO: 86028 - DNA, 255 bp, Homo sapiens
gttccaggtttacatccttgcccacagggattgaaaaaggaatagaagagcatggtcctggtgctggtgctgcaggccagatggggaggagggcaggatactgcaagcggagccggacttggggaagggaagggctgcagaaagctccaagtaccgaaggggaaagcgcagcggattcgtgtctggcaagagcaggtggggtagagcagaaggtcgacgcagagcagaaggtcgacgcagagcagaaggtcgacg

SEQ ID NO: 86029 - DNA, 430 bp, Homo sapiens
ttgcattgaatctgtagattgcttttggtggtgtggacattttttaaatattgatttttccaatccattaatacaggatatctttccatttatctgtgttttgatttctttcatcagtgttatatagttttcagtgtacagatattttacctccttggttaaatttattcctattttaattttgttgatgttattataaatgggatttttttttaaatttctttttcagatagtttgttgttgtgctgggattatagacgtgagccaccacagctgggccagctttattcattttgctcaatattgctttgggtatttggaggttttttgtggttccctatgaattttatgattgatttttctatttctgtgaaaaatgtccttggaattttggtagggattgccttgaatctgtagattgcggtgtttg

SEQ ID NO: 86030 - DNA, 804 bp, Homo sapiens
ttcctactcaataaactcctttgataacatccttaatagatggtttcatggcaaccctcacctccaccatgaatgatctgtgtctgagattcattacatcagaaaataatctcattttattgtcatatatgtgaggatgtcttccttaaacttggttctatttgccaagacttctatctactcattggtacaggcccctaatctcttatctgaaatccttggggctgcacgtcttacaacttaatttttcaggttttagatagggcacacatactgtgtgttttatactctccccagtggggtccagggaagcactccatcatcaaacacatttgtattttcgcagtgaagcatataaatattcacaattagtgggctaacgagtatatataaataacttcacattaattaaagttggattttgccaccaaatttaccaaaaaaaaaaaaaaatcaactttcacatatctttcaattccaaatttacaaataaagaactgtggacatatattattttgtcctcagtgaatacacaagtaagtccacttcctcttccatgctagcagtccttccactattggaagacagctcttacacttctcccttatccactgtgcctccacacgtcatacttctaaattatcaactgacaaattaacctagtgtaatcaaagagggctagagtagggctctactgctcatccagagcagctttctttctttatttaaagttcaaatgtagaataatacagggcactggaggagcaggctacagcactggcactccatcctagaaaagaggag

SEQ ID NO: 86031 - DNA, 746 bp, Homo sapiens
cgagatcgcgccactgcactccagcctgggcgacagagcgagaccccatctcaaaaaaaaaaaaaagaaaacaatttggttttcatcctatttcctaggacagagttcctaaaaacccttgtaatctctagagcaataagagcgtcttttgtgtgctcatgagatggttggtgtctggaagcccctagagagactcagaatgggggctggttcagaaagacccaggcaagatcagaggattgggacttaaatcagccatgcctgtgatggagcctccttaaaaacccaaaggactggcttgaggagctcgtggatagctggacgtgtggtggttcccggagggtggcatgccaggagagggcatggaatctctgcaccccttcccagcataccttggcctgtccatctcttcatctggctattttatctgtgtacttcgtaatgaccttggtgataaaccagtaaacatgtttccctgagttctgtgagttgttccagcaaattaatcaaactcaaggagagggtagtaggagccctgattttagccagtcagaagtataattgacagccttttaacttgggattggcatctgaagtgggaggcagtttagtgggacctcctgtggaatctccaacctgtggaatctccaggtagatagtatcagaagcaagttgtaggatacccagctggtgtccactggggaattgcttggtgtttgtggaaaatatcccccacacatctggtg

SEQ ID NO: 86032 - DNA, 809 bp, Homo sapiens
gtagcatcctgctaaatttggttgaatggaattttgtgttttcagagaagtagggggttggagggagctgtccctataaacatacagaaatactgtcatatactaaaaagagcagttttggagccaaatgacctagggtacccaactaccagttatcctctctgaactgcacttttcctatctacataatggaatggtattttcttcctctcaggagtgttgttgagaaataatgtatgtaatagatactcagtgccttagttcactttgtgctgttataacaaaacctcagattgggtatggtttttgtgggttggttggttggttggttttttgagacagggtctggctctgttgcccaggctagagtgcagtggcacgatctcgactcattgcaacctttgcacctttgctttctggctcaagccatcctccaacctcagcctcctgggtagctgggaccacaggcttgcaccaccacacctgctaattttgtatttttttgtagagacagggtctgactttgttgcccaggctggtctcaaactcctaggatcacgaggtcaggaaatcaagaccattctggctaacagggtgaaacccggtctctactaaaaatacaaaaaaaaaaattaggcgtggtagcgggcgcctgtagtcctagctactcaggagtgttgggaacaagccccccaaaatctggccataaactggccccaaaactggccacaaacaaaatctctgcagcactgtgacatgttatgatggtcacaacacccacgctggaaggttgtggatttactggaatg

SEQ ID NO: 86033 - DNA, 711 bp, Homo sapiens
gcattaatcattcatgatggcagagctctcataacctaatcatctcttaaagtttccacctcttaacactgttgcattggggattatttctaacacacgaactttgggggacatattcaaaccatagcactcagaaaatgttacttcccttcccagccacctttcagattgtttcatgggaaatgttttcagatttcacataaccaggaaagacatgatcattgtctggaaagattcttagttgggaactgcttgtattaacatctctcagccttgggtatattcttgtcgtggagaaacactctagtagggcacaagtggttgtaaaatcagtttagtaaattatgaccagcttttctttttaatgaaataacaaattagaaaataccacatgtggggccgggcgcagtggctcacgcctgtaatcccagcatgttgggaggccgaggcgggtggatcacgaggtcaggaaatcaagaccattctggctaacagggtgaaacccggtctctactaaaaatacaaaaaaaaaaattaggcgtggtagcgggcgcctgtagtcctagctactcaggagtgttgggaacaagccccccaaaatctggccataaactggccccaaaactggccacaaacaaaatctctgcagcactgtgacatgttatgatggtcacaacacccacgctggaaggttgtggatttactggaatg

SEQ ID NO: 86034 - DNA, 368 bp, Homo sapiens
aacatgcctgcagtgttcccttcctaaaccaactttgccattttctcaggcagacacacaaacatgcaagcgtccacagtaatgtgcgtgtgtgagggatgggggaagagtgattgttgctttgtagtagctcctttgaagtgtttaattcctcccttgtaatctcttcatcaacacacatttaaagcatatcagttttacctcagcaatttgattctcagaggcttatgtggctcagggcctctgtccagcacctgggtggcacagtttgttttatgtgcatgcagaagtgttaacagaattaatttttttccttctttctctctttcttcttcccccacctcccccaatttaggttaatgagccca

SEQ ID NO: 86035 - DNA, 860 bp, Homo sapiens
ttttatttagctcatatccaaaatattgcaaaatgtagtcaatatggaacttactaatgagaatttttgcattcttttctttatattgtttttgaaatatagctgatctcaagtcagctttgaatatagctgatctcaaactagtcacattttaaatgcacagtgactatatgtggaaaatttttagagtgtgagttgacaaatgtcttctgtacaaaaggctgttgaatatttaaagctttgcataccatatgggtttggtcacgaccactccactgtgctggtaaagcatgaaaatggttattagatgatgcataaatattgctatgttccagtaaaactttacttatgggtgctgaaataggaatttcaaataattttcatgtgtttgaattttatttttttgaaccatttaaaaatattaaaactattcttagctagtttgtacaaaaataggtaagacgcaggcttaacccatgtacttggccagacagaaataatagataggatagaatgaaaacaaaaagacagggttatgtagttgattggagagttcctagagtacaaggagttgagggagaatccataggggggtaaattgggaataaagccaggtgacctacagatggctagaagaggaataaacaaacaaaaaggggcctatgcagttcaggctttgggggttgagttgtagtaaccatgtaagagctcccccagctactaataaaagacctggtttggagatttgaccctatagtatgtagtttaggcaataattctgataccacataatgaacaagtgagtgcaagagaaactctcatgtaagataatgtttcaaacaaaaatgacagtacaaaga

SEQ ID NO: 86036 - DNA, 841 bp, Homo sapiens
agaccctccagccattccccttgaaaacaccccccgaccccaagccacaataatgacagcgagagctccaattaactaagcacctacctgggggcagaataacccttcactgcctgatccccatctgcagtgtggcccaacagcccccagaactatgcccacatagactggaggtaggcagttcaccgtccctccctgttaggaatgagaccatccctgaggctatggcccaggcccacaggcgtccagtgtctgagatctttgggaagggagactagggcaggtggagacagcgcagaacccccgtgctgggtgggaagcatgaccacatggtgggtgagcagcccccatgcactgacggtaaattcccctgtggactcatttctgttggtttctattacacctggccaggcgtggtacaatacaggtcggtgctcacaatctttccagcattccactttcacagggcaggatggtggcccccggttccccagtgaggaaagtgagtctcagggggcagcctgactgcagaaagtgctgcgacaggggccctgatggacaggacccgcggcggacagtcctcgaatcctggagttttctctgctcaaccctgctgggctgctgagactccagtctgagtggggaggtggggggagactctggattcagccccatcactgcccaggggaaatcccctactataatccactttctaactccatttcttcatttcacaaaacacaaaaacccctgtcctcctagagctgacattctaggtaagaagacaaacacctatatgatacacagtgtaatacaataaatatatatatgatacatacac

SEQ ID NO: 86037 - DNA, 426 bp, Homo sapiens
atctcatgtaccccataaatatattcacctactatgtacccgcaaaagactgtgtccttggcccagctctatgcccctcccaagagtgaaggtgatgaaggcatccctaggtgctgacctcagacataccacacttctacagagtgtacagtgaaattcccaagaggaagacagtcaaggtcagggatccacgaaatgatgctcccaaaacctttgcagccccaaggagcatgaggagttatcagtggagcaattgagctgcaaactcagccctcttatttgggcttttaggaagtctttactgtcaggtggatgttttcaaccaaacaaaacaggctcccattcctgctgtgcactggataagttccgaaaggttaacattattaacactctttctttctcttcatgcttttccaagtcttttta

SEQ ID NO: 86038 - DNA, 279 bp, Homo sapiens
atatgatggttttaaataaatatgataagagatgaagagagttttaagtaatagaactattctaagttttggatgtttggtttagtgtctctagctatatttctgtttaatgtcaaggcataatatattcgaaccattttatttattaaatttaataaacattgattgtcctattagtcaaagtttcagaaaaatgcaaaaagtcttgttctcaaaggaatgctccctggaccatgcacatcaaagtcgtgggtggctgcttgtgggggtagaaaatat

SEQ ID NO: 86039 - DNA, 469 bp, Homo sapiens
ctcactatttgccccctgtattagtccaatttcacacatctataaaaaaactacctgaaactgggtaatttacaagcaaaggaggtttaattgactcacagttctgcatggctggagaggactcagggaacgtacaatcatggtggaaggtgagggggaagcaaggcacttcttacatggtggcaggagaagagagagagcacagagaaaacggccacttttaaaccatcagatctcatgagaaaactcttattatcacaaggacagtttgggggaaaccaccggcatcagccaatcacctcctaccagcctctccctagacacatgaggattacaattggagatgaagtttgggtgaggacacagagccaagccatgttacccccaaaccctttatgaataattctatataacctggaaaaacccctgaatgtctcaccatttcctcagcttagtctaagaacctgcc

SEQ ID NO: 86040 - DNA, 1982 bp, Homo sapiens
gccacaaggaggggaaggaaggtagagggagggaacactttcgaaggccccggccggatgcaggtcctggattaatgagccttggatatgtgtggcacttccgtaatgggggcacaattcaaacgcctaatgggtccagataggaaccctgaatgagtgaaatcggtgaagtctaagaggaacaacaaaacaagtgtgaagataaataacaatggacaatccacctatcgtcggaagacaaaagggaatggcgggggctgtggacagagcaagtggatgttccaactaaaggaagtagcctctgctcagggccagccttggttttgactcccagtagctgccatgcaggaggtggggcccaaggtggctagatccttggattttctaagcaaagtcagaaatccctatttttatgtgcaatccccggtttttcaacactggcatctaatcaaaatattttttcaaataccgtgtgggccaaacaaaatatctgcgggcgaaatgcagcccatggagcaccagttggccgctccttttccaagtgctgaagcagaccacaactcaatccagttggggagagggtgctttcatcaagtttgggtcaattcttttttgggcatttaataaagctgagaattcaaaagacaccatcaacttccagaaatctataagaaccggctgcggaacatttcaaaggcgtcctccacgtcatcagcttatgcaacagaacctctactttgcccagagttttggaaattaacaacgagggagtgtcctttcagctttcctgggatagtggaactaacaggcttcagatgaaacctatttgttggtttgcagacagcctgggacttaagtccaaactgctcgcaacagacagtcctgccataaaaccaagttggggtgctcaaggctcatcataaaatgaccagagaatccacttcggctgccttgccagagatctgattttatgactgtttaaagggatgagacagatgtcatccccaaacctgagagcagcagaatttgttgctgaggaccagaacggactccttcaaattcagccctcagtttgtctttgacttcatctagagaaagattcttgacactctggatgggcaaaacaggccccagccctgcgtctattcacaggcacaacttgaccagatccctggatccataaaaaattaaagaggtgtcaaaaatgcagcagagaagagccaaataaatggtttcatcattccccaggaagaaaacccctcttttttttttttttctgaaagggtggaaactaaaggaaaattggtgctaaaacaaagttgaactggttcagagcaaaaagagagtccagaatgttacttgaaggcagcacacaccaaaacacacccaaatctcaagtctaggaatgactggcaaccacagctacttcagggcagggggctttcatttgttctttgtgggttttcccctgggaaaacaaagctttgcccttgatccaaaatgggtttatcaagggtgggaagggaaggagcacagagaataatctagtgtatgaaatgagttgagtaactgccacccaattcatagactaaagtaaccaaattctttttcaagttctacatttctagagagaaacagactacagctagcgctgatattagaaagttatgtagattttttaacattatgatattctggctgggcacagtggctcacgcttataatcccagctttttgggaggctgaggcgagaggatcacttgagcccaggagttcgagaccagactgggcaacatagcaagaccctgtgtctctataaaaaataaaaagttgagccaggcatggtggcatgtgcctatagtcccagctactgagaagactgaggcaggcagattgcttgagcctgggaggttaaggctgcagtgagctatgggggcaccactgcactgcagcctgggtgacagagtgagagaccctctctc

SEQ ID NO: 86041 - DNA, 201 bp, Homo sapiens
gcagctcaaatctcaaccattactacagcctacagatcattcttctttctcatctcccaaaaatctctctagagacccaagacaactcctctagaaattctgactccaaaggtctgggtggaatgcaggtatcagtattaattaattaattaattatttttgagacagaattttgctctgtcacccatgctggagtacagt

SEQ ID NO: 86042 - DNA, 815 bp, Homo sapiens
acaacagtaaggagtggtgaagccagtcaataaagggcatgttatcaagcccactaccactgcgcgcgactgcagctgaatacagttgggaaactgggaaatagtaccggatgtgggcaatttatcagagtcaacaacctggttttttcagcaaataaatggcaagagaacaaagaggaagtggaactcctttagattaatagaggtttaaaaggcatcaacaaaatgtaacatatggctttaatttgcatcctcattcaaacaaaccaactgtaaagttatatttatgagacaagcagaaaaatttgactgttgacaaatgttagatgatattaaggaattactattaaattttaagtataataatgacattttattgtttaaaaaaagaattcttaactcttctacatgctgaagtagttaagaatgaaataatatcatgtctggtatttaccttaaaaccatccagtgtatggcttatttcacttagcataatgcttactaggttcatccatgttgtcacaaatggcaagatctccttatttttaaggctgaataatattccattgtatacatatgccacaatttctttatccattcatacattgacaaacatttacgttgtttctatatcttagctactgtgagtaatgctgcaataaacatgggcatgcagatacatttacaaggtggtgaattcattttctttgggtatatacctgaaaaaaaccttgctgggttatatggtagttttatttttaatttctctcacttacatgtaaaatataaaaaacaaaacaactcgaatatataga

SEQ ID NO: 86043 - DNA, 751 bp, Homo sapiens
aggataggctcaccacatctggtgaggcaggcagggcctcgctgcaacacagaatgatcccgtaggtctcaaggcctacttgtactgttgtacataatgtatataattgacttttattcactcgacaaaatttcctaaaaatacatccaaatgattgcattaattaatattttgttcctttgatgactgagtagtatttcatggtttctggtataaattcatcacaaattaaacattcacctgggcttattgaccttttcaactgtaacaaattaagctgttgtagacattcgtgaacaagtttttgtgggaccacaagtttcatcactccaaattaaacacccacaactgcaattgctgggatctatggtctatgcatatctggtttttattttactttaaaaaatttttaattattttctcaaaattttatgtgtacactgagtgcccacagaagctagtaaggatactggggcattggagaggaggtagagaaggttaatcagcacaaaaaaaaaaatgtggaaagaatgaataacatgtctgtcttttaaaaaaactgtcaactatttttcagagtggctctattattttacttttccactagcaacttatgagtgatcgtattttttacatcctgaatagcttttgctattgtcacaatttttaaaagtcattttgataggtgtgtagaaatatctcactatggttttatttgacatgtccatgatgattaataatattgaacatg

SEQ ID NO: 86044 - DNA, 418 bp, Homo sapiens
acaggattattcaggataatgcagtgccatctggaagacccttatagctatagggcagctccactgaggagagagcggaatctccccagttgagcaggtgatttaaactcccctggcattcgcagcaataacaaccgtatttttccctccgcctggcctgtgtcttgactttggacaggagtccaaagtgagctgcgtctttgtgtctgctccctgcactgcagagggtgtgagctgcacgctgcctacccgggtctgatagggagtggggattagacgccaacattccaacatcattatgtaaagtaaaatagcatcattgagagaggtgaggctgagcagtccaaaatatttgataacactgaaagagcgtttttcctcttccacagtgaatccatgtctccatttgcatttgtta

SEQ ID NO: 86045 - DNA, 337 bp, Homo sapiens
catatttaaaaaaatatgttttctgtgtgttgccaaagaatagaaatgcaattgattttttaatattaaacttatatctagccatggtattgaattcttctaatttctaataatttgtctgtcaatcattttattctttctaggtaaatatgatactataataaattttgcttctttctgtttctttccttttcctattatttacttttcttgcattactaggctactttggacctttaataaaatgtgaaaaagcacatttatctttatattgattttaaacagaacactctaaataccttattatcggtaagactaatgactgctgaagaatttt

SEQ ID NO: 86046 - DNA, 470 bp, Homo sapiens
cagaggagagagggtttcaagcaagatgtggagtcagcaggtctcccactatgaagattaccacgggaaccaaggggtgctcctgggactgaagtggatgagagcagtgttggagggtgctgggctgatgacacatgggagagggttgaagagaatgtgggtggtagctgaggacagacgagtgtcctggaacgtgtggtgagaaggagaatagaaggagaggtggaaactgcagagggccatggtgttgggctgagcgatggccgagcaggtatgtaagctgaagggagtgatccaatacctgggagaaaccgctgggacaggagagagggtgtccgcggaagcagagtcccttggaagatgagaggtgatgagttcagaggtggaagggatgccctaccccatgtccaagcaggaacagatcatacatggaagctccagaggctggagaggcatgggttttggcatgg

SEQ ID NO: 86047 - DNA, 322 bp, Homo sapiens
cttagccgcccaggacagctagcttttcattttcgttctctcccggctgggtgtcctaccccgggcccagccctgttatcttgggcacgaacaatgcaccggtaggctggtgatcggtggcgggaagactactcccgggacattgggtactaagtggtggccgctgccgccttctctgctgcccgctcccgccttcctctgctggccctggctccctctgctcccgtttccactctgggcactcaactctccctctggcgtggatcccttcccccgttctcactttctgctccccttagggttccctggatcctagaccacg

SEQ ID NO: 86048 - DNA, 396 bp, Homo sapiens
gcacgagggaggcggagatgttagaacattggcaagttgtgtgagaggagtggacaaaagaagggaagacgacaatctcaaactgaatgataacctggaagccgaaggaaaaaatactgaaatatgatgctgagattaacgggggtggtagagaaaagttacatcaccttaccagatgaggaaggttgctttcgagatgtgtaacaagtatggatgcagttccaaagaagagctccatcagttccccgctagcagcctgagctgaacgcattctctgcattgcagtctagcttgcttttctgcaagcaagagttcagaagctttctttacttcaagattagaactgatttcatactgatggattgttgtatgtgagaaataaaaacacttaagtaa

SEQ ID NO: 86049 - DNA, 1090 bp, Homo sapiens
gctcgtgagtccgcggctcgcacccaggggcgcccgcacgtgcggctagaacgtccgagtcggggtccggggcggggggcgcaggcccgcggcggtaggggaggagagcgggcacccgagtctccatcctcagggtggcctgaaggttccaggagggcgtccggcgaaggcacggggctgcgaccatccagttagcagggctggtgtgactgttgagagtaaatgaaaattcgttttgtgacaccgaccacctccaaggaatgaaaggagcagtcagccgaaacgacagcattacttgcgtccttacctaattggaaccttatccgtggctgagggtgccaccattggaggggccgccgccccctctgacaccacctggcgctccgctccatttaggagctagaacgaaaaggaggcccatcccccagtaagtcacagcccacgccaagatgagttctggagcctgtgcgaccgaagtttcttcaccgcagggcgaggtggacaagggtgtgagttactttgacttcaagacgtctcagtggcggctggttctggagagaggctttatgctggagcacttccagcaaagttcggctggggcctccttaactcactggctggtcacccttggcctcggttttcaaccaaagcctaaggcctcagttttcaacgctgtaaatggaaataaatgagagaagaaagtacagcccgtgtgacaagtgcagcaagcaatgcaacttccttgggacctaccctttgtggtcccttgctttaaaagtatagattcacatttagttagacctgtttcttcctcgcatgcaatttcaccagtcttttcccagacttctgtactcaacagaggaagttccttcctgggagaccatagctgtttgtatgtaaagagttgcgaaaaaacaaaagcaaaacaaaaaactccaacacctctctgtcacagaagtattgaattatatagactggaaaaatggaagtatccaagaaaacgcgtgtggtaagaaaatggctaaggtgcaggattctgttttgtggctctggtctcagaaatagacctcacatacacattattccttat

SEQ ID NO: 86050 - DNA, 389 bp, Homo sapiens
ttagggttatttgtacgtgctgtattccacgttgggtttgccacatctcgcttggttttaactaattgtttaattttggagtgtgtgaagggtgtgtgatacatcactgtggccctaggagtcagatacaaaaaggcctactcagtgccaggcctcctcagccctgccttcccgtttccagtcccctttccccagcctggcttatttgtcctgtatttcttttgttttgtgccattttacactcatcagatttgtatgaaaaattattgactctggcagtagggacatactcactccgacctcatccttgtcggccactccttacctgagggagagaggaccacaccactgaaagatggggtcatgggataaaactggaaactttatgg

SEQ ID NO: 86051 - DNA, 428 bp, Homo sapiens
cacatcatcacatgctttacagagaaatcttttctgaaagagaaagtccattgatgtggcaagcttcattgttgtcttaagaaattaccacagccaccccaactttcagtgacctccatcctggtgaatattcagacagtcaatcctttgaaggtttgaagctaggcttctctctagctttgaaaatgccagatagcatcttcttctattataaggctgttttacctacattgaaaatctgttgtttagtgtaaccaccttcatcagtcagggaccatcaatatcaaggcaagaccctacaatggcaaaaagataactcactgaaggctcagttaattattagaattttttttagcaatgaagtattttagtaagctatctacatttttagagataatgctatttcacacttaacagacctacagtag

SEQ ID NO: 86052 - DNA, 1524 bp, Homo sapiens
  misc_feature (18)..(18): n is a, c, g, or t
  misc_feature (46)..(48): n is a, c, g, or t
  misc_feature (74)..(74): n is a, c, g, or t
  misc_feature (202)..(202): n is a, c, g, or t
  misc_feature (1458)..(1458): n is a, c, g, or t
  misc_feature (1470)..(1471): n is a, c, g, or t
ttaaatagagcccctgtnagaacaatatgaattctgctaaaactgnnncaagaacaaacatcaaatttatggcnaagcttaggtggaagaatggtgcaatcattgatgctttgcaaaaagtttatgggaacaacgccccaaggaaatcagtttacaaatggataattcattttaagaaaggacaagacaatgttgaagatgnaacctacagcagcagaccatgccacttcgtgaggaaaaaattatctcattcatgccctacttgaagaggaccaatgattaacagcagaaacgatagccaacacaatatgctcctcagttggttcagcttttataaatctgactgaaaaattaaagttgagcacactttccactcaatggataccaaaaccatccagcccaggtcagctgcagacaaaagcagagctttcgatggaaatgtcaaacaagtgagatcaagatcctgaagcatttcttcaaagaattgtagcaaaaacagacttttaaaaccttgaattcagagacaggtataaagactgcttggtgattttgaaaggactgagatcattttgggagagatcatcttcagaaaatgaccagatacaacaagaatttaacatggcagccaaaccaacccactaacacacatttaaataagatacccaaatgcagaaagaaaagcacagtcgtcatgcaaaatagtcactactcattcaaaaactctatagttgtctgagtcgttatgctcaaaatatccaataatatttcttttgctgagctgtaaaataattattttgcaaacataaaagaaaaaaaaaagaattgtaacagaaacatggctttaccagtatgaccctcaagacaaaatacaaaacaatggctaccaagaggtggaagtggcccagtcacagcaagagcagattgatcaagagcaaaggtcatggtaacagttttttggatcctcaagtcattttgcttgttgactttttggagggccaaataaagatatcatctgcttattatgagagtgtttcgagagaaatccaaagcttagcagagaaacgcctgggaaagcttcaccagagggtcttccaccgtgacagttcccctgcgcattcctctcataaagcaagggcagtttagctagaatttctatcaaaaatcattaggtatccatctcccagtcctgatttggctccttctgacttctttttgtttcccaatcttaaaaaaatcctgaagggcacctgtttttcttcagctaataaaaaagacatggttaatttcccaggaccctcagttctttagggatagactgaatggctggtatcattgcttgaacttaatggagcttatgttgagaaataaaagaaattatattttatttttatcttttaattctatttttccatgaactttttgaagtcccctcagatataagcagaacgttatgaaacngagttaccttgnntctagaagagtacaatgataaaggggaagatagaaacacacacatatgcgttg

SEQ ID NO: 86053 - DNA, 341 bp, Homo sapiens
gatttcctgagctttacaagggagactggaaagtttgattaagtttgaatttgtgtttggctgattgccagccaaaaccgaatgggcttgtgggagagttctgttgttgctgattctgttcctgttttgtggcagctctcttggggtgggggcaggcacactggtgttgtgttgtgggttttttttagacccccttacttgctgaatggctattcctctgttgtgatgcatgagatgtaaatcccccaaagactggttgccagagcgacgggctggaattgagctcagctaaacaaagtccttcagctttgaagggagaagcgcttgtttcccatgtggag

SEQ ID NO: 86054 - DNA, 347 bp, Homo sapiens
tccccccaaaaaaacacagtaaaataggacaacatgagttgttcttgcccacagttcttttctatttgtactatgtttatcttcatatgctgaaaaatgttcctttttctacattgagattttgatgtgccaaacaaattgaatttctttttcctaccacatttctattggcggggactgaaagtttctctggatttccttgttgctgttgtttgtgctgtgaaattattcagaatttctagatgttaacattttaaccttcttttagttaatctcaaatttttttccagacataatattgaaattatgtttaaatggaatcagaagaaatttacatccagtacatt

SEQ ID NO: 86055 - DNA, 779 bp, Homo sapiens
tgtggagctctgggtttgctcttagtactgctgccagaaacactgttagaatggcaaccctgccattctcccctccagtggaagattctactttattcaggaaggctggtggcttgcaggggctaggcttacacaagccagccaagattgagaaggtaggggagtgctttcaatggaggccatagttgtcatcttttcttctgagcaggctctaggacaaacaatgagcaaattgagatgtcctgtattgggaggatgaggctgatatgtttcatcattctcagaatttgtgggctagagcacctttttgggaatatgggcctagggaaaagaacggtcacttacctggacactatggccatagtcttgagtttttctagtcagcatgtgattggttgtaccttaagtttatgacaccaaaaatactattaactctgttatttttgttcttaatcccatctcaaattagtttctagagttagaatcagaacacaaggatgctcattttcacatggagggaaagttgccaaagcatttaaaaaataaccccaaaagtatatctagcagtgaagcttggtagataaaggtgaactgctaaacagacactggcgtgccacactcctgccagggcagtctcattgtgtgtgacggtgctgcaacactgccagtattacttgagatgcagtctctctcccctgttctcagttcctgggctcagcctcctccaaggcctgccagtgagtagcagtttggaaggcaggccaagggagatccccaaa

SEQ ID NO: 86056 - DNA, 666 bp, Homo sapiens
tgtggagctctgggtttgctcttagtactgctgccagaaacactgttagaatggcaaccctgccattctcccctccagtggaagattctactttattcaggaaggctggtggcttgcaggggctaggcttacacaagccagccaagattgagaaggtaggggagtgctttcaatggaggccatagttgtcatcttttcttctgagcaggctctaggacaaacaatgagcaaattgagatgtcctgtattgggaggatgaggctgatatgtttcatcattctcagaatttgtgggctagagcacctttttgggaatatgggcctagggaaaagaacggtcacttacctggacactatggccatagtcttgagtttttctagtcagcatgtgattggttgtaccttaagtttatgccaaagcatttaaaaaataaccccaaaagtatatctagcagtgaagcttggtagataaaggtgaactgctaaacagacactggcgtgccacactcctgccagggcagtctcattgtgtgtgacggtgctgcaacactgccagtattacttgagatgcagtctctctcccctgttctcagttcctgggctcagcctcctccaaggcctgccagtgagtagcagtttggaaggcaggccaagggagatccccaaa

SEQ ID NO: 86057 - DNA, 332 bp, Homo sapiens
agagagagagagagagagagagagagagagagagagagagagagagagagagagagaggtcaaaatccactggtggcgtttggggtgttcccgtggacgcggcctcccggcaggcggacctccaccgggtgggcgcggcaggcgggctgtgcgggcaggaagagcgacgagcttgagagtgggagatggggtgcaacggcgggcctctccggggaggtgacactgccgctgagacccgaatggaagggcgcgcccggcgggggaacagcaggcgccgagatggagtctcactgtagtccagatggagtgcaatggcgtgatctcggctcact

SEQ ID NO: 86058 - DNA, 132 bp, Homo sapiens
tcaccgtggaggttctctgcagcttactcagtggggcagcaagtagctcaggacaccaggcaacttttaagctctcataatgctgtgctggagttggagcagaagcttgtgctgtatgaagggccttggttg

SEQ ID NO: 86059 - DNA, 325 bp, Homo sapiens
caaaatcatggattcctgctcctgggatgtggaatcattcttaggggctgcctatgtgaggtgggagctggagatggttccaggtcagggaggctaagaggatcaatggcatgccccactacttgctggctgtgcggcctgagacaaggtactcttctttctcagggcttcagagtttaatctgtgaaagaggaggtctgggctaggtgatcacataaatctcttccacatctagaatttgatggagtggctatagcagaaaagtagtttacaattcagggttaataaggaggaaaaaggattacagagggaaaaggttctaaat

SEQ ID NO: 86060 - DNA, 632 bp, Homo sapiens
gagaaaaagtaaataaggctttctggagatgacggaaattttgtatgaataaaagccttataaacaatgaatacatttggataaacaactcattaaaatgcacattaatggaatacctgtacaaatagttttaatacttgtgtccagtggcactaaagagatatattaaaatagattctggttgagttgattataagattgtcaatcataggatacacagggaaagcacagacacgattgctcatctctttggtagtctaaaatatgttccttttaaccacatcaaaagatactatctgattctaatacagaaggtgcaacttcctaggaattatactttgtattatattcaataattattttatgttttgcatcacatgggtgttgcaagaacacagctcttgaactaaaaaggcattacattaagaatttatttttgtaaattttaataaactctaaattaatgcaaaatatttatgaaaatagcacagcttcacattaatacccacagtacttaaatatctcccttagttgactcacagctttgtatgtaagcttcaaatttttaatggtaaaaataagaaaattaggactagcgaactgctagttgttccctcagtgcatgtgcttga

SEQ ID NO: 86061 - DNA, 371 bp, Homo sapiens
ccagatttaggaacgaaataaacccttctgttaagaagacctgaaataaagctgtattgagaccatcatccattcacagaggagatttctcagggacagttccccatgttgttggagacccaattctaacatatctgagaaccggtgatgaagtgagtttaggtttggggacccaaaggaacccacagaagataagccattcagtaagatgattttaaatttagagaaaaaataattttgttgaaattcccaccttaacaaattggaaacacatacatgtttcaagttaatatgtccgtgcttacaataatcgtgaaggaagtattaataatgaaaaaatcaagagccacacaaaagtatagggaatgcta

SEQ ID NO: 86062 - DNA, 1023 bp, Homo sapiens
agatatttactttatgaattaaagctggagtcagtgtcagcccgaaggctgaaggaaaaagagcaacagatccagggagcattcacctgccctgtctccaaacagccttgtgcctcacctacccccaacctcccagagggagcagctatttaaggggagcaggagtgcagaacaaacaagacggcctggggatacaactctggagtcctctgagagagccaccaaggaggagcaggggagcgacggccggggcagaagttgagaccacccagcagaggagctaggccagtccatctgcatttgtcacccaagaactcttaccatgaagaccctcctactgttggcagtgatcatgatctttggcctactgcaggcccatgggaatttggtgaatttccacagaatgatcaagttgacgacaggaaaggaagccgcactcagttatggcttctacggctgccactgtggcgtgggtggcagaggatcccccaaggatgcaacggatcgctgctgtgtcactcatgactgttgctacaaacgtctggagaaacgtggatgtggcaccaaatttctgagctacaagtttagcaactcggggagcagaatcacctgtgcaaaacaggactcctgcagaagtcaactgtgtgagtgtgataaggctgctgccacctgttttgctagaaacaagacgacctacaataaaaagtaccagtactattccaataaacactgcagagggagcacccctcgttgctgagtcccctcttccctggaaaccttccacccagtgctgaatttccctctctcataccctccctccctaccctaaccaagttccttggccatgcagaaagcatccctcacccatcctagaggccaggcaggagcccttctatacccacccagaatgagacatccagcagatttccagccttctactgctctcctccacctcaactccgtgcttaaccaaagaagctgtactccggggggtctcttctgaataaagcaattagcaaatca

SEQ ID NO: 86063 - DNA, 290 bp, Homo sapiens
  misc_feature (288)..(288): n is a, c, g, or t
catagaaaatacaagtagcattccttacacatcttaaaggcgagcacgaacgccttctatacccacccagaacgagaccatgcaccagccgagaagattttcctggatggatagcctccctccctaccctaaccaagttccttggccatgcagaaagcatccctcacccatcctagaggccaggcaggagcccttctatacccacccagaatgagacatccagcagatcccaggaggtcctggtggctggcacgtcgacgcggccgcgaatttagtagtagtagtcgncc

SEQ ID NO: 86064 - DNA, 1041 bp, Homo sapiens
  misc_feature (1039)..(1039): n is a, c, g, or t
agatatttactttatgaattaaagctggagtcagtgtcagcccgaaggctgaaggaaaaagagcaacagatccagggagcattcacctgccctgtctccaaacagccttgtgcctcacctacccccaacctcccagagggagcagctatttaaggggagcaggagtgcagaacaaacaagacggcctggggatacaactctggagtcctctgagagagccaccaaggaggagcaggggagcgacggccggggcagaagttgagaccacccagcagaggagctaggccagtccatctgcatttgtcacccaagaactcttaccatgaagaccctcctactgttggcagtgatcatgatctttggcctactgcaggcccatgggaatttggtgaatttccacagaatgatcaagttgacgacaggaaaggaagccgcactcagttatggcttctacggctgccactgtggcgtgggtggcagaggatcccccaaggatgcaacggatcgctgctgtgtcactcatgactgttgctacaaacgtctggagaaacgtggatgtggcaccaaatttctgagctacaagtttagcaactcggggagcagaatcacctgtgcaaaacaggactcctgcagaagtcaactgtgtgagtgtgataaggctgctgccacctgttttgctagaaacaagacgacctacaataaaaagtaccagtactattccaataaacactgcagagggagcacccctcgttgctgagtcccctcttccctggaaaccttccacccagtgctgaatttccctctctcataccctccctccctaccctaaccaagttccttggccatgcagaaagcatccctcacccatcctagaggccaggcaggagcccttctatacccacccagaatgagacatccagcagatttccagccttctactgctctcctccacctcaactccgtgcttaaccaaagaagctgtactccggggggtctcttctgaagtcgacgcggccgcgaatttagtagtagtagtcgncc

SEQ ID NO: 86065 - DNA, 974 bp, Homo sapiens
agatatttactttatgaattaaagctggagtcagtgtcagcccgaaggctgaaggaaaaagagcaacagatccagggagcattcacctgccctgtctccaaacagccttgtgcctcacctacccccaacctcccagagggagcagctatttaaggggagcaggagtgcagaacaaacaagacggcctggggatacaactctggagtcctctgagagagccaccaaggaggagcaggggagcgacggccggggcagaagttgagaccacccagcagaggagctaggccagtccatctgcatttgtcacccaagaactcttaccatgaagaccctcctactgttggcagtgatcatgatctttggcctactgcaggcccatgggaatttggtgaatttccacagaatgatcaagttgacgacaggaaaggaagccgcactcagttatggcttctacggctgccactgtggcgtgggtggcagaggatcccccaaggatgcaacggatcgctgctgtgtcactcatgactgttgctacaaacgtctggagaaacgtggatgtggcaccaaatttctgagctacaagtttagcaactcggggagcagaatcacctgtgcaaaacaggactcctgcagaagtcaactgtgtgagtgtgataaggctgctgccacctgttttgctagaaacaagacgacctacaataaaaagtaccagtactattccaataaacactgcagagggagcacccctcgttgctgagtcccctcttccctggaaaccttccacccagtgctgaatttccctctctcataccctccctccctaccctaaccaagttccttggccatgcagaaagcatccctcacccatcctagaggccaggcaggagcccttctatacccacccagaatgagacatccagcagatgggaactttttcccttccctactccaggtcgtctcgtcactaagggtcc

SEQ ID NO: 86066 - DNA, 962 bp, Homo sapiens
  misc_feature (960)..(960): n is a, c, g, or t
agatatttactttatgaattaaagctggagtcagtgtcagcccgaaggctgaaggaaaaagagcaacagatccagggagcattcacctgccctgtctccaaacagccttgtgcctcacctacccccaacctcccagagggagcagctatttaaggggagcaggagtgcagaacaaacaagacggcctggggatacaactctggagtcctctgagagagccaccaaggaggagcaggggagcgacggccggggcagaagttgagaccacccagcagaggagctaggccagtccatctgcatttgtcacccaagaactcttaccatgaagaccctcctactgttggcagtgatcatgatctttggcctactgcaggcccatgggaatttggtgaatttccacagaatgatcaagttgacgacaggaaaggaagccgcactcagttatggcttctacggctgccactgtggcgtgggtggcagaggatcccccaaggatgcaacggatcgctgctgtgtcactcatgactgttgctacaaacgtctggagaaacgtggatgtggcaccaaatttctgagctacaagtttagcaactcggggagcagaatcacctgtgcaaaacaggactcctgcagaagtcaactgtgtgagtgtgataaggctgctgccacctgttttgctagaaacaagacgacctacaataaaaagtaccagtactattccaataaacactgcagagggagcacccctcgttgctgagtcccctcttccctggaaaccttccacccagtgctgaatttccctctctcataccctccctccctaccctaaccaagttccttggccatgcagaaagcatccctcacccatcctagaggccaggcaggagcccttctatacccacccagaatgagacatccagcagatgtcgacgcggccgcgaatttagtagtagtagtcgncc

SEQ ID NO: 86067 - DNA, 969 bp, Homo sapiens
agatatttactttatgaattaaagctggagtcagtgtcagcccgaaggctgaaggaaaaagagcaacagatccagggagcattcacctgccctgtctccaaacagccttgtgcctcacctacccccaacctcccagagggagcagctatttaaggggagcaggagtgcagaacaaacaagacggcctggggatacaactctggagtcctctgagagagccaccaaggaggagcaggggagcgacggccggggcagaagttgagaccacccagcagaggagctaggccagtccatctgcatttgtcacccaagaactcttaccatgaagaccctcctactgttggcagtgatcatgatctttggcctactgcaggcccatgggaatttggtgaatttccacagaatgatcaagttgacgacaggaaaggaagccgcactcagttatggcttctacggctgccactgtggcgtgggtggcagaggatcccccaaggatgcaacggatcgctgctgtgtcactcatgactgttgctacaaacgtctggagaaacgtggatgtggcaccaaatttctgagctacaagtttagcaactcggggagcagaatcacctgtgcaaaacaggactcctgcagaagtcaactgtgtgagtgtgataaggctgctgccacctgttttgctagaaacaagacgacctacaatagagtcccctcttccctggaaaccttccacccagtgctgaatttccctctctcataccctccctccctaccctaaccaagttccttggccatgcagaaagcatccctcacccatcctagaggccaggcaggagcccttctatacccacccagaatgagacatccagcagatttccagccttctactgctctcctccacctcaactccgtgcttaaccaaagaagctgtactccggggggtctcttctgaataaagcaattagcaaatca

SEQ ID NO: 86068 - DNA, 373 bp, Homo sapiens
ggctactactactaaattcgcgggcgagtggaaacaagacgacctacaataaaaagtaccagtactattccaataaacactgcagagggagcacccctcgttgctgagtcccctcttccctggaaaccttccacccagtgctgaatttccctctctcataccctccctccctaccctaaccaagttccttggccatgcagaaagcatccctcacccatcctagaggccaggcaggagcccttctatacccacccagaatgagacatccagcagatttccagccttctactgctctcctccacctcaactccgtgcttaaccaaagaagctgtactccggggggtctcttctgaataaagcaattagcaaatca

SEQ ID NO: 86069 - DNA, 851 bp, Homo sapiens
  misc_feature (1)..(1): n is a, c, g, or t
natttcggcacaggtggggatacaactctggagtcctctgagagagccaccaaggaggagcaggggagcgacggccggggcagaagttgagaccacccagcagaggagctaggccagtccatctgcatttgtcacccaagaactcttaccatgaagaccctcctactgttggcagtgatcatgatctttggcctactgcaggcccatgggaatttggtgaatttccacagaatgatcaagttgacgacaggaaaggaagccgcactcagttatggcttctacggctgccactgtggcgtgggtggcagaggatcccccaaggatgcaacggatcgctgctgtgtcactcatgactgttgctacaaacgtctggagaaacgtggatgtggcaccaaatttctgagctacaagtttagcaactcggggagcagaatcacctgtgcaaaacaggactcctgcagaagtcaactgtgtgagtgtgataaggctgctgccacctgttttgctagaaacaagacgacctacaataaaaagtaccagtactattccaataaacactgcagagggagcacccctcgttgctgagtcccctcttccctggaaaccttccacccagtgctgaatttccctctctcataccctccctccctaccctaaccaagttccttggccatgcagaaagcatccctcacccatcctagaggccaggcaggagcccttctatacccacccagaatgagacatccagcagatttccagccttctactgctctcctccacctcaactccgtgcttaaccaaagaagctgtactccggggggtctcttctgaataaagcaattagcaaatca

SEQ ID NO: 86070 - DNA, 853 bp, Homo sapiens
gagtcctctgagaggttggatgggagagcatgtctgtgtgtctcagagccaccaaggaggagcaggggagcgacggccggggcagaagttgagaccacccagcagaggagctaggccagtccatctgcatttgtcacccaagaactcttaccatgaagaccctcctactgttggcagtgatcatgatctttggcctactgcaggcccatgggaatttggtgaatttccacagaatgatcaagttgacgacaggaaaggaagccgcactcagttatggcttctacggctgccactgtggcgtgggtggcagaggatcccccaaggatgcaacggatcgctgctgtgtcactcatgactgttgctacaaacgtctggagaaacgtggatgtggcaccaaatttctgagctacaagtttagcaactcggggagcagaatcacctgtgcaaaacaggactcctgcagaagtcaactgtgtgagtgtgataaggctgctgccacctgttttgctagaaacaagacgacctacaataaaaagtaccagtactattccaataaacactgcagagggagcacccctcgttgctgagtcccctcttccctggaaaccttccacccagtgctgaatttccctctctcataccctccctccctaccctaaccaagttccttggccatgcagaaagcatccctcacccatcctagaggccaggcaggagcccttctatacccacccagaatgagacatccagcagatttccagccttctactgctctcctccacctcaactccgtgcttaaccaaagaagctgtactccggggggtctcttctgaataaagcaattagcaaatca

SEQ ID NO: 86071 - DNA, 912 bp, Homo sapiens
agatatttactttatgaattaaagctggagtcagtgtcagcccgaaggctgaaggaaaaagagcaacagatccagggagcattcacctgccctgtctccaaacagagccaccaaggaggagcaggggagcgacggccggggcagaagttgagaccacccagcagaggagctaggccagtccatctgcatttgtcacccaagaactcttaccatgaagaccctcctactgttggcagtgatcatgatctttggcctactgcaggcccatgggaatttggtgaatttccacagaatgatcaagttgacgacaggaaaggaagccgcactcagttatggcttctacggctgccactgtggcgtgggtggcagaggatcccccaaggatgcaacggatcgctgctgtgtcactcatgactgttgctacaaacgtctggagaaacgtggatgtggcaccaaatttctgagctacaagtttagcaactcggggagcagaatcacctgtgcaaaacaggactcctgcagaagtcaactgtgtgagtgtgataaggctgctgccacctgttttgctagaaacaagacgacctacaataaaaagtaccagtactattccaataaacactgcagagggagcacccctcgttgctgagtcccctcttccctggaaaccttccacccagtgctgaatttccctctctcataccctccctccctaccctaaccaagttccttggccatgcagaaagcatccctcacccatcctagaggccaggcaggagcccttctatacccacccagaatgagacatccagcagatttccagccttctactgctctcctccacctcaactccgtgcttaaccaaagaagctgtactccggggggtctcttctgaataaagcaattagcaaatca

SEQ ID NO: 86072 - DNA, 797 bp, Homo sapiens
  misc_feature (1)..(1): n is a, c, g, or t
natttcggcacaggtggggatacaactctggagtcctctgagagagccaccaaggaggagcaggggagcgacggccggggcagaagttgagaccacccagcagaggagctaggccagtccatctgcatttgtcacccaagaactcttaccatgaagaccctcctactgttggcagtgatcatgatctttggcctactgcaggcccatgggaatttggtgaatttccacagaatgatcaagttgacgacaggaaaggaagccgcactcagttatggcttctacggctgccactgtggcgtgggtggcagaggatcccccaaggatgcaacggatcgctgctgtgtcactcatgactgttgctacaaacgtctggagaaacgtggatgtggcaccaaatttctgagctacaagtttagcaactcggggagcagaatcacctgtgcaaaacaggactcctgcagaagtcaactgtgtgagtgtgataaggctgctgccacctgttttgctagaaacaagacgacctacaatagagtcccctcttccctggaaaccttccacccagtgctgaatttccctctctcataccctccctccctaccctaaccaagttccttggccatgcagaaagcatccctcacccatcctagaggccaggcaggagcccttctatacccacccagaatgagacatccagcagatttccagccttctactgctctcctccacctcaactccgtgcttaaccaaagaagctgtactccggggggtctcttctgaataaagcaattagcaaatca

SEQ ID NO: 86073 - DNA, 258 bp, Homo sapiens
gatcaatatatccaggaatttgtgaaaagatcctaaacttttcaaacatgtcacaggtagtacttgaagtatgcttggtaaaatgtaccggttaaagcagtatgtttctcagatagcctgagattttatttaacaattatgtatctaagtctactaatacatttgagcaaaagagtgttgggttcataaataagaagtcagtatttcacttagattatttcagaaacttgtaagtacctgtaaatagctactctgaaa

SEQ ID NO: 86074 - DNA, 311 bp, Homo sapiens
caaatattatcattaactatactctttatgctatttaatctgcttatcctaatttccctatgctactccttgaactggtagatatacccactcagtaagaaagcaaataaaaataaaatagtttgagtcttactctggtgatctctctatcttgcatgaagctttctttatatgtaaattgtattcctcccctattccaaaccattatttttttctgtctctagatgtaaggttcttaacagtgctggagatttcatcagatggggacagacagctgatgaacattctttggctcttcaaccccttttctt

SEQ ID NO: 86075 - DNA, 180 bp, Homo sapiens
catttcctgcctctctcaccttcctggttcctgccagcatttcttggtttgtggccacatctttccaacgtttgccacaagcttctctttgccttctcttctgtctgcatctctgctcttgctgcctctctaaggatgctttgattacatttagaacccactagataatccagggtaatc

SEQ ID NO: 86076 - DNA, 1522 bp, Homo sapiens
agtggcgcggacgcctgctcagtgcgcgccggccgggcaaccctatgctggcgtaatcgggttcctccgagccgccgtaggactggttccggcgggctggtgaggaatggagccggtaggctgctgcggcgagtgccgcggctcctccgtagacccgcggagcaccttcgtgttgagtaacctggcggaggtggtggagcgtgtgctcaccttcctgcccgccaaggcgttgctgcgggtggcctgcgtgtgccgcttatggagggagtgtgtgcgcagagtattgcggacccatcggagcgtaacctggatctccgcaggcctggcggaggccggccacctggaggggcattgcttggttcgcgtggtagcagaggagcttgagaatgttcgcatcttaccacatacagttctttacatggctgattcagaaactttcattagtctggaagagtgtcgtggccataagagagcaaggaaaagaactagtatggaaacagcacttgcccttgagaagctattccccaaacaatgccaagtccttgggattgtgaccccaggaattgtagtgactccaatgggatcaggtagcaatcgacctcaggaaatagaaattggagaatctggttttgctttattattccctcaaattgaaggaataaaaatacaaccctttcattttattaaggatccaaagaatttaacattagaaagacatcaactcactgaagtaggtcttttagataaccctgaacttcgtgtggtccttgtctttggttataattgctgtaaggtgggagccagtaattatctgcagcaagtagtcagcactttcagtgatatgaatatcatcttggctggaggccaggtggacaacctgtcatcactgacttctgaaaaaagtatgtcttgtgtgcttctgatttcgtctgtgaatgaagggaaatggtctcaggttttgtcactttggggttaacaatttaaaaaacgtgtttaaagaattattaagataatagttcattccattttgtagtagacattggctaaggggcttactgaacataattctgcttacggttgaataattacatttttatatatattgtccttcaagaacttccttgagtcacattctccttaaaatttgacattgcctgttgatctttcctttgacagatgtggtactctgtgtgacctcaatgtgtcacctcctttctagtttcctcctttaaaggaaacacatggttagagtgtatctttatggcaaaacttctcagagcttctaatatgcccggtgctgtggaaatctggaaggagaatagcattacctgtgacagttcccaaatctgtttggtcacaaaacttttttccacagaatgtcttgcaagtcgtactggtttttggaaattctgtattagatcttttgaaaggctttttcaagcttaaaaattgtggatcttttttgttactaaggcttttgctttcaaagataaaaatatttgctcttctgtcttgggagcca

SEQ ID NO: 86077 - DNA, 1102 bp, Homo sapiens
aaaaaaaaaaaaaaaaaaaaaaaagtaaaagatgatgatctgtttcatagctatacaacaataatggcactcatacatctggggtcatctaaataataattaaagtggctttcataatatgtaacttttgggttctgcctttttcagaaaatggaaacttgggccatgtgtatttcaaacaaaaataactttagatatatcttttttgtagctttgattgatgctctaagatcacatgagggtagtatttaatatattagatgaaggacaactttggacataacactgactaggagttgagagcttttgcatcaggcagaagcaaactgattatagttgtgttgcaccagatcatgtagctgctgtgtaacatgaccttaaatagtcttcctgcataggaagagcaaaagggtattcatcaataggatatagatttaagacattccctgactaccccttgcgttgttaggtgatgtcttttagcagaatcatgaagaccttttttctcccttaataaaggagaaaaatatactgatggctggagaaatttttctctgcctttcagttttatgaattttttcagaagtaacaatattattattgactttttacttatttgataaaaattaaagaactatttttgttttggtcagataaattgacaagactaatcagtattttattataagtaaaagatttttcttctttccttaaaaatatttttttttcacctaggtctaaatagctaactaactggtagaccagagtattacatcatcttattttggttttataccaataaaacatagcgtggaactcattcaggtaatgttttgcatttcattgcttttggatgaacaaaggaagtaaactaatcctttataaatgaaaacccagaatagttggtatgtcagctagtcattcctgtcatattcccagtagaatgattttcaagtttgaatttctgtacaaatatctaaataagagatgtgcagagagcaccaattttccttcaatatccattctttacttttcacataatgatagaacctttgatttttcaagtgggtatgcctcctagaataaagactacatttcccag

SEQ ID NO: 86078 - DNA, 2829 bp, Homo sapiens
agtggcgcggacgcctgctcagtgcgcgccggccgggcaaccctatgctggcgtaatcgggttcctccgagccgccgtaggactggttccggcgggctggtgaggaatggagccggtaggctgctgcggcgagtgccgcggctcctccgtagacccgcggagcaccttcgtgttgagtaacctggcggaggtggtggagcgtgtgctcaccttcctgcccgccaaggcgttgctgcgggtggcctgcgtgtgccgcttatggagggagtgtgtgcgcagagtattgcggacccatcggagcgtaacctggatctccgcaggcctggcggaggccggccacctggaggggcattgcttggttcgcgtggtagcagaggagcttgagaatgttcgcatcttaccacatacagttctttacatggctgattcagaaactttcattagtctggaagagtgtcgtggccataagagagcaaggaaaagaactagtatggaaacagcacttgcccttgagaagctattccccaaacaatgccaagtccttgggattgtgaccccaggaattgtagtgactccaatgggatcaggtagcaatcgacctcaggaaatagaaattggagaatctggttttgctttattattccctcaaattgaaggaataaaaatacaaccctttcattttattaaggatccaaagaatttaacattagaaagacatcaactcactgaagtaggtcttttagataaccctgaacttcgtgtggtccttgtctttggttataattgctgtaaggtgggagccagtaattatctgcagcaagtagtcagcactttcagtgatatgaatatcatcttggctggaggccaggtggacaacctgtcatcactgacttctgaaaagaaccctctggatattgatgcctcgggtgtggttggactgtcatttagtggacaccgaatccagagtgccactgtgctcctcaacgaggacgtcagtgatgagaagactgctgaggctgcgatgcagcgcctcaaagcggccaacattccagagcataacaccattggcttcatgtttgcatgcgttggcaggggctttcagtattacagagccaaggggaatgttgaggctgatgcatttagaaagttttttcctagtgttcccttattcggcttctttggaaatggagaaattggatgtgatcggatagtcactgggaactttatattgaggaaatgtaatgaggtaaaagatgatgatctgtttcatagctatacaacaataatggcactcatacatctggggtcatctaaataataattaaagtggctttcataatatgtaacttttgggttctgcctttttcagaaaatggaaacttgggccatgtgtatttcaaacaaaaataactttagatatatcttttttgtagctttgattgatgctctaagatcacatgagggtagtatttaatatattagatgaaggacaactttggacataacactgactaggagttgagagcttttgcatcaggcagaagcaaactgattatagttgtgttgcaccagatcatgtagctgctgtgtaacatgaccttaaatagtcttcctgcataggaagagcaaaagggtattcatcaataggatatagatttaagacattccctgactaccccttgcgttgttaggtgatgtcttttagcagaatcatgaagaccttttttctcccttaataaaggagaaaaatatactgatggctggagaaatttttctctgcctttcagttttatgaattttttcagaagtaacaatattattattgactttttacttatttgataaaaattaaagaactatttttgttttggtcagataaattgacaagactaatcagtattttattataagtaaaagatttttcttctttccttaaaaatatttttttttcacctaggtctaaatagctaactaactggtagaccagagtattacatcatcttattttggttttataccaataaaacatagcgtggaactcattcaggtaatgttttgcatttcattgcttttggatgaacaaaggaagtaaactaatcctttataaatgaaaacccagaatagttggtatgtcagctagtcattcctgtcatattcccagtagaatgattttcaagtttgaatttctgtacaaatatctaaataagagatgtgcagagagcaccaattttccttcaatatccattctttacttttcacataatgatagaacctttgatttttcaagtgggtatgcctcctagaataaagactacatttcccagtctcctgtgcaggtatgactgtgttctggacaatggaatgtgaggggaaacgattttttgtgtccttaaaatggcatgaccatttatttgcccctttctccatcctgttgcttggaatgtggatctggtagtgagccatcttggaccctgaagaggaggcaacacaccattgtagaagaaaaacaacagaaggatcctggtccctgtacgacctcattgaagaaacaccataagtggcgtggactatctacctccagactgttttacaagagagaaattagcatattccatctaatacagtatgatgtaactaatgttacttttgtaacagtcagtggtttgttctaacaggacagtagaacacttgcaaggtaagtaaaaccaaatgtattagcattattcctgcttttccttttttgtcacttttatcctttttttaaaactgaaaatatttttctcttgctatttatatatatatgataaaaatgcttggaagagtccttta

SEQ ID NO: 86079 - DNA, 2324 bp, Homo sapiens
agtggcgcggacgcctgctcagtgcgcgccggccgggcaaccctatgctggcgtaatcgggttcctccgagccgccgtaggactggttccggcgggctggtgaggaatggagccggtaggctgctgcggcgagtgccgcggctcctccgtagacccgcggagcaccttcgtgttgagtaacctggcggaggtggtggagcgtgtgctcaccttcctgcccgccaaggcgttgctgcgggtggcctgcgtgtgccgcttatggagggagtgtgtgcgcagagtattgcggacccatcggagcgtaacctggatctccgcaggcctggcggaggccggccacctggaggggcattgcttggttcgcgtggtagcagaggagcttgagaatgttcgcatcttaccacatacagttctttacatggctgattcagaaactttcattagtctggaagagtgtcgtggccataagagagcaaggaaaagaactagtatggaaacagcacttgcccttgagaagctattccccaaacaatgccaagtccttgggattgtgaccccaggaattgtagtgactccaatgggatcaggtagcaatcgacctcaggaaatagaaattggagaatctggttttgctttattattccctcaaattgaaggaataaaaatacaaccctttcattttattaaggatccaaagaatttaacattagaaagacatcaactcactgaagtaggtcttttagataaccctgaacttcgtgtggtccttgtctttggttataattgctgtaaggtgggagccagtaattatctgcagcaagtagtcagcactttcagtgatatgaatatcatcttggctggaggccaggtggacaacctgtcatcactgacttctgaaaagaaccctctggatattgatgcctcgggtgtggttggactgtcatttagtggacaccgaatccagagtgccactgtgctcctcaacgaggacgtcagtgatgagaagactgctgaggctgcgatgcagcgcctcaaagcggccaacattccagagcataacaccattggcttcatgtttgcatgcgttggcaggggctttcagtattacagagccaaggggaatgttgaggctgatgcatttagaaagttttttcctagtgttcccttattcggcttctttggaaatggagaaattggatgtgatcggatagtcactgggaactttatattgaggaaatgtaatgaggtaaaagatgatgatctgtttcatagctatacaacaataatggcactcatacatctggggtcatctaaataataattaaagtggctttcataatatgtaacttttgggttctgcctttttcagaaaatggaaacttgggccatgtgtatttcaaacaaaaataactttagatatatcttttttgtagctttgattgatgctctaagatcacatgagggtagtatttaatatattagatgaaggacaactttggacataacactgactaggagttgagagcttttgcatcaggcagaagcaaactgattatagttgtgttgcaccagatcatgtagctgctgtgtaacatgaccttaaatagtcttcctgcataggaagagcaaaagggtattcatcaataggatatagatttaagacattccctgactaccccttgcgttgttaggtgatgtcttttagcagaatcatgaagaccttttttctcccttaataaaggagaaaaatatactgatggctggagaaatttttctctgcctttcagttttatgaattttttcagaagtaacaatattattattgactttttacttatttgataaaaattaaagaactatttttgttttggtcagataaattgacaagactaatcagtattttattataagtaaaagatttttcttctttccttaaaaatatttttttttcacctaggtctaaatagctaactaactggtagaccagagtattacatcatcttattttggttttataccaataaaacatagcgtggaactcattcaggtaatgttttgcatttcattgcttttggatgaacaaaggaagtaaactaatcctttataaatgaaaacccagaatagttggtatgtcagctagtcattcctgtcatattcccagtagaatgattttcaagtttgaatttctgtacaaatatctaaataagagatgtgcagagagcaccaattttccttcaatatccattctttacttttcacataatgatagaacctttgatttttcaagtgggtatgcctcctagaataaagactacatttcccag

SEQ ID NO: 86080 - DNA, 2711 bp, Homo sapiens
gggaagcttgcctggggacacgccgtgggcatgtcccaggctggcggggtggggggagagacccttgggacccaccagggccgtccccggctcgctcgccctacctgaggtgaccccctacccgcgagcgtgtgccgcttatggagggagtgtgtgcgcagagtattgcggacccatcggagcgtaacctggatctccgcaggcctggcggaggccggccacctggaggggcattgcttggttcgcgtggtagcagaggagcttgagaatgttcgcatcttaccacatacagttctttacatggctgattcagaaactttcattagtctggaagagtgtcgtggccataagagagcaaggaaaagaactagtatggaaacagcacttgcccttgagaagctattccccaaacaatgccaagtccttgggattgtgaccccaggaattgtagtgactccaatgggatcaggtagcaatcgacctcaggaaatagaaattggagaatctggttttgctttattattccctcaaattgaaggaataaaaatacaaccctttcattttattaaggatccaaagaatttaacattagaaagacatcaactcactgaagtaggtcttttagataaccctgaacttcgtgtggtccttgtctttggttataattgctgtaaggtgggagccagtaattatctgcagcaagtagtcagcactttcagtgatatgaatatcatcttggctggaggccaggtggacaacctgtcatcactgacttctgaaaagaaccctctggatattgatgcctcgggtgtggttggactgtcatttagtggacaccgaatccagagtgccactgtgctcctcaacgaggacgtcagtgatgagaagactgctgaggctgcgatgcagcgcctcaaagcggccaacattccagagcataacaccattggcttcatgtttgcatgcgttggcaggggctttcagtattacagagccaaggggaatgttgaggctgatgcatttagaaagttttttcctagtgttcccttattcggcttctttggaaatggagaaattggatgtgatcggatagtcactgggaactttatattgaggaaatgtaatgaggtaaaagatgatgatctgtttcatagctatacaacaataatggcactcatacatctggggtcatctaaataataattaaagtggctttcataatatgtaacttttgggttctgcctttttcagaaaatggaaacttgggccatgtgtatttcaaacaaaaataactttagatatatcttttttgtagctttgattgatgctctaagatcacatgagggtagtatttaatatattagatgaaggacaactttggacataacactgactaggagttgagagcttttgcatcaggcagaagcaaactgattatagttgtgttgcaccagatcatgtagctgctgtgtaacatgaccttaaatagtcttcctgcataggaagagcaaaagggtattcatcaataggatatagatttaagacattccctgactaccccttgcgttgttaggtgatgtcttttagcagaatcatgaagaccttttttctcccttaataaaggagaaaaatatactgatggctggagaaatttttctctgcctttcagttttatgaattttttcagaagtaacaatattattattgactttttacttatttgataaaaattaaagaactatttttgttttggtcagataaattgacaagactaatcagtattttattataagtaaaagatttttcttctttccttaaaaatatttttttttcacctaggtctaaatagctaactaactggtagaccagagtattacatcatcttattttggttttataccaataaaacatagcgtggaactcattcaggtaatgttttgcatttcattgcttttggatgaacaaaggaagtaaactaatcctttataaatgaaaacccagaatagttggtatgtcagctagtcattcctgtcatattcccagtagaatgattttcaagtttgaatttctgtacaaatatctaaataagagatgtgcagagagcaccaattttccttcaatatccattctttacttttcacataatgatagaacctttgatttttcaagtgggtatgcctcctagaataaagactacatttcccagtctcctgtgcaggtatgactgtgttctggacaatggaatgtgaggggaaacgattttttgtgtccttaaaatggcatgaccatttatttgcccctttctccatcctgttgcttggaatgtggatctggtagtgagccatcttggaccctgaagaggaggcaacacaccattgtagaagaaaaacaacagaaggatcctggtccctgtacgacctcattgaagaaacaccataagtggcgtggactatctacctccagactgttttacaagagagaaattagcatattccatctaatacagtatgatgtaactaatgttacttttgtaacagtcagtggtttgttctaacaggacagtagaacacttgcaaggtaagtaaaaccaaatgtattagcattattcctgcttttccttttttgtcacttttatcctttttttaaaactgaaaatatttttctcttgctatttatatatatatgataaaaatgcttggaagagtccttta

SEQ ID NO: 86081 - DNA, 2767 bp, Homo sapiens
agtggcgcggacgcctgctcagtgcgcgccggccgggcaaccctatgctggcgtaatcgggttcctccgagccgccgtaggactggttccggcgggctggtgaggaatggagccggtaggctgctgcggcgagtgccgcggctcctccgtagacccgcggagcaccttcgtgttgagtaacctggcggaggtggtggagcgtgtgctcaccttcctgcccgccaaggcgttgctgcgggtggcctgcgtgtgccgcttatggagggagtgtgtgcgcagagtattgcggacccatcggagcgtaacctggatctccgcaggcctggcggaggccggccacctggaggggcattgcttggttcgcgtggtagcagaggagcttgagaatgttcgcatcttaccacatacagttctttacatggctgattcagaaactttcattagtctggaagagtgtcgtggccataagagagcaaggaaaagaactagtatggaaacagcacttgcccttgagaagctattccccaaacaatgccaagtccttgggattgtgaccccaggaattgtagtgactccaatgggatcaggtagcaatcgacctcaggaaatagaaattggagaatctggttttgctttattattccctcaaattgaaggaataaaaatacaaccgtcttttagataaccctgaacttcgtgtggtccttgtctttggttataattgctgtaaggtgggagccagtaattatctgcagcaagtagtcagcactttcagtgatatgaatatcatcttggctggaggccaggtggacaacctgtcatcactgacttctgaaaagaaccctctggatattgatgcctcgggtgtggttggactgtcatttagtggacaccgaatccagagtgccactgtgctcctcaacgaggacgtcagtgatgagaagactgctgaggctgcgatgcagcgcctcaaagcggccaacattccagagcataacaccattggcttcatgtttgcatgcgttggcaggggctttcagtattacagagccaaggggaatgttgaggctgatgcatttagaaagttttttcctagtgttcccttattcggcttctttggaaatggagaaattggatgtgatcggatagtcactgggaactttatattgaggaaatgtaatgaggtaaaagatgatgatctgtttcatagctatacaacaataatggcactcatacatctggggtcatctaaataataattaaagtggctttcataatatgtaacttttgggttctgcctttttcagaaaatggaaacttgggccatgtgtatttcaaacaaaaataactttagatatatcttttttgtagctttgattgatgctctaagatcacatgagggtagtatttaatatattagatgaaggacaactttggacataacactgactaggagttgagagcttttgcatcaggcagaagcaaactgattatagttgtgttgcaccagatcatgtagctgctgtgtaacatgaccttaaatagtcttcctgcataggaagagcaaaagggtattcatcaataggatatagatttaagacattccctgactaccccttgcgttgttaggtgatgtcttttagcagaatcatgaagaccttttttctcccttaataaaggagaaaaatatactgatggctggagaaatttttctctgcctttcagttttatgaattttttcagaagtaacaatattattattgactttttacttatttgataaaaattaaagaactatttttgttttggtcagataaattgacaagactaatcagtattttattataagtaaaagatttttcttctttccttaaaaatatttttttttcacctaggtctaaatagctaactaactggtagaccagagtattacatcatcttattttggttttataccaataaaacatagcgtggaactcattcaggtaatgttttgcatttcattgcttttggatgaacaaaggaagtaaactaatcctttataaatgaaaacccagaatagttggtatgtcagctagtcattcctgtcatattcccagtagaatgattttcaagtttgaatttctgtacaaatatctaaataagagatgtgcagagagcaccaattttccttcaatatccattctttacttttcacataatgatagaacctttgatttttcaagtgggtatgcctcctagaataaagactacatttcccagtctcctgtgcaggtatgactgtgttctggacaatggaatgtgaggggaaacgattttttgtgtccttaaaatggcatgaccatttatttgcccctttctccatcctgttgcttggaatgtggatctggtagtgagccatcttggaccctgaagaggaggcaacacaccattgtagaagaaaaacaacagaaggatcctggtccctgtacgacctcattgaagaaacaccataagtggcgtggactatctacctccagactgttttacaagagagaaattagcatattccatctaatacagtatgatgtaactaatgttacttttgtaacagtcagtggtttgttctaacaggacagtagaacacttgcaaggtaagtaaaaccaaatgtattagcattattcctgcttttccttttttgtcacttttatcctttttttaaaactgaaaatatttttctcttgctatttatatatatatgataaaaatgcttggaagagtccttta

SEQ ID NO: 86082 - DNA, 2664 bp, Homo sapiens
agtggcgcggacgcctgctcagtgcgcgccggccgggcaaccctatgctggcgtaatcgggttcctccgagccgccgtaggactggttccggcgggctggtgaggaatggagccggtaggctgctgcggcgagtgccgcggctcctccgtagacccgcggagcaccttcgtgttgagtaacctggcggaggtggtggagcgtgtgctcaccttcctgcccgccaaggcgttgctgcgggtggcctgcgtgtgccgcttatggagggagtgtgtgcgcagagtattgcggacccatcggagcgtaacctggatctccgcaggcctggcggaggccggccacctggaggggcattgcttggttcgcgtggtagcagaggagcttgagaatgttcgcatcttaccacatacagttctttacatggctgattcagaaactttcattagtctggaagagtgtcgtggccataagagagcaaggaaaagaactagtatggaaacagcacttgcccttgagaagctattccccaaacaatgccaagtccttgggattgtgaccccaggaattgtaggtcttttagataaccctgaacttcgtgtggtccttgtctttggttataattgctgtaaggtgggagccagtaattatctgcagcaagtagtcagcactttcagtgatatgaatatcatcttggctggaggccaggtggacaacctgtcatcactgacttctgaaaagaaccctctggatattgatgcctcgggtgtggttggactgtcatttagtggacaccgaatccagagtgccactgtgctcctcaacgaggacgtcagtgatgagaagactgctgaggctgcgatgcagcgcctcaaagcggccaacattccagagcataacaccattggcttcatgtttgcatgcgttggcaggggctttcagtattacagagccaaggggaatgttgaggctgatgcatttagaaagttttttcctagtgttcccttattcggcttctttggaaatggagaaattggatgtgatcggatagtcactgggaactttatattgaggaaatgtaatgaggtaaaagatgatgatctgtttcatagctatacaacaataatggcactcatacatctggggtcatctaaataataattaaagtggctttcataatatgtaacttttgggttctgcctttttcagaaaatggaaacttgggccatgtgtatttcaaacaaaaataactttagatatatcttttttgtagctttgattgatgctctaagatcacatgagggtagtatttaatatattagatgaaggacaactttggacataacactgactaggagttgagagcttttgcatcaggcagaagcaaactgattatagttgtgttgcaccagatcatgtagctgctgtgtaacatgaccttaaatagtcttcctgcataggaagagcaaaagggtattcatcaataggatatagatttaagacattccctgactaccccttgcgttgttaggtgatgtcttttagcagaatcatgaagaccttttttctcccttaataaaggagaaaaatatactgatggctggagaaatttttctctgcctttcagttttatgaattttttcagaagtaacaatattattattgactttttacttatttgataaaaattaaagaactatttttgttttggtcagataaattgacaagactaatcagtattttattataagtaaaagatttttcttctttccttaaaaatatttttttttcacctaggtctaaatagctaactaactggtagaccagagtattacatcatcttattttggttttataccaataaaacatagcgtggaactcattcaggtaatgttttgcatttcattgcttttggatgaacaaaggaagtaaactaatcctttataaatgaaaacccagaatagttggtatgtcagctagtcattcctgtcatattcccagtagaatgattttcaagtttgaatttctgtacaaatatctaaataagagatgtgcagagagcaccaattttccttcaatatccattctttacttttcacataatgatagaacctttgatttttcaagtgggtatgcctcctagaataaagactacatttcccagtctcctgtgcaggtatgactgtgttctggacaatggaatgtgaggggaaacgattttttgtgtccttaaaatggcatgaccatttatttgcccctttctccatcctgttgcttggaatgtggatctggtagtgagccatcttggaccctgaagaggaggcaacacaccattgtagaagaaaaacaacagaaggatcctggtccctgtacgacctcattgaagaaacaccataagtggcgtggactatctacctccagactgttttacaagagagaaattagcatattccatctaatacagtatgatgtaactaatgttacttttgtaacagtcagtggtttgttctaacaggacagtagaacacttgcaaggtaagtaaaaccaaatgtattagcattattcctgcttttccttttttgtcacttttatcctttttttaaaactgaaaatatttttctcttgctatttatatatatatgataaaaatgcttggaagagtccttta

SEQ ID NO: 86083 - DNA, 2663 bp, Homo sapiens
agtggcgcggacgcctgctcagtgcgcgccggccgggcaaccctatgctggcgtaatcgggttcctccgagccgccgtaggactggttccggcgggctggtgaggaatggagccggtaggctgctgcggcgagtgccgcggctcctccgtagacccgcggagcaccttcgtgttgagtaacctggcggaggtggtggagcgtgtgctcaccttcctgcccgccaaggcgttgctgcgggtggcctgcgtgtgccgcttatggagggagtgtgtgcgcagagtattgcggacccatcggagcgtaacctggatctccgcaggcctggcggaggccggccacctggaggggcattgcttggttcgcgtggtagcagaggagcttgagaatgttcgcatcttaccacatacagttctttacatggctgattcagaaactttcattagtctggaagagtgtcgtggccataagagagcaaggaaaagaactagtatggaaacagcacttgcccttgagaagctattccccaaacaatgccaagtccttgggattgtgaccccaggaattgtagtgactccaatgggatcaggtagcaatcgacctcaggaaatagaaattggagaatctggttttgctttattattccctcaaattgaaggaataaaaatacaaccctttcattttattaaggatccaaagaatttaacattagaaagacatcaactcactgaagtaggaaccctctggatattgatgcctcgggtgtggttggactgtcatttagtggacaccgaatccagagtgccactgtgctcctcaacgaggacgtcagtgatgagaagactgctgaggctgcgatgcagcgcctcaaagcggccaacattccagagcataacaccattggcttcatgtttgcatgcgttggcaggggctttcagtattacagagccaaggggaatgttgaggctgatgcatttagaaagttttttcctagtgttcccttattcggcttctttggaaatggagaaattggatgtgatcggatagtcactgggaactttatattgaggaaatgtaatgaggtaaaagatgatgatctgtttcatagctatacaacaataatggcactcatacatctggggtcatctaaataataattaaagtggctttcataatatgtaacttttgggttctgcctttttcagaaaatggaaacttgggccatgtgtatttcaaacaaaaataactttagatatatcttttttgtagctttgattgatgctctaagatcacatgagggtagtatttaatatattagatgaaggacaactttggacataacactgactaggagttgagagcttttgcatcaggcagaagcaaactgattatagttgtgttgcaccagatcatgtagctgctgtgtaacatgaccttaaatagtcttcctgcataggaagagcaaaagggtattcatcaataggatatagatttaagacattccctgactaccccttgcgttgttaggtgatgtcttttagcagaatcatgaagaccttttttctcccttaataaaggagaaaaatatactgatggctggagaaatttttctctgcctttcagttttatgaattttttcagaagtaacaatattattattgactttttacttatttgataaaaattaaagaactatttttgttttggtcagataaattgacaagactaatcagtattttattataagtaaaagatttttcttctttccttaaaaatatttttttttcacctaggtctaaatagctaactaactggtagaccagagtattacatcatcttattttggttttataccaataaaacatagcgtggaactcattcaggtaatgttttgcatttcattgcttttggatgaacaaaggaagtaaactaatcctttataaatgaaaacccagaatagttggtatgtcagctagtcattcctgtcatattcccagtagaatgattttcaagtttgaatttctgtacaaatatctaaataagagatgtgcagagagcaccaattttccttcaatatccattctttacttttcacataatgatagaacctttgatttttcaagtgggtatgcctcctagaataaagactacatttcccagtctcctgtgcaggtatgactgtgttctggacaatggaatgtgaggggaaacgattttttgtgtccttaaaatggcatgaccatttatttgcccctttctccatcctgttgcttggaatgtggatctggtagtgagccatcttggaccctgaagaggaggcaacacaccattgtagaagaaaaacaacagaaggatcctggtccctgtacgacctcattgaagaaacaccataagtggcgtggactatctacctccagactgttttacaagagagaaattagcatattccatctaatacagtatgatgtaactaatgttacttttgtaacagtcagtggtttgttctaacaggacagtagaacacttgcaaggtaagtaaaaccaaatgtattagcattattcctgcttttccttttttgtcacttttatcctttttttaaaactgaaaatatttttctcttgctatttatatatatatgataaaaatgcttggaagagtccttta

SEQ ID NO: 86084 - DNA, 1633 bp, Homo sapiens
agtggcgcggacgcctgctcagtgcgcgccggccgggcaaccctatgctggcgtaatcgggttcctccgagccgccgtaggactggttccggcgggctggtgaggaatggagccggtaggctgctgcggcgagtgccgcggctcctccgtagacccgcggagcaccttcgtgttgagtaacctggcggaggtggtggagcgtgtgctcaccttcctgcccgccaaggcgttgctgcgggtggcctgaatgttcgcatcttaccacatacagttctttacatggctgattcagaaactttcattagtctggaagagtgtcgtggccataagagagcaaggaaaagaactagtatggaaacagcacttgcccttgagaagctattccccaaacaatgccaagtccttgggattgtgaccccaggaattgtagtgactccaatgggatcaggtagcaatcgacctcaggaaatagaaattggagaatctggttttgctttattattccctcaaattgaaggaataaaaatacaaccctttcattttattaaggatccaaagaatttaacattagaaagacatcaactcactgaagtaggtcttttagataaccctgaacttcgtgtggtccttgtctttggttataattgctgtaaggtgggagccagtaattatctgcagcaagtagtcagcactttcagtgatatgaatatcatcttggctggaggccaggtggacaacctgtcatcactgacttctgaaaagtctaaatagctaactaactggtagaccagagtattacatcatcttattttggttttataccaataaaacatagcgtggaactcattcaggtaatgttttgcatttcattgcttttggatgaacaaaggaagtaaactaatcctttataaatgaaaacccagaatagttggtatgtcagctagtcattcctgtcatattcccagtagaatgattttcaagtttgaatttctgtacaaatatctaaataagagatgtgcagagagcaccaattttccttcaatatccattctttacttttcacataatgatagaacctttgatttttcaagtgggtatgcctcctagaataaagactacatttcccagtctcctgtgcaggtatgactgtgttctggacaatggaatgtgaggggaaacgattttttgtgtccttaaaatggcatgaccatttatttgcccctttctccatcctgttgcttggaatgtggatctggtagtgagccatcttggaccctgaagaggaggcaacacaccattgtagaagaaaaacaacagaaggatcctggtccctgtacgacctcattgaagaaacaccataagtggcgtggactatctacctccagactgttttacaagagagaaattagcatattccatctaatacagtatgatgtaactaatgttacttttgtaacagtcagtggtttgttctaacaggacagtagaacacttgcaaggtaagtaaaaccaaatgtattagcattattcctgcttttccttttttgtcacttttatcctttttttaaaactgaaaatatttttctcttgctatttatatatatatgataaaaatgcttggaagagtccttta

SEQ ID NO: 86085 - DNA, 349 bp, Homo sapiens
caaggaaaagaactagtatggaaacagcacttgcccttgagaagctattccccaaacaatgccaagtccttgggattgtgaccccaggaattgtaggtgagataaattagcaacttgatgatttcttccttgcattaatgtggggtcctttggattggtgagttatttttagcttagaaccacatttctatttctgtccatctaaaatacaataaagtcagtcatatttaccatggcattatatttgccttatattaatgtttattaagttattgtacttctcatctcaaggttacctgtataaatatccagtagtcattcataagaggggaatgatctcattctgcct

SEQ ID NO: 86086 - DNA, 571 bp, Homo sapiens
agtggcgcggacgcctgctcagtgcgcgccggccgggcaaccctatgctggcgtaatcgggttcctccgagccgccgtaggactggttccggcgggctggtgaggaatggagccggtaggctgctgcggcgagtgccgcggctcctccgtagacccgcggagcaccttcgtgttgagtaacctggcggaggtggtggagcgtgtgctcaccttcctgcccgccaaggcgttgctgcgggtggcctgcgtgtgccgcttatggagggagtgtgtgcgcagagtattgcggacccatcggagcgtaacctggatctccgcaggcctggcggaggccggccacctggaggggcattgcttggttcgcgtggtagcagaggagcttgagactcggttcagattttgccagttgtcccagtaaggttcttcatggcaaaaagatctgttcccaattgcaatttgctctgaatccttgaggaatcaccacactgtcttccacaatggttgaactaatttgcactcctacaaacagtgtgaaagtgttcctgtttctccacatcctctccagcatctg

SEQ ID NO: 86087 - DNA, 2690 bp, Homo sapiens
agtggcgcggacgcctgctcagtgcgcgccggccgggcaaccctatgctggcgtaatcgggttcctccgagccgccgtaggactggttccggcgggctggtgaggaatggagccggtaggctgctgcggcgagtgccgcggctcctccgtagacccgcggagcaccttcgtgttgagtaacctggcggaggtggtggagcgtgtgctcaccttcctgcccgccaaggcgttgctgcgggtggcctgaatgttcgcatcttaccacatacagttctttacatggctgattcagaaactttcattagtctggaagagtgtcgtggccataagagagcaaggaaaagaactagtatggaaacagcacttgcccttgagaagctattccccaaacaatgccaagtccttgggattgtgaccccaggaattgtagtgactccaatgggatcaggtagcaatcgacctcaggaaatagaaattggagaatctggttttgctttattattccctcaaattgaaggaataaaaatacaaccctttcattttattaaggatccaaagaatttaacattagaaagacatcaactcactgaagtaggtcttttagataaccctgaacttcgtgtggtccttgtctttggttataattgctgtaaggtgggagccagtaattatctgcagcaagtagtcagcactttcagtgatatgaatatcatcttggctggaggccaggtggacaacctgtcatcactgacttctgaaaagaaccctctggatattgatgcctcgggtgtggttggactgtcatttagtggacaccgaatccagagtgccactgtgctcctcaacgaggacgtcagtgatgagaagactgctgaggctgcgatgcagcgcctcaaagcggccaacattccagagcataacaccattggcttcatgtttgcatgcgttggcaggggctttcagtattacagagccaaggggaatgttgaggctgatgcatttagaaagttttttcctagtgttcccttattcggcttctttggaaatggagaaattggatgtgatcggatagtcactgggaactttatattgaggaaatgtaatgaggtaaaagatgatgatctgtttcatagctatacaacaataatggcactcatacatctggggtcatctaaataataattaaagtggctttcataatatgtaacttttgggttctgcctttttcagaaaatggaaacttgggccatgtgtatttcaaacaaaaataactttagatatatcttttttgtagctttgattgatgctctaagatcacatgagggtagtatttaatatattagatgaaggacaactttggacataacactgactaggagttgagagcttttgcatcaggcagaagcaaactgattatagttgtgttgcaccagatcatgtagctgctgtgtaacatgaccttaaatagtcttcctgcataggaagagcaaaagggtattcatcaataggatatagatttaagacattccctgactaccccttgcgttgttaggtgatgtcttttagcagaatcatgaagaccttttttctcccttaataaaggagaaaaatatactgatggctggagaaatttttctctgcctttcagttttatgaattttttcagaagtaacaatattattattgactttttacttatttgataaaaattaaagaactatttttgttttggtcagataaattgacaagactaatcagtattttattataagtaaaagatttttcttctttccttaaaaatatttttttttcacctaggtctaaatagctaactaactggtagaccagagtattacatcatcttattttggttttataccaataaaacatagcgtggaactcattcaggtaatgttttgcatttcattgcttttggatgaacaaaggaagtaaactaatcctttataaatgaaaacccagaatagttggtatgtcagctagtcattcctgtcatattcccagtagaatgattttcaagtttgaatttctgtacaaatatctaaataagagatgtgcagagagcaccaattttccttcaatatccattctttacttttcacataatgatagaacctttgatttttcaagtgggtatgcctcctagaataaagactacatttcccagtctcctgtgcaggtatgactgtgttctggacaatggaatgtgaggggaaacgattttttgtgtccttaaaatggcatgaccatttatttgcccctttctccatcctgttgcttggaatgtggatctggtagtgagccatcttggaccctgaagaggaggcaacacaccattgtagaagaaaaacaacagaaggatcctggtccctgtacgacctcattgaagaaacaccataagtggcgtggactatctacctccagactgttttacaagagagaaattagcatattccatctaatacagtatgatgtaactaatgttacttttgtaacagtcagtggtttgttctaacaggacagtagaacacttgcaaggtaagtaaaaccaaatgtattagcattattcctgcttttccttttttgtcacttttatcctttttttaaaactgaaaatatttttctcttgctatttatatatatatgataaaaatgcttggaagagtccttta

SEQ ID NO: 86088 - DNA, 2909 bp, Homo sapiens
agtggcgcggacgcctgctcagtgcgcgccggccgggcaaccctatgctggcgtaatcgggttcctccgagccgccgtaggactggttccggcgggctggtgaggaatggagccggtaggctgctgcggcgagtgccgcggctcctccgtagacccgcggagcaccttcgtgttgagtaacctggcggaggtggtggagcgtgtgctcaccttcctgcccgccaaggcgttgctgcgggtggcctgcgtgtgccgcttatggagggagtgtgtgcgcagagtattgcggacccatcggagcgtaacctggatctccgcaggcctggcggaggccggccacctggaggggcattgcttggttcgcgtggtagcagaggagcttgagactcggttcagattttgccagttgtcccagtaaggttcttcatggcaaaaagatctgttcccaattgcaatttgctctgaaatgttcgcatcttaccacatacagttctttacatggctgattcagaaactttcattagtctggaagagtgtcgtggccataagagagcaaggaaaagaactagtatggaaacagcacttgcccttgagaagctattccccaaacaatgccaagtccttgggattgtgaccccaggaattgtagtgactccaatgggatcaggtagcaatcgacctcaggaaatagaaattggagaatctggttttgctttattattccctcaaattgaaggaataaaaatacaaccctttcattttattaaggatccaaagaatttaacattagaaagacatcaactcactgaagtaggtcttttagataaccctgaacttcgtgtggtccttgtctttggttataattgctgtaaggtgggagccagtaattatctgcagcaagtagtcagcactttcagtgatatgaatatcatcttggctggaggccaggtggacaacctgtcatcactgacttctgaaaagaaccctctggatattgatgcctcgggtgtggttggactgtcatttagtggacaccgaatccagagtgccactgtgctcctcaacgaggacgtcagtgatgagaagactgctgaggctgcgatgcagcgcctcaaagcggccaacattccagagcataacaccattggcttcatgtttgcatgcgttggcaggggctttcagtattacagagccaaggggaatgttgaggctgatgcatttagaaagttttttcctagtgttcccttattcggcttctttggaaatggagaaattggatgtgatcggatagtcactgggaactttatattgaggaaatgtaatgaggtaaaagatgatgatctgtttcatagctatacaacaataatggcactcatacatctggggtcatctaaataataattaaagtggctttcataatatgtaacttttgggttctgcctttttcagaaaatggaaacttgggccatgtgtatttcaaacaaaaataactttagatatatcttttttgtagctttgattgatgctctaagatcacatgagggtagtatttaatatattagatgaaggacaactttggacataacactgactaggagttgagagcttttgcatcaggcagaagcaaactgattatagttgtgttgcaccagatcatgtagctgctgtgtaacatgaccttaaatagtcttcctgcataggaagagcaaaagggtattcatcaataggatatagatttaagacattccctgactaccccttgcgttgttaggtgatgtcttttagcagaatcatgaagaccttttttctcccttaataaaggagaaaaatatactgatggctggagaaatttttctctgcctttcagttttatgaattttttcagaagtaacaatattattattgactttttacttatttgataaaaattaaagaactatttttgttttggtcagataaattgacaagactaatcagtattttattataagtaaaagatttttcttctttccttaaaaatatttttttttcacctaggtctaaatagctaactaactggtagaccagagtattacatcatcttattttggttttataccaataaaacatagcgtggaactcattcaggtaatgttttgcatttcattgcttttggatgaacaaaggaagtaaactaatcctttataaatgaaaacccagaatagttggtatgtcagctagtcattcctgtcatattcccagtagaatgattttcaagtttgaatttctgtacaaatatctaaataagagatgtgcagagagcaccaattttccttcaatatccattctttacttttcacataatgatagaacctttgatttttcaagtgggtatgcctcctagaataaagactacatttcccagtctcctgtgcaggtatgactgtgttctggacaatggaatgtgaggggaaacgattttttgtgtccttaaaatggcatgaccatttatttgcccctttctccatcctgttgcttggaatgtggatctggtagtgagccatcttggaccctgaagaggaggcaacacaccattgtagaagaaaaacaacagaaggatcctggtccctgtacgacctcattgaagaaacaccataagtggcgtggactatctacctccagactgttttacaagagagaaattagcatattccatctaatacagtatgatgtaactaatgttacttttgtaacagtcagtggtttgttctaacaggacagtagaacacttgcaaggtaagtaaaaccaaatgtattagcattattcctgcttttccttttttgtcacttttatcctttttttaaaactgaaaatatttttctcttgctatttatatatatatgataaaaatgcttggaagagtccttta

SEQ ID NO: 86089 - DNA, 2406 bp, Homo sapiens
agcgttctcgaggatccccgtcggatgcaagtgtcgtggccgtaagagagcaaggaaaagaactagtatggaaacagcacttgcccttgagaagctattccccaaacaatgccaagtccttgggattgtgaccccaggaattgtagtgactccaatgggatcaggtagcaatcgacctcaggaaatagaaattggagaatctggttttgctttattattccctcaaattgaaggaataaaaatacaaccctttcattttattaaggatccaaagaatttaacattagaaagacatcaactcactgaagtaggtcttttagataaccctgaacttcgtgtggtccttgtctttggttataattgctgtaaggtgggagccagtaattatctgcagcaagtagtcagcactttcagtgatatgaatatcatcttggctggaggccaggtggacaacctgtcatcactgacttctgaaaagaaccctctggatattgatgcctcgggtgtggttggactgtcatttagtggacaccgaatccagagtgccactgtgctcctcaacgaggacgtcagtgatgagaagactgctgaggctgcgatgcagcgcctcaaagcggccaacattccagagcataacaccattggcttcatgtttgcatgcgttggcaggggctttcagtattacagagccaaggggaatgttgaggctgatgcatttagaaagttttttcctagtgttcccttattcggcttctttggaaatggagaaattggatgtgatcggatagtcactgggaactttatattgaggaaatgtaatgaggtaaaagatgatgatctgtttcatagctatacaacaataatggcactcatacatctggggtcatctaaataataattaaagtggctttcataatatgtaacttttgggttctgcctttttcagaaaatggaaacttgggccatgtgtatttcaaacaaaaataactttagatatatcttttttgtagctttgattgatgctctaagatcacatgagggtagtatttaatatattagatgaaggacaactttggacataacactgactaggagttgagagcttttgcatcaggcagaagcaaactgattatagttgtgttgcaccagatcatgtagctgctgtgtaacatgaccttaaatagtcttcctgcataggaagagcaaaagggtattcatcaataggatatagatttaagacattccctgactaccccttgcgttgttaggtgatgtcttttagcagaatcatgaagaccttttttctcccttaataaaggagaaaaatatactgatggctggagaaatttttctctgcctttcagttttatgaattttttcagaagtaacaatattattattgactttttacttatttgataaaaattaaagaactatttttgttttggtcagataaattgacaagactaatcagtattttattataagtaaaagatttttcttctttccttaaaaatatttttttttcacctaggtctaaatagctaactaactggtagaccagagtattacatcatcttattttggttttataccaataaaacatagcgtggaactcattcaggtaatgttttgcatttcattgcttttggatgaacaaaggaagtaaactaatcctttataaatgaaaacccagaatagttggtatgtcagctagtcattcctgtcatattcccagtagaatgattttcaagtttgaatttctgtacaaatatctaaataagagatgtgcagagagcaccaattttccttcaatatccattctttacttttcacataatgatagaacctttgatttttcaagtgggtatgcctcctagaataaagactacatttcccagtctcctgtgcaggtatgactgtgttctggacaatggaatgtgaggggaaacgattttttgtgtccttaaaatggcatgaccatttatttgcccctttctccatcctgttgcttggaatgtggatctggtagtgagccatcttggaccctgaagaggaggcaacacaccattgtagaagaaaaacaacagaaggatcctggtccctgtacgacctcattgaagaaacaccataagtggcgtggactatctacctccagactgttttacaagagagaaattagcatattccatctaatacagtatgatgtaactaatgttacttttgtaacagtcagtggtttgttctaacaggacagtagaacacttgcaaggtaagtaaaaccaaatgtattagcattattcctgcttttccttttttgtcacttttatcctttttttaaaactgaaaatatttttctcttgctatttatatatatatgataaaaatgcttggaagagtccttta

SEQ ID NO: 86090 - DNA, 2118 bp, Homo sapiens
agtggcgcggacgcctgctcagtgcgcgccggccgggcaaccctatgctggcgtaatcgggttcctccgagccgccgtaggactggttccggcgggctggtgaggaatggagccggtaggctgctgcggcgagtgccgcggctcctccgtagacccgcggagcaccttcgtgttgagtaacctggcggaggtggtggagcgtgtgctcaccttcctgcccgccaaggcgttgctgcgggtggcctgcgtgtgccgcttatggagggagtgtgtgcgcagagtattgcggacccatcggagcgtaacctggatctccgcaggcctggcggaggccggccacctggaggggcattgcttggttcgcgtggtagcagaggagcttgagaatgttcgcatcttaccacatacagttctttacatggctgattcagaaactttcattagtctggaagagtgtcgtggccataagagagcaaggaaaagaactagtatggaaacagcacttgcccttgagaagctattccccaaacaatgccaagtccttgggattgtgaccccaggaattgtagtgactccaatgggatcaggtagcaatcgacctcaggaaatagaaattggagaatctggttttgctttattattccctcaaattgaaggaataaaaatacaaccctttcattttattaaggatccaaagaatttaacattagaaagacatcaactcactgaagtaggtcttttagataaccctgaacttcgtgtggtccttgtctttggttataattgctgtaaggtgggagccagtaattatctgcagcaagtagtcagcactttcagtgatatgaatatcatcttggctggaggccaggtggacaacctgtcatcactgacttctgaaaagaaccctctggatattgatgcctcgggtgtggttggactgtcatttagtggacaccgaatccagagtgccactgtgctcctcaacgaggacgtcagtgatgagaagactgctgaggctgcgatgcagcgcctcaaagcggccaacattccagagcataacaccattggcttcatgtttgcatgcgttggcaggggctttcagtattacagagccaaggggaatgttgaggctgatgcatttagaaagttttttcctagtgttcccttattcggcttctttggaaatggagaaattggatgtgatcggatagtcactgggaactttatattgaggaaatgtaatgaggtctaaatagctaactaactggtagaccagagtattacatcatcttattttggttttataccaataaaacatagcgtggaactcattcaggtaatgttttgcatttcattgcttttggatgaacaaaggaagtaaactaatcctttataaatgaaaacccagaatagttggtatgtcagctagtcattcctgtcatattcccagtagaatgattttcaagtttgaatttctgtacaaatatctaaataagagatgtgcagagagcaccaattttccttcaatatccattctttacttttcacataatgatagaacctttgatttttcaagtgggtatgcctcctagaataaagactacatttcccagtctcctgtgcaggtatgactgtgttctggacaatggaatgtgaggggaaacgattttttgtgtccttaaaatggcatgaccatttatttgcccctttctccatcctgttgcttggaatgtggatctggtagtgagccatcttggaccctgaagaggaggcaacacaccattgtagaagaaaaacaacagaaggatcctggtccctgtacgacctcattgaagaaacaccataagtggcgtggactatctacctccagactgttttacaagagagaaattagcatattccatctaatacagtatgatgtaactaatgttacttttgtaacagtcagtggtttgttctaacaggacagtagaacacttgcaaggtaagtaaaaccaaatgtattagcattattcctgcttttccttttttgtcacttttatcctttttttaaaactgaaaatatttttctcttgctatttatatatatatgataaaaatgcttggaagagtccttta

SEQ ID NO: 86091 - DNA, 1495 bp, Homo sapiens
agtggcgcggacgcctgctcagtgcgcgccggccgggcaaccctatgctggcgtaatcgggttcctccgagccgccgtaggactggttccggcgggctggtgaggaatggagccggtaggctgctgcggcgagtgccgcggctcctccgtagacccgcggagcaccttcgtgttgagtaacctggcggaggtggtggagcgtgtgctcaccttcctgcccgccaaggcgttgctgcgggtggcctgcgtgtgccgcttatggagggagtgtgtgcgcagagtattgcggacccatcggagcgtaacctggatctccgcaggcctggcggaggccggccacctggaggggcattgcttggttcgcgtggtagcagaggagcttgagaatgttcgcatcttaccacatacagttctttacatggctgattcagaaactttcattagtctggaagagtgtcgtggccataagagagcaaggaaaagaactagtatggaaacagcacttgcccttgagaagctattccccaaacaatgccaagtccttgggattgtgaccccaggaattgtagtgactccaatgggatcaggtagcaatcgacctcaggaaatagaaattggagaatctggttttgctttattattccctcaaattgaaggaataaaaatacaaccctttcattttattaaggatccaaagaatttaacattagaaagacatcaactcactgaagtaggtcttttagataaccctgaacttcgtgtggtccttgtctttggttataattgctgtaaggtgggagccagtaattatctgcagcaagtagtcagcactttcagtgatatgaatatcatcttggctggaggccaggtggacaacctgtcatcactgacttctgaaaagtctaaatagctaactaactggtagaccagagtattacatcatcttattttggttttataccaataaaacatagcgtggaactcattcagtctcctgtgcaggtatgactgtgttctggacaatggaatgtgaggggaaacgattttttgtgtccttaaaatggcatgaccatttatttgcccctttctccatcctgttgcttggaatgtggatctggtagtgagccatcttggaccctgaagaggaggcaacacaccattgtagaagaaaaacaacagaaggatcctggtccctgtacgacctcattgaagaaacaccataagtggcgtggactatctacctccagactgttttacaagagagaaattagcatattccatctaatacagtatgatgtaactaatgttacttttgtaacagtcagtggtttgttctaacaggacagtagaacacttgcaaggtaagtaaaaccaaatgtattagcattattcctgcttttccttttttgtcacttttatcctttttttaaaactgaaaatatttttctcttgctatttatatatatatgataaaaatgcttggaagagtccttta

SEQ ID NO: 86092 - DNA, 494 bp, Homo sapiens
ggtattcataaattatatcgtctcttaaagatgccctgttctaactggctgagagagatagtaagttcttatataaaatatttctaaaattcctagataataaataattttaacttacaatattttaaatatgctacactgaaaatattctacttataattttgagaatgtgagttcatataattaggataaatctgtagcaaatgagactaacttaataattccagttattaaggaaacccaaaagccaggtatgatgacgtgtacctataatgctagctacttgggattataggcatgtgtcaccatgcccagctaattttttatttttagtagaggtggggttttgccatgttggccaggctggtcttgaactcctggcctcaagcaatctgcccaccttgggctcccaaagtgctgggattataggcatgagccaacgtgcccagccaattacttttaaatattctaaggctacatggctctagacttac

SEQ ID NO: 86093 - DNA, 352 bp, Homo sapiens
gaaaacaaggccactgggttcaagaagtaataggaaactttgagaaggtgatattcatgaaatgatgggatgagcaaagaattcaagaatgagtggtggccaggcatggtggctcacgtctgtaatcccagcactttgggaggctgaggcggggggatcacctgaggtcaggaattcgagaatagcctggccaacatggtaaaaccccatctctactaaaaatacaaaaattatctagttatggtgggaggctgaggcaggagaatcgcttgaacccaggagtcggaggttacagtgagccaagattgcaccactgcactccagcctgggcgacagagcaagactctgtctc

SEQ ID NO: 86094 - DNA, 195 bp, Homo sapiens
cagggggaggaggacgggaacggatggagttggtttttttttttggagcttctgagacccaagcttcaggccatgctcccccaagcacctccccaccaccaccccccaagatgtagtcttgctctgtttcccaggctggagtgcaatggcgtgatctcagctaaacggaacttctgcctcccgggctcaagcaat

SEQ ID NO: 86095 - DNA, 341 bp, Homo sapiens
atacaaaacatcgcagacaaactacctaagagtaccttgattattccttctgcattgttctcactgttatttatctgaagaaaggggcatcctagacgttatagctatattttcataataaactatctatgctaattatgttgaactagacttatcaggaggatattaacttggggtacttaagaattagttgtggtggctcatgcctgtaatcccaaaacattgagaagcctagcggggtggatcacttgaggtcaggagtttgagaccagcctggccaacatggtgaaaccctgtctctactaaaaacacaaaaattagcgggtgtggtggcatgtgcc

SEQ ID NO: 86096 - DNA, 619 bp, Homo sapiens
cggccgcggcccagagagggtggtgagggcgggggaagccggcgctcgcgctccgccccggcccagggcggctccgcccccgcgcctccgccaccgcccactcacacagtgcagcacgagggcttcctactgcgcaagcgcgagctcgacgctaaccgcaagtcgtccaaccggtgagcgtgtgggcggggctttggaaggcgggtctcaggctcagggtgaccattgcgtggagcggtgggactgaggagggggtgtggctcaacttcaggccctccagcaggtggcggtagtaggtggggccagagctggggggtggtggtggcttaaatcaagaaagccaaccaatgagcaggagggggtgtggtttaacgtcaggccctccaacccgtgggggtagtaggtggggccagatgaggggtggggctcaactttgatgattccaaccaatgaacaggaaggggcaggacctaaggttagtgcatctaatggatgatgggtagagcttaggtgggaacagaaggaaaatgttctgaaagtgagtaaattggaacctaacctcttagcaaccaacccaggagttgatcagctaaatagcaaagagggaggcatctagttg

SEQ ID NO: 86097 - DNA, 2061 bp, Homo sapiens
cggccgcggcccagagagggtggtgagggcgggggaagccggcgctcgcgctccgccccggcccagggcggctccgcccccgcgcctccgccaccgcccactcacacagtgcagcacgagggcttcctactgcgcaagcgcgagctcgacgctaaccgcaagtcgtccaaccggtgagcgtgtgggcggggctttggaaggcgggtctcaggctcagggtgaccattgcgtggagcggtgggactgaggagggggtgtggctcaacttcaggccctccagcaggtggcggtagtaggtggggccagagctggggggtggtggtggcttaaatcaagaaagccaaccaatgagcaggagggggtgtggtttaacgtcaggccctccaacccgtgggggtagtaggtggggccagatgaggggtggggctcaactttgatgattccaaccaatgaacaggaaggggcaggacctaaggttagtgcatctaatggatgatgggtagagcttaggtgggaacagaaggaaaatgttctgaaagtcgtgggtgagcctgtactgtgtgcttagtaagggggaactgggcttctacaaggactccaagggcccggcatccgggagcacacacggtggggaaccgctgctcagcctgcacaaggccaccagcgaggtggctagtgactacaagaaaaagaagcatgtcttcaagctccagacccaggatggcagtgagtttttgctccaggcaaaagatgaggtgagatctggtcctttcctccctctgtgtggacctcagtaatgacctggctgtctggctcctgacccagagtgatggggctgtgagaagggacactcacaggccagagttatcagggctgtaatgggaaagcccacaggcactgagagcccaaaggaggttcctaacccagtggggagtgggaagggcttcagggagggctgcctgcagatcctgatgacaaagtccaacatctttgccgtggtcactcaggaggagatgaacggctggctggaggctgtagcttcctcggtggcggaacacgcagagatcgcccgctggggccagacactacccactacttcatccacagatgagggcaaccctaagagggaaggcggagatcgcagggccagcgggcgcaggaagtgacttcccacccccaggacctgacacatctcgtctcccctcttttccgcactgtgggcacaaagacactttttcttccgcaggggcgggagcccctagttccaacactgaggacgcgtgacatggtgggcaccggaaaggaggggacttctcctgcaccccaagaagtggtggggagattgctgcccctatagccatatctcggccccttcccactcaccacccccaccccaggtgctgggggtcccttatttttatgcaataactgagcttgatgggggtgggcagggggccagttgagccaagcccccagccccgatctgcagatcctgccccaagaagctggggtggtgggggcagtaattcctgcccccctctctgccctagggatgggcacgggggcgctggtgaggtcccctggaccatccagggtgctagggggcagggaggggacaccccctccccgcctttacctcacttccaatgctgccttgatctctgtctgggaggggggagtgaaggggccctagccccctgcactccgccgcctcagagccatgcggttaattcctgacttagtttatttttgcaaaacgtcgatctcctcctcccccgccccgcatccgcgaaggcttttaatgggaggggcgtcaaagctcaaaactgttttcctctctcctcccccctccagttgtaaatgccacttcatgaggggaggggcgaggggaagcccacccctgcatgcttctggctggagcacctccctggggagtcgggggattgggttgtgggcagtccccatggccgcctggagaagccgctggggcccgggggtgtggggcggtgtggcgggcgcacactgtatgtacctataataaaccctttggctttgacggtc

SEQ ID NO: 86098 - DNA, 1650 bp, Homo sapiens
ggagagacaggaattctttattccagacagtagaccaatagactttccttgagaaagctccatgagtggggaggattgagtggagcaaaggcttatggaggagacagcttaagacttaccttcaggaaattcagtatgggaggggataaggaagggaaatctcagcctgggcaaaggcttgatactgagagacttaaatgctcccctcagggcagcaacagccttaaggaagagcattttaggtccaactagggcgcaactagggcgcaaaggtccagaggtaggaaggctcagacatattcagaccttgaggatgttaatgaagagttattaggcagagtgctgcggctctgccttgagccccatcttgtcgctccaggtcgtgggtgagcctgtactgtgtgcttagtaagggggaactgggcttctacaaggactccaagggcccggcatccgggagcacacacggtggggaaccgctgctcagcctgcacaaggccaccagcgaggtggctagtgactacaagaaaaagaagcatgtcttcaagctccagacccaggatggcagtgagtttttgctccaggcaaaagatgaggaggagatgaacggctggctggaggctgtagcttcctcggtggcggaacacgcagagatcgcccgctggggccagacactacccactacttcatccacagatgagggcaaccctaagagggaaggcggagatcgcagggccagcgggcgcaggaagtgacttcccacccccaggacctgacacatctcgtctcccctcttttccgcactgtgggcacaaagacactttttcttccgcaggggcgggagcccctagttccaacactgaggacgcgtgacatggtgggcaccggaaaggaggggacttctcctgcaccccaagaagtggtggggagattgctgcccctatagccatatctcggccccttcccactcaccacccccaccccaggtgctgggggtcccttatttttatgcaataactgagcttgatgggggtgggcagggggccagttgagccaagcccccagccccgatctgcagatcctgccccaagaagctggggtggtgggggcagtaattcctgcccccctctctgccctagggatgggcacgggggcgctggtgaggtcccctggaccatccagggtgctagggggcagggaggggacaccccctccccgcctttacctcacttccaatgctgccttgatctctgtctgggaggggggagtgaaggggccctagccccctgcactccgccgcctcagagccatgcggttaattcctgacttagtttatttttgcaaaacgtcgatctcctcctcccccgccccgcatccgcgaaggcttttaatgggaggggcgtcaaagctcaaaactgttttcctctctcctcccccctccagttgtaaatgccacttcatgaggggaggggcgaggggaagcccacccctgcatgcttctggctggagcacctccctggggagtcgggggattgggttgtgggcagtccccatggccgcctggagaagccgctggggcccgggggtgtggggcggtgtggcgggcgcacactgtatgtacctataataaaccctttggctttgacggtc

SEQ ID NO: 86099 - DNA, 163 bp, Homo sapiens
ccatctgtctacttgtccatccatcagtgaagcagccaaggtggatactgggttccccagaagcagagcctgagacatagatttttgggaaagtgacctattggaggagggctctgaggagaaggacagagggtcaaggcaggggaaggagccaagcaaggct

SEQ ID NO: 86100 - DNA, 520 bp, Homo sapiens
ggagatgcaggatcagacgtagagatggtattgactggagataagtttacaggtaaaagaaaattacaattcagcatgagaacattcttcataagttttacctatggccccaatgataattaggccaactgtatcttgaatgtatatcatatgctgtgtcactcatatttcaaccaatgatcagatgagtcacagtccgatgagtatctttggagcctaaagaaaggctggttagtgctctctttgcatatcctcactttgggtggaaatcatgacctaaggggaagaatttttctttcctccaaatacagtgaaagatagatgtcataaaaaattatggcccttctggttcccctttagatcctcttcctagtaaagtgaaactcagtgactaaaatacacacacacacacacacacacacacacacacacccctaagacaacccactgaattcaagttaatcctttctaccccaaagctataagttgctcagcaagttcagagtcattgggaagccag

SEQ ID NO: 86101 - DNA, 420 bp, Homo sapiens
ggcgagtccgatcggaccaggaagtagctcaggggagcctgacctcgacccgcctttctcctcacacgagctgaggaggcagggaagtaccgagggcagtcaagcctcccctgggggtggttcctgggactagatggagctcagtctctggattctccctctttctcggccctatgcttcctgacagacctggccgccaaaccctgtaatcgccctcctttaacccaagaaagcaagtctttctgccgtttctgagctggcttgagccttaagactaccttaaggaggtacttggataaatagcggtctgaatttctgtaccaggcctcagataagagacaggcagtgaaggggaagttttgtaaaagaaaacgggactagaaaagccgagcaagttgagggctgggcggggtttctttt

SEQ ID NO: 86102 - DNA, 542 bp, Homo sapiens
tagtcacctcgcgaccggcattctggacttctggggacagctgctgcgcattcacatcaggagctagaagatctgggggtcagccgcattggccatcaggaactgatcttggaggcggttgaccttctgtgtgcattgaattatggcttggaaacagaaaatctaaaaaccctttctcacaagttgaatgcatctgccaaaaatctgcagaattttataacaggaaggagaaggagtggccattatgatgggaggaccagccgaaaattgccaaacgactttctgacctcagttgtggatctgattggagcagccaagagtctgcttgcctggttggacaggtcaccatttgctgctgtgacagactattcagttacaagaaataatgtcatacaactctgcctggagttaacaacaattgtgcaacaggattgtactgtatatgaaacagagaataaaattcttcacgtggtgagtatacttggatttattttaatctttattagaggatatttccttgttcaactagaagaggtgaacca

SEQ ID NO: 86103 - DNA, 546 bp, Homo sapiens
tagtcacctcgcgaccggcattctggacttctggggacagctgctgcgcattcacatcaggagctagaagatctgggggtcagccgcattggccatcaggaactgatcttggaggcggttgaccttctgtgtgcattgaattatggcttggaaacagaaaatctaaaaaccctttctcacaagttgaatgcatctgccaaaaatctgcagaattttataacaggaaggagaaggagtggccattatgatgggaggaccagccgaaaattgccaaacgactttctgacctcagttgtggatctgattggagcagccaagagtctgcttgcctggttggacaggtcaccatttgctgctgtgacagactattcagttacaagaaataatgtcatacaactctgcctggagttaacaacaattgtgcaacaggattgtactgtatatgaaacagagaataaaattcttcacgtgtgtaaaactctttctggagtctgtgaccacatcatatccctgtcgtcagatcctctggtttcacagtctgctcac

SEQ ID NO: 86104 - DNA, 491 bp, Homo sapiens
gaagagtagcttctacccacatgcagctgtttaaaatcaaatacaattaaaaatttagttcctcagtcatactagccgcatttcaaatgcttagtagctatatgtgtctatttaaatttaaataaaattaaaaatttattcagctgtactagccacatttcaagggctcagcaatcacaataaacatatagaacatttccaccattgcagaaagttcttttggaaagtgctgctctagacaaactcatggatcatgctagccttgctataagcctcattatcaaagccaaatacattgtgaagatttgactagctatcctgaggttctgtgattctatgtctatttagagttttaatcattgagcttttcttctccacactcttagatgggcaaatactgttttaaagcattcatatttcatatattaaaacatttattttctgctcaaaacattcttatctaaatgggtggtttatatatcttgaaaatg

SEQ ID NO: 86105 - DNA, 537 bp, Homo sapiens
gtgacttaagcgccaacagtttatcatttctcccagttctctgggtcgactgagtttcagctgagtggttcttctgctgctgtcacctgggcttagtgaggtgcctgcattcaactgggagctctgctggcattcaaggtggcttcagacctctatccagtgacttctctcaacagcagggtattcagacttcttatacggtggctggcttccaagagagaagcagcagaagctgccattcctcttaaggcatgaactcagaagaagtccaccacattctatggatcaaagcaagtggcaaggcccgatttaagaagtggggaaatctattaaagtgggagcaacacacatgtacagggaggggagaaattactagagcctcttttgactctttatcacattaactcaccagaaactaagtttcagagaaggaactcccaccaggagggaactactgctgtgatagatcctggccttatgggatcaggatttttaggaactcttactacctccccctaagggcagaattccacagag

SEQ ID NO: 86106 - DNA, 627 bp, Homo sapiens
gtcctctccttttaatttcctaccgctggtctgctagcaggcagctcggcatgtctgttagaattgtgtgttaaggaagagtaagtatgtaatgaggagggactgaaatcctcttataagaataaagtatgtggggctgggcatggtggcccactcctgtaatcccagccctttgggaggccgaggccggcagatcacctgaggtcaggagttcgagaccagcctggccaacatggtgaaaccccctctctaaaaaaaaatacaaaaaaattagccaggcgtggtggcacactcttacaatcccagctactcaggaggctgaggcgggagaattgcttgaacccaggagacggaggttgcagtgggccaaggatcacaccactgcattccagcctgggtgacaagagcgagactccatctcaaataaagaaagaaagaaagaataaaatgtgcggatttcagtgcagggagagtgcagtggctgctctgacctgctggttcttctgcatgctccaggtgagtaagctggtacatttgagtctgggagaggtgtgacatatgcatgggagttatttatggctcaaggtggaagaaaagcaataagccttgttaccggcccttgcagtc

SEQ ID NO: 86107 - DNA, 253 bp, Homo sapiens
tgaaatgaaatgaaataatgaaatgaaatgaaaagatgctatgaattgatgagatgaaatgaaatcatgagatgaaatgatgagatgaaatcatgagatgatgagacgaagtgaaatgatgaaatgatgagatgaaatgatgaaatgaaataatgaaaggatgaaatgatgagatgaaatgatgaaatgatgaaatggaatgaaatgaaatgaaatggtgaaatgaaatgaggaaatgaaatgaagaaatgaa

SEQ ID NO: 86108 - DNA, 615 bp, Homo sapiens
gaggttagcccttcctgtcccctggtgtttgttgtatgtgtctgtggtatggctcagcagatggtgtcatgggatgggaatagaggagtgggtattagataggcagactttctttggtttccatgtatttgagctctacagggtaaagtggtagagtgggtgggttgacagaggaagaacaatgctcaggctggcattccgaggaagaggatacttcccacaatggagtgaggtcaggctcacttttcagagataagttcattcattccttattttcaagctcctaatcaacagttttcctggtggcctagaatttggagatttcatcctctggattttcagttacctttgtttttgcaaacatttcattcatcctaggggctgtgaaaatgataagctttcataagacttattttaattaaggaagcatttctgcattttcccctatgaagaaaaggaaaactgaccgggcatggtggctcatgcttctaatcccagcactttgggaggccaaggcgggcggatgacttgaggtcaggagttcgagaccacgttggccaacatggtgaaaccctgtctctaccaaaaatattaaaaaaaaaaaaaaaaaaaaac

SEQ ID NO: 86109 - DNA, 368 bp, Homo sapiens
tgagacagtctcactgttgccgaggctggagtgcagtgacatgatctcaactcactgcaacctccgcctctgaggttcaagcaattctccctgcctcagcctcccaagtagctgggattacaggcacctgccaccacgccgagctaaatttttatatttttagtagagaagtggttttgccatgttggccatgctggtcttgaactcctgacctcaggttaaaatctataaaattttgttccaaaattaagatgtcacaaaaagatggatttttttataatgtgccagttcaagaaataagcttaatgaaacaatcctacattaaacagtatttacatttagagctaaaattcaaatctatctaaaag

SEQ ID NO: 86110 - DNA, 366 bp, Homo sapiens
tgcttttggctctgcttgcccttcatgggagtcagctccttttctggaagttctatattgtagggaagaagtagacttttaaaaataaaacccttgtggagttgtcagggttcttgggcagtaactgagtcaagatgctgcagaatctgctggcactgtcaggttgcccagaggaccatgagcattgcttcatgcaggcattttgaaaataaaggtccagaaaacacaagctgtttcaggagaagaatggaattccagtgcatctaaagggtggtagagctgatgacctcctgtatagagccaccatggttctcagttagtgaaacagcatatgccatgcatcagctggctgtggtttcatttccc

SEQ ID NO: 86111 - DNA, 206 bp, Homo sapiens
gcgccgtgtttgtccctccgtttggtgatgggcacctgggctgcctctgcctttttgctactgtggatcgagctggtgtgaacacagcggagtggtcgtcgtccgcagtcgagctggtgtgaacacggtggggtggttgtcgtccgcaatcaagctggtgtgaacacggcggggtgctcgtccgtccttgttttcatttctttggg

SEQ ID NO: 86112 - DNA, 335 bp, Homo sapiens
agacaacctgagctatgacctgtaaggatgaatgtataccatatgtgctcatttccagtcactgtccacaatgacccacagacaaaatgggcaggtggatacagacaaagactactatgtgtcctggggtaaaagcacaggagtaaaactggagatcacagcctactctcagctttacactcagaggcccagtgccaactgagacaagccaggaaggtcaacatcaccttcatacttacctcagagaaatgccaggaagagagacgacaatcccggttgaggacttatggaagcaagggcctatatacgcatcttcattttgaagttttcttctg

SEQ ID NO: 86113 - DNA, 323 bp, Homo sapiens
aatgcaatatttataaataaaacataggatatctgggatttgttttgaaattacctgggttggggaagagagaaaacaaaattggctgtgagttgataatccctgaaactggataagggtacatcgagtttattataccagaattttgcaagccaaactaaagcagaatcctagatttttacgattatggcattcaactgtgcacaggtatcttacctagcctaaatttgacagcaactaaaaaaaaaatattctgtccaatctgcactgtaactaagcctttccaacataagtttccacagagactattcttttcttttatt

SEQ ID NO: 86114 - DNA, 3017 bp, Homo sapiens
cgctgccactggttagcgataatactggcagcgcgaccggtttctgagggttgttcaccttgctgctcagacgctccgagaagcttcaggcagcataacacttacagtagagacagggtttcaccatgttagccaggatggtcttgatctcctgacctcgtgatccacctgcctcggcctcccaaagtgctgggattacaggcgtgagccactgcgcctggccgcaatttacttcattgaatctccaacaagagtcctgtgagctgctgactggagacggtgcacgtctggatacgagagcatttccactatgggactggatacaaacacacacccggcagacttcaagagtctcagactgaggagaaagcctttccttctgctgctactgctgctgccgctgcttttgaaagtccactcctttcatggtttttcctgccaaaccagaggcacctttgctgctgccgctgttctctttggtgtcattcagcggctggccagaggatgagactccccaaactcctcactttcttgctttggtacctggcttggctggacctggaattcatctgcactgtgttgggtgcccctgacttgggccagagaccccaggggaccaggccaggattggccaaagcagaggccaaggagaggccccccctggcccggaacgtcttcaggccagggggtcacagctatggtgggggggccaccaatgccaatgccagggcaaagggaggcaccgggcagacaggaggcctgacacagcccaagaaggatgaacccaaaaagctgccccccagaccgggcggccctgaacccaagccaggacaccctccccaaacaaggcaggctacagcccggactgtgaccccaaaaggacagcttcccggaggcaaggcacccccaaaagcaggatctgtccccagctccttcctgctgaagaaggccagggagcccgggcccccacgagagcccaaggagccgtttcgcccaccccccatcacaccccacgagtacatgctctcgctgtacaggacgctgtccgatgctgacagaaagggaggcaacagcagcgtgaagttggaggctggcctggccaacaccatcaccagctttattgacaaagggcaagatgaccgaggtcccgtggtcaggaagcagaggtacgtgtttgacattagtgccctggagaaggatgggctgctgggggccgagctgcggatcttgcggaagaagccctcggacacggccaagccagcggcccccggaggcgggcgggctgcccagctgaagctgtccagctgccccagcggccggcagccggccgccttgctggatgtgcgctccgtgccaggcctggacggatctggctgggaggtgttcgacatctggaagctcttccgaaactttaagaactcggcccagctgtgcctggagctggaggcctgggaacggggcagggccgtggacctccgtggcctgggcttcgaccgcgccgcccggcaggtccacgagaaggccctgttcctggtgtttggccgcaccaagaaacgggacctgttctttaatgagattaaggcccgctctggccaggacgataagaccgtgtatgagtacctgttcagccagcggcgaaaacggcgggccccactggccactcgccagggcaagcgacccagcaagaaccttaaggctcgctgcagtcggaaggcactgcatgtcaacttcaaggacatgggctgggacgactggatcatcgcaccccttgagtacgaggctttccactgcgaggggctgtgcgagttcccattgcgctcccacctggagcccacgaatcatgcagtcatccagaccctgatgaactccatggaccccgagtccacaccacccacctgctgtgtgcccacgcggctgagtcccatcagcatcctcttcattgactctgccaacaacgtggtgtataagcagtatgaggacatggtcgtggagtcgtgtggctgcaggtagcagcactggccctctgtcttcctgggtggcacatcccaagagccccttcctgcactcctggaatcacagaggggtcaggaagctgtggcaggagcatctacacagcttgggtgaaaggggattccaataagcttgctcgctctctgagtgtgacttgggctaaaggcccccttttatccacaagttcccctggctgaggattgctgcccgtctgctgatgtgaccagtggcaggcacaggtccagggagacagactctgaatgggactgagtcccaggaaacagtgctttccgatgagactcagcccaccatttctcctcacctgggccttctcagcctctggactctcctaagcacctctcaggagagccacaggtgccactgcctcctcaaatcacatttgtgcctggtgacttcctgtccctgggacagttgagaagctgactgggcaagagtgggagagaagaggagagggcttggatagagttgaggagtgtgaggctgttagactgttagatttaaatgtatattgatgagataaaaagcaaaactgtgcctaaaaaaaaaaaaaaaaaaaaaaaaaaaaaaaaaaaaaaaacaaaaagaggggcgagcacgcccacgaaaaatcaccagcggagggggccacccacagctatgacagctaccaccatatttttggacagcaagcggggctacccccaataagagggaggctcgatattatctaaagccaagcaaccgaggcgcgcgcctagttatcaacgacgctgccggacgtgggccaaacacgggctcacgcggaggaccattctggtaacacgggaaaaccactaccacttgtggggcggggtgacacacagtcgagcgacaatcaacccccaacgaagatgtgaagcccgcaggagacaactgacaacactgcagccgtcaacgtggcgcacaccaagcgccaatgaccggcgcagacaaattggctacacgagatgcattgacaattttaacag

SEQ ID NO: 86115 - DNA, 2832 bp, Homo sapiens
ctccttcaagccctcagtcagttgtgcaggagaaagggggcggttggctttctcctttcaagaacgagttattttcagctgctgactggagacggtgcacgtctggatacgagagcatttccactatgggactggatacaaacacacacccggcagacttcaagagtctcagactgaggagaaagcctttccttctgctgctactgctgctgccgctgcttttgaaagtccactcctttcatggtttttcctgccaaaccagaggcacctttgctgctgccgctgttctctttggtgtcattcagcggctggccagaggatgagactccccaaactcctcactttcttgctttggtacctggcttggctggacctggaattcatctgcactgtgttgggtgcccctgacttgggccagagaccccaggggaccaggccaggattggccaaagcagaggccaaggagaggccccccctggcccggaacgtcttcaggccagggggtcacagctatggtgggggggccaccaatgccaatgccagggcaaagggaggcaccgggcagacaggaggcctgacacagcccaagaaggatgaacccaaaaagctgccccccagaccgggcggccctgaacccaagccaggacaccctccccaaacaaggcaggctacagcccggactgtgaccccaaaaggacagcttcccggaggcaaggcacccccaaaagcaggatctgtccccagctccttcctgctgaagaaggccagggagcccgggcccccacgagagcccaaggagccgtttcgcccaccccccatcacaccccacgagtacatgctctcgctgtacaggacgctgtccgatgctgacagaaagggaggcaacagcagcgtgaagttggaggctggcctggccaacaccatcaccagctttattgacaaagggcaagatgaccgaggtcccgtggtcaggaagcagaggtacgtgtttgacattagtgccctggagaaggatgggctgctgggggccgagctgcggatcttgcggaagaagccctcggacacggccaagccagcggcccccggaggcgggcgggctgcccagctgaagctgtccagctgccccagcggccggcagccggccgccttgctggatgtgcgctccgtgccaggcctggacggatctggctgggaggtgttcgacatctggaagctcttccgaaactttaagaactcggcccagctgtgcctggagctggaggcctgggaacggggcagggccgtggacctccgtggcctgggcttcgaccgcgccgcccggcaggtccacgagaaggccctgttcctggtgtttggccgcaccaagaaacgggacctgttctttaatgagattaaggcccgctctggccaggacgataagaccgtgtatgagtacctgttcagccagcggcgaaaacggcgggccccactggccactcgccagggcaagcgacccagcaagaaccttaaggctcgctgcagtcggaaggcactgcatgtcaacttcaaggacatgggctgggacgactggatcatcgcaccccttgagtacgaggctttccactgcgaggggctgtgcgagttcccattgcgctcccacctggagcccacgaatcatgcagtcatccagaccctgatgaactccatggaccccgagtccacaccacccacctgctgtgtgcccacgcggctgagtcccatcagcatcctcttcattgactctgccaacaacgtggtgtataagcagtatgaggacatggtcgtggagtcgtgtggctgcaggtagcagcactggccctctgtcttcctgggtggcacatcccaagagccccttcctgcactcctggaatcacagaggggtcaggaagctgtggcaggagcatctacacagcttgggtgaaaggggattccaataagcttgctcgctctctgagtgtgacttgggctaaaggcccccttttatccacaagttcccctggctgaggattgctgcccgtctgctgatgtgaccagtggcaggcacaggtccagggagacagactctgaatgggactgagtcccaggaaacagtgctttccgatgagactcagcccaccatttctcctcacctgggccttctcagcctctggactctcctaagcacctctcaggagagccacaggtgccactgcctcctcaaatcacatttgtgcctggtgacttcctgtccctgggacagttgagaagctgactgggcaagagtgggagagaagaggagagggcttggatagagttgaggagtgtgaggctgttagactgttagatttaaatgtatattgatgagataaaaagcaaaactgtgcctaaaaaaaaaaaaaaaaaaaaaaaaaaaaaaaaaaaaaaaacaaaaagaggggcgagcacgcccacgaaaaatcaccagcggagggggccacccacagctatgacagctaccaccatatttttggacagcaagcggggctacccccaataagagggaggctcgatattatctaaagccaagcaaccgaggcgcgcgcctagttatcaacgacgctgccggacgtgggccaaacacgggctcacgcggaggaccattctggtaacacgggaaaaccactaccacttgtggggcggggtgacacacagtcgagcgacaatcaacccccaacgaagatgtgaagcccgcaggagacaactgacaacactgcagccgtcaacgtggcgcacaccaagcgccaatgaccggcgcagacaaattggctacacgagatgcattgacaattttaacag

SEQ ID NO: 86116 - DNA, 571 bp, Homo sapiens
gagaaacgccttcagcactatttaattactacagaagctaagatgtaataggattcagtttaacttttaacagtctggagagaccagcctacatgctcttttggcaagatcagtagttcttggcatcacccaataccaggcatcagagccttcttgacactgagtgtcagcctcaaagcacgcttggtggactgagagcatggttgggtaggaagatcaaggagcaaggataagaacaaccaggcagaaggaaggcagagattactggaaagaggagaaaggagaaaaggggagaagggaagaggcagcttgatagagaaagaacgggagtggaaacagaggagagagctatgtatggcttgaatgtgtccctccaaggtcatgtgttggaaacttaatcctcaatgcaatgttgagaggtgggacttttaagaggtgattaggtcatgaaggttctgccttcatgaatagattagtgctgttatcatgggagttggctagttgtcttgggagagggttcctgataaaaaagatgagttcagtcctcttccctcttctttctctctccact

SEQ ID NO: 86117 - DNA, 620 bp, Homo sapiens
tatccatgcatttacttaattctttccttcactgctgatttttgatctgaccattatcagatactgctaaggtgtctgcatcgggctttctagtctagtaattgctctgtcacgtgctgcttctcatactgctttaattattaaagcttcaccatacattttagcatatgacaaggaagtcttttctcatcactctcccttttcaacatttcttatgtattgttgcaggtctattcctccagatgatccttagaactgcgtatttcaagataagttctttgaggattataattagatatacagaattcttggaaaaatcagcttctttaaaataatcatttttccttctggggctatgatatttttctggatttatctcagtgaccttgagattctcagttaggttttgtagttatttttatatatgtctctcattttttcttaggttttcaaaataattatttatctccaaataatatttttgtacttctcattccaataatggtatatttcccttgattcactccctgttatatttagttttctatttatttatcatgaattcaatcttaaactctcctgagtttttgcaacttttttttgactctatgcaaacttga

SEQ ID NO: 86118 - DNA, 340 bp, Homo sapiens
aaaacagaaaatcacaagtgttggtgaggaagtggagcagttagaacccttgtacacttggtggaaatgtaaaatgctgcagctgctataaaacaacaccatagtaacgaaataatttacactcaaaatcaccgtatgatccagcaatttcacatcttggtatgttgcaaaagatgtgaaagcgaagacacaaaataatacacgtacacctaagctcatagcagcatgactcacttcactcaaaatgtttttgaattacctgtgttgtttgaattatcgtcaatgaataaatagataaaatgtgatttatacatacagtgggatattattcagttatgaa

SEQ ID NO: 86119 - DNA, 2968 bp, Homo sapiens
agagagcagtggtataggtgtgcagtttccatgatgcaggttccatttttaatatattgttccacttatcctttcttctgagtaaattgctaattgtgccaaatttatgtaatagtttttgtaatgtggaataagaattatgatggaaccattgcacatttttttctgaaacagccagtcaaggcagaacattaatctccaaatgcaagggctgatctatttattcattttggaggttgggtactttattctttctttccgtcatccttttcattgtttcccccggattctaattagtttttattttttttagataactccaatataatcattacagtttatgctttaaatactatgtgctttaaaaaggaaaatgggaccaatttgtctgctaagaatttgattttaggtactataagagtattaggaaaatatatacaactggtgttaatttctagatattttctagaaatcacttgtgttcctatttaataaaaggtaatttagaatactacttgtcctttgcagtagtttagtaatgggcattaagctgtgtcctcgaaggatgtacctattactaggtgcattttagaatgaaatattgatattttattagcatataattgtggccatatatctcagattttctgaggcagatctaattttagataattctgttggtagaccatgtgatccttctttttggttttggaaatataatcattgttaatgttttccctccaaatagaatactgttttatccatacaaatcataacagcatctatcccatgctagggttggaaactgatattggtattacttgtgttttttcttagtgtgttttatttcccagtttcatcttcttttaaaaatgaaaatatggtgccttccctccctccaggaagactggcaaatatttccttttatttactgctgctgtggagtgatgagatatgcactttactctttaagattcagcaaaaagcttttcacttctcagtatatccagaatacatcatatctgggacttaggaaaatttgccaagcaatctttgtttttatagatactaatgttgaccctctccagcgttcaatgttataaatagaacaagtcaagctagtgtttatctcctccccctccccaaaactgtggcacagcatataaaaatgtacctcaataatgttctattaaaaatgggacaggggccttatgttttcataatttcccaacaatgtgccgccatatttttgcctcaaggtaaaggttttaacagatgaaaaagtacttcccaattcccccgtgctattcctaacctataatgcccaaatgttttgtgcaatgtgtagtgtgtgtgtataaatacatatattcttgaaatagacataccatcagagacatcattcacaagtaactgatgtattggcatctcattcatatttctgatgtgtgaggtatatggtactaattaccttttccttgatgtttgccaaatttgaataaaggcattggtacgaaattacagaatgtaaagaaaatgtttttggcttgaaaaattaacatattttatgacgtaccacagtatactctgcccaaaccagcaccctatctatctttcctgttctttacatccctgttccccatccctacttcctcatttttggtataacacagttcttttgtagcatcattataattgcagttctatggcaattggacagttatagcatggaaacagactggtataaatagtacagtagtcaccagtgtgccacatttgcattagtaatgcaaaatatacattttataaaggacaaactttgtgttatgttttattttcattacattgtataatattgtaagactattgtatgtcctaatttgcattataaatgtttttttcctacgtaaaggcataaatatagcaactttgtataaaggtagcttattagatttttaattttttcttttataaaaaattgtccaacagtgggactaccattgccaaattgtatatgaaatatgaattttacccccatggttaatttcttttataaacattccatatttctctaataaaaagacataagtgatactgtactatgcatacattgtatcttaatgctgtttcagatcagcattttaaattttggtttgcatttttaatattggcaaaacgtaaccactgttaattaaaataaaaccttgttgtatatgtaacaacataattttccctctatcccttcccaccctttgttctctatttctccctatcagtgccaacttcatacattttgtagcatggcaataaaatataacttttacactgaggccgagtgtggctttttggaggaagtggggatgggacgattgccctctagttgtcctttgcatatgactgttttttgccatataagccatgtcatcaggcatgaaaagttttctcatatatgatgtaaacttgcttttaaggacaagtgtgaatgtgctttttaagcttaatttttgtcatgacaactaattttttttatctttggagaagtcagagttctttacaatcaaacgtttattaactggagtacttagaataagctagtaattgaatttagttcaagggctaagcaacacatttttaaatccttatttattgtagagtattagtatactgtcctacaaattatgtaaaatatggtttaatattagatgactttggattttgcaatgccttactgttgtcattctagcataaatatccataatgaggtactcaagttgatactggaagctgagctgatcatacactgacctgaagcattcatgaaaagctgctttattgaataaagtctgattggagttcttttcatgctcactttccccttattgctgaaagtagattgcaataaaaccccaataaaacgtttggtcggatatctacttaaaagttttattgtatttatatttcacatact

SEQ ID NO: 86120 - DNA, 255 bp, Homo sapiens
tgccgcccccaaccccttccctgcatctgtggaaaaactgtcttccatgaaaccagtccctggtgccaaaaaggttggagactgctgctctaagccacctgtacgtgagaagcgttttattctaagagtgactgagaataaacaaactcagcatgcaaagaaaacacaaactaatcaggaggaatatcttgggtagaaagtattagttatttcttaaaatctgtaaatctgtaaaatatgtataaatcctgggtc

SEQ ID NO: 86121 - DNA, 176 bp, Homo sapiens
ggcttttacaaggattagaagtaatacatgtaatacaccaggcacatagtatgtacccatgggtaacatcatggcaaccctttattattattaattattattattattttagagacaggtctcaccctctcacccaggctggagtgcagtggtgcaaacacggctcaagtaactcg

SEQ ID NO: 86122 - DNA, 1895 bp, Homo sapiens
gggggacttgaccctgagcaggtagaagccactgaagggatcggagcaggaagtgacctgagcatgtgctgcgtgccatgtggtctccaacaatggctggtgggctgtttgctgtgagtaagaaatattttgaatatctggggtcttatgatacaggaatggaagtttggggaggagaaaacctcgaattttcctttaggatctggcagtgtggtggggttctggaaacacacccatgttcccatgttggccatgttttccccaagcaagctccctactcccgcaacaaggctctggccaacagtgttcgtgcagctgaagtatggatggatgaatttaaagagctctactaccatcgcaacccccgtgcccgcttggaaccttttggggatgtgacagagaggaagcagctccgggacaagctccagtgtaaagacttcaagtggttcttggagactgtgtatccagaactgcatgtgcctgaggacaggcctggcttcttcgggatgctccagaacaaaggactaacagactactgctttgactataaccctcccgatgaaaaccagattgtgggacaccaggtcattctgtacctctgtcatgggatgggccagaatcagtttttcgagtacacgtcccagaaagaaatacgctataacacccaccagcctgagggctgcattgctgtggaagcaggaatggatacccttatcatgcatctctgcgaagaaactgccccagagaatcagaagttcatcttgcaggaggatggatctttatttcacgaacagtccaagaaatgtgtccaggctgcgaggaaggagtcgagtgacagtttcgttccactcttacgagactgcaccaactcggatcatcagaaatggttcttcaaagagcgcatgttatgaagcctcgtgtatcaaggagcccatcgaaggagactgtggagccaggactctgcccaacaaagacttagctaagcagtgaccagaacccaccaaaaactaggctgcattgctttgaagaggcaatcattttgccatttgtgaaagttgtgttggatttagtaaaaatgtgaataagctttgtacttattttgagaactttttaaatgttccaaaataccctattttcaaagggtaatcgtaagatgttaacccttggtatttagaaaattaaaaccttataatatttttctatcaagatgtatattttacagtcgtgccttttactctcattagcaaaaaagataaagattttattttggtatttacaagaattcccaggtacgaagatatctgcatgggtggaaatcaggttcaagcaacgtactttgcattaactgataatacctcagctgcggggttaaagttttcccagtatagagagactgtcactaggaacattgtattgatttattcaggtcattgagatcttctagatgtattttaaaaagaatgctttttggttatgtgttgctaccacagttaacactccataatgttcatgtcagccaaagaggactaaccaaagctgaaatctcagagaacaatttgctttactaagctgagtcaacttgagagcgaacttctaacaatgccgcactgtagtgtggctggttctaccactatgactttaaaacatgtttatatcatttttaatttttatgatacggtagtgtcagggagaaatgtaatgttctatatgaaattcctttttcaagtttgttcattaataacagttattaatttaaatcagcgttagagtttgtgctgctgcaactgctgtgaaaatttctctgagtaattctgatttgtgaatgatcccagaccaaccctgagattttgtcaacctgattaagtcaatatgaatgattaaaaagatgtgagaac

SEQ ID NO: 86123 - DNA, 1215 bp, Homo sapiens
tgtacaagcctggtgctgtgtccccgggacagtcctgagttgctgcgttacacggaagacacttacccctcaataaatatttctgaaatggatggatctttatttcacgaacagtccaagaaatgtgtccaggctgcgaggaaggagtcgagtgacagtttcgttccactcttacgagactgcaccaactcggatcatcagaaatggttcttcaaagagcgcatgttatgaagcctcgtgtatcaaggagcccatcgaaggagactgtggagccaggactctgcccaacaaagacttagctaagcagtgaccagaacccaccaaaaactaggctgcattgctttgaagaggcaatcattttgccatttgtgaaagttgtgttggatttagtaaaaatgtgaataagctttgtacttattttgagaactttttaaatgttccaaaataccctattttcaaagggtaatcgtaagatgttaacccttggtatttagaaaattaaaaccttataatatttttctatcaagatgtatattttacagtcgtgccttttactctcattagcaaaaaagataaagattttattttggtatttacaagaattcccaggtacgaagatatctgcatgggtggaaatcaggttcaagcaacgtactttgcattaactgataatacctcagctgcggggttaaagttttcccagtatagagagactgtcactaggaacattgtattgatttattcaggtcattgagatcttctagatgtattttaaaaagaatgctttttggttatgtgttgctaccacagttaacactccataatgttcatgtcagccaaagaggactaaccaaagctgaaatctcagagaacaatttgctttactaagctgagtcaacttgagagcgaacttctaacaatgccgcactgtagtgtggctggttctaccactatgactttaaaacatgtttatatcatttttaatttttatgatacggtagtgtcagggagaaatgtaatgttctatatgaaattcctttttcaagtttgttcattaataacagttattaatttaaatcagcgttagagtttgtgctgctgcaactgctgtgaaaatttctctgagtaattctgatttgtgaatgatcccagaccaaccctgagattttgtcaacctgattaagtcaatatgaatgattaaaaagatgtgagaac

SEQ ID NO: 86124 - DNA, 2749 bp, Homo sapiens
gcggccgccggtgccggcgaacgcgctgggcgcgcggggcgaggcggtgcggctgcagctgcagggcgaggagctgcggctgcaggaggagagcgtgcggctgcaccagattaacatctacctcagcgaccgcatctcactgcaccgccgcctgcccgtgcgctggaacccgctgtgcaaagagaagaaatatgattatgataatttgcccaggacatctgttatcatagcattttataatgaagcctggtcaactctccttcggacagtttacagtgtccttgagacatccccggatatcctgctagaagaagtgatccttgtagatgactacagtgatagagagcacctgaaggagcgcttggccaatgagctttcgggactgcccaaggtgcgcctgatccgcgccaacaagagagagggcctggtgcgagcccggctgctgggggcgtctgcggcgaggggcgatgttctgaccttcctggactgtcactgtgagtgccacgaagggtggctggagccgctgctgcagaggatccatgaagaggagtcggcagtggtgtgcccggtgattgatgtgatcgactggaacaccttcgaatacctggggaactccggggagccccagatcggcggtttcgactggaggctggtgttcacgtggcacacagttcctgagagggagaggatacggatgcaatcccccgtcgatgtcatcaggtctccaacaatggctggtgggctgtttgctgtgagtaagaaatattttgaatatctggggtcttatgatacaggaatggaagtttggggaggagaaaacctcgaattttcctttaggatctggcagtgtggtggggttctggaaacacacccatgttcccatgttggccatgttttccccaagcaagctccctactcccgcaacaaggctctggccaacagtgttcgtgcagctgaagtatggatggatgaatttaaagagctctactaccatcgcaacccccgtgcccgcttggaaccttttggggatgtgacagagaggaagcagctccgggacaagctccagtgtaaagacttcaagtggttcttggagactgtgtatccagaactgcatgtgcctgaggacaggcctggcttcttcgggatgctccagaacaaaggactaacagactactgctttgactataaccctcccgatgaaaaccagattgtgggacaccaggtcattctgtacctctgtcatgggatgggccagaatcagtttttcgagtacacgtcccagaaagaaatacgctataacacccaccagcctgagggctgcattgctgtggaagcaggaatggatacccttatcatgcatctctgcgaagaaactgccccagagaatcagaagttcatcttgcaggaggatggatctttatttcacgaacagtccaagaaatgtgtccaggctgcgaggaaggagtcgagtgacagtttcgttccactcttacgagactgcaccaactcggatcatcagaaatggttcttcaaagagcgcatgttatgaagcctcgtgtatcaaggagcccatcgaaggagactgtggagccaggactctgcccaacaaagacttagctaagcagtgaccagaacccaccaaaaactaggctgcattgctttgaagaggcaatcattttgccatttgtgaaagttgtgttggatttagtaaaaatgtgaataagctttgtacttattttgagaactttttaaatgttccaaaataccctattttcaaagggtaatcgtaagatgttaacccttggtatttagaaaattaaaaccttataatatttttctatcaagatgtatattttacagtcgtgccttttactctcattagcaaaaaagataaagattttattttggtatttacaagaattcccaggtacgaagatatctgcatgggtggaaatcaggttcaagcaacgtactttgcattaactgataatacctcagctgcggggttaaagttttcccagtatagagagactgtcactaggaacattgtattgatttattcaggtcattgagatcttctagatgtattttaaaaagaatgctttttggttatgtgttgctaccacagttaacactccataatgttcatgtcagccaaagaggactaaccaaagctgaaatctcagagaacaatttgctttactaagctgagtcaacttgagagcgaacttctaacaatgccgcactgtagtgtggctggttctaccactatgactttaaaacatgtttatatcatttttaatttttatgatacggtagtgtcagggagaaatgtaatgttctatatgaaattcctttttcaagtttgttcattaataacagttattaatttaaatcagcgttagagtttgtgctgctgcaactgctgtgaaaatttctctgagtaattctgatttgtgaatgatcccagaccaaccctgagattttgtcaacctgattaagtcaatatgaatgattaaaaagatgtgagaaccaaaaacacacacccacacaccacagcaaccaaccattgttgtgacccgcctcgcggccctggaaggaagtgctagtacacaccattcgtttggagcccggggcacctgtaggatgacgtaacgtggaccacggggtacgagagggacctcgggacggactaggccggagacccaccaataaaacggcgagggaaacgaggcttctgacaactcag

SEQ ID NO: 86125 - DNA, 1880 bp, Homo sapiens
  misc_feature (1758)..(1758): n is a, c, g, or t
gcggccgccggtgccggcgaacgcgctgggcgcgcggggcgaggcggtgcggctgcagctgcagggcgaggagctgcggctgcaggaggagagcgtgcggctgcaccagattaacatctacctcagcgaccgcatctcactgcaccgccgcctgcccgtgcgctggaacccgctgtgcaaagagaagaaatatgattatgataatttgcccaggacatctgttatcatagcattttataatgaagcctggtcaactctccttcggacagtttacagtgtccttgagacatccccggatatcctgctagaagaagtgatccttgtagatgactacagtgatagagagcacctgaaggagcgcttggccaatgagctttcgggactgcccaaggtgcgcctgatccgcgccaacaagagagagggcctggtgcgagcccggctgctgggggcgtctgcggcgaggggcgatgttctgaccttcctggactgtcactgtgagtgccacgaagggtggctggagccgctgctgcagaggatccatgaagaggagtcggcagtggtgtgcccggtgattgatgtgatcgactggaacaccttcgaatacctggggaactccggggagccccagatcggcggtttcgactggaggctggtgttcacgtggcacacagttcctgagagggagaggatacggatgcaatcccccgtcgatgtcatcaggtctccaacaatggctggtgggctgtttgctgtgagtaagaaatattttgaatatctggggtcttatgatacaggaatggaagtttggggaggagaaaacctcgaattttcctttaggatctggcagtgtggtggggttctggaaacacacccatgttcccatgttggccatgttttccccaagcaagctccctactcccgcaacaaggctctggccaacagtgttcgtgcagctgaagtatggatggatgaatttaaagagctctactaccatcgcaacccccgtgcccgcttggaaccttttggggatgtgacagagaggaagcagctccgggacaagctccagtgtaaagacttcaagtggttcttggagactgtgtatccagaactgcatgtgcctgaggacaggcctggcttcttcgggatgctccagaacaaaggactaacagactactgctttgactataaccctcccgatgaaaaccagattgtgggacaccaggtcattctgtacctctgtcatgggatgggccagaatcagtttttcgagtacacgtcccagaaagaaatacgctataacacccaccagcctgagggctgcattgctgtggaagcaggaatggatacccttatcatgcatctctgcgaagaaactgccccagagaatcagaagttcatcttgcaggaggatggatctttatttcacgaacagtccaagaaatgtgtccaggctgcgaggaaggagtcgagtgacagtttcgttccactcttaccaacgagacttgcaccaaaatttccggggaattcccaattccagggaaacaacactgtgggggttttccccttttttcccaaaaaaaaagggggaaaaagggggccctgcgtgcgccccaaaaaatttgtcgtctgcggggcttctatcctagaaaaaacactttttttctctgcggcgggcaacaaaaacaatagataaggccggggggcggccccccacgcacacaccaccatttttttttttcccccgcggggggggaaganatattagacgagggggggcagggggtgttattatctagaacaaacgtgtttttttcttctccccccacaacacacaaacaagcaacaacagcaggggcggggcgggcggcgagggagacaca

SEQ ID NO: 86126 - DNA, 2533 bp, Homo sapiens
gcggccgccggtgccggcgaacgcgctgggcgcgcggggcgaggcggtgcggctgcagctgcagggcgaggagctgcggctgcaggaggagagcgtgcggctgcaccagattaacatctacctcagcgaccgcatctcactgcaccgccgcctgcccgtgcgctggaacccgctgtgcaaagagaagaaatatgattatgataatttgcccaggacatctgttatcatagcattttataatgaagcctggtcaactctccttcggacagtttacagtgtccttgagacatccccggatatcctgctagaagaagtgatccttgtagatgactacagtgatagagagcacctgaaggagcgcttggccaatgagctttcgggactgcccaaggtgcgcctgatccgcgccaacaagagagagggcctggtgcgagcccggctgctgggggcgtctgcggcgaggggcgatgttctgaccttcctggactgtcactgtgagtgccacgaagggtggctggagccgctgctgcagaggatccatgaagaggagtcggcagtggtgtgcccggtgattgatgtgatcgactggaacaccttcgaatacctggggaactccggggagccccagatcggcggtttcgactggaggctggtgttcacgtggcacacagttcctgagagggagaggatacggatgcaatcccccgtcgatgtcatcaggtctccaacaatggctggtgggctgtttgctgtgagtaagaaatattttgaatatctggggtcttatgatacaggaatggaagtttggggaggagaaaacctcgaattttcctttaggatctggcagtgtggtggggttctggaaacacacccatgttcccatgttggccatgttttccccaagcaagctccctactcccgcaacaaggctctggccaacagtgttcgtgcagctgaagtatggatggatgaatttaaagagctctactaccatcgcaacccccgtgcccgcttggaaccttttggggatgtgacagagaggaagcagctccgggacaagctccagtgtaaagacttcaagtggttcttggagactgtgtatccagaactgcatgtgcctgaggacaggcctggcttcttcgggatgctccagaacaaaggactaacagactactgctttgactataaccctcccgatgaaaaccagattgtgggacaccaggtcattctgtacctctgtcatgggatgggccagaatcagtttttcgagtacacgtcccagaaagaaatacgctataacacccaccagcctgagggctgcattgctgtggaagcaggaatggatacccttatcatgcatctctgcgaagaaactgccccagagaatcagaagttcatcttgcaggaggatggatctttatttcacgaacagtccaagaaatgtgtccaggctgcgaggaaggagtcgagtgacagtttcgttccactcttacgagactgcaccaactcggatcatcagaaatggttcttcaaagagcgcatgttatgaagcctcgtgtatcaaggagcccatcgaaggagactgtggagccaggactctgcccaacaaagacttagctaagcagtgaccagaacccaccaaaaactaggctgcattgctttgaagaggcaatcattttgccatttgtgaaagttgtgttggatttagtaaaaatgtgaataagctttgtacttattttgagaactttttaaatgttccaaaataccctattttcaaagggtaatcgtaagatgttaacccttggtatttagaaaattaaaaccttataatatttttctatcaagatgtatattttacagtcgtgccttttactctcattagcaaaaaagataaagattttattttggtatttacaagaattcccaggtacgaagatatctgcatgggtggaaatcaggttcaagcaacgtactttgcattaactgataatacctcagctgcggggttaaagttttcccagtatagagagactgtcactaggaacattgtattgatttattcaggtcattgagatcttctagatgtattttaaaaagaatgctttttggttatgtgttgctaccacagttaacactccataatgttcatgtcagccaaagaggactaaccaaagctgaaatctcagagaacaatttgctttactaagctgagtcaacttgagagcgaacttctaacaatgccgcactgtagtgtggctggttctaccactatgactttaaaacatgtttatatcatttttaatttttatgatacggtagtgtcagggagaaatgtaatgttctatatgaaattcctttttcaagtttgttcattaataacagttattaatttaaatcagcgttagagtttgtgctgctgcaactgctgtgaaaatttctctgagtaattctgatttgtgaatgatcccagaccaaccctgagattttgtcaacctgattaagtcaatatgaatgattaaaaagatgtgagaac

SEQ ID NO: 86127 - DNA, 2513 bp, Homo sapiens
agccttcctactgatgctactctacatggcccgtgaaaaccgtattggaaaactcctagcatttcagtagattttccagttaatgaagtcttacattttaagcatcaaaactttgtgtaaatgttggtgcttttcagtggaaaattaagatttttaataatattttatatggtgttctgccctcataaaaactgaataaacaagaatttggccttctaccgaggactcacgccctctgtaataagtaccagatgctgtgcttggttgtcccatctttgggaaaatgagatattcaaggctgtcagtcccagtgtgagatgggctcagatgccttcgcctgttgagtctttgggtgtgcttttaatggtctctctgcctcttccttaggtgtcaggctgctctacctgtttctagacgctcttcctttcccccttccaaacctcttttcttccttgctgctttcctatcttctgtggctaggagatcaggtaatcaagcctgtgtttactgtaatgagtaagtgggttgccagcgaggtctctgtggatgctcctgtgagtcaagtgcatgagctttagtgcatggactttggggtcttggttcccacagcttatatgttttgggggctgctttcttgctctttacccacattctgtgtcatgagtgtgccgggtaggtggcctcctgcccgatggaggctgagcatcttggcagtgtccatcatgccttgcgtgtgcctggcctctttgctgcagatactatggacccgcagctcatcccctgctcaccacctggcctctccttttctctgtgtgcagatctggcagtgtggtggggttctggaaacacacccatgttcccatgttggccatgttttccccaagcaagctccctactcccgcaacaaggctctggccaacagtgttcgtgcagctgaagtatggatggatgaatttaaagagctctactaccatcgcaacccccgtgcccgcttggaaccttttggggatgtgacagagaggaagcagctccgggacaagctccagtgtaaagacttcaagtggttcttggagactgtgtatccagaactgcatgtgcctgaggacaggcctggcttcttcgggatgctccagaacaaaggactaacagactactgctttgactataaccctcccgatgaaaaccagattgtgggacaccaggtcattctgtacctctgtcatgggatgggccagaatcagtttttcgagtacacgtcccagaaagaaatacgctataacacccaccagcctgagggctgcattgctgtggaagcaggaatggatacccttatcatgcatctctgcgaagaaactgccccagagaatcagaagttcatcttgcaggaggatggatctttatttcacgaacagtccaagaaatgtgtccaggctgcgaggaaggagtcgagtgacagtttcgttccactcttacgagactgcaccaactcggatcatcagaaatggttcttcaaagagcgcatgttatgaagcctcgtgtatcaaggagcccatcgaaggagactgtggagccaggactctgcccaacaaagacttagctaagcagtgaccagaacccaccaaaaactaggctgcattgctttgaagaggcaatcattttgccatttgtgaaagttgtgttggatttagtaaaaatgtgaataagctttgtacttattttgagaactttttaaatgttccaaaataccctattttcaaagggtaatcgtaagatgttaacccttggtatttagaaaattaaaaccttataatatttttctatcaagatgtatattttacagtcgtgccttttactctcattagcaaaaaagataaagattttattttggtatttacaagaattcccaggtacgaagatatctgcatgggtggaaatcaggttcaagcaacgtactttgcattaactgataatacctcagctgcggggttaaagttttcccagtatagagagactgtcactaggaacattgtattgatttattcaggtcattgagatcttctagatgtattttaaaaagaatgctttttggttatgtgttgctaccacagttaacactccataatgttcatgtcagccaaagaggactaaccaaagctgaaatctcagagaacaatttgctttactaagctgagtcaacttgagagcgaacttctaacaatgccgcactgtagtgtggctggttctaccactatgactttaaaacatgtttatatcatttttaatttttatgatacggtagtgtcagggagaaatgtaatgttctatatgaaattcctttttcaagtttgttcattaataacagttattaatttaaatcagcgttagagtttgtgctgctgcaactgctgtgaaaatttctctgagtaattctgatttgtgaatgatcccagaccaaccctgagattttgtcaacctgattaagtcaatatgaatgattaaaaagatgtgagaac

SEQ ID NO: 86128 - DNA, 1168 bp, Homo sapiens
aaggatccctatgccgaagagtacagaagttcatctgcaggaggatggatctttatttcacgaacagtccaagaaatgtgtccaggctgcgaggaaggagtcgagtgacagtttcgttccactcttacgagactgcaccaactcggatcatcagaaatggttcttcaaagagcgcatgttatgaagcctcgtgtatcaaggagcccatcgaaggagactgtggagccaggactctgcccaacaaagacttagctaagcagtgaccagaacccaccaaaaactaggctgcattgctttgaagaggcaatcattttgccatttgtgaaagttgtgttggatttagtaaaaatgtgaataagctttgtacttattttgagaactttttaaatgttccaaaataccctattttcaaagggtaatcgtaagatgttaacccttggtatttagaaaattaaaaccttataatatttttctatcaagatgtatattttacagtcgtgccttttactctcattagcaaaaaagataaagattttattttggtatttacaagaattcccaggtacgaagatatctgcatgggtggaaatcaggttcaagcaacgtactttgcattaactgataatacctcagctgcggggttaaagttttcccagtatagagagactgtcactaggaacattgtattgatttattcaggtcattgagatcttctagatgtattttaaaaagaatgctttttggttatgtgttgctaccacagttaacactccataatgttcatgtcagccaaagaggactaaccaaagctgaaatctcagagaacaatttgctttactaagctgagtcaacttgagagcgaacttctaacaatgccgcactgtagtgtggctggttctaccactatgactttaaaacatgtttatatcatttttaatttttatgatacggtagtgtcagggagaaatgtaatgttctatatgaaattcctttttcaagtttgttcattaataacagttattaatttaaatcagcgttagagtttgtgctgctgcaactgctgtgaaaatttctctgagtaattctgatttgtgaatgatcccagaccaaccctgagattttgtcaacctgattaagtcaatatgaatgattaaaaagatgtgagaac

SEQ ID NO: 86129 - DNA, 493 bp, Homo sapiens
tattaataaaatttctaatttagttgtagctagattcttaaagtactcagcaattatggtggctattttgaaactgtgcattgtttatcaagcttgtttttcatgtaaaaggatctgggcattgatatattttcattatatttgtagttaatagtaaaaatgtttaaatatataagtagctggtgaaatttgtatttggcatgccccaaagccccttttccttcaaaagctttaatcctgacagcatctcttgaaatataaaacaaatttgaagttccctaagaaaaatacatgtttttctttgaggatactactgttgctttgctgccctctacagtcatctaaaatagtcactctagatttttctccattcagatacttagaatactttttccctgacctgtgtatgagctttatatttcaggaatgggttaagtaatatttactgttacggaagtaaagtttagtcacagttaatctatatatgtcatgc

SEQ ID NO: 86130 - DNA, 449 bp, Homo sapiens
tattaataaaatttctaatttagttgtagctagattcttaaagtactcagcaattatggtggctattttgaaactgtgcattgtttatcaagcttgtttttcatgtaaaaggatctgggcattgatatattttcattatatttgtagttaatagtaaaaatgtttaaatgtcctttcattatagactcagattccctactaatttgatttagagataatcattcatggctatacatttaatttaatactaagcctgacaataaactgcctagtttttaaaacctgcttagagataccatacctactttattttaaatgcaaaataaaaaagtccttctccattcctttaattttttggaagagaatcaagtggaagaaggcatatagctaacagttctatacttctctttaagggcacaggactaaaacatgatagcagcatttctcac

SEQ ID NO: 86131 - DNA, 1043 bp, Homo sapiens
tggatgaagagtgagctaggagaacttcgtaaggtgaaactgtggggatccaatgggcaacacaaagcatcttggttaaggaggttaggggccggtctaggacttgcctcaggaggaaggacagcctcagagcatgctcagaggtgggaagggaaggaggagaaagcaggcgaagcggggccatctgctttatctgaagattttcagctgatgaagaactaggaggctcaaacactatcttacctgagtccaggacaagtgacttggagagtgtgctcttctgtggcaggatcaggtctgtctagggcaggatggcccaggatctcagcgagaaggacctgttgaagatggaggtggagcagctgaagaaagaagtgaaaaacacaagaattccgatttccaaagcgggaaaggaaatcaaggagtacgtggaggcccaagcaggaaacgatccttttctcaaaggcatccctgaggacaagaatcccttcaaggagaaaggtggctgtctgataagctgatggcatggagccctgccctgagtgtctgtccctcttcagccaagcccaagtctcctagacccccagggagccagtgaactgtcaccttctcttcatcacagaatgagtaaagatccctgaacaaatgcattgtgaacccattccccactcccaccttcaactcttttctcccattatttcctccacctgctgggtctctgctgaccttgctgggaacactctgaggacagtgtggctggccgagcggttggccccatgggtggtggggtgtgagaagcctgcaataccccaagaccccagagggcagtccttaggaagcacttacaccacctgggaacccctccgtcttttccctctactctcatcctaggaataaagcatttccacgccagagtagtttgggctgggggccagggttgggtggtcctgtccctccatatcatgtcctaccctatggtcctgttcctagtcatttagatcaccccagatggcctgatgacaacaagagtttgtgaagttatg

SEQ ID NO: 86132 - DNA, 803 bp, Homo sapiens
gaggccaagattcggcacgaggcttggagagtgtgctcttctgtggcaggatcaggtctgtctagggcaggatggcccaggatctcagcgagaaggacctgttgaagatggaggtggagcagctgaagaaagaagtgaaaaacacaagaattccgatttccaaagcgggaaaggaaatcaaggagtacgtggaggcccaagcaggaaacgatccttttctcaaaggcatccctgaggacaagaatcccttcaaggagaaaggtggctgtctgataagctgatggcatggagccctgccctgagtgtctgtccctcttcagccaagcccaagtctcctagacccccagggagccagtgaactgtcaccttctcttcatcacagaatgagtaaagatccctgaacaaatgcattgtgaacccattccccactcccaccttcaactcttttctcccattatttcctccacctgctgggtctctgctgaccttgctgggaacactctgaggacagtgtggctggccgagcggttggccccatgggtggtggggtgtgagaagcctgcaataccccaagaccccagagggcagtccttaggaagcacttacaccacctgggaacccctccgtcttttccctctactctcatcctaggaataaagcatttccacgccagagtagtttgggctgggggccagggttgggtggtcctgtccctccatatcatgtcctaccctatggtcctgttcctagtcatttagatcaccccagatggcctgatgacaacaagagtttgtgaagttatg

SEQ ID NO: 86133 - DNA, 649 bp, Homo sapiens
tggatgaagagtgagctaggagaacttcgtaaggtgaaactgtggggatccaatgggcaacacaaagcatcttggttaaggaggttaggggccggtctaggacttgcctcaggaggaaggacagcctcagagcatgctcagaggtgggaagggaaggaggagaaagcaggcgaagcggggccatctgctttatctgaagattttcagctgatgaagaactaggaggctcaaacactatcttacctgagtccaggacaagtgacttggagagtgtgctcttctgtggcaggatcaggtctgtctagggcaggatggcccaggatctcagcgagaaggacctgttgaagatggaggtggagcagctgaagaaagaagtgaaaaacacaagaattccgatttccaaagcgggaaaggaaatcaaggagtacgtggaggcccaagcaggaaacgatccttttctcaaaggcatccctgaggacaagaatcccttcaaggagaaaggtggctgtctgataagctgatggcatggagccctgccctgagtgtctgtccctcttcagccaagcccaagtctcctagacccccagggagccagtgaactgtcaccttctcttcatcacagaatgagtaaagatccctgaacaaatgc

SEQ ID NO: 86134 - DNA, 341 bp, Homo sapiens
agtctctccttaactggttgattccccatatcacaccaaagttatcttcctaaaaacaaatttgatcatcgcattcacttgctttaaaaagtccgcttactctctgatgcctgtagattttcttattcaagaacctttacagtcgagtcctaacacatttcaccaatttcacatctagctactctgtttttacctgtctacattggcttctcactgttccttacaactctgttctttcctccacctagaatatttttttcttagaccaattcctaactatcctttaagaccaactcatacatcatctactcattaaagtcttctgtgacatcctcagttaa

SEQ ID NO: 86135 - DNA, 244 bp, Homo sapiens
cttgtcacctctgcatctttgtcgctgattgctgtctggcatacccctttctctactccccctcccattcgctcatttattactttttgttcagtgaacatttattaagcccctactaccttccaggcattgttcaatgttctgggaatataaaagagaacaagccatttgaagtccttgctctgatataggtgccactctagtaagatgacagccgataaaccaatacatatacgcttttcca

SEQ ID NO: 86136 - DNA, 175 bp, Homo sapiens
agtgtcctggctgccctgtggtgatggggatggcagggacctgcatttttgtgagttcctgcacgtgatgaaggggaaattgcaactgcccaggcagcctgtgcaaaaaggcagtgggtttcaagtgtggtcataaaccaaaagcctcaggttcacacgtcatgggggaggctga

SEQ ID NO: 86137 - DNA, 327 bp, Homo sapiens
catgcccccccctgctctgtggctaccagggagaaagacaagtgttatatgtgcgtgatgtccttcccattggcaaaagaatgcatcttttccatcccttatgtctgctgcagtcagaatgatcaaagatatggagtatttcccaaagaaaatgtctcagtgtccaaagatcgccccttccccatctcccaggaggtggggtgtgcataggcaatgacaggcggacttgctgcttgcaagccttgggttcactttggctaggctgcagttttccttacagcagcaaagatgggtggcagttagtacagagactaagaacacaaactt

SEQ ID NO: 86138 - DNA, 1120 bp, Homo sapiens
gcctatagttaaaaaaaaaaaaagcagttaacagaaaccaatccccctacaatgaaccagattctgtatttacaaagattctaaagcagctctacacgtgcccagtcaagacctttttaatgccattaacactgaggacattgagctgagacactagattgagaatcacattcccaggggtcagcaaacgacctataaagggcccagataagtattttaggttgtgtgggccacatgcagtttttgtttcatatttttgcttgttttttttttttttttaaacaactctttaaaaatataaaagccattcctggctttaagtgctgtacaaaaacaggccatcaacacatgtggcttgtgagccagaggttgccagtccctcccctagaataaggactactccaggcccgccttaacaacgtctaaagcaaaaccctgacccgatccacaagacggtcagagtttggaggttaagtcctgccaagtaagaggggcctgggagacacctgggacattgctcagtaaacagagcctaaagctaagcctacacagcccagcatggtacgtccagtaatggaactacaaactagaacgaaagtcaggatttttcagtggaagagcaccctgagtctccctcatttgttatttatcagtgttgaatatacactaaaaaaacaaaaatcactaaacatacaaagaaagaggaaaacgtaagccatagttaagaaaaaaaaaaagcagttaacagaaaccaatccccctacaatgaaccagattctgtatttacaaagattctaaagcagctctacatatgtccaaaggaggctgggcacggtggctcacacctgtaatcccagaaatttgggaggccgaggtgggcagatcacttgagcccaggagtttgagatcagcctggccaacatggtgaaaccccatctctactaaaaacacaaaaattagctgggtgtggtggcgcacgcctgtagccccagctactcggaaagctgaagcaggagaatcgcttgaatccgggaggtggaggttacagtgagccaagatagtgccactgcactccagcctgggtgacagagcaagactccatctcaaaataaataaaaat

SEQ ID NO: 86139 - DNA, 1463 bp, Homo sapiens
  misc_feature (1252)..(1252): n is a, c, g, or t
  misc_feature (1270)..(1270): n is a, c, g, or t
  misc_feature (1275)..(1275): n is a, c, g, or t
  misc_feature (1301)..(1301): n is a, c, g, or t
  misc_feature (1463)..(1463): n is a, c, g, or t
attccctcggcgggccgagcctcccctctctcccgcccctcctcctccctttcccacccctcggagtagagctgcacatgcggctgctccctgctccgtcccgcccagccactgtcgcgcaggaacgggtccctgcagcccccagccgatggcaggacagtagccgcctgtcagaggtcgtgaacggctgaggcagacgcagcggctcccgggcctcaagagagtggatgtctccggaggccatgggctacccggaggtggagcgcagggaactcctgcctgcagcagcgccgcgggagcgagggagccagggctgcgggtgtggcggggcccctgcccgggcgggcgaagggaacagctgcctgctcttcctgggtttctttggcctctcgctggccctccacctgctgacgttgtgctgctacctagagttgcgctcggagttgcggcgggaacgtggagccgagtcccgccttggcggctcgggcacccctggcacctctggcaccctaagcagcctcggtggcctcgaccctgacagccccatcaccagtcaccttgggcagccgtcacctaagcagcagccattggaaccgggagaagccgcactccactctgactcccaggacgggcaccagctccatgtttctttttcactgagaaaaaagaaagcaggacaccaatgagttgtgtcttccctctgtccactctcagcaccttcactctgaagatctgttaaaagcacacgagtcgtctcagtccctcagtgggagctgtttcacctggcgtcatctagtcagccatcttcaataataactgttaaatgaacatttatatccactgaaaccactaagtgaaataaagatgtgtttaggcaaagaactgagtttatgacttatagatcctcaccaaggaaacttccaaaagatgtacttcacagaagaagaaaatgatcccagaaggaaaatttgagatgtaagacagaagaacaagcaaagattgtttaaacatatggccctattgaatttcttcttccctgatgaaaagccatactctgaagaagaaagtaggcgtgttcgccgcaataaaagaagcaaaagcaatgaaggagcagatggtaagtctactcagttgatcctttatcacttctgaattatttgttagtaaaagtatccttttaagaactaccttcttggtagggcatggtggctcacgcctgtaatcctagcactttgggaggcccacgcgggcngatcacttgaggtgaggnattcnaaaccagcctggccaacatggtgaanccctgtctctactaaaaatacaaaaaaaattagccgggcctagtcccagctgcttgggagactaaggcaggagaatcgcttgaaactgggaggtagaggttgcagtgagctgagactgtgccactgcactccagcctgggtgacagtgcgagactccatctn

SEQ ID NO: 86140 - DNA, 840 bp, Homo sapiens
attccctcggcgggccgagcctcccctctctcccgcccctcctcctccctttcccacccctcggagtagagctgcacatgcggctgctccctgctccgtcccgcccagccactgtcgcgcaggaacgggtccctgcagcccccagccgatggcaggacagtagccgcctgtcagaggtcgtgaacggctgaggcagacgcagcggctcccgggcctcaagagagtggatgtctccggaggccatgggctacccggaggtggagcgcagggaactcctgcctgcagcagcgccgcgggagcgagggagccagggctgcgggtgtggcggggcccctgcccgggcgggcgaagggaacagctgcctgctcttcctgggtttctttggcctctcgctggccctccacctgctgacgttgtgctgctacctagagttgcgctcggagttgcggcgggaacgtggagccgagtcccgccttggcggctcgggcacccctggcacctctggcaccctaagcagcctcggtggcctcgaccctgacagccccatcaccagtcaccttgggcagccgtcacctaagcagcagccattggaaccgggagaagccgcactccactctgactcccaggacgggcaccagggacaccaatgagttgtgtcttccctctgtccactctcagcaccttcactctgaagatctgttaaaagcacacgagtcgtctcagtccctcagtgggagctgtttcacctggcgtcatctagtcagccatcttcaataataactgttaaatgaacatttatatccactgaaaccactaagtgaaataaagatgtgtttaggc

SEQ ID NO: 86141 - DNA, 924 bp, Homo sapiens
  misc_feature (713)..(713): n is a, c, g, or t
  misc_feature (731)..(731): n is a, c, g, or t
  misc_feature (736)..(736): n is a, c, g, or t
  misc_feature (762)..(762): n is a, c, g, or t
  misc_feature (924)..(924): n is a, c, g, or t
taaggctcttcgatcaagaacataactaggaatcattcgaggtgattcaaggactttgactacatcatttcattctcttatggcctacaaggtttctgctgagaaatccactgatattctaatggatattcctttggacaccaatgagttgtgtcttccctctgtccactctcagcaccttcactctgaagatctgttaaaagcacacgagtcgtctcagtccctcagtgggagctgtttcacctggcgtcatctagtcagccatcttcaataataactgttaaatgaacatttatatccactgaaaccactaagtgaaataaagatgtgtttaggcaaagaactgagtttatgacttatagatcctcaccaaggaaacttccaaaagatgtacttcacagaagaagaaaatgatcccagaaggaaaatttgagatgtaagacagaagaacaagcaaagattgtttaaacatatggccctattgaatttcttcttccctgatgaaaagccatactctgaagaagaaagtaggcgtgttcgccgcaataaaagaagcaaaagcaatgaaggagcagatggtaagtctactcagttgatcctttatcacttctgaattatttgttagtaaaagtatccttttaagaactaccttcttggtagggcatggtggctcacgcctgtaatcctagcactttgggaggcccacgcgggcngatcacttgaggtgaggnattcnaaaccagcctggccaacatggtgaanccctgtctctactaaaaatacaaaaaaaattagccgggcctagtcccagctgcttgggagactaaggcaggagaatcgcttgaaactgggaggtagaggttgcagtgagctgagactgtgccactgcactccagcctgggtgacagtgcgagactccatctn

SEQ ID NO: 86142 - DNA, 1427 bp, Homo sapiens
  misc_feature (1216)..(1216): n is a, c, g, or t
  misc_feature (1234)..(1234): n is a, c, g, or t
  misc_feature (1239)..(1239): n is a, c, g, or t
  misc_feature (1265)..(1265): n is a, c, g, or t
  misc_feature (1427)..(1427): n is a, c, g, or t
attccctcggcgggccgagcctcccctctctcccgcccctcctcctccctttcccacccctcggagtagagctgcacatgcggctgctccctgctccgtcccgcccagccactgtcgcgcaggaacgggtccctgcagcccccagccgatggcaggacagtagccgcctgtcagaggtcgtgaacggctgaggcagacgcagcggctcccgggcctcaagagagtggatgtctccggaggccatgggctacccggaggtggagcgcagggaactcctgcctgcagcagcgccgcgggagcgagggagccagggctgcgggtgtggcggggcccctgcccgggcgggcgaagggaacagctgcctgctcttcctgggtttctttggcctctcgctggccctccacctgctgacgttgtgctgctacctagagttgcgctcggagttgcggcgggaacgtggagccgagtcccgccttggcggctcgggcacccctggcacctctggcaccctaagcagcctcggtggcctcgaccctgacagccccatcaccagtcaccttgggcagccgtcacctaagcagcagccattggaaccgggagaagccgcactccactctgactcccaggacgggcaccagggacaccaatgagttgtgtcttccctctgtccactctcagcaccttcactctgaagatctgttaaaagcacacgagtcgtctcagtccctcagtgggagctgtttcacctggcgtcatctagtcagccatcttcaataataactgttaaatgaacatttatatccactgaaaccactaagtgaaataaagatgtgtttaggcaaagaactgagtttatgacttatagatcctcaccaaggaaacttccaaaagatgtacttcacagaagaagaaaatgatcccagaaggaaaatttgagatgtaagacagaagaacaagcaaagattgtttaaacatatggccctattgaatttcttcttccctgatgaaaagccatactctgaagaagaaagtaggcgtgttcgccgcaataaaagaagcaaaagcaatgaaggagcagatggtaagtctactcagttgatcctttatcacttctgaattatttgttagtaaaagtatccttttaagaactaccttcttggtagggcatggtggctcacgcctgtaatcctagcactttgggaggcccacgcgggcngatcacttgaggtgaggnattcnaaaccagcctggccaacatggtgaanccctgtctctactaaaaatacaaaaaaaattagccgggcctagtcccagctgcttgggagactaaggcaggagaatcgcttgaaactgggaggtagaggttgcagtgagctgagactgtgccactgcactccagcctgggtgacagtgcgagactccatctn

SEQ ID NO: 86143 - DNA, 926 bp, Homo sapiens
attccctcggcgggccgagcctcccctctctcccgcccctcctcctccctttcccacccctcggagtagagctgcacatgcggctgctccctgctccgtcccgcccagccactgtcgcgcaggaacgggtccctgcagcccccagccgatggcaggacagtagccgcctgtcagaggtcgtgaacggctgaggcagacgcagcggctcccgggcctcaagagagtggatgtctccggaggccatgggctacccggaggtggagcgcagggaactcctgcctgcagcagcgccgcgggagcgagggagccagggctgcgggtgtggcggggcccctgcccgggcgggcgaagggaacagctgcctgctcttcctgggtttctttggcctctcgctggccctccacctgctgacgttgtgctgctacctagagttgcgctcggagttgcggcgggaacgtggagccgagtcccgccttggcggctcgggcacccctggcacctctggcaccctaagcagcctcggtggcctcgaccctgacagccccatcaccagtcaccttgggcagccgtcacctaagcagcagccattggaaccgggagaagccgcactccactctgactcccaggacgggcaccagaggactttgactacatcatttcattctcttatggcctacaaggtttctgctgagaaatccactgatattctaatggatattcctttggacaccaatgagttgtgtcttccctctgtccactctcagcaccttcactctgaagatctgttaaaagcacacgagtcgtctcagtccctcagtgggagctgtttcacctggcgtcatctagtcagccatcttcaataataactgttaaatgaacatttatatccactgaaaccactaagtgaaataaagatgtgtttaggc

SEQ ID NO: 86144 - DNA, 485 bp, Homo sapiens
aggtactccggaggctgaggtgggagagtcacttgaacccaggagggagaggttgcagtgagctaacaccactgcactccagcctgggcaacagagtgagattctgaagaaaagaaaagaaaagaaaagagggaaagaaagagagaaagaaggaaagagagagagaaagagaaggaagagagagacagagaaagaaggaaggaaaaaggcataccatgggcgggaagccaagtgatagcttttcatgactggactgtcaaagttcaagacgagtgactggagaaggtaactggacataaaccagacttagaggatggaatagcaattatgaattgggagacaaggcaaatgttgacaattttaggcatcaggtagtaaaactgtcctcattcttttgaaaattaacctcgctgggcacagtggctcatgcctgtaatcccagcactttgggaggctgaggcaggtggaccacttgaagtcaggag

SEQ ID NO: 86145 - DNA, 634 bp, Homo sapiens
aaagaggtcagggtgtggcgatttttgccaatgactgcgatttccagaaggcacagcagaaggtttcccacagccttatgggaattactgtgcaggagaggaagggagcccagggtttcatatggtggctgacattctcaggggtaacagccataatgacattagtcctgaatgcctttaggcagaaagtggtgagaattctttgaataatattaggcagatcaggtggtggtcttgccagaagtgggcaaaaattctgaggatctcttttggcccctgataatgaatgcagtatcatgctagaaatctctgtatcggtattgtgcacagctgaattgttacctacttgtgtgtgccttgattttccagaaagactgtgaggtctcctatcactgtatcattgtgttttttgcattgtactttcttgctctacatgactatcatacgtgttatggattgaactgtctccactccccaaattcatatgcctcaatcctcagtacctcaccatgtgaccttatttgaagatagggttttttcaccttacttggagagaggataatcaagttaaagtgaggtcatgtgggtgggccctaatccaacatgactggtatccttatgtttaaaaaaaaaa

SEQ ID NO: 86146 - DNA, 246 bp, Homo sapiens
cagcatttcttcccatctctctgctcacacggcccccttgttcttgcatgctgtctactttttccattagagcctttggcctaccaatcattttcaatttcctgtatgataattgccatccatgttatctccatgttcctgcaaccattcagttgtctctctcagcctctggtgagattgttgttagaccttcttctgttctgcattcctaacactctcttgcatgtttctcatctccttttctcc

SEQ ID NO: 86147 - DNA, 226 bp, Homo sapiens
cttagtgggtagaggggagaggacagaactaagtggtagaaattttaacatgttgattagaagtcccttaactttcctaacccatttctttccaccctgtcacgaaaaatttggtgtggtagtgggaggccttaggcaagctattgactgttttctcaggaattgagggtgtgggagttttgatctttagggttcttggtcgatctgtaggcttaaaatcagcttg

SEQ ID NO: 86148 - DNA, 440 bp, Homo sapiens
gaacaaatgctgtgcctgttgatgcagatggagacaagtgcaggatagtttaccaccatagccacggcaactggatttccaggacggtgaactgttcttggtagtgtttcaaacaaaagaagtacagccttacctgccttacacagtagttacgttccaagaaaattctgtatattatgaaaaagtacatttgtgcttatgtgtaaaacaggctatagcctcggataattagtaaagggttttggcccatgagaatgtctggcaggacatcagagtggcatgcagatgcagggcaatccttggttgtacaggaccgctagcatccctggtcccccacacttagtgcctgtaaagtccgctagtctctgtgaccaccagaaaataccttcatcgatttctcaagcattccctggggagctgtgctctccctacggatacca

SEQ ID NO: 86149 - DNA, 800 bp, Homo sapiens
ctcatgggagccttctcagcacatatattccttgggaacctcacgggaccaaactgcttggattcaactcccatttcctaatcagttgtgtggccttgggcaaattacttaacctctcggtgcctcagttttctcatcagtaaaatgggcgtaaggtcattgtcttaataaatttacacacgtacagcactttgggccacagttggttcatggctagcactaaactaatgttagctgtcgccactcccacctaaggccagtccctccaggaacctgacacttttggtgttccatctcttcttctcaaccatattcctgtcatggtgggtagcacccctgttcatccagttgagccagccacaagcctagaggtcaccccactccccatccccacaaaccgtcatcaagtctcatcaaccttattaacttccttaaaaacttccagatctgttcccctctgtcctactctacaacttctccccagagctagcccagtagcccccaagtacaaccatcccagccactacccatttccaccctgcggccagagtcctgctttgaaatgcagacctgatcttgtcacccctccctggactcgccctgctgaaatctcttaatgactttccactcctcttggggtgaaaatcaaaaccctaacaccatgcagactgagtctgttagaatatttttgaccctgaggatcagaaaccctagcaaaccagatttaaattacaggcagtttattagcttcctcacaggtagactggatagggtgggcttcaggcattgtatgattaagg

SEQ ID NO: 86150 - DNA, 408 bp, Homo sapiens
cacacagcccgggtccacttgcatgttgtaatcaaaggtgagctcctcgcctgcccggatggttcttgtggcaaagaaagcgatgcgacgcagccgctcgtcaaggttgtctatgatgaccttttacaccagcacgtggagcacaccctgtcagagaccgaacaggaagaactcgtcacagagcaaagatcctcccctttgcactgcgttcaagggagcgcaggtggccaggaaaccctgctcagcagctctgcgcccagtgcccccgccctccctccagcacctccccggcagcaggcctgcgttgggggtctgtgtgttttggagatgggggtctcatttttttgcccggggggagcgcagtggtactgcgcaggggtgacaggcacacacagccaagcctgatgc

SEQ ID NO: 86151 - DNA, 245 bp, Homo sapiens
ctctgaaggattgggtgcacttggggtgttgagggggcttgggtggagaaagaagggggcccccattttgggtctgtgccattcacccaggggaaaatgggtgtgacaaatggaagatgcaaggaggatgacgatggtgacaatgacagtgatgatgatgatgacgcggcatgattcctgagcgggccctaccctttccaccgcctttcctgcctcccattcctagtcccccacccatcacatgg

SEQ ID NO: 86152 - DNA, 166 bp, Homo sapiens
actaggatttgtataggctttgagagaggagaaagcatggtctattcagatatccgaaatggagagaacaagggaaagagtggcaaaaaatgtgacctgaaaggttagagcatggctaaaatacgcagggtcttgtatacaaggttaaggattttgacctaagggt

SEQ ID NO: 86153 - DNA, 304 bp, Homo sapiens
aagtgatttgcctcccttggcctcccaaagtgctgggattacaggtgtgagccaccatacccagctgaaatctccaaacttggaagcatatttttgtcatagatttttcacaatacaggcagtgatttgatgagtattgctcattggcttgtcatattgtccactggatggggtcagtagggcctctgattaattaggtttaagtttctcagagccccttctttttgtttttcttgactgattaaataacacctctatctaaatctctttacagcccacatatatatctatatggacacataga

SEQ ID NO: 86154 - DNA, 168 bp, Homo sapiens
  misc_feature (1)..(3): n is a, c, g, or t
  misc_feature (5)..(8): n is a, c, g, or t
  misc_feature (150)..(150): n is a, c, g, or t
  misc_feature (155)..(156): n is a, c, g, or t
  misc_feature (158)..(159): n is a, c, g, or t
  misc_feature (161)..(161): n is a, c, g, or t
  misc_feature (167)..(167): n is a, c, g, or t
nnntnnnnagaaaaaagaaagaaaggaaagaaggaaagaaagaaaagaaagaaagaaagaaaaagaaaagaaagaaagaaagaaagaaaaagaaaaagaaagaaagaaagaaagaaagaaagaaagaaagaaagaaagaaagaaagaaanaaagnnannangaaagnc

SEQ ID NO: 86155 - DNA, 2396 bp, Homo sapiens
gccacaaacagagatttacccacgtatttattaacagcaagccagtcattagcattgtttctatagatattaaattaactaaaagtatcccttatgggaaacgaagggatgggccgaattaaaggaataggttgggctagttaactgcagcaggagcatgtccttaaggcacagatcactcatgctattgtttgtggtttaagaatgcctttaagcggttttccaccccgggcaggccaggtgttctttgccctcattccagtaaacccacaaccttccagtatgggtgttagggccattatgaacatgttacagtgctgcagagattttatttatggccagtttatggccagattttggggggcctgctcccaacactctacatatgctccatcttgcagaggcttcattcttggttctctagctaaaaacagtagaaattttgcacacctgggttagaaaaaaaaaatagccattaaacccacccctgttacaggtcactattggtattttgattttgccttcaatccatctgttattgtttacttttaagagtccttgatagttgctttttatgtccagagttttaatttcagtcagaaagagaaataggccttggtgagcatgctttgtcttggctggtgccagaagtctgtactcaaatatttttaaaataatttttagttgaataacaagttagacctgtgtttagctttctcattgttttcctaaaaatagaagaaaaggttttaaatactttaaccacgaaatactttaaagcaggtttaaaataaactccttcattttgcctgttctattactctgttctcacactgctaataaagacatacccaagactggtaatttataaagtaaagaggtttaattgactcacagttccacatggctggggaggcctcccaatcatggcagaaggtgaatgaggagcaaagtcacatcttacatggtggcaggcaagagagagagcatgtgtgcaggggaattcccctttataaaaccgtccaatctcatgagacttatgcagtctcatgggagcagcatgagaaagactcacctccgtgattcagttacctcccactgtgtccctgccacaacatgtgggaattgtgggagctaaaaatcaagatgagatttgggtaggaacacagtcaaaccatatctcctatatacattcacactagcattttagttttagaactagttctatgttactatctgaattaatttttccacaattttgtaaggaaaaataatgcgttctttgaatttcatgtgtaaatgatatttttagttttgtgtcattttgtcaaataaattctgaaaatctttgtattgacagtgtgttatctctgcataaccatatatgtataagagtgctcaataaaaagaataaagaggaaacagcactggatctatacctatacaaaacaagctaccagcagagcccactgggaatggtcatgatataatcaggaatgttatattcacacgttgtagatctgcatatgagaggagggtttgcagatagcagattctagaaaagttgtctaatcagacagtaaatgaaggtgttgaagcactgaacaaaaataagctgctttaattactcataagagggaagtacaagtcattattccatctgccaatttacagactgtaagataccctttaaaagtagcagtaagtaaactcttcataaaagttagactgtatgacaaatccactgcctttcttcttttgcagcagggcctttctttttaatgactattttttgtttttggagatgaagtctgtcacccaggctggagttcagtggcctgattgatcactgcagcctcgacctccagctcacataatcctcctgcttcagcctcctgagtagctgggactacgggtgtgtgccaccatgcctggctttttaaaaaaaaaaattttgtggagttggtgtctcgctatgttgcccaagctgatgtcaaacttctggattcaagcacttctgcccaaagtgctaggattataggtgtgagccactgtgcccaagctagtgactgtttttgaaaaaaagaagcacattaccctcccttgttaatcacttatgtacaaaaatgcatgttttgctgttgatctgttttaactctttctacataaataacacatttgtacatgtatatgtgcagatatatttataatgttaaaattgtgtttaagtgatgtttactaaacaggataaaattttgtttggaaaattgcgatgtgaaattttatctagttaatctatagtcctttcccttatggtgtccagctctatgcaggctctgcctcactccagattatgtaaatatcaattcatattcaaatgaatttgaaatttagct

SEQ ID NO: 86156 - DNA, 1711 bp, Homo sapiens
  misc_feature (22)..(22): n is a, c, g, or t
  misc_feature (154)..(154): n is a, c, g, or t
  misc_feature (180)..(180): n is a, c, g, or t
  misc_feature (360)..(360): n is a, c, g, or t
aattgttgccccttagataagnagcccctgttagtttaagaaaagatggttagtttcccgaagttcaaggttggagtagttcctgtataaggaaggtagctggtcaacctgtcctgctcgggccttcgatataccagttccaagcagatgtagnaaaaaggaaggtaagagtcagaagcnttatgttgttaatgcggggaaacgcccatatcgggggcaccgattataaggggacatagtcagttcccaaagcctccgataatattggttattactatgaagaggattatacaaaatgcatgggctgtgacgatacgtttgtagatgtggtcgttacctagaaggttgcctggctggccnagctcggctcgaataaggaggcttagagctgtgcctaggactccagctcatgcgccgaataataggtatagtgttccaatgtctttgtggtttgtagagaatctcgtgccgaattcggcacgagcatgtgggaattgtgggagctaaaaatcaagatgagattagttttagaactagttctatgttactatctgaattaatttttccacaattttgtaaggaaaaataatgcgttctttgaatttcatgtgtaaatgatatttttagttttgtgtcattttgtcaaataaattctgaaaatctttgtattgacagtgtgttatctctgcataaccatatatgtataagagtgctcaataaaaagaataaagaggaaacagcactggatctatacctatacaaaacaagctaccagcagagcccactgggaatggtcatgatataatcaggaatgttatattcacacgttgtagatctgcatatgagaggagggtttgcagatagcagattctagaaaagttgtctaatcagacagtaaatgaaggtgttgaagcactgaacaaaaataagctgctttaattactcataagagggaagtacaagtcattattccatctgccaatttacagactgtaagataccctttaaaagtagcagtaagtaaactcttcataaaagttagactgtatgacaaatccactgcctttcttcttttgcagcagggcctttctttttaatgactattttttgtttttggagatgaagtctgtcacccaggctggagttcagtggcctgattgatcactgcagcctcgacctccagctcacataatcctcctgcttcagcctcctgagtagctgggactacgggtgtgtgccaccatgcctggctttttaaaaaaaaaaattttgtggagttggtgtctcgctatgttgcccaagctgatgtcaaacttctggattcaagcacttctgcccaaagtgctaggattataggtgtgagccactgtgcccaagctagtgactgtttttgaaaaaaagaagcacattaccctcccttgttaatcacttatgtacaaaaatgcatgttttgctgttgatctgttttaactctttctacataaataacacatttgtacatgtatatgtgcagatatatttataatgttaaaattgtgtttaagtgatgtttactaaacaggataaaattttgtttggaaaattgcgatgtgaaattttatctagttaatctatagtcctttcccttatggtgtccagctctatgcaggctctgcctcactccagattatgtaaatatcaattcatattcaaatgaatttgaaatttagct

SEQ ID NO: 86157 - DNA, 225 bp, Homo sapiens
gtcacttctcttgtggaagttacaagctattttacttaatgctaaaccattgtagctaaatttgacaagtgaaaaatctacgcacaaggccattttacttttggagtataatttttccttgaaatgcaaactgaaacttgagtaaaccaaggtaatacctagaatcagtgctttttaaacagttgcagatttgtttcatgtgacctatctttagataatgcatgt

SEQ ID NO: 86158 - DNA, 324 bp, Homo sapiens
tttccaagaaaaacagcattgagcagcataagatgtaagtaaaaagtattaaacggggagagatgcacactggccatgtagttcgtcagcaagaaagcaggaccttaacaaagcagatcctcagctagatgaccttttcatattttaacaaaatcatctccttttacttaaatgttgttataaagaagctttatagcaccaatgggaaaccagtaccttttgccatgaattgaagacaaatggaaacccaataaaaacataaccttattaaattctagctactgttacctgccaatgcttctagacttgaagcttgttctgttt

SEQ ID NO: 86159 - DNA, 274 bp, Homo sapiens
gctttgcctaactcaaattcttttctgaactctcttggtcaagtatctttttctcacatttacgagttatacaaaactttagtttgtgctgtgtatttgtatgaagattatgtttttaatatttaaaacattgtgctttgatacagttgatgttaacagcaatttggaagccatttagaatttgaccttttattcttgaccattgggtatatcaagatgtaaggtagattccttacagagttggatcatcattattccaatgatggaattggag

SEQ ID NO: 86160 - DNA, 119 bp, Homo sapiens
gatccagaaacttttcccaagaagcttggacatggattgctggtaaacacaaaaactgcatggagggcagagcagccggttgactcccccttgtcaatatcttaaagtggaaaagcttg

SEQ ID NO: 86161 - DNA, 673 bp, Homo sapiens
agtctgaaggcaggaaaaggcccctttcccggctcaagcagtgaaggagtttccttttactcagcctttctgttccattgcgcctccaacggactggatgaggcccacccacgagagggaggaaaatctgcatcattgggtgtgccaagttcaatgttaatctcatccagaaacacagtcagtcacacccagaatcatgttggaccagatatctgggcaccccatggcccagtcaagtcgacacatacagttaaccatcaccctcagcaattgaaaaaaaagatttcatctctgtcccagacaagtagattgctctgtccccagtgctcatgtccttggatttcagggatttcggcaattccttcttgggctccagcaccctcagctcacgtttgggaagtgcctggctcagaacagtgttttctaggtgggaaagaacacctgtgtctcttgagacattagtgagcattcccccgaagaagtgctcagtcaaatcagtgctcagtcaaatcagcacccagttttcagctctgcctgaaaacttctcacagcatgggggctggcgccacctccgagaagcccgtctgggtccctgaatgcttgcaacgaacagagcctctttaacccgcacgttgtgcacatgtaccctaaaacttaaagtataattagaaaa

SEQ ID NO: 86162 - DNA, 340 bp, Homo sapiens
gcacctgaattgaccccagcaagattgagattgatctggtttctttcagcctgttaaatgccaacccagtcatctgtaacagtacttagtgtttttgtaatttttctgtacaaattttctgtgtttgttctgtaaaacttacctatcacttgaaaatattttccttgatttagagatgaaaataaccacaaccacttattttattgcttgttttaaaaaattgttttgacagtcaatgtccatgctataatcacagggtttttgtgtgtgtgtgtataatcttaatgaaaagagtttacattttactaggaaaagatgatgaaacttaacatttgaaata

SEQ ID NO: 86163 - DNA, 161 bp, Homo sapiens
aagaaaaaaacataaataatattagaaatggaaaagttataaatcaactacagcaaggatttaaaactattatgaaacaaaccaagtagaaagtagatctgccaaacaaaaaaggaaagaaactgtttctttcataaataaatgacaatgggggaaaaaga

SEQ ID NO: 86164 - DNA, 276 bp, Homo sapiens
ctcctgccactaccaaataaaaaaaaaaaagaaacctcatctccatgacctgaaaggccctacaggcctccatctcctgtttgtgcccgacttgagccacattcatctgctagttcttcctcaaacctgccacgttctttgccgcctcggtgaattgttggcactgctccctctgcccgctgtcctctgcccccagatcaccaggagaccaactcctactcaaaatccaggtcctgtctcaagtttctaacttccagagaggccttccctgaccag

SEQ ID NO: 86165 - DNA, 275 bp, Homo sapiens
ggcaccaccctgagctggtcaccatgtttttattactttagtcattgacatcttgtcagcagtatcaccacctttgccccggggcctgtcagtatggcaattgttacctttttgattgacacttttgaaaatttgtcaacatgttatttattattttagggggatctctgtctaacttaaagtcatttcttgaagttaatttactgttttattctttgaacagactctttggtttgtatgcagtagaggctataatagtctacatgctattatat

SEQ ID NO: 86166 - DNA, 878 bp, Homo sapiens
ctgagaggcagagggcatgttgtgtctcccctcctcccaaacagatgctcggatctgattttaaaatagcatctgtgtgagtatgtgagatgtggctggtcacaatgaagtgggttcacctccttacaaacctttagtcataactgaggttttggacatcagcaggtaaaagtaaggaacagttgggagcttaagtaagaaataatgtgatgaattgtttttccagcaaggttgccatggagggggctgcactaaggaaagaggttatgggtcagcaactttacttttcattccctgctctatccccaggcccagggcactgcctgatgcatggtagcacttataaatgttcaatgaatggatgaaaattaatctgcctgaaaaactgtaggtattatgtaaaaaacaaatatgaggatattgtgacaaaagaaccagtgacatttattgattgatggatctgtgatataaaggtgagagaggaattctcctttctctttagcttggcctgtttcctttaggcgtctttactaacaaaacgacgttaaattgtgattttctcatcctatatccagggatttaatacactattggatctggataaggagtaattgctcttttctggagtaatctggatcttttgctctgtctctctaacttttctgaaattaaatccttcaaggaatgaccagtagccaattgttccattgaaaatttgagttcacctgtcttcctgctgtatttggttaatataattaatgtctagaaaaagctccacccccctgccccagtcagcttctaaactggagtgtaagctccatgacggcaggaattttctcttcactctatccctaggccttaaagtaagacagtgccca

SEQ ID NO: 86167 - DNA, 918 bp, Homo sapiens
cagggcaggcacccaacctccacaagccccctcctcactcggtgcagtggcagagggggagctggggctcagggcttaccatttacacagccaacgactataggagtccgagttgcagctctactgggtgtggagtcggtggttttccagaaagtgtagacctgccttttggtggttgtcgacatatctagggatggtgacacacagctgctttctcagccgggccccccacattgaactggagtccccaggagtgccagcccctggcagcttctgcttcagtgcctgaccctggccgtggggtcccaggggatgtattgaggcgggtagacacagatggagagaagctgggcctggggatggctttatacctgggcctggggagggggcttcactcccaagctgcaaaagagcctttgcccatctccttagggtcctctgggggtcctgatatgattcttttccaaacatacataagtcattttgtttttctgccagaacgtgtaagggctttgcctccttcagggatctgcccgccccaccggctgcccggatgtggcctcctctggctccagagccggtgccagccgttggcgttcattctcctgtctgggcagatggcagccttgcttcagccctgccccccagggaaagagcgacctccctagccgttggcacacctgagcctgggctgagggcatcacagtcacgcccagggaggtaggcagttctctgtccacacactgggtgtggcagtgaagactctggaggagttcgtgcgcctgctagaggtgaggcaggtgggaggggaggaggccaggctggcacccaggtcatgccccagccgccgcgtcctggaacgcagagtccaatttgcttttcaaatgtcagcctctgtttctttggctgtccctgtgt

SEQ ID NO: 86168 - DNA, 289 bp, Homo sapiens
tccatggtctggcggccaaaaatggaagggtcccagtgaggtgggtggcctgggggaaatgggcctgcgactttggaataagccttctggttgcccctgaaaccccaggcaggtgccacgagaaggcacggagggccgggctgtgtttgtgtacacatcagtgtgtgcgagggagggcggcgcggcagcacagcctgccagcaagcccattttggtcaccatctgccatggagagcccgcgcacctgtcagaagcagctgctgacggcagatcgtaggtgagggaggga

SEQ ID NO: 86169 - DNA, 1200 bp, Homo sapiens
  misc_feature (109)..(109): n is a, c, g, or t
  misc_feature (112)..(112): n is a, c, g, or t
  misc_feature (133)..(133): n is a, c, g, or t
  misc_feature (142)..(142): n is a, c, g, or t
gagaacagtcaataatgtgcatcaaatatattctgagttctagagaaattaatgaccaagcattagaactagaagcaaaaaaaaaaaaaaaaaaaaaaaaaaaaaaaanggncgggggtgggggaaaattttngttttccgngcccttttagatcacggaagattgggtggggggggccccggcccaaatttcattcgttgaacctccccctgattgttttgttgggaagggaccctgtgggtggcaaggttaatcggacactcaagggggggggcaaggtcttttcccaataggtgatccctcggtggaaaagtggaataagctcttcaacgaagaatcgaggagggttaaacaaaagaaggctattccccgtgaataagcatcctctcatccaattttgggccgtgccaaccaatccattgttaaaatgttgaatttgccccctcctcttgctttcacccaaccaagtggtatgtggagaaggggtcttcccctccagccctgttggtggacaactgtggtaaatgtccgcagcattaaaaaacacgtcttttcgttggtggaagaaaagtgggctcacagcccactgcggagatatgtcttttaaatcacaaccgggcaccaacaatggtggaggctctaatagcaactgggggggttttgcaaaacatgtttagccgctcctggaaatttagcaaaaaagaccagaggttgactcctggaagaaacagaagccccttttgacccctaaaggggggaacaaaaattttacgcgtacaccttctagtgcagattataacgccgttgagtaccctgtaggttggtaactggctgtgaaaacccttgacagaaccaataagaggttcaaccatgtattgtagtcccctatctggagaacccaacaaaggtgttgtttcaaccagggagctattttttcccaaagtggagtggacaatccttttgccaaacagtggttatgcagagacgaatataaccgctaaagaatttttgatcgtttgcccacaaataaaagaggtcatgagcgaagtgtctttcaagtagaaatactcaaccccatcgagacttatgaataggactgggcaatgtaagagaaagtgtaacacacacggaggatgtttgatcaaaatttcgaacttaattgtgttaagaggtaagggcttacctatgttactagagtg

SEQ ID NO: 86170 - DNA, 281 bp, Homo sapiens
atctatattccctgaagacattggagccaggcctccagtttcatccttgtcactaattccagcttttccaggtgacctgagtcttgggatcagagctcattctccttttcaaactgatatgacacagtatatgactaagagaggcatggtatatatgcttatgagtggattttctatatttttataagggtgcatattacctgaaagtattgatttacactttgaagcagagccacatgtcatcagatttggcatacatcaaatagttggaaaataagcaa

SEQ ID NO: 86171 - DNA, 654 bp, Homo sapiens
ttactttagcttatcctgactgttgcattttccatccaaataacagcagcatcataaacatttatataatttgtataacagtttgcttaggcttcttatgtacctatttaccctttcccaaaatccaaatttactcagtttcatcttcttgacaacagaatcccaacttcattccagctgcaatatgcccaaccccagcatgtgtccaactacagttcaattattctaagccaatcacagcaactcagttctcccttgaaagtcattggcctaggggttagcatatgagtcagttctgaacaatgagccttaaggagaatctgcctaagatttcaggagtatctttcttttctgataagagcagcatgcaaagtcagaaagccttttttgtcctcttcccatcactttcagctttaaaagccataatagaagaatgtggtgctcgagctctgaccatgaagataaacaccagtgtgccctgaaagcaatggagtcaaggatagaaagagctggatccttgacataactgaaccatccactcacccacaggactgcctacctggacttcacagtgaactgttaatgtctttatggtttaagccatatgtctgatttttctgtttcttgctgccaaaatcatcctaactgacaaaa

SEQ ID NO: 86172 - DNA, 467 bp, Homo sapiens
agtcactgctgcagtctgtgtgctggctggtgctgcagtctcagctccaggcttgactggggaaggatccactttcagactcactcaatggttgttggcaggacctagctcttcatgcgtctttggactggggggtctcacttcctgtctggctgttggcaggaagccccctcagtgttctgccacacaaagctggcctctccatcaggtggctcacaacagggcagcatgtttcatcaggcagagcacacaagaggagcccaggagggtgagcacgatctctgagtagctgctgtccctttatcacctagttgagggaatggtaatccacctgcttgcaagattcagcccagaggagcaaatcactggctccagcccacactcaaggacttggatgctaggaggtggagactgtttctaaacataggaagggattcccacagcaagtaacacacaaacattatgca

SEQ ID NO: 86173 - DNA, 635 bp, Homo sapiens
gtgaggacggggaggacgcgccgtcggccgggcagcggtggagaccggtacccatacaggtggggacggctagaggagcggaatctccatgagtttgagcagctcggttttcccaccacctccaaatcatggaagacacagggtgcaggcagagcccccggggccatggccagcccttccggcagctccgaagcccctggcaagccccgaggcagggatggccggcccaggagggaggaggacgacgtccctcccgaagagaagaggctgcggctcttgctggaggggggaagcgcacagccccaggactgcgaggacgggcaggacgcgccgcggtcggccaggaaggagaccggcacccagacaggtggcgacggcagaggatttctatgggaatactctctttgaagaacccatgaagcagtgtcaggctggtacgaggatcagcagtgatttctttgaggaggagatccgtttcttcactcacaggtcatgtctgagtggatcaagaagaacagagggcccttttatgagattttgtctgcgtagaccattagcttggtaaaaatgtcaaaaccatcctcattctttaatagcagattattttggacttttctctgccagaagcagcatgg

SEQ ID NO: 86174 - DNA, 403 bp, Homo sapiens
  misc_feature (398)..(400): n is a, c, g, or t
  misc_feature (402)..(403): n is a, c, g, or t
catttagtttaagcattttgagatgactatggttttataatgtgatgtgtgaaattaaatcaggaacatgcacatttgtgttttcataagaaggaaaaaaattgacacttttactatactcatacctaatttagggtataaaatgtggttcctgaaaatggaagttctatacaaatctgtgccatacgaggttattattgcatagtagctatggagatccatcatatttgaccaatcacttttctgttttacataaatcccctcatggagtgccctcagctagagttccctctagccacctttcatgggaattgttggttcatcctctgaggctgcagtagtaactttgatgttttctttttttttttttgagacagagtctcactctgtctcaaaannnann

SEQ ID NO: 86175 - DNA, 881 bp, Homo sapiens
ttagaatctaggtttaagcaaattgaaactaacacagcgatgaatcatatcagacggcaaattatggaagaacttgcaacttgcacctatataatatatactgttttatatactgttttattttaccagttagtttctatataaaagataagtaaattataaggcattttcaaggtaactggtacatagggtcaatggatctgcaagcaatgacttaactgtggttccatgtcacagtgatggacttctcagcatggttaaatctggaaagctttctatgactccatccttcccaccaccccaaattgcggcgacacaaagggtgaaatgtatctattaataaaaacaaaatactctaaacattgtataaaagaggggaaaaggagaagccgacttaatggtctaatgaggctatcttccagagacttcttgtgtgtgaggctcactttgacctttcgctttgctcaggagcccagcgcctcatttttcacattcttgcaattacgttaacgcttcaagcatttctgactccaagtcagctagcaacaccaggcataactcaacactgtgagtttttctcctctctgtagattcattaacaggtcaccaaggtcccaactgaaatttaaaactgactggttctgttgggttagttgagttatggcaagggagatagcaagaaagggccagagagaagaggaggtgggagaaagaagaacccaggttttggagtggggattacttgtaataacgagcaaagcataaagttttagcgtttcggttagttagttttgttttttaggaaagagaagaattctgagactgatatataggtaaaaacaatcacacaaacttctgtgctgtgggtagatgcacccact

SEQ ID NO: 86176 - DNA, 747 bp, Homo sapiens
gacgtttttaatctgtaaaaaatgaaaaaatattatatatgtgtttggattttatgaacatctggtacatggccatgtactttttaaaatagccaataattatattttaatattactggattgcaacatggatttggaatgtggaacctttaaattctcagaataactctcagaaaacaaataaatttgatgttaaaatacattatcaagcaaatgtaattaaaacagtattacctagatatatgaaaagcaaacacatagagattccataagtagactcaaatacacacgaaactttaatacataataaatgcggcattgcatattagtgggaatgaaaaagatttaataaatatgtggggaaaactggaaactgatctagaaaaaatagtgtttaaccaagataaacttcatatggatcaaatatttaaatataaaaataaaataataacaattacagcaggaggatgggaattattttagttataaattatttttgaagtatgaccccaaatccagaaaccatagaataaaatattaatatagtaggctacattaaaattttttaaaataattctgcatagcaaaaataccacaaagtaaaaaaaaatttttaatagcctaaatacttgcaattcatattattgataaaggattaattgccttcataattaaaaagctcctaaaataaaacagaaaaatactaacaaccaataggaaaagagcaaagaaggaagaatagcaaaa

SEQ ID NO: 86177 - DNA, 438 bp, Homo sapiens
ctagaggatcccggaaggttaagggctacccaatgaatataacaaacataatgtggaacaaagtcagacccaaaagagtgtatacagaattccaaactaaatagggtaggaatagctcatgtcagaacagcccttcttcaggtagcaattataactcttaacaaaatattacaaaaccaactacctggagacactggagaagaatgaaaatcaggcagaaactgaaggagagtctatacttggaggaggagaatggccttgagtacatttcctatttttatgactctttctctagggccagcccaagttggcaccaagtagcatgcctaaaagttggtagaaaacacgcagtcttactggcttgaagatccagaggaagagtttaggtaaaaagtgagtgaggaaatttcagaaaggagaaaaaccatacagaggtag

SEQ ID NO: 86178 - DNA, 347 bp, Homo sapiens
gttccagttcctttggcttccttaattaatgcttacgtgccaagacttttccaccccagagccccacatgcctgttcctgggcgatcttgaacggtgcgcttctgcatgagggctcacctccagtgccgtcttctccaggagaccaccgtgacccccggctcttctgcatcatacccgccgctttgcgtttcccagtcttaacgtgagaggctagcagaccccatctgccttgtcctgggacggcctggaacacagtaggtgtgaagaaatactgttaaatggatggacagcctccctttgatatttacctgcacaccgctttgccactgtccctgtcacattgcga

SEQ ID NO: 86179 - DNA, 369 bp, Homo sapiens
agttacagaggcctttgaacttcatctccacagagggcaactgcctccctgcaagggcaccttggtggtctacacaaacccacctggacaagaggacaagcgatgccagctttgaggctgctggcagtgggtgccttcagatcaagatattgcatggctaagcccaaaacattcagttctgattcctaccgacaacacagttgatttgccaggtaacttgggcacccagctcaatttctggtgatcttaaaagcgttttttcttagcataaacctcacttccagtgaaggtaatttcacagtacaaaaatggcagagaaattattttcctactgtttgaagtggtgacagataacagactcacattcct

SEQ ID NO: 86180 - DNA, 367 bp, Homo sapiens
tttagagggctccaaagttataaaataaatactggagatttggtgcttgttaaaattttgaccttttctattaaagcccattggagtgatgtacagagaaaaggctgtcttgtgttgtgatagggccatgctccatccacaggtcctgggaaggatgatgtaactgtggtctaacagcattgtctgaatttttggcctagggcaaagaggaggagggcgggtaaagaaacctgatcagaccatttgatgctaatttcacaggtgactggtcactgtgtgcctggctgttgttatttatagagctgtaagtggctggagctacacacaggaacctgaaaggatggtctgtattagagtgtggtggtag

SEQ ID NO: 86181 - DNA, 488 bp, Homo sapiens
tggagtcccggaaccaatctctctgctataatgagagacaactgtggctaacggtggaatctctgctagtggattattcaatccgcatcatctctgaacaatttttaatcctggactggcttctactctgattttcaggttattacaaaagaaaagaaaaaaagacattatgttttcccgctagagtctcaatatggtttatttgtccccaccaaaattcatgttgaaatctgatcccgaatgtgacagtgttgggaggtggcgcctagtaggtaggaagtgtttgggtcatgggggcagattcttcataaatggcttggtattgttcttgcagtagtaagttctcacagaaaataaagtagttctcacgtgcgtaggttgttataaagccaagacatccctcaggctctgccctctttaagtgtccacttccccttaccttctccactatgttgtcatgcagcataaaagccctatctggaagccag

SEQ ID NO: 86182 - DNA, 347 bp, Homo sapiens
actggattctgatgatggttgcacactgtgtgaaattactttaaaaatcaccaaactgcatagttataatggataaattttatgatatataaattataccttaataaaactattttaaaattcgaaagctctgaagatacacagatacacagagagagagagagaaaaaaacatatccactgttatttgctaatactacacttaggaagacaagacttgcaggtaaagtgtttaaaagacacaatttagaaaacaagacagtttcctaggatttcaaagatcccctattattgtggaaaagcagcatctagtcatatataccatttcttgtagtcttcctacaaagc

SEQ ID NO: 86183 - DNA, 454 bp, Homo sapiens
ctcctaagtctccgtggatacggctgggtggagcgggaggatgatcacagggtttagagacaaaaagctgagatattgagtccttgttcttttcttccttattatacaattgtcacgattataaaaaaattcctttagcctctttgaatacagggtctcgtaggtggtggccacagggaaacaggaatttaaactgaaaaagtaaactggaaatggccagctgctgatcaatgggcaaaacgttccagctaagcaggacttggaagctctagagatccctgtacaacactgtacctgtggttaataatgtattgtacacttaaaatttttaagagggtagatttcatgttaagagctctcactaaaataaaataacataacataaactgaatccatcagctgtacagcaaaagaagtcaatcggagcaaaatcttcacagcccagtttgccagg

SEQ ID NO: 86184 - DNA, 472 bp, Homo sapiens
tgaacctgggaggcagaggctgcagtgtgccaagatcacgcccactacactgcagcctgggtgacagagcaagactgtctcaaaaaaaagaaagaaaaaagagtgagtagttattggggccttgatttcagaccatgtaggagtctgccaaatctgctgccttcagaaatcaaaagatcaaggaaagagtaaaagaagattgaataaaatgaaaccaggacacattttagaccaaagagttccactggggacttactcataacccaggtatcttttcatataaaatgctaaccataggattaaagctgcaagtgtaatctgaaaggcattataggctgcttagatccacttattagcatttcctatcaattgaagcattttctctgctaaaatatcaatgaaaatgaaaaaaagccaaagccagtagagttcatatagttaggaacataagctctggaggtgaactggttca

SEQ ID NO: 86185 - DNA, 377 bp, Homo sapiens
cccaggctagagtgcaatggtgcgatctcagctcaccaaaacctctgcctcccgggttcaagcgattctcctgcctcagcttcccgagtagctgggattataggctcatgtcaccacgcctggctaattttgtatttttagtagagacagggtttctccatgttggtcaggctggtcgcgaactcccgatcttaggtgatctgcctactttggcctcccaaagtgctgggattacaggcgtgagccaccgcacctgacaaatgatgtagtttttctcccttaggttattagtaggcagaatagttttacatttgattattagttattcatatttcttttgtgacttgttggttcttaatatatctattcagccaaaa

SEQ ID NO: 86186 - DNA, 482 bp, Homo sapiens
caatttaactcaattctgacactatctacccaggtatagcatagaccccacaggttaagagctcagtcccacaagactgtccccctcttgagatgctagtcccaagttccaggttgtgacttacacttctgaccagctggctataaatcaaggattcccacatcttctaatctttgatcatttgctagaatagctcacagaacttcaagaaacacttaacatttactggtttgctataaaggatgttacaagaggtaaaagacgaacagccagatggaagaaatgcatagggaaaggtatgtgggaagggatgcagagcttctgtgctctctttaggagcatcaccttccactacctccaaatgttcagcaccctggaagctctaggaacattgcatttcagtgatttttatggaagcttcatcatataggtgtgatatttactaggtcaatctccacgacctccccacttctcagaggttg

SEQ ID NO: 86187 - DNA, 837 bp, Homo sapiens
  misc_feature (671)..(671): n is a, c, g, or t
  misc_feature (680)..(680): n is a, c, g, or t
  misc_feature (683)..(683): n is a, c, g, or t
  misc_feature (685)..(685): n is a, c, g, or t
tttggatccagttctgtaagggcagaggattcattatttccaggtaatttaagtatgttctggggagaagtgttacaagatggactggggactcggctgggatcctgatgggatctaaattattgatttcacctgactgaattgctatttgcgtcacacctcaggaccctggaaacaatacacaatttgcccattcattaatttattaattcactcaacaaacttgtacatctgccataagtctgacaccatcctagttatcagggatgtagatagtcaaaagaagatgtaaacctaacctcatgcatctgtgaatctccccatctaaaaagacacagccttgtaaagaagcttgtgtgaaagtgctaacgacagacatgccaagtgttaaggggatgcaggagaggcgtggtaaaatgggttgggaggcagctcagatgtctaaaggggtcaggcagacaatgcagataagtgaaagagggccagttgatgcagagtggggacatctggaaagcacccgccccatctaaaggaggcagcctctgagagtctggggatcagggatagaagggagatgtacttttcactgtacatccttttgtattttttaaattttgttacttaattcaaaaaaatgtaaaaataaagtgaggtaaccattaaaaaaaaanaaaaaaaanaananaaaaaaaaaaacgacgggggcacaatgtggggggggggaaaaaagaggatagaggggggagggcaaaaggggggcgagcccccatttgggagaaagggggaacaggggggcccccaaaaggggggagataaaaaggagacaggggaccgtag

SEQ ID NO: 86188 - DNA, 304 bp, Homo sapiens
tgcccagagccctggctgctgctactgccactcagcacagctgggccaggctgttgccccagagggcgtcagacgtgaactttgggaacatctttattctgttttaaagtgagcacaaattattagacactttccccaaaatccatgtgtttggggcgtcttccggccatgccacacatctgtgtttgcctggctgtttctgcaccgagttccgtccacagcccgggtttctgttgttttaagtcttgagccctgggccgggggccacttctcattggtggctggaggctcggccaagtgaggg

SEQ ID NO: 86189 - DNA, 288 bp, Homo sapiens
tctctctgtgtcgctcaggctggagtgcagtggctccatctcagcctactgcaacctctgcctcccacacttgggtgattctcccaccttagccacccaagtagctgggactacaagcacgtgccatcacgcctggctaatttttgtgttttttgtagaggaggggttttgccacattgtccaggctggtcttgaacccctgggcccaacttggcctcctaaagcgctgagattacaggcataagccaccacgtccaccccagtattcttttcttttcttccttcttt

SEQ ID NO: 86190 - DNA, 298 bp, Homo sapiens
ccccccaactagaagaatacaattaaaaaaagaggcagtacacatggttaataaacagatgaaaaaattaaaattcacttgtactataagacaggcagattaaattatttttacctatcaaattaaccagaacaaaggcatgcactttagtgaggatgaggaacatacagattcactggtgaaagtaaatgtacacacaacctttcaagttgatagtttggcagaagttgctaaaaacatttaaagctttcatactttttgataaggctttttattttagaaaacatataaataaaaa

SEQ ID NO: 86191 - DNA, 394 bp, Homo sapiens
taaatttgtatgtccctgatgactacctttttatatatttattggccatttggatatgctctttgtacagtgtctcatgtttgttgctaatttttctgctgtgttatttatctttttctcattgatttgcagttctttatacacacgtttattctggatatgagtcctttgttgtatattgtgaatatcattctctactctgtggatttcctttttactctcttcatcttttgatgtatatacagtataattttttttctctctcaaaaaacttagtactttatccatattgtatgtctggtatacagagcatcaattatgcaaagtgacctcattgttattaaatagttggaaatagatttagggatgttaattaaatgacaaaattggttgg

SEQ ID NO: 86192 - DNA, 564 bp, Homo sapiens
agcgctctagaggatcctcaaacaccgcaatcttatgtgatccacctgccttggcctcccaaaatgctaggattacaggtgtgagccactgtgcctggctgcatttgctttcatgaataaaatatactaacctaactcagaaattaacattgatttgttattatactattacctgatgtgtagaatttgtttgaaatttgccagttgttccagttacgccttttatagcaaaagaaaatctcagattatccaattcattatttccatgtcttactttggaacagttctttagtctctgtgttttatgacattgatatttttaaagagtacaaattagttacttatagagtcccctcagtttgggtttggctgatgtttcttcatgattagattcaggttatgcattttttggggggcagaaataatacagaaattatgtgttattaggcaacataagatgtgtttatttgaccacatacatgccttttgactcagcagtcccaaatctcagaatttacccagaagatgcacttcccacagtatgaaaatacacatgtacaaggt

SEQ ID NO: 86193 - DNA, 452 bp, Homo sapiens
tgctcggtggagctctctgaaactcttctggttctgagggctgcctgattcatgaatcgtttttcgctcagataaactctgctgaatttgcctaaagtttttcttttaagagtttcacatgagaagtcagatcttgaagcaaacttccagtgatcccaggagcactgagtgaccaagttaaggtacccagcatgcccagtgtactcactgctctttcgcagcaactggggtcatgggtgagatttttgaatctaagcttcatgaacttctgatttgagctgagtttgagcatttttgatctacactgggtttcaaagtcatgccaacaacaggactgggcccagtagggaggcctcaggtatttgactgggtcagacataaactcaactcagttagtaggtaggaaaggttaataaaagacatagaatcatgggtttatctggtcaaaggtt

SEQ ID NO: 86194 - DNA, 226 bp, Homo sapiens
tgtgtgtgtgtgtgtgtgtgtgtgtgtgtgtgtgtatttgtatcaagcagttaccatacaaagggagtcttactatgttgcccaggctggtctcaaactcctcacctcaagtgatcctcccaagtcagcctcccccagagtgctgggattagaggcacaagccattgtgcctggcctttttttttttttttttttttaaggcagagtctcgttctgtcacccaggc

SEQ ID NO: 86195 - DNA, 385 bp, Homo sapiens
gctttgtgacatgctggattgtatccattatgtgttcctaagaccctcagccctctccctccaccaagacccaataaaagtgtgttattgaaagtagtagctactggccgggcgtggtggctcacgcctgtaatcccagcactttgggaggccaaggtgggtggatcacaaggtcgggagttcgagttcagcctggccaatatggtgaaatcccgtctcaactaaaaatacaaaaattagtcgggcatggtggcgggcgcctgtaatcccagctacttgggaggctgaggcaggagaatcgctggaacccgggaggtggaggtggcagtgagcaaagattgcgccattgcactccagcctgggtgacagagagagactctgtctc

SEQ ID NO: 86196 - DNA, 394 bp, Homo sapiens
ccattttcttgactgggcatttaacaaactttttgttttaggaccctgtttgtgatctcagatttgaagctgaacatctgagatgttacgcagcctcatagggtttcagttaccaagactgacagatcaacagctaggttggcagtgcaaaaatccactatctgtttttgaagaaacggattttctgcctccatgtttttcatttccaggaataatacttctctcatgacaagcagacttgtaaaatgaggagaagcccttatcagaaaccagacttcctccctctccacacccagcacctctctttaaaaaatgtcccaaatcctgtctttattagaatttgaattttgtcatcttaaaggatactggtgatttcccatattatggctatacg

SEQ ID NO: 86197 - DNA, 565 bp, Homo sapiens
gatcccgcttccttcacactgggtcgccccaccagccgcctgggttccagtttagcactgccgacgacttgctgtgcctggcatgtccttgctcccaaatgtcacatctatgaagcctcaccctaaaaccctgtaagagcgattccctctttcacccacatgcccgttagcctttatttagcacaccttaaattgtattcattttgcatctcaatctagttcacagcctggtatataacaactaataaatgtgagttgactgataaagactataaaaaaaaaaaaaaaaaaaaaaaaaaaaacaaaaaaaaaaaaaaaaaaaaaaaaaaaaaaaaaaaaaaaaaaaaaaaagaaaaaaacacaaaaataaccaacaaaaaaaaaaatcatggggaatacaaaaacaaaaaacataaaaaaaacctggggccccctttcccccaatgttttttaaacttcggcaatttttaccccggggcccttattgggcgttattgggcccattgcccctatatgggggggctttacaaatcactggcccccgttttaaacaggtgcgcctggg

SEQ ID NO: 86198 - DNA, 273 bp, Homo sapiens
atttggagagaaaaatgatttataacattcttaacaatttgcacatatttctagttcttatttaatcaatgcagtggtgccatatcacctgtgtagtttctttcatgttctctttctggctttataatgcatagttacatattatatacatttgaaatggctacattttcctttattatttaaatattcagtgtatagtttggcttaatttatagtagtttactttctatacttccagggtgggtggatttgtacccagaaatccaccttaaa

SEQ ID NO: 86199 - DNA, 235 bp, Homo sapiens
agggggaatcccagagtgtgcccggcgctgacagcagcaagagacaggagctgggcagagcatccctggctaggggatctgccagagcctagctgacagcatcctctcttccctgccccctgaattcatcttcccctcctggccctgggcttccccatctctcttgctcctgcctgctgtgacagctaattgcaggatgcaattttctgcctcccatctccctatctgcatgtct

SEQ ID NO: 86200 - DNA, 410 bp, Homo sapiens
  misc_feature (313)..(313): n is a, c, g, or t
  misc_feature (404)..(404): n is a, c, g, or t
cacaacacactccagggtaaattcatttcagccacagtttctcacaccgtgcctctgcggacaacccctcagccctcaccacttcccctggctcagcttggtattgctaactgggcagcttgatgcagatgcctgagataccttcagttgtcccagacaattccatttgcccctccctttcatacctgcttctcactgactccacagtgtcccttaacacccggtgattgggactcaggcacaggtgcagggctgaaggacactcccagcctgcttgccctgtcacccgcagaagtcaaggcacgtcctgccntcagggcaccttctccagccaccctcccaggctctgtgcttcccaccagcccgtccattggtgtggaccctcgtgccttcctctgcacccnccagag

SEQ ID NO: 86201 - DNA, 506 bp, Homo sapiens
ccaaggaaggggcaatgggcacactgatttatagctggtgggtcagaagtataggtgacaacctactacttgcaattggtatgggagggcaggagggagtcttgtgggactgagcccgtaacctgtgggagctgacactatttgcctagagatggttccagaattgatggtgtctgctggagaattgcttgacgtgtggggaaaacccccccatacatctggtgtcagaagtgttgtgttgagtgttgtgggaggaaaaaaggaagctgtttcttccttcagaccaggtgaccaaggcctgacttggggccagaggcagtgaggttggagggtgagggaccagcagtggaggtatttgagacatggagttgacactgacgttgtcagcagaaccatggaggttgggtcagaagttacctgaggcttgcctgggcacggttggctcatgcttgtaatcccaacattttgggaggttgaggtgagaggattgcttgaggccagaagtt

SEQ ID NO: 86202 - DNA, 428 bp, Homo sapiens
aaaaacactagtggaaatagattatatgagtcttgcatttagaagtgccatctgttcaactttgcaccctcgcagtcagagtgttaatatctcccgtgcagagataccatttgtcagcattttccgctgtgtggagttaccaaacagttcactttttaatcctttggcctaagtcagctaaaattctctgagcgcacatgtcttgagctttgtgtgtctttactatcaccttcttgtttaagaaaatttcctttcaaaactctattaggagaagggacagaatttggagctaactctgcctatggcagcccaaggcatttgggggaaagggggagaactcagaggagtagattcccctggagaatagctagtatctatctttctgattaacttctgcaagacttaaatgagttttaaaggccctcata

SEQ ID NO: 86203 - DNA, 321 bp, Homo sapiens
acacatatatacatacatatatgtatacatgtataaacacatacctattttatagccttttacagttaaaaaacaatttatatttagcctttgtgtaaatgttttaatattattcccatattttggaagaagaaagtgaagctcagaagagttaagtgacttagacaagattactattctagtaaacaaaataggactgtaatagatggtttaagtgtattttaaattttacctcttggtcaggattcttggcattaagctctgttgactggtatataggaatagaagctttcttgtataatttattcttctcttgttata

SEQ ID NO: 86204 - DNA, 569 bp, Homo sapiens
ctggggtcctgggtgctgttgccgtgacttcagcttctcctgagacaggttgaagcccagtctcttaatgcaggtcatattcttgtgtgtagcctgtgggcctcctatgtcggaatcaccgaggcatcttgttgaaatgcagatttctgagctcccttcagtccctgaagtggataagtcagtccctggtgacttatccaaccagaatttccaggatcagggacctggaatctgttgttaggcacactgaagtttgagaaccactgaatcagtgatttcagtatttcctaaaatgcttttgtgccatcatatgaaatatcagttttccaactggtcctagtgagttttgttttagatgtttgttttacagtggaaagggaaatgatagtctgtggcggttatttgttgcccactgatatcgccccaggacctacaaatggagcctccttgttaggaggcaactggagatagtgatcttactgtcttcttccagttacttcagaccatatgctgtcctccacatttagttgatctccagttctgcctgggtgtttgctgtttgctaccct

SEQ ID NO: 86205 - DNA, 715 bp, Homo sapiens
cagagagataatcctgggggtgcacagagggtcccccaacagtatccaacataatattgaccagcacaagtctatgaggagactgcctgaggccagccgaaaaaccacctgaaaatccttgcaggaggagtgtgcagtgctgacccagggcaggggatgaagcctgttctcgtcagccaggtgctaaaccttatattcacagtgccttcagcagagcactcagaaggcctcaacttaatagcagagaataattagtaataggctgaatattactcagctactgcctagcaaatgtaaaaagctagaccatatcatactatttccaagtaacttaactgcttccaagaggaaagctcaaaaatatttctagaaatgcaaacatatccagcacccagaaggtaaaatttacaatgtctgggattacattaaaattttccaggcatgaaaagaagcagaaaaataaaatccacagtgaggagaaaaatcaatcaatctaaccattgcagaactgacaccactgttagaattataaggacaatacaaataattattataattgtattttatatattcaaagagttaagtgaagacaggagatattttaaaaaattaaatcaaattctaacaaatgaaagctctaatatctgagatgaaaatgcactgtacatgattaatgacatattagaccttgcagaaagaaatacgagtgaatttg

SEQ ID NO: 86206 - DNA, 338 bp, Homo sapiens
tctttaacaaccacttgtagtcttccgtaatataacatgtttaagtataagcacatcagtttatttctccagacattgtaaattgtgaagcttatgttgatttttttcccattagcatactccactggcatttatgtttttcttagactttttttcctccatttctcttttggttttgctaaatttttctacctgaaaaactcttaaaattctgaaaattttatattactggaagatataacagcagcataaattgaattttctaaattatcaagaaacatgaggtatacaatatacataggatagtaccatacctagcactggtgaggtatggaaat

SEQ ID NO: 86207 - DNA, 416 bp, Homo sapiens
atctctcttgcccgctgccacaagcactgttgtaaacacactgaaaaacaaaagagttatgtccccgagtaacagcttatctgccagccattactcttaagcaccatttactggatcacagctcaatttaaaacatctgcctatatatttgagactgtacctcactctgttacccaggctagagcgcagagaagcaatcgtagctcactgcagcctcaagctcctaggctcaagccattctcccacctcagccttctgagtagctgggactacaggcacacaccactacacttggctaatatgtgttattttctgtaaagacagggttttccatgttgcccaggctgatctcaaacttctggcctcaagtgatcctcccaccttagcctggcaaagtgctggaattacaggcttga

SEQ ID NO: 86208 - DNA, 854 bp, Homo sapiens
ggtggggggtgcctcttaaagatttcttattcgaaattgaagtctgagaatgacaaaagtgtgcccccacaagtgagctagagggaataaaaacctgggaacccgggactcaggtgaatgggggcccacgagctcaaaatataccacctgatggaggctggtgcaggtgggatactcacactgcctaggcaaccacccactccagatctttgctcaggctctttcctctgctggggacaccccctcctctgcctggcttattctgacttttccttgtgtctcagcttctacacaacactcccggacaccttcctcaaacatgctgcattgcttcaaatcctttcctgaccagttacgctccgcacatgaattgcctggcaacccataaccagatcatagactctttcaaggaggaatctgtgccttgtcccggtgctcagcccacccagtgcctggtagaccgtaggtgctcttaaatctttgtggaatcaatacatggattcagagtcatagataaactcttttcttccctggacagagctgactcccttagcaccaattttagggagcccataaaaaatgtacagtcgtgtgatgaggctaaatggaaagagaatatagcttggcaagcaaggaaacctcattagaataattaaagggactattaacccaaaccaacctagacgtaacttaaaatgtgttatgaactactgtggaacatttatttgatggctcaaacattaagttagtaacctcaatatggttctacacctcaatttaaagcgttctcatttatgtgcatgtgtgtttcaaatccctaattggaattctgaaaggaatgcttcagaaatgac

SEQ ID NO: 86209 - DNA, 367 bp, Homo sapiens
catgcctaaaaacatctctggatggatacacagtgaaacagtggtacctatttatgtgtaggtagcaaagaactgggcagatggtagacagggatgggatgaagactttttgttatatctcttttaatatttagtttttaaaccatgtgaatatattgcctgttcaggatatcaaaaatagcaagtttactagagtttaaacaatagctgttatatctgacacacacttgaaaccttgctaaattcacatttatttttctttttatggtgtattagtgcaagcctgtctttgtattgtaaaatctaatgatacggtatttatattatttttgtttggcattttttgcattaaatgaattattttgca

SEQ ID NO: 86210 - DNA, 423 bp, Homo sapiens
tagaggaacccccgctacctggcattttcagataattaaggagaaaatttgttgtattcatagctgctttacaaggaaaggaaaaaaacggtcttcagactcaagggaaataatagcaacaaatctaaaactaaatttctatggaaatataaaagactactttgtgttataattttattaaattattagacatattttttcataatattttactaaacagcattgccttctaaggattatgaagtatatagatttcatacctgcaacaaatatagaactaagaattgaggaatgataagtaggctgctatagttataaggtttctacagtttacacaaaattgtacggtataaactttaattaggccatgaaaagtaaaatatgtatgttataatgctaataggaaccactaaaaggaaataa

SEQ ID NO: 86211 - DNA, 857 bp, Homo sapiens
ttttttttgagacagggtcacactctgccacccaggctcaagtacagtggcgcgatctcggttcaccacagcttcctgggctcaagcaatcttcccatctcaccctcctaagtaactgggactacaggcatgcaccaccacacccagctaatattttgtattttttgtagacatgggtttcaccatgttgcctaggctggtcttgaactcttgagctcaagtgatctgcccaccttggcctcccaaagtgctgagattactggcatgagccactgggcctgcccttaaaaattatttaattatgcatttgatttatcagctatagggatatttagacttactatctgttcttgtgtccattttggtgacatatctttcaaagaatttgtccatttgatctaaaatgttaaagttattggcataaatataccctttattatccttttaatgtctataaaatatacagtgatgtccctctttttttctctataggtttaattactaagggttgttaatattattaaagtttaccaaaaatttatcttctagctttgggcgctccattgtttcttttccacttcactgagttctgcttttatttatttcctttcttgtacttactttaggtttaataacttgcctttttctagcatctgaatgtaaaagcagagatcactgattttatctttcctatattctcatctacttctttaaaacaaaagtttcccgctgaagactactttagttaaatcccacaaattgtgatatgtggtgttttaattattattcaaaataaaatatttcctgatttttcttgtaacttcttttttgagcaatggtaatgatgtggtgtaagt

SEQ ID NO: 86212 - DNA, 392 bp, Homo sapiens
cattagttaatatatgaattttatagatgaaatgggcatgtatttataggtatatgaataaaaaggttttattgtaattaaatattcttagttttaaaatttatttactaaattatgataccaaaagtataggcaacagaagaaaaatagataaactagactttatcaaagttaatgactgttgtatatcaaaagactcatcaacagattgaaaagacaacatggaatgggagaaaatatttccgaatcatatatctcataagggattaatatctagaatatatacaataaagaactcttacaactcaacaacaaccaaaaaaacttgattaaaaaatgggctaaggacttgaatagacatttctacaaagaagaaaatacataaacggcaa

SEQ ID NO: 86213 - DNA, 539 bp, Homo sapiens
agataaatattatgaaggaccctgtctcattgtgccatcagtatatcatggctgagactatctcagataagataatgtattagtcgtctgcttcctaggaaaatgaacactaaaatgaaatatggaagaaatggattctgagtgttaaatgtgagaaacaaggtttatactgaacattctaagccattgccaaatgtcaactttaaacttcagatcaagagattcagaattctacagtgtcaggtatggtagatgttctcacaccaaggtgaacacaagaatcaaccgagtgatttatttaaaagagagtcctgagtgccacccccagaaattcagatttttaaatttttaaataaatctgagtgtgtcttttaaacttacattttgtaccagcaactccaagttattctaatataggtaatccacagataaaaaatatttgttagaacgtattttttaaaaatattgtttagaccataaatattttagccttttcttttttttaacaaaatataaatttatactttttagacagcaaa

SEQ ID NO: 86214 - DNA, 285 bp, Homo sapiens
cttttaatctacccaacatttcattattttttccctgagtagctttattttccccctaaaagttcacacaaatcaaattaacatattgaatcataaaccatgaaactttctataagttatctgctcacctaactgcctcaatctatactgcacaccatcctaaaccgtgttttcctctccttcctaaaaaaagatggagacttatacttccatttttgtcccgatttactgcagggattttaactaactagtcagacttggttggttctgtttctgagaaatttg

SEQ ID NO: 86215 - DNA, 361 bp, Homo sapiens
gccatttaaaggtagatttctatcatgtaaaaataatctatctgaaaaacaaatgtaaagaacacacattaattactataattcatctttcaattttttcatggaatggaagttaattaagaagagtgtattggataactactttaatattggccaaaaagctagatatggcatcaggtagactagtggaaagttacaaaaattaataaaaaattgactaacattttaagttgtgcatcttttctccttcctgtccacctattgttctttttttcacttttccatttcaatttcttccttatgtattcttgatctacttttctttatatccttctatcctttccttgcgctctcagtattt

SEQ ID NO: 86216 - DNA, 2674 bp, Homo sapiens
ccgcgacttcggcttcgcgagtagcattggttccttgggtttatttcgttttcctctctcttctccaccttagtcgcccctttcgcgctgcgctgtagcgtgctctcacagcctttttgccttgaactgaatgcaggtgggaaacaggtcggcgtgccgaaagacaccgagtaggtagaaataaggcaaactcacagaggcgcaacaggtccggtcctccgtggccagggcgagccgcggccccgcgtggcgcctcggccgttgccctcggaccctgagcggccactgttggggccctcgaaagaggtgtcggtcctctgggagtcggaagagctgtctgggtgggtttcgtcttgctttttaccccaccgccacccagtccccggacggagggtgcttttcacttccagctgggaggagagaagaaagcggggatggtgcacgcctgcgggtctggacgctgagcaaggcaggggattatttgaggtgtagagggtgggaagcgaagccgagacggccgaccccgccacgatgctgctgaagaagcacgcagggaaaggagggggccgggagcccagatccgaggacccgacccctgccgaacagcattgttcccggaccatgcccccgtgtgccgtcctggcggccctcctgtcagtggtggccgtggtgtcttgcctgtacctgggtgtgaaaaccaacgacctccaggcgaggatcgccgctctcgaatccgccaaaggggccccctccattcatctgctgcctgataccctggatcacctcaagactatggtgcaagagaaagtggagcgacttctggctcagaaatcctatgaacatatggctaaaataagaatcgcaagagaagcaccttcagaatgtaactgcccagcaggccctccagggaaacgaggtaagagaggccgaagaggagaatctggtcctcctggacagcctggtcctcagggccctcctggtccaaaaggcgataagggagaacaaggtgatcagggacctaggatggtgtttcctaaaatcaatcatgggtttctctctgctgatcagcagctcattaaacgccgcctgattaagggtgaccaaggacaggcagggcctccaggaccccctggccctccaggcccaagagggccacctggggacacagggaaagatggcccccgtggaatgccaggagtacccggtgaaccaggaaagccaggagaacaaggcttgatgggtcctctagggcctccgggacaaaagggttctattggagcacctggaattccagggatgaatgggcaaaagggtgagcccgggttgcctggagcagtaggacagaatggaataccaggacctaagggagaacctggagaacaaggtgaaaagagggagacgctggagagaacggccccaagggtgacacaggcgaaaagggtgaccctggatcatctgctgcaggaattaagggagaacctggggaatctggtcgtccagggcaaaagggtgaaccagggcttcctgggcttcctggacttccggggataaagggagaaccaggtttcattggtcctcaaggagaaccaggcttaccaggtttaccaggaacaaaaggtgaacggggggaagcagggcctcctggaagaggtgagcgaggggaacctggagcccccggaccaaaggggaaacaaggtgaatcaggaactagaggcccaaaggggtcaaagggggatcgtggagaaaaaggggactctggagctcagggaccaaggggtccacctggtcaaaaaggggatcaaggagccactaagatcatagactacaacggcaacctccacgaagccttacagaggattaccaccttaactgtcacgggtccccctggacctcctggacctcaaggactacaagggccaaagggagagcagggatctccaggaatcccaggaatggatggagagcagggactcaaaggctcaaagggagacatgggggacccaggtatgacaggtgaaaaaggaggaattggacttcctggattaccgggagccaatggaatgaaaggagaaaaaggagattctggaatgccgggtccacagggtccttctatcataggcccaccaggcccaccaggtccccatggcccacctggccccatgggacctcatggacttcctggaccaaagggtacagatggtcctatgggaccccatggccctgcaggtcccaaaggagaaagaggtgaaaaaggagctatgggagagcctggaccaagagggccctatgggctgcctgggaaagatggagagcctggtcttgatggcttccctggtccacggggtgagaagggtgatctaggagaaaagggagaaaaggtgacctctccatcccagcatgtaccttgtttgattcttctcctgctgtctgctttgctgttcagcttgtgtgattccatttgacacttaatctttctccatcctgtgctccaaaaacatactgatgcctgatttaaggaatcaggtcttcagagaggaatgaagaaggctgtactgccagatataagggcactgcctggcatagaagaaaaaattattatcaccagatattctagctacagtttttcaaccacctgacaccaatttatggaaaaataaaggatttttgaaaaaaa

SEQ ID NO: 86217 - DNA, 863 bp, Homo sapiens
  misc_feature (482)..(482): n is a, c, g, or t
  misc_feature (796)..(797): n is a, c, g, or t
  misc_feature (803)..(803): n is a, c, g, or t
  misc_feature (807)..(807): n is a, c, g, or t
  misc_feature (810)..(810): n is a, c, g, or t
  misc_feature (814)..(814): n is a, c, g, or t
  misc_feature (829)..(829): n is a, c, g, or t
  misc_feature (834)..(834): n is a, c, g, or t
agatggtagtacgaggcggtgtatgtatctacacgaaggcctcaggtaaacgaggtagagaggcgaagaggagaatctggtcctcctggccctcctggtccaaaaggcgataagggagaacaaggtgatcagggacctaggggcctgccaggcttccccacagttgctgccctgcacagtaatcagatcctcaccgtcaagggtgaccaaggacaggcagggcctccaggaccccctggccctccaggcccaagagggccacctggggacacagggaaagatggcccccgtggaatgccaggagtacccggtgaaccaggaaagccaggagaacaaggcttgatgggtcctctagggcctccgggacaaaagggttctattggagcacctggaattccagggatgaatgggcaaaagggtgagcccgggttgcctggagcagtaggacagaatggaataccaggacctaagggagaacctgnagaacaaggtgaaaagggagacgctggagagaacggccccaagggtgacacaggcgaaaagggtgaccctggatcatctgctgcaggaattaagggagaacctggggaatctggtcgtccagggcaaaagggagaaccaggtttcattggtcctcaaggagaaccaggcttaccaggtttaccaggaacaaaaggtgaacggggggaagcagggcctcctggaagaggtgagcgaggggaacctggagcccccggaccaaaggggatcgtgacgaacaagggactctggagctcagggacaaagggtcacctgnncaaacngggncangagncctggatcttaatanacgcnacttcccaaaactccaagatacccttttg

SEQ ID NO: 86218 - DNA, 695 bp, Homo sapiens
ggtttggttgtcaggtcagctgaacacttagctgatagctagcattagctgctggccaggtgcataagccatcttagatgtccagcccaggttcatagaatgggatgcccactgatgacaatgccaggccctccagggaaacgaggtaagagaggccgaagaggagaatctggtcctcctggacagcctggtcctcagggccctcctggtccaaaaggcgataagggagaacaaggtgatcagggacctaggggcctgccaggcttccccacagttgctgccctgcacagtaatcagatcctcaccgtcaagggtgaccaaggacaggcagggcctccaggaccccctggccctccaggcccaagagggccacctggggacacagggaaagatggcccccgtggaatgccaggagtacccggtgaaccaggaaagccaggagaacaaggcttgatgggtcctctagggcctccgggacaaaagggttctattggagcacctggaattccagggatgaatgggcaaaagggtgagcccgggttgcctggagcagtaggacagaatggaataccaggacctaagggagaacctggagaacaaggtgaaaagggagacgctggagagaacggcccaagggtgacacaggcgaaaaagggtgacctggatcatctgctgcaggaattaagggagaaccg

SEQ ID NO: 86219 - DNA, 560 bp, Homo sapiens
tacatttctaagaattttgagggcttggactattcctgctgctctacagttgaggtaatgccaccatcaatgaaacttcagataaatttcctattgcattgaaaaaagagagagagctgggtttgccctgcccctgaccttcagcgctgccaacctgttccagctggctgctgtccacttcagcactgagtgttaaaatgcctatacctacagatgaacttttccttagaggcttccctggtccacggggtgagaagggtgatctaggagaaaagggagaaaaggggccagatggcttacccatgcctggctgttggcaaaagtgatgaatctaacctttcaagcatgaagttgtgtatataagggtccatttttaatatttatagttgaaaactgaattgcagattttacaagtctgagatatgtttacatagggctgcttcttcctgttggcagtagtatacatgtccatttttactccacttacatctgaaattgggcaatttgtgaaaccagtgagaatcctgcaaaaaatatagatcagtatctccttaaaaaaa

SEQ ID NO: 86220 - DNA, 223 bp, Homo sapiens
ggcctagggagggagataggcaagtaaaggtacaattattaatagagtaagtgcatagaaggtccctctaagtcttaagagccaagggtggctttgaggctgcttcttcctgttggcagtagtatacatgtccatttttactccacttacatctgaaattgggcaatttgtgaaaccagtgagaatcctgcaaaaaatatagatcagtatctccttaaaaaaa

SEQ ID NO: 86221 - DNA, 2765 bp, Homo sapiens
  misc_feature (1469)..(1469): n is a, c, g, or t
ccgcgacttcggcttcgcgagtagcattggttccttgggtttatttcgttttcctctctcttctccaccttagtcgcccctttcgcgctgcgctgtagcgtgctctcacagcctttttgccttgaactgaatgcaggtgggaaacaggtcggcgtgccgaaagacaccgagtaggtagaaataaggcaaactcacagaggcgcaacaggtccggtcctccgtggccagggcgagccgcggccccgcgtggcgcctcggccgttgccctcggaccctgagcggccactgttggggccctcgaaagaggtgtcggtcctctgggagtcggaagagctgtctgggtgggtttcgtcttgctttttaccccaccgccacccagtccccggacggagggtgcttttcacttccagctgggaggagagaagaaagcggggatggtgcacgcctgcgggtctggacgctgagcaaggcaggggtccgtatccgctcgtgggcttgactccaccaactagttgtgcagccacagggactgaactttggaggaatcgacctttttctttccttttaggattatttgaggtgtagagggtgggaagcgaagccgagacggccgaccccgccacgatgctgctgaagaagcacgcagggaaaggagggggccgggagcccagatccgaggacccgacccctgccgaacagcattgttcccggaccatgcccccgtgtgccgtcctggcggccctcctgtcagtggtggccgtggtgtcttgcctgtacctgggtgtgaaaaccaacgacctccaggcgaggatcgccgctctcgaatccgccaaaggggccccctccattcatctgctgcctgataccctggatcacctcaagactatggtgcaagagaaagtggagcgacttctggctcagaaatcctatgaacatatggctaaaataagaatcgcaagagaagcaccttcagaatgtaactgcccagcaggccctccagggaaacgaggtaagagaggccgaagaggagaatctggtcctcctggacagcctggtcctcagggccctcctggtccaaaaggcgataagggagaacaaggtgatcagggacctaggatggtgtttcctaaaatcaatcatgggtttctctctgctgatcagcagctcattaaacgccgcctgattaagggtgaccaaggacaggcagggcctccaggaccccctggccctccaggcccaagagggccacctggggacacagggaaagatggcccccgtggaatgccaggagtacccggtgaaccaggaaagccaggagaacaaggcttgatgggtcctctagggcctccgggacaaaagggttctattggagcacctggaattccagggatgaatgggcaaaagggtgagcccgggttgcctggagcagtaggacagaatggaataccaggacctaagggagaacctgnagaacaaggtgaaaagggagacgctggagagaacggccccaagggtgacacaggcgaaaagggtgaccctggatcatctgctgcaggaattaagggagaacctggggaatctggtcgtccagggcaaaagggtgaaccagggcttcctgggcttcctggacttccggggataaagggagaaccaggtttcattggtcctcaaggagaaccaggcttaccaggtttaccaggaacaaaaggtgaacggggggaagcagggcctcctggaagaggtgagcgaggggaacctggagcccccggaccaaaggggaaacaaggtgaatcaggaactagaggcccaaaggggtcaaagggggatcgtggagaaaaaggggactctggagctcagggaccaaggggtccacctggtcaaaaaggggatcaaggagccactaagatcatagactacaacggcaacctccacgaagccttacagaggattaccaccttaactgtcacgggtccccctggacctcctggacctcaaggactacaagggccaaagggagagcagggatctccaggaatcccaggaatggatggagagcagggactcaaaggctcaaagggagacatgggggacccaggtatgacaggtgaaaaaggaggaattggacttcctggattaccgggagccaatggaatgaaaggagaaaaaggagattctggaatgccgggtccacagggtccttctatcataggcccaccaggcccaccaggtccccatggcccacctggccccatgggacctcatggacttcctggaccaaagggtacagatggtcctatgggaccccatggccctgcaggtcccaaaggagaaagaggtgaaaaaggagctatgggagagcctggaccaagagggccctatgggctgcctgggaaagatggagagcctggtcttgatggcttccctggtccacggggtgagaagggtgatctaggagaaaagggagaaaaggtgacctctccatcccagcatgtaccttgtttgattcttctcctgctgtctgctttgctgttcagcttgtgtgattccatttgacacttaatctttctccatcctgtgctccaaaaacatactgatgcctgatttaaggaatcaggtcttcagagaggaatgaagaaggctgtactgccagatataagggcactgcctggcatagaagaaaaaattattatcaccagatattctagctacagtttttcaaccacctgacaccaatttatggaaaaataaaggatttttgaaaaaaa

SEQ ID NO: 86222 - DNA, 2730 bp, Homo sapiens
  misc_feature (1376)..(1376): n is a, c, g, or t
ccgcgacttcggcttcgcgagtagcattggttccttgggtttatttcgttttcctctctcttctccaccttagtcgcccctttcgcgctgcgctgtagcgtgctctcacagcctttttgccttgaactgaatgcaggtgggaaacaggtcggcgtgccgaaagacaccgagtaggtagaaataaggcaaactcacagaggcgcaacaggtccggtcctccgtggccagggcgagccgcggccccgcgtggcgcctcggccgttgccctcggaccctgagcggccactgttggggccctcgaaagaggtgtcggtcctctgggagtcggaagagctgtctgggtgggtttcgtcttgctttttaccccaccgccacccagtccccggacggagggtgcttttcacttccagctgggaggagagaagaaagcggggatggtgcacgcctgcgggtctggacgctgagcaaggcaggggattatttgaggtgtagagggtgggaagcgaagccgagacggccgaccccgccacgatgctgctgaagaagcacgcagggaaaggagggggccgggagcccagatccgaggacccgacccctgccgaacagcattgttcccggaccatgcccccgtgtgccgtcctggcggccctcctgtcagtggtggccgtggtgtcttgcctgtacctgggtgtgaaaaccaacgacctccaggcgaggatcgccgctctcgaatccgccaaaggggccccctccattcatctgctgcctgataccctggatcacctcaagactatggtgcaagagaaagtggagcgacttctggctcagaaatcctatgaacatatggctaaaataagaatcgcaagagaagcaccttcagaatgtaactgcccagcaggccctccagggaaacgaggtaagagaggccgaagaggagaatctggtcctcctggacagcctggtcctcagggccctcctggtccaaaaggcgataagggagaacaaggtgatcagggacctaggatggtgtttcctaaaatcaatcatgggtttctctctgctgatcagcagctcattaaacgccgcctgattaagggtgaccaaggacaggcagggcctccaggaccccctggccctccaggcccaagagggccacctggggacacagggaaagatggcccccgtggaatgccaggagtacccggtgaaccaggaaagccaggagaacaaggcttgatgggtcctctagggcctccgggacaaaagggttctattggagcacctggaattccagggatgaatgggcaaaagggtgagcccgggttgcctggagcagtaggacagaatggaataccaggacctaagggagaacctgnagaacaaggtgaaaagggagacgctggagagaacggccccaagggtgacacaggcgaaaagggtgaccctggatcatctgctgcaggaattaagggagaacctggggaatctggtcgtccagggcaaaagggtgaaccagggcttcctgggcttcctggacttccggggataaagggagaaccaggtttcattggtcctcaaggagaaccaggcttaccaggtttaccaggaacaaaaggtgaacggggggaagcagggcctcctggaagaggtgagcgaggggaacctggagcccccggaccaaaggggaaacaaggtgaatcaggaactagaggcccaaaggggtcaaagggggatcgtggagaaaaaggggactctggagctcagggaccaaggggtccacctggtcaaaaaggggatcaaggagccactaagatcatagactacaacggcaacctccacgaagccttacagaggattaccaccttaactgtcacgggtccccctggacctcctggacctcaaggactacaagggccaaagggagagcagggatctccaggaatcccaggaatggatggagagcagggactcaaaggctcaaagggagacatgggggacccaggtatgacaggtgaaaaaggaggaattggacttcctggattaccgggagccaatggaatgaaaggagaaaaaggagattctggaatgccgggtccacagggtccttctatcataggcccaccaggcccaccaggtccccatggcccacctggccccatgggacctcatggacttcctggaccaaagggtacagatggtcctatgggaccccatggccctgcaggtcccaaaggagaaagaggtgaaaaaggagctatgggagagcctggaccaagagggccctatgggctgcctgggaaagatggagagcctggtcttgatggcttccctggtccacggggtgagaagggtgatctaggagaaaagggagaaaagggattccgtggcgttaagggggaaaaaggggagccaggccagcctggcctggatgggctggatgccccttgccaattggggccagatggcttacccatgcctggctgttggcaaaagtgatgaatctaacctttcaagcatgaagttgtgtatataagggtccatttttaatatttatagttgaaaactgaattgcagattttacaagtctgagatatgtttacatagggctgcttcttcctgttggcagtagtatacatgtccatttttactccacttacatctgaaattgggcaatttgtgaaaccagtgagaatcctgcaaaaaatatagatcagtatctccttaaaaaaa

SEQ ID NO: 86223 - DNA, 925 bp, Homo sapiens
ccgcgacttcggcttcgcgagtagcattggttccttgggtttatttcgttttcctctctcttctccaccttagtcgcccctttcgcgctgcgctgtagcgtgctctcacagcctttttgccttgaactgaatgcaggtgggaaacaggtcggcgtgccgaaagacaccgagtaggtagaaataaggcaaactcacagaggcgcaacaggtccggtcctccgtggccagggcgagccgcggccccgcgtggcgcctcggccgttgccctcggaccctgagcggccactgttggggccctcgaaagaggtgtcggtcctctgggagtcggaagagctgtctgggattatttgaggtgtagagggtgggaagcgaagccgagacggccgaccccgccacgatgctgctgaagaagcacgcagggaaaggagggggccgggagcccagatccgaggacccgacccctgccgaacagcattgttcccggaccatgcccccgtgtgccgtcctggcggccctcctgtcagtggtggccgtggtgtcttgcctgtacctgggtgtgaaaaccaacgacctccaggcgaggatcgccgctctcgaatccgccaaaggggccccctccattcatctgctgcctgataccctggatcacctcaagactatggtgcaagagaaagtggagcgacttctggctcagaaatcctatgaacatatggctaaaataagaatcgcaagagaagcaccttcagaatgtaactgcccagcaggccctccagggaaacgaggtaagagaggccgaagaggagaatctggtcctcctggacagcctggtcctcagggccctcctggtccaaaaggcgataagggagaacaaggtgatcagggacctagggggtctctagggcctccgggacgaaagggtctattg

SEQ ID NO: 86224 - DNA, 1645 bp, Homo sapiens
ccgcgacttcggcttcgcgagtagcattggttccttgggtttatttcgttttcctctctcttctccaccttagtcgcccctttcgcgctgcgctgtagcgtgctctcacagcctttttgccttgaactgaatgcaggtgggaaacaggtcggcgtgccgaaagacaccgagtaggtagaaataaggcaaactcacagaggcgcaacaggtccggtcctccgtggccagggcgagccgcggccccgcgtggcgcctcggccgttgccctcggaccctgagcggccactgttggggccctcgaaagaggtgtcggtcctctgggagtcggaagagctgtctgggtgggtttcgtcttgctttttaccccaccgccacccagtccccggacggagggtgcttttcacttccagctgggaggagagaagaaagcggggatggtgcacgcctgcgggtctggacgctgagcaaggcaggggtccgtatccgctcgtgggcttgactccaccaactagttgtgcagccacagggactgaactttggaggaatcgacctttttctttccttttaggattatttgaggtgtagagggtgggaagcgaagccgagacggccgaccccgccacgatgctgctgaagaagcacgcagggaaaggagggggccgggagcccagatccgaggacccgacccctgccgaacagcattgttcccggaccatgcccccgtgtgccgtcctggcggccctcctgtcagtggtggccgtggtgtcttgcctgtacctgggtgtgaaaaccaacgacctccaggcgaggatcgccgctctcgaatccgccaaaggggccccctccattcatctgctgcctgataccctggatcacctcaagactatggtgcaagagaaagtggagcgacttctggctcagaaatcctatgaacatatggctaaaataagaatcgcaagagaagcaccttcagaatgtaactgcccagcaggccctccagggaaacgaggtaagagaggccgaagaggagaatctggtcctcctggacagcctggtcctcagggccctcctggtccaaaaggcgataagggagaacaaggtgatcagggacctaggaattaatacacgtattgtatgtcctgagttgtaaacagaatgtcaattgagggaaattacagtgtggttttcgtaacagtgtctatagttatctccattttgtactaacattttgtaattaagatgttgtaattttgtaagtaagattccagaaatgcttcgtgtagcaaactctttacaccgtgtagacacagatcccattgtacctgccccaggctcagtgacaatgagctctcagtttccctattccatgctttaagaaattattggtttgactgggcatggtggttcacgcctgtaatcccagcactttgggaggccgaggcagtcagatcccttgaggtcaggagtttgagaccagcctggccaacatagtgaaacccagtctctactacaaatacaaaaattagctgggcgtggtggtgcacacctgtaatcccagctactgggcaggctgagacagagaatcacttgaaccctggaggcagaggcttcagtgagctgagattgtaaccactgcactgcggcc

SEQ ID NO: 86225 - DNA, 355 bp, Homo sapiens
attaactggctctgactctgtgttgttcattatgggacagtgaggtatgatgtaatggaagggcatcaggctagaaaactacatggtcttaaggtcattggataatctcttggggcattgttttccttggtgtgtgatgaagctaatataatgaggtacttgtccagcctacctcacagggatgttgtgaggataaaatgagataatagatatgaaactggcttggaaaaaaaagaaaagcattatacacatgcaaggttaccacctttttattttcactgttgcctcatgggcaacttatgttcatggactctaaaaattttagagtccttgcatattagaaatgtaaaaatgg

SEQ ID NO: 86226 - DNA, 264 bp, Homo sapiens
aagatcacaccactgcactccagcctgggtgacagagcgagactccatctcaaaaaaaaaaaaatgtcctgccccttcctgaaatatggagtaggagatattcttaactacaaccacaggtagcagggctgctaagggagtataagggtggcaggagtttcaatggatgaagacagctcagtaaaggaaagacaagaagattctcggaaatccatgccatctgacaactcagataagcctgccaacctgatccctgggagagag

SEQ ID NO: 86227 - DNA, 1748 bp, Homo sapiens
aacagaggtagcctgaaagaagcaggaactccaggatcccaaaccagagcagaccctatagtaaagtatttttacatcttttcctttccccagaagagatccctaacctattgttttattgacagccttgctgttagaggctctttcccagaagttggacgaagaggctcaggcgttgctgtttcttgtcttccaagtcaagtggttactctggtaatggattgcctctctccgagctttcaccctggtgagactgtccagatctagtctgtaaacccagcttagaagcactgttgtaaaaatgactgaagagcccatcaaggagatcctgggagccccaaaggctcacatggcagcgacgatggagaagagccccaagagtgaagttgtgatcaccacagtccctctggtcagtgagattcagttgatggctgctacagggggtaccgagctctcctgctaccgctgcatcatcccctttgctgtggttgtcttcatcgccggcatcgtggtcaccgcggtggcttacagcttcaattcccatgggtctattatctccatctttggcctggttgttctgtcatctggactttttttactagcctccagtgccttgtgctggaaagtgagacaaaggagcaagaaagccaagagacgggagagtcaaacagctctcgtggcaaatcagagaagcttgtttgcttgagactgaatacgaccaaatgggccattgggcctggaaaacgtgctctgactttgtcacccaattcacccagaaccatggtgggagagaacagacttggcgttggagcagactggaagaatgggggtgggagggtggaggggcttctcctttgtgaggaatgactcatgtcttctttaacgacaaacttaaccctaagggctacttctgagactgaaaaatcagctttctatttacatgaaacactttgggggtcatgggagtgcacagcattagacagtatttggttcaccctgtaaagtagccaagaaaagatgagaaaaatcaagataggcctggcacactagacatttgcctccaaaagaaataacctacagtcttaagatgtatcataaaaatgttctgccaaggatctaaattaccttgggtttcgcatatgtctatgaaattctgtgataatttttttcaatacattgattcactggcgtctgttttcattttatacttttaataactcatcactggtggtactttatcttgaaaagtaatattttttatattttaacattggacagtgttagccagttgtaatgatgtatcagaagtaaagaaaaacccattaaagttatagctaatagatgctgttgggggttaaattaatagtaaaataatccaatatagcacttttgatgatttttatataaaagtcaactgtacatttcattcagaataataaatacttattgctgctaaaacttcttaaatggttgtttctgctatagttatttctattgcagttccaaattgccatcttcccttgtctcatttgcaagttctcaattgtatttctctcaaatggacaggttccttctttactggaggatttttgtttttatcatattggtttttcattacttctgaatagtcttaattacgtttactaaattctaaaggatttctgtgctattataattaggaaatcaacgtctttggtcaggaactttataatgtgctattaaatgtatattacatttttgtggaatca

SEQ ID NO: 86228 - DNA, 334 bp, Homo sapiens
aacagaggtagcctgaaagaagcaggaactccaggatcccaaaccagagcagaccctatagtaaagtatttttacatcttttcctttccccagaagagatccctaacctattgttttattgacagccttgctgttagaggctctttcccagaagttggacgaagaggctcaggcgttgctgtttcttgtcttccaagtcaagtggttactctggtaatggattgcctctctccgaggtgagtgtaagtaatttggggacagatcttgattttcaggttagctcaatctcagctttggggtgaagttatttttttcagacataatctcaaatatc

SEQ ID NO: 86229 - DNA, 1464 bp, Homo sapiens
aacagaggtagcctgaaagaagcaggaactccaggatcccaaaccagagcagaccctatagtaaagtatttttacatcttttcctttccccagaagagatccctaacctattgttttattgacagccttgctgttagaggctctttcccagaagttggacgaagaggctcaggcgttgctgtttcttgtcttccaagtcaagtggttactctggtaatggattgcctctctccgagctttcaccctggtgagactgtccagatctagtctgtaaacccagcttagaagcactgttgtaaaaatgactgaagagcccatcaaggagatcctgggagccccaaaggctcacatggcagcgacgatggagaagagccccaagagtgaagttgtgatcaccacagtccctctggtcagtgagattcagttgatggctgctacagggggtaccgagctctcctgctaccgctgcatcatcccctttgctgtggttgtcttcatcgccggcatcgtggtcaccgcggtggcttacagcttcaattcccatgggtctattatctccatctttggcctggttgttctgtcatctggactttttttactagcctccagtgccttgtgctggaaagtgagacaaaggagcaagaaagccaagagacgggagagtcaaacagctctcgtggcaaatcagagaagcttgtttgcttgagactgaatacgaccaaatgggccattgggcctggaaaacgtgctctgactttgtcacccaattcacccagaaccatggtgggagagaacagacttggcgttggagcagactggaagaatgggggtgggagggtggaggggcttctcctttgtgaggaatgactcatgtcttctttaacgacaaacttaaccctaagggctacttctgagactgaaaaatcagctttctatttacatgaaacactttgggggtcatgggagtgcacagcattagacagtatttggttcaccctgtaaagtagccaagaaaagatgagaaaaatcaagataggcctggcacactagacatttgcctccaaaagaaataacctacagtcttaagatgtatcataaaaatgttctgccaaggatctaaattaccttgggtttcgcatatgtctatgaaattctgtgataatttttttcaatacattgattcactggcgtctgttttcattttatacttttaataactcatcactggtggtactttatcttgaaaagtaatattttttatattttaacattggacagtgttagccagttgtaatgatgtatcagaagtaaagaaaaacccattaaagttatagctaatagatgctgttgggggttaaattaatagtaaaataatccaatatagcacttttgatgatttttatataaaagtcaactgtacatttcattcagaataataaatacttattgctgctaaaacttctt

SEQ ID NO: 86230 - DNA, 1647 bp, Homo sapiens
agcggctaactctggctgggaaagccttgctgttagaggctctttcccagaagttggacgaagaggctcaggcgttgctgtttcttgtcttccaagtcaagtggttactctggtaatggattgcctctctccgagctttcaccctggtgagactgtccagatctagtctgtaaacccagcttagaagcactgttgtaaaaatgactgaagagcccatcaaggagatcctgggagccccaaaggctcacatggcagcgacgatggagaagagccccaagagtgaagttgtgatcaccacagtccctctggtcagtgagattcagttgatggctgctacagggggtaccgagctctcctgctaccgctgcatcatcccctttgctgtggttgtcttcatcgccggcatcgtggtcaccgcggtggcttacagcttcaattcccatgggtctattatctccatctttggcctggttgttctgtcatctggactttttttactagcctccagtgccttgtgctggaaagtgagacaaaggagcaagaaagccaagagacgggagagtcaaacagctctcgtggcaaatcagagaagcttgtttgcttgagactgaatacgaccaaatgggccattgggcctggaaaacgtgctctgactttgtcacccaattcacccagaaccatggtgggagagaacagacttggcgttggagcagactggaagaatgggggtgggagggtggaggggcttctcctttgtgaggaatgactcatgtcttctttaacgacaaacttaaccctaagggctacttctgagactgaaaaatcagctttctatttacatgaaacactttgggggtcatgggagtgcacagcattagacagtatttggttcaccctgtaaagtagccaagaaaagatgagaaaaatcaagataggcctggcacactagacatttgcctccaaaagaaataacctacagtcttaagatgtatcataaaaatgttctgccaaggatctaaattaccttgggtttcgcatatgtctatgaaattctgtgataatttttttcaatacattgattcactggcgtctgttttcattttatacttttaataactcatcactggtggtactttatcttgaaaagtaatattttttatattttaacattggacagtgttagccagttgtaatgatgtatcagaagtaaagaaaaacccattaaagttatagctaatagatgctgttgggggttaaattaatagtaaaataatccaatatagcacttttgatgatttttatataaaagtcaactgtacatttcattcagaataataaatacttattgctgctaaaacttcttaaatggttgtttctgctatagttatttctattgcagttccaaattgccatcttcccttgtctcatttgcaagttctcaattgtatttctctcaaatggacaggttccttctttactggaggatttttgtttttatcatattggtttttcattacttctgaatagtcttaattacgtttactaaattctaaaggatttctgtgctattataattaggaaatcaacgtctttggtcaggaactttataatgtgctattaaatgtatattacatttttgtggaatca

SEQ ID NO: 86231 - DNA, 1779 bp, Homo sapiens
cacttcagaccacaaatccccacctcattttcaatgaattttttgctgaactgtccacctaaagtgggtaataaaaagatcccagggagcaggttgcactgtgtttaatagtaacacaataaagatttgttggctgtcattcaatggagaagaacatcatttgttgctggccacttgccttgacattgattttgtgggcagccaatgggtgatagtttgcaaagaatgcatgttatgcccagcaagattggcggagtctgagttgctctttcaccctggtgagactgtccagatctagtctgtaaacccagcttagaagcactgttgtaaaaatgactgaagagcccatcaaggagatcctgggagccccaaaggctcacatggcagcgacgatggagaagagccccaagagtgaagttgtgatcaccacagtccctctggtcagtgagattcagttgatggctgctacagggggtaccgagctctcctgctaccgctgcatcatcccctttgctgtggttgtcttcatcgccggcatcgtggtcaccgcggtggcttacagcttcaattcccatgggtctattatctccatctttggcctggttgttctgtcatctggactttttttactagcctccagtgccttgtgctggaaagtgagacaaaggagcaagaaagccaagagacgggagagtcaaacagctctcgtggcaaatcagagaagcttgtttgcttgagactgaatacgaccaaatgggccattgggcctggaaaacgtgctctgactttgtcacccaattcacccagaaccatggtgggagagaacagacttggcgttggagcagactggaagaatgggggtgggagggtggaggggcttctcctttgtgaggaatgactcatgtcttctttaacgacaaacttaaccctaagggctacttctgagactgaaaaatcagctttctatttacatgaaacactttgggggtcatgggagtgcacagcattagacagtatttggttcaccctgtaaagtagccaagaaaagatgagaaaaatcaagataggcctggcacactagacatttgcctccaaaagaaataacctacagtcttaagatgtatcataaaaatgttctgccaaggatctaaattaccttgggtttcgcatatgtctatgaaattctgtgataatttttttcaatacattgattcactggcgtctgttttcattttatacttttaataactcatcactggtggtactttatcttgaaaagtaatattttttatattttaacattggacagtgttagccagttgtaatgatgtatcagaagtaaagaaaaacccattaaagttatagctaatagatgctgttgggggttaaattaatagtaaaataatccaatatagcacttttgatgatttttatataaaagtcaactgtacatttcattcagaataataaatacttattgctgctaaaacttcttaaatggttgtttctgctatagttatttctattgcagttccaaattgccatcttcccttgtctcatttgcaagttctcaattgtatttctctcaaatggacaggttccttctttactggaggatttttgtttttatcatattggtttttcattacttctgaatagtcttaattacgtttactaaattctaaaggatttctgtgctattataattaggaaatcaacgtctttggtcaggaactttataatgtgctattaaatgtatattacatttttgtggaatca

SEQ ID NO: 86232 - DNA, 1224 bp, Homo sapiens
gagtctaactctggctgggaaagccttgctgttagaggctctttcccagaagttggacgaagaggctcacatggcagcgacgatggagaagagccccaagagtgaagttgtgatcaccacagtccctctggtcagtgagattcagttgatggctgctacagggggtaccgagctctcctgctaccgctgcatcatcccctttgctgtggttgtcttcatcgccggcatcgtggtcaccgcggtggcttacagcttcaattcccatgggtctattatctccatctttggcctggttgttctgtcatctggactttttttactagcctccagtgccttgtgctggaaagtgagacaaaggagcaagaaagccaagagacgggagagtcaaacagctctcgtggcaaatcagagaagcttgtttgcttgagactgaatacgaccaaatgggccattgggcctggaaaacgtgctctgactttgtcacccaattcacccagaaccatggtgggagagaacagacttggcgttggagcagactggaagaaataacctacagtcttaagatgtatcataaaaatgttctgccaaggatctaaattaccttgggtttcgcatatgtctatgaaattctgtgataatttttttcaatacattgattcactggcgtctgttttcattttatacttttaataactcatcactggtggtactttatcttgaaaagtaatattttttatattttaacattggacagtgttagccagttgtaatgatgtatcagaagtaaagaaaaacccattaaagttatagctaatagatgctgttgggggttaaattaatagtaaaataatccaatatagcacttttgatgatttttatataaaagtcaactgtacatttcattcagaataataaatacttattgctgctaaaacttcttaaatggttgtttctgctatagttatttctattgcagttccaaattgccatcttcccttgtctcatttgcaagttctcaattgtatttctctcaaatggacaggttccttctttactggaggatttttgtttttatcatattggtttttcattacttctgaatagtcttaattacgtttactaaattctaaaggatttctgtgctattataattaggaaatcaacgtctttggtcaggaactttataatgtgctattaaatgtatattacatttttgtggaatca

SEQ ID NO: 86233 - DNA, 1588 bp, Homo sapiens
agagagagagagagagagagagagagagagagagagagagagagagagagagagagagagagagagagagagagagagagagagagagagagagtgtccagatctagtctgtaaacccagcttagaagcactgttgtaaaaatgactgaagagcccatcaaggagatcctgggagccccaaaggctcacatggcagcgacgatggagaagagccccaagagtgaagttgtgatcaccacagtccctctggtcagtgagattcagttgatggctgctacagggggtaccgagctctcctgctaccgctgcatcatcccctttgctgtggttgtcttcatcgccggcatcgtggtcaccgcggtggcttacagcttcaattcccatgggtctattatctccatctttggcctggttgttctgtcatctggactttttttactagcctccagtgccttgtgctggaaagtgagacaaaggagcaagaaagccaagagacgggagagtcaaacagctctcgtggcaaatcagagaagcttgtttgcttgagactgaatacgaccaaatgggccattgggcctggaaaacgtgctctgactttgtcacccaattcacccagaaccatggtgggagagaacagacttggcgttggagcagactggaagaatgggggtgggagggtggaggggcttctcctttgtgaggaatgactcatgtcttctttaacgacaaacttaaccctaagggctacttctgagactgaaaaatcagctttctatttacatgaaacactttgggggtcatgggagtgcacagcattagacagtatttggttcaccctgtaaagtagccaagaaaagatgagaaaaatcaagataggcctggcacactagacatttgcctccaaaagaaataacctacagtcttaagatgtatcataaaaatgttctgccaaggatctaaattaccttgggtttcgcatatgtctatgaaattctgtgataatttttttcaatacattgattcactggcgtctgttttcattttatacttttaataactcatcactggtggtactttatcttgaaaagtaatattttttatattttaacattggacagtgttagccagttgtaatgatgtatcagaagtaaagaaaaacccattaaagttatagctaatagatgctgttgggggttaaattaatagtaaaataatccaatatagcacttttgatgatttttatataaaagtcaactgtacatttcattcagaataataaatacttattgctgctaaaacttcttaaatggttgtttctgctatagttatttctattgcagttccaaattgccatcttcccttgtctcatttgcaagttctcaattgtatttctctcaaatggacaggttccttctttactggaggatttttgtttttatcatattggtttttcattacttctgaatagtcttaattacgtttactaaattctaaaggatttctgtgctattataattaggaaatcaacgtctttggtcaggaactttataatgtgctattaaatgtatattacatttttgtggaatca

SEQ ID NO: 86234 - DNA, 446 bp, Homo sapiens
tttggctgacaaaggattgattctcagtggagccctgagatacaagtgctcatagttcacttagtttgaggaatggccctaaatgagtttcttagaaataggtggttttaaaaacttgtggattgtaattaaaatgtaattatgataatgattatgagcataagcagaattctcaggagataggaacaggtgaattagctggtaatgggacatttgaccccacagagctgtgcacagactgttcgaagttcagtgaatattaggtgaattgctttaaagtgatacccttgtgacctgttggagttaataatttttcaagtacctaatctactagtaggaaacaacttattccaatacatagtagtaaaaatacagactgtgaaagccagaagagattttaacaatcagtgatctggcctctccttcaataaatttaaagagtgatc

SEQ ID NO: 86235 - DNA, 322 bp, Homo sapiens
ctaaccccaggcacacacgtgagcacctcacatctgggctctaaggataaaaccaccagcaccttgtacagggctcttcctggtgatgccaaatacttagaagaaacctggtctagagaagactcgagttcaagttccagctctgacgattgttaacagggagaccttgggcaaaggtgctggtcacggaggcagctgtacaaccaggctcagtggtatccaccctccaagcaaggggaactgaggaaaaatgcctgagaaacgtgcagcgtctgttcaatctctgaaccacgttaatacaaccatcttcagggatgcagga

SEQ ID NO: 86236 - DNA, 352 bp, Homo sapiens
actcagtgtcttgaaatcagcacaacaaaatggtgcctgaggagcagtgtttactttgatcattcttcaacttctgtgccccagcctttcacagagcacaaattgctttaccagagttacggtgctgaagcccacgactgtttttgtagtctggttgctgtggtgatccttagccttccatgaaactcccatctctagggaaatagaaacctttgcagctgtctcggcctttttggttttgtatctggtggaggtcttcaccgagcttgttcaagcctgagagtgatcggtttgtgtcagagtaaaatacacacatggaaacagggcatccccttcaggatgtgttgtatta

SEQ ID NO: 86237 - DNA, 474 bp, Homo sapiens
tgtattagtctgttttcatgctgctgataaagacatacctgagactgggcaatttacaaaagaaagaggtttattggacttacagtttcacatgactgaggaagcctcataatcatggtggaaggcaaacagcacgtctcacatggtggtggcaagagggagaacgaaagccaagcgaaacagtttccccttatcaaaccatcaggtcttgtgagacttattcacaaccacaagaacagtatgggtgaaactgcccccatgattcaattatctcccactgtgtccctcccacaaaacggaattatgggagtacaattcaagatgacatatgggtggggacacagagccaaaccatatcagttggtttaacaacagacaatgtagttgaccaccttaagagaatatggaaaaagccatatgctcatttcagtaggtattggagaggaatttgacaaaatttaatattcacttatt

SEQ ID NO: 86238 - DNA, 574 bp, Homo sapiens
ggaatattaggataagtttttgtaggtcagaagaatttcaagtagtttttagacaaaacatatccatgagtgtgaaaaaagctgtgttgacgaatagattacatttcacatttaccagcaagtcagtaaaaaatagtgcttatttacatagtcaatataatttaatgttctaaaaataatatcttcgatctgcccaatatttaatgtatcatttgagatttttaaaaatgcatccgctccattatgtaaacattaagatatgcctatgtttctttaactatacagcctctttacaataaatttcttgatttttgtgcacaggatagtattgcaacctgctatttagcctttggtgccttagaattattataaatatttaacaatatgtacataatgtaaatactgccaagagatcagtaaggccaaatattttctctattcactttttattgctcttgctttctattgctactaaagcctcttttatccagctttgtaatagttccaacattgtagcgaatgtaaatgtttactttcaataaatctgaacttgttcaacaagtacggtatatgt

SEQ ID NO: 86239 - DNA, 741 bp, Homo sapiens
tgctttgtttgggccacttgttatttaaggtttataataatcgcactaaacacaatgaaaaacaaaggagaacattgagagatcactttaactttttataatcagtttatgtgtattttatggtagtaaatgataaaatagctagtatctacatatagtttatacatttgtggcatacctttctcttaatttttaaggtatttttaggctacttggctcatctgagtttttcaaagtgttgcgagtctccaaaaacttctcagtgtgtttactgaaaatttatgtgtcagtgggcctgagtggttgaaaacggtgttattcaaaggccgcctgtatttctaattcgtccctctttgtgattactgctggctaaattcagacctacattattagattattggatttatttcctaacatcctttctgcctacaagtttacttccctaattcctcctgctcagttttctgaaggatgtcatatatagctactcctctgcttattgcttattgacctcatctcctgtcacccccactacacccagaccctaaactctgcttttctcagaaaagatgtgcttttcctaactccgtcccacatcttcagtctggaatgttctgtgctcttcagtgtagccttcagcgctcacctacttaaaagtcctttctgctgaagcctgtcttcttctaggagacttagtggacatctgttggggctctcctggctcttattttcttcttagtt

SEQ ID NO: 86240 - DNA, 1278 bp, Homo sapiens
gtccgacggtccacccagtgcttgcggcctcgcggccgggccggcctgggctgcaatcaatgcggctttgtctgggacgcccacatcccagaggccattcccgggtcggcaaatcggagcgcggccggggcgcgcgggggtgagataagcggccatgtgatcccacctgggctggaaggggaggggcgccaggtgaggcggcggccggtggggcgcgggcggccacgcggggctcctgcagcatggctgtcagcaggaaggactggtccgcgctgtccagccttgcccggcagaggactctggaggatgaggaggaacaggagcgcgagcgcaggcggcggcaccgcaacctgagctccaccacggacgatgaggctcccaggctcagccagaatggagaccggcaggcctctgcttctgagagactaccgagcgtggaagaagcagaggtgcccaagccactgcccccagcctccaaagatgaggacgaggacatccagagcatcctcagaacacggcaggagcggaggcagaggcggcaggtggtggaggctgcacaggcccccatccaggagaggctggaggcagaggaggggaggaacagcttgagccctgtgcaggccacacagaaacccctagtctccaagaaggaactggaaatcccacctcgccggagactgagtcgggaacagcggggcccctgggccctggaggaggagagcttggtgggcagggagccagaagagaggaagaaaggggttccagaaaagtccccagtcttggagaagtcctccatgccaaagaagacggccaggagctaagtgcctttttgtgtgcaaccacttaccctttctctgaaaaacctgttctcaggaaggatctgataaactcatttactctcaggtgtaagagactgatgagaccttagaagcgaattcctctctggaggccttgctttctagcagagtcacctgaagtgtgtgaggaggatcatcattttcctcatcccccctcttctcacattaaggtggtggcttgccactcagcagtcctagcttggtgactgggaactgccacatacagggccaggcctaccctccttccccacaagccccctccaacccccacccccatgctctggacctcatggctcctatgagcttggagcatggtgaaccatcagagaatctagaaccaaccaagctaggaacatcagcctggtgcctgttaaccccttaaagctgtggtttacaacttttcaaaaatttaaatcattag

SEQ ID NO: 86241 - DNA, 2842 bp, Homo sapiens
  misc_feature (1906)..(1906): n is a, c, g, or t
  misc_feature (1910)..(1910): n is a, c, g, or t
gtccgacggtccacccagtgcttgcggcctcgcggccgggccggcctgggctgcaatcaatgcggctttgtctgggacgcccacatcccagaggccattcccgggtcggcaaatcggagcgcggccggggcgcgcgggggtgagataagcggccatgtgatcccacctgggctggaaggggaggggcgccaggtgaggcggcggccggtggggcgcgggcggccacgcggggctcctgcagcatggctgtcagcaggaaggactggtccgcgctgtccagccttgcccggcagaggactctggaggatgaggaggaacaggagcgcgagcgcaggcggcggcaccgcaacctgagctccaccacggacgatgaggctcccaggctcagccagaatggagaccggcaggcctctgcttctgagagactaccgagcgtggaagaagcagaggtgcccaagccactgcccccagcctccaaagatgaggacgaggacatccagagcatcctcagaacacggcaggagcggaggcagaggcggcaggtggtggaggctgcacaggcccccatccaggagaggctggaggcagaggaggggaggaacagcttgagccctgtgcaggccacacagaaacccctagtctccaagaaggaactggaaatcccacctcgccggagactgagtcgggaacagcggggcccctgggccctggaggaggagagcttggtgggcagggagccagaagagaggaagaaaggggttccagaaaagtccccagtcttggagaagtcctccatgccaaagaagacggcacctgaaaagagcctggtctccgataaaacctccatctctgagaaggtgctggcctcagagaagacatctctatcagagaagatagcagtgtcagagaaaagaaacagctcagagaagaagtctgttctagaaaaaaccagtgtctctgagaagtcgctggccccagggatggcactgggctcaggaaggaggctggtgtctgagaaagcttccatctttgagaaggcactggcctcagagaagagcccaactgcagatgctaagccggccccaaagagggccacagcctcagagcagcccctggcgcaggagccgccagcctctgggggaagcccagccaccaccaaggagcagagaggaagggccctccctgggaagaacctgccctctttggcaaagcagggggcttcagaccctccgactgtggcctcccgcctcccacccgtcacactccaggtgaaaatccccagcaaggaggaagaggcagatatgtcctcacccacacagcgaacctacagcagctccctcaaacgctccagccccaggaccatctcctttcggatgaaacccaagaaagaaaactcggaaacaaccctaactcgcagtgccagcatgaagctcccagacaacacagtgaagttgggagagaagctggagagataccacacggccatacggagatcagaatctgtcaagtctcggggtctgccttgcactgagttattcgtggctcctgtgggtgtagccagcaagcgccacctctttgagaaggaactggcgggccagagccgagcagaaccagcctccagccggaaggagaacttgaggctctcaggggttgtgacatcaaggctcaacctgtggatcagcaggacccaggaatctggagatcaggacccccaggaggcacagaaagcatcatctgcaaccgagaggactcagtggggacagaaatctgactcctcgctggacgctgaggtgtgacaagccccgccaagacagacctgcaagtcttcgtctcaagggacctccctcatgccaggcccctgcctctcacagcagcaccctttcctctcattgtccctgttcccttnttgnctgtggatctgtttggccagggtccctggggtcaggaatatttgcaagactcagccagctccttcccagcccagcctcttggggctgggactttctcaccctgcggcaggcacaacagatgctgggacccagtctctgcccaggtcacagcacaagtgcacatcagcactatggggcctatgtcctgcccagagacctctgctccttcctgctcacatccacagtcagggcacggcgcccctcaagaactccagagtcacctgtctcatcggctcccagcaagtgcctctttgtctatgatgtcccccttctctgaggcctggacccacccatctttgtccctggggcctgctcccagccactgaggcccgctctggccaggggagaaggagctgccgtgcgtcttccctgtgccccgtctccctgcttggttctcccctcccttccctggccggctgccatggccaggagctaagtgcctttttgtgtgcaaccacttaccctttctctgaaaaacctgttctcaggaaggatctgataaactcatttactctcaggtgtaagagactgatgagaccttagaagcgaattcctctctggaggccttgctttctagcagagtcacctgaagtgtgtgaggaggatcatcattttcctcatcccccctcttctcacattaaggtggtggcttgccactcagcagtcctagcttggtgactgggaactgccacatacagggccaggcctaccctccttccccacaagccccctccaacccccacccccatgctctggacctcatggctcctatgagcttggagcatggtgaaccatcagagaatctagaaccaaccaagctaggaacatcagcctggtgcctgttaaccccttaaagctgtggtttacaacttttcaaaaatttaaatcattag

SEQ ID NO: 86242 - DNA, 1139 bp, Homo sapiens
gtccgacggtccacccagtgcttgcggcctcgcggccgggccggcctgggctgcaatcaatgcggctttgtctgggacgaagcccaatttccgggggccatttccgggtttggaaattcgaacgtctgcccggggggctcaccttgcccggcagaggactctggaggatgaggaggaacaggagcgcgagcgcaggcggcggcaccgcaacctgagctccaccacggacgatgaggctcccaggctcagccagaatggagaccggcaggcctctgcttctgagagactaccgagcgtggaagaagcagaggtgcccaagccactgcccccagcctccaaagatgaggacgaggacatccagagcatcctcagaacacggcaggagcggaggcagaggcggcaggtggtggaggctgcacaggcccccatccaggagaggctggaggcagaggaggggaggaacagcttgagccctgtgcaggccacacagaaacccctagtctccaagaaggaactggaaatcccacctcgccggagactgagtcgggaacagcggggcccctgggccctggaggaggagagcttggtgggcagggagccagaagagaggaagaaaggggttccagaaaagtccccagtcttggagaagtcctccatgccaaagaagacggccaggagctaagtgcctttttgtgtgcaaccacttaccctttctctgaaaaacctgttctcaggaaggatctgataaactcatttactctcaggtgtaagagactgatgagaccttagaagcgaattcctctctggaggccttgctttctagcagagtcacctgaagtgtgtgaggaggatcatcattttcctcatcccccctcttctcacattaaggtggtggcttgccactcagcagtcctagcttggtgactgggaactgccacatacagggccaggcctaccctccttccccacaagccccctccaacccccacccccatgctctggacctcatggctcctatgagcttggagcatggtgaaccatcagagaatctagaaccaaccaagctaggaacatcagcctggtgcctgttaaccccttaaagctgtggtttacaacttttcaaaaatttaaatcattag

SEQ ID NO: 86243 - DNA, 296 bp, Homo sapiens
atgggtcagccgttggtgttcttggttcccagagatcagaatctgtcaagtctcggggtctgccttgcactgagttattcgtggctcctgtgggtgtagccagcaagcgccacctctttgagaaggaactggcgggccagagccgagcagaaccagcctccagccggaaggtgaggggctcaggccccacagggtccttagggtgattagccctgacgtctccaaaacccaaatcttggctgtggcaatgctagaaaactgttttcatgtgtcaattaatgttggcagaacctcca

SEQ ID NO: 86244 - DNA, 437 bp, Homo sapiens
ataatcatttaaagcaaccattaataactatgtacctattattgccattttgtttattgttttctgtttggcagttgttttctctttgatttgatgatgttttgtaatgattgtttttgggtatttttgtgtatatatcaattataggggttttggtagttatttcaaggcttgcataaaatatcttgtctattttaagttgataacaatttacctttgatcacacacaaaaaccatacttttaatcctcccacacattttgtgttcttgtaattagtttgcttctttgtacattgtgtgtctcttactaaatgtttatcttttaacttttatgttagggttaacagtaatttacatactacagtgttgcattattctgtatttgtctacatatttatctttaccaatgagatttatgctttcatttgttttcatgt

SEQ ID NO: 86245 - DNA, 163 bp, Homo sapiens
aaaaaaaaaagaatatatagacgggtcagaactgcattcacactttggttctatagaatatcaagctgttttttgatactttatttagtgatacagtggtattcccaggaggatttgtcagcacttttctgggaatgcttggaaatgactaattagcattaga

SEQ ID NO: 86246 - DNA, 814 bp, Homo sapiens
gcctcactcaggagctgctcggcagccgtgggacacagggtctcttggttttgcatccagttccagcgctcggtagcgctaagagggtctcgttcaaaaatgcagctggattttgatttggcgattcagattttcaggcctgtgtctccaggatttcaggggtgtgtttcctggagctgcaaaccaaatgaccacacacgaagtggcttaaagcagcagaggttcattctcacagctctggaggccagaagtccgaactcaaggtgtggccggggctggttccttccggaggctctgagggagcctcggtcccaggcccctcccggcgcccgctggtggccgggctcccgggtgctgccagcctcgtggacacacggctccaatctctgctctctcctgcccatctgcatgttttccttttcctgtcaggaaagcagctagtggacttagggcccccctggctcatcctggatgcattcgtcccaggacccttgacctgtttatctaccaagacctttttccaaatgaggtcacgttcacaggctctgagggctgggacctggccgcatcttcccgcggtcacctttcagctcccgacaggaagcgtggccccagaaccctgggggtttcagagcccgtgcccatgggtggttctggaattctgaggccgatcctttggctggtgtcccggaattccctggtccggcccctcgtccatgcaggcaccctaggggctccccggcaggaccccagaacgccaatatcctactccacgggtccaggcgggctcccgggagctgatgccgaggtctct

SEQ ID NO: 86247 - DNA, 249 bp, Homo sapiens
attatggttttgatttgtatttctcccatggctaataatattcaggacctctttatgtgcttattggccatttgtatatcttttttaaagaaatatctattcagatcctttgcttatttttgaattgggctatttgtctttttattcttgagttgtaattgttctttatatattctagatacaagcaacttattatgtttatagtttgcaaacaattttttcccattctttgggttgtcttttcactgt

SEQ ID NO: 86248 - DNA, 361 bp, Homo sapiens
taaagataagttaccttgcatttgagcaaagcttggccaaaagattctcagcatggcaaactgtgattctgatctctaattcttagggaagtgcgactgaattttcatattttttccaaacaagcctttaacaatttcacttcctgaagctaaccctattgttatagaatcacttagactttcagaattcagtaggaaaaaattaatttttagttttcctatttgcaatttttgtagctaaagaacaggggcaatccgagaaaattcaaaactttaaaaaatgtaatttcaattcaaatatctttgtatgtagggcataagtgaatgaaagcatcgactttggggttagagagtcatatct

SEQ ID NO: 86249 - DNA, 353 bp, Homo sapiens
tattttttgtgagtaaaccatggtattattgctttcaattcatttatttttttctattgaattcaggtgtctagaaatgggctaaagacccaatctctaacttaaaggagcccatttttgtgtgaatacagacttagaaatgccttatgtttgttgtatattttaataattttcttgagaggttgaggtgcctatatggaaaatatattaaaggaggatgcttgaagaataataaagagagtggctatttgggtaactacaaggcttatcttttgcagaatgaaaaatccaaaggccttagcttaatgtctggggctacagaggcaatttttagagagcatgtatacagaaaa

SEQ ID NO: 86250 - DNA, 357 bp, Homo sapiens
gaggacagagaccatgtcatcatttttctactcttaacacagtgtctagcaatagttggtattccctgagtggctttttagttgaatacacagtgagggcatgtatccgtgaaagaatgaagcagaagctatactgtataatgaaattatgttcattgtaaataatttctgacccactattaacactataggaaggaatacccaaatggacattcttatattccaagaggaactgatcattagtgctgaacttccacttggtctttgaagagagtcatcacacttttccaacctcagcatccagttccctaaggatacattgagcacaaatactaaccaaaagtctgttactcaaag

SEQ ID NO: 86251 - DNA, 358 bp, Homo sapiens
agcgacagggtcttgctattttgcgcaggctggcctcctggctgtaagcaatcctccaacatcagcctctagagtagctgggacaactggcacaagtgaccacaccgagttttctcttaatacacccacctttctctttctacaaagctaagctatgtagactccaaaggaaaaaaaaaagcctactaaataacttctctgttcctcttcctgcttaaaatgtacaccagatcctttctttgccagactaagaaagttataaccccaaatctacattccatagtgggcaaaacttttttttaaaaaaatactgactttatatctagatactataccttaaaagcatacttttaaaaac

SEQ ID NO: 86252 - DNA, 126 bp, Homo sapiens
aaggcacagcaaccttaggtttatacccgagagcaaaccatcactctacgcactcgcacacatatccatgtcactatctgtacattcttactcacgctgcttgacaccatggggctatttcgtaaa

SEQ ID NO: 86253 - DNA, 378 bp, Homo sapiens
catgaaaccccacaattgttgctgggtttcttggtaaggcactatgccttttttaaatgccagtacctggtgagaagatggggatactctgaatgtttaacaactgagtacatttcatactggtagaagtaaactggaaaaaatctagaactttagagttgggtgcaatcccgtgtttgagtcttccaattttaaaaggtggaaatggaaggtcaaagaggttaagtgattcttcccaaagtcataaagccagtctgcctaaagacagtggggcagaggagttggcattgaccaagtagggcaggcctggagggagagagaaactggggatctggaaaggtccaggagtgtgaggcctggtgggacatggagtgagga

SEQ ID NO: 86254 - DNA, 213 bp, Homo sapiens
gcgtgagccaccgcatccggccgggagttgggatacattctaaacattcttctgcatggtagtagttcaagtatttgaagagaaccatctccccccatatctcttttcttgacaaaaaacttcatttcctcatgatatggtttccagatttgtctccatcctgttggcctttcctctggtgacctggttaagatctggatccagaactgaacc

SEQ ID NO: 86255 - DNA, 291 bp, Homo sapiens
  misc_feature (29)..(29): n is a, c, g, or t
  misc_feature (50)..(50): n is a, c, g, or t
agtaccagctttgggacctgttgcctgtntgattgtggaaaacacttcanctctcaggggggcttcttagctggaaagtgggggtaaaacagtaacccctgtcagatgagaagatgccagccttgagcaagataaagcacgttatgaatggctgttggtggtggttctctgtttcactcttctgcctccctcattccctgctcctcctgggcttgaaaatcagtcattgtgatctcctcctctgctgcccagcccagtcctgctgtcgtgcctggaacgtaactcccacaa

SEQ ID NO: 86256 - DNA, 459 bp, Homo sapiens
tcttgctctgtcgcccagattggagtgcagtggcgcaatctcagctcactacaaccttcgcctcccaggttcaagcaattctcatggtgcctcagcttccttggtagctgagactgcagatgtgtaccaccatgcctggctaatttttgtatttttagtagagatggggtcttgccatgttggccaggctagtctcaaactcctgacctcatgtgatctgctcaggttggtggatcaaagtgctgagattacagacatgagccatcatggctgtccaaaacctagtctatttctaatgccattttttaaattctgagatttatttctatgaaaatatttctaagtgtatcaggttgtatacaccagggtttgaatatgattgattttttaaatgttttggaaatatttgaaaacagtatgtaatccttgtcatagacttatttggatatagttctatca

SEQ ID NO: 86257 - DNA, 516 bp, Homo sapiens
atttccaaacgttgtttggtaatatatagaaatatgattgattttgtttattgagtttgcatataaccacattactaaactcgcatattgagcattttaataggttattttgaatacttttacatagactgttgtctgaaaatagaaacaggtttatttcttcctttctgatgtggatgtcactgatttttttccctacattactgatctggctaggactatcactataaagttgaatataagtggtaaaagagctgacttcttgccttggacccagtttttaaatcagttggagagtcaccattaagtgtaatttagtggtagttttgtttgttttttttttgtttgttttgtagatgccctctatcaggataagttcccttttctcattttgctgagagtttttataaagaatagctattgaattttgtcaaatgcttttgctgcatctgctgaaatgacacgtttattcttcatctacctaataatgttgcaatttatatctgttgagctttg

SEQ ID NO: 86258 - DNA, 410 bp, Homo sapiens
tttgcggtgagccgagattgtgccattgcactccagcctgggtaacgagaggaaaatccggctaaaaaaaaaacaaaaaacctaaaatttgccaaaagactaatattttattttctcttctttctgacctgatgacgcctctccccagtgtgttgagttgcattccccatccacccccttactttaccactaggaaaaagatctgatgtgtgagggtcagagtcctgtagacagctagaaattgacttttaagtttgaactctaggttaaatattgattgattttgatctctcaacctaacacagtctttgggagaaattatttgtgtttaaccactcttatggccataagactattgcttaaatttaaccccaatccctccagcagctgaacaagtttatctccattat

SEQ ID NO: 86259 - DNA, 446 bp, Homo sapiens
ttccacatggcctaccaggccctgtgtgatgtggcccagactcacagatctcaccccctcttcttctccccctcactcaccatggctgagccacgctggcttcctatgattctttgatctaggtagatgtacaatagagaaaaaaagaatgtgaaaattattgaaggatatagaaggagatcagttctcaaaattagcaggagagctcggttttatgtaatgattctgccacacaaatgtgggcgtatacgtaggaagcatggtttgatttcaaggacctctgggaaggaaccttttgtatctcaaaacttagctctttcaccagcttcattaaattattttccaggacaatatacttcataaattcccacctatgaggaagtacagttagtatttactctgtgccaggtacagtgctaggtacaagagctatgatgatgaaaaaa

SEQ ID NO: 86260 - DNA, 439 bp, Homo sapiens
  misc_feature (81)..(81): n is a, c, g, or t
  misc_feature (120)..(120): n is a, c, g, or t
  misc_feature (150)..(150): n is a, c, g, or t
cgaatcgagctcggtaccagacgtcattctgcatagacgtcattctgcatagacgtcattcttgcatgagctcggcttccngcttcattcctctcctcattagtgtcaggagcacagttngtcctgtatgtcgcaatacctctactgctngctgattagtaaaaccctgattcatccatttcttcctggaactcttaacttagccaaaattttaggttgtattcaattaggaaaaatcatacaaaatacctattcccactcaattctagattaatcgaaatcttcctgttgagttggttatgcaggtaaaactacaccaccggctttggatatataaaaaaaaaaaaacactcgagatagtcaaagccttccatatctagcctaaactaccattttcttctcatttcccacaatatccaccaataaatttacagttcag

SEQ ID NO: 86261 - DNA, 494 bp, Homo sapiens
ctcagcctcctgagtagctgggattacaggtgcctgtcaccgcacccagctagttgttgtattttagtagagaacgaggtttcaccatcttggccaggctggtcttgaactcctgacctcgtgatccacccgccttggcttcccgaagtgctgggattacaggtgtgagccaccacacccggccctgttttggttttttaattagaacattgcactagatctctaaggatgcttccagctgtaacatctgtctataggctctctgatctcagatttactcagattttgaaattaaaaaaaaaaaaaaaaaaacaaaaacaaaaaaaaaaacaaaaaaaaaaaggggggccgcacaccaaaggaaattccccaggaggggcccgtgtggcgggaccccccttggcgcaaaagagggcgccccaagacgagaggaggcccgcgagagaagcgcggatgacgcgccgacggaacgcgcgacgtcatacgacaggcgc

SEQ ID NO: 86262 - DNA, 286 bp, Homo sapiens
tccaccacacctcataactttataaaatgttttctttaatagagtttgataaagatgtctgctctgcatatgagtcacgcataagtttgtctttcgatctcaattatctgagttctttgttagtaaacatccatctccatagtaaaaccacaaatcaggacaaacaaactcaggggtgaaccagatctttctaggctctttgatttgatgactcagaagcaaggaaaggttatctattaggtatagccttcaagttttggaacaagaatagtcagcaatctggaaa

SEQ ID NO: 86263 - DNA, 207 bp, Homo sapiens
tgccactgtgtggcctcacagggaacatggaaaggctcttggggtgaggaaactgaggctcaaagaggacacaaggcaagccctagattccagaatcagtgatgaagtaacagggcctcttgggtggtgggcagggttcaaggccggatcccactcttggagtcccctccttgttgctctgtaggaggccctgagtcaatttctcta

SEQ ID NO: 86264 - DNA, 467 bp, Homo sapiens
gcatctgtgctcagacctgccagtacagcctaatatttttctgaatcttgaggcagtcaagttgcccatatgcactgaggcccactttatgtagagtgtgcttgggacacttccagagatgtgcacaattagctaaaacagttttgtcctttcagaatttagctgagaaaatgacagtccacataataagatcattaatgatataaggcaggagattgtacagatgatgctgtgggattttttgtatttcttcttgaggagctcatcttactaagttcaaattatcaaattgtgtttaaggaaaaaaggttcattatttcatcatcctcatttttttttaaccatttgtgggtcattcctcccaggttgtaagtatttttattcagatgcatgtaggtgttcgatatttacccttgtaatgttaaagatgacaggatactgctctcactttgctctgttatataagc

SEQ ID NO: 86265 - DNA, 242 bp, Homo sapiens
cggggcgacggggaatctgtgtacccgagtgagtgtctaactcttatgtgtgtctccctgtgtctgtctgcctgagtctctctgcaacccactgaggtgaccagcctgtgactctgtgaaaccatgttcagactccatcctctcatgtcacttgtggtcactaggctgtagaaaaaagagcttggtcaaggtgcagtagctcatgcctgtaatcctagcactttgggaggtcgaggcaggtg

SEQ ID NO: 86266 - DNA, 227 bp, Homo sapiens
gtgatccacccacctcggcctcccaaagtgttgagattacaggcatgagctaccacacctggccgcatgtttagttttttaactcttattaatgtcaacttttaaaagtaaaaatttcatattgtgttacattggttgccatcaagatgaagatagggaagttaagagttggggaaggtggagatgaatgaagtcaattgatgaagactagtagattgcggtgtttg

SEQ ID NO: 86267 - DNA, 921 bp, Homo sapiens
gcctcccgctcattgaatgagcatctccaggccctcctcactccggatgagccggacaagtcccaggggcaggacctccaagaacagctggctgaggggtgtagactggcacagcaccttgtccaaaagctcagcccagaaaatgacaacgatgacgatgaagatgttcaagttgaggtggctgagaaagtgcagaaatcgtctgcccccagggagatgcagaaggctgaagaaaaggaagtccctgaggactcactggaggaatgtgccatcacttattcaaatagccatggcccttatgactccaaccagccacataggaaaaccaaaatcacatttgaggaagacaaagtcgactcagctctcattggctcatcctctcatgttgaatgggaggatgctgtacacattattccaggtagctcaatgatctacattctgaagttgtctgaaaatgtcttcatgattaaattcagcctaaacgttttgccgggaacactgcagagacaatgctgtgagtttccaacctcagcccatctgcgggcagagaaggtctagtttgtccatcaccattatgatatcaggactggttacttggttaaggaggggtctaggagatctgtcccttttagagacaccttacttataatgaagtacttgggaaagcagttttcaagagtataaatatcctgtattctaatgatcatcctctaaacattttatcatttattaatcctccctgcctgtgtctattattatattcatatctctacactgcaaattttgggtctcaatttttactgtgcctttgtttttactagtgtctgctgttgcaaaaagaagaaaacattctctgcctgagttttaatttttgtccaaagttaattttaatctatacaattaaaaccttttgcctatcac

SEQ ID NO: 86268 - DNA, 766 bp, Homo sapiens
  misc_feature (396)..(396): n is a, c, g, or t
ctcatctattgtttttaccatatgagttataggaaaggagaaggccctgactccagtgaaaatttgctattaggtggcagtaagcagtttttctctcatttctgagaagtaagtaaacaatttttgcatactgttgtcaatagagatctaattccatttattttttaattagggttactaagaccctagaaagagaagaagaaagcttttcacagaacagtttctaatgtgtctggtatcaaaaagaatacacaattgatcggcattaagttgtataatttgaacagtgcccaccctgctcgctaactgcttacctcatacaactgaaatactgtatgagtagttcatatatttgatcctggagatacagaattgtacatgattatacatatatcngagttttatactgtcttcagagagagagctatgtgtatgtgtgcgtttgtagaacaagcattctagagtccagaattgtattttttagaattatgacagcattgaatttcatcagactaggaaataattgttctctttgtatttttacaatgaaatttgatttaaaagttaggtagcaataattttaacagtgacgctgagagttctgaagaattgcagtaaactgaagagtacttactgatctttgtagttggaacagaatggtagtgaattaggtacccttcagtgttgcagaaaaagtatcataggttgttccctatttcatgtgtttcaaagggatagggcagtgtgtaggttaaaaattaaagta

SEQ ID NO: 86269 - DNA, 428 bp, Homo sapiens
taagattcatgcagtgaaagctaacttactgagtgataaatttgcttagtgatctgtttattaggttttccaaatttgctaattgggctttgaacagctgtaaaagttctgactgtaaaagaaagcttcaacttttggcattcatgatgcttttctgagtattaaactaagatagatgttttacctgaaggatcggccaccaatctttaaatggctaaacaaaagggttgctaaaacataatccaaattgacataagaaataccatttttccaaccaaaattttggcattcatatggctacttttacgtatttcagctgcatttgaacatctttttcaaactttagggtggttggtgtatcactgaggtcttggatgacactttagctttgattttgtttttatgaattaaaattgtcataccaaaat

SEQ ID NO: 86270 - DNA, 680 bp, Homo sapiens
tgcaccctttttactccacagggggagaagcactacacctaatcctcttacctgctacaggcaatgtggcagagaattctccacctgggacttcagtgcacaagttttctgtgaagttatcagcatcattgtcacctgtgatcccaggatttccccagatagtcaactcaaatcccctcactgaagcttttagggtgaattggctgtcaggcacctactttgaggttgtcaccactgggatggaacaactagattttgaaacaggaccaaacatatttgatttgcagatttatgtgaaggatgaggttggtgtcacagacctgcaagtcctgactgtccaggtaacagatgtgaacgagccacctcagtttcaaggcaacttggcagaagactggtctaggtctacacctctacatagtagaaagagcaaaccctggattcatttaccaggttgaggccttcgatccagaagacacaagccgaaacattcccctcagttatttcctgatttctcccccaaagagcttcagaatgtctgctaatggcaccctcttctccacaacagaattggactttgaagcaggacacagaagtttccatctcatcgtggaggtgagggacagtggaggcctcaaagcctccacagagctccaggtgaacatcgtgaacctcaacgacga

SEQ ID NO: 86271 - DNA, 694 bp, Homo sapiens
tgtttccagtgtcctctgggctgtttccaagagcaacaagaaacgaataaatctctgacggagattcactcttgttgcccaggctggagtgcaatggcacaatttcggctctccacaatctctgcctcccagattcaagctattctcctgcctctgtctcccgaggagctgggattacaggctggtgtgcaatggtgcgatttccgctcactgcacttccaccttccgggattcaagccattatcctgcctcagcctccggagtagctaggactacaggcatgtgccaccatgcccggctaatttttgtatttttagtagaggcagggattcaccacattggtcaggctggtctcgaactcctgacctcaagtgatctgcccgcctctgcctcccaaagtgctgggaatacaggcatgagcaaccgcacccggcatggattaattgaaaattttcttctgtagattgtaatatattactattgttatctattttattgccccaattttctcaaatttggctatggaagtttattcaaagtggatctgtttccctttcacattttccccattttgtgagcatttccttacttcctaacatgacaaaatatttcaaactaatcttgtattttccctgcccgatcctgatatcaaatatgtccacaaggagccttggttcctttaattggagagtgg

SEQ ID NO: 86272 - DNA, 857 bp, Homo sapiens
catttatcttattattagtaatgttaactttgatcacttggctaagttgacatctccactttgaagttactattctataattatcttgtgggaagatactttcatattatgcaaatatgttctttcccaacatatattcaccactaatcttagcatccctccaaggttctttcttgcaacaattattactatgatatttgcaaagtgatgattcttatattttatgtctcctacatttaatgaaatcttactgtaataaaatactacccattctcaatctttggtttattatttatgtcaatatggatttttttttgagttggagtcttgttttgtcatccaggctggtgtgcaatggtgcgatttccgctcactgcacttccaccttccgggattcaagccattatcctgcctcagcctccggagtagctaggactacaggcatgtgccaccatgcccggctaatttttgtatttttagtagaggcagggattcaccacattggtcaggctggtctcgaactcctgacctcaagtgatctgcccgcctctgcctcccaaagtgctgggaatacaggcatgagcaaccgcacccggcatggattaattgaaaattttcttctgtagattgtaatatattactattgttatctattttattgccccaattttctcaaatttggctatggaagtttattcaaagtggatctgtttccctttcacattttccccattttgtgagcatttccttacttcctaacatgacaaaatatttcaaactaatcttgtattttccctgcccgatcctgatatcaaatatgtccacaaggagccttggttcctttaattggagagtgg

SEQ ID NO: 86273 - DNA, 918 bp, Homo sapiens
caggtgaataaaattgattaaactgatctttcaaataataaattaactttgcaaacttgctagaaatttaatttgttcacagtttattatccattctatgtactgctacattcaactggttattatgttttaaggacttttgagtctatgtttatgagggataaacatcaaagttatataatgcctttgtctcgatttggaatcggcaatactgggttcataaaataagataggaaatgtccctttaaattttcttttttttttttttttttttttttgagacggagattcactcttgttgcccaggctggagtgcaatggcacaatttcggctctccacaatctctgcctcccagattcaagctattctcctgcctctgtctcccgaggagctgggattacaggctggtgtgcaatggtgcgatttccgctcactgcacttccaccttccgggattcaagccattatcctgcctcagcctccggagtagctaggactacaggcatgtgccaccatgcccggctaatttttgtatttttagtagaggcagggattcaccacattggtcaggctggtctcgaactcctgacctcaagtgatctgcccgcctctgcctcccaaagtgctgggaatacaggcatgagcaaccgcacccggcatggattaattgaaaattttcttctgtagattgtaatatattactattgttatctattttattgccccaattttctcaaatttggctatggaagtttattcaaagtggatctgtttccctttcacattttccccattttgtgagcatttccttacttcctaacatgacaaaatatttcaaactaatcttgtattttccctgcccgatcctgatatcaaatatgtccacaaggagccttggttcctttaattggagagtgg

SEQ ID NO: 86274 - DNA, 513 bp, Homo sapiens
cgttttttaaaaaaactacatagaataaatccagtctgtttacatggcacacaatgtcctacctgatttggttgctgaatatttctccgatatttttttcctgctactcttccctcttttcattctgttccacacgtattagttttcttgctcttccataaacatttcaaactcatttctacctcatagcctctgtttttactattaccattgcaaggattattcttttctaagatatttctatggaaactctgtccccctatttcattcagtctttgttcctgtgtcaccatctcagagaggctttccatgattattgaataaattctaaaataaaattgatatcgaaaagggcatgctccctgcagcaagttgctaatatcagaaatcaataacaataagatatattcccaaattcatacatagagatattcaaacacaacacattcctacataacacttgggctaaggcatacataaaaatgaatacaaaataattagatctgaaaaaac

SEQ ID NO: 86275 - DNA, 369 bp, Homo sapiens
caattataatattaatttttatcagacaccatcaaatccagccacttttagatctccaatattggttataagtgccaacatttagactgaaagaactgtttaacagatggagcatttccttcttccagtatttaggagtgaggccatctgactgaagtcttatttccctgcttataaactaaggcctttgcccaggagactatttcaaaaatgtaccaaaggttaatatgtttgcatatattacaaatgctaagcaaaatggaatgttaatatattctcttattaattacaaaggaaatggcaggaatgactgcacataaaggacattttaccagttgttcttactctgattaccttttaggtccctgc

SEQ ID NO: 86276 - DNA, 281 bp, Homo sapiens
ggaatgacatggtcattccgacttaaaagaaacattttaggttcacacttgccaagttaggaagaaaaccaaccttagatcccttcccccccaccaatactcctttccccaaacaccgtccccacccgcctctatgtttaattgaatttttatttgtgatatatagaaaacctaacccatggctgtcatgctgagtgtcatttggcttcaagctcgaaccagggcacagcttggcctggaaccctgagacaagatgctggcctcagaaggtggggctcacg

SEQ ID NO: 86277 - DNA, 436 bp, Homo sapiens
aactcttttttcaagtgactttgttaccaggtaccgttgttgcagaggagtgatttgattattctttctctgtagaaatggtgatgatgtggggcaaatctacctcaaactgtaaactatactcactttttccacagatggggtcttgttatgttgcctaggctagacttgaattcctggacccgggtgaccctcctgcctcagcctcccaagtagctgggactacaggcacatgccaccacacacccagctatattcacattaaaaaaaaaaaatcatctgtaattctaagagctccctgtgtggagccttccaagtggcccacctgtgtgggaaagctgccctgcaatatgggcccaaaaattttccttggttttcatgtatctgagcaagttgcttaaaggtgcctggttctgtgtgtttgagattatttatt

SEQ ID NO: 86278 - DNA, 385 bp, Homo sapiens
cctggattttgcagaacccaggtagggtctcacagacttaccttcagacaccactgagttttccacaagtttatattgccatttatattagacaatactcacaaaacatttttatggagtacatttggggccatctgaacgactgccttctaactgcactgccatttggcgtcagtgcggccctctcagatgccccagagacacttcaaactctcgaccttgactcccctgcccccaggcttcctctagtgttccctctctccatccagtcatgtaggccagaaacctcagtgatactcttgaccctaccttccccgccatctcacatacctaaatctatcactagttctagagattttaaaaaagagcagctttattgtaccta

SEQ ID NO: 86279 - DNA, 1300 bp, Homo sapiens
  misc_feature (1211)..(1211): n is a, c, g, or t
  misc_feature (1255)..(1255): n is a, c, g, or t
  misc_feature (1272)..(1272): n is a, c, g, or t
  misc_feature (1287)..(1287): n is a, c, g, or t
ccgcatcgtgaaggaatctggaggaaagctgaccaggcggcttgtgaacagtcagtgcgaatttgaaagaagaaaaccagatggaacaacgacgttgggacttctccatcctgtggatcccattgtaggagagccaggctactgccctgtgagactgggaatgacaactggaagacttcagtctggagtgaatactttgcaggggttcaaagaggataaaaggaacaaagtcactccagtgttatatttgaattatgggccctacagttcttatgcaccgcattatgactccacatttgcaaatatcagcaaggatgattctgatttaatctattcaacctatggggaagactctgatcttccaagtgatttcagcatccatgagtttttggccacgtgccaagattatccgtatgtcatggcagatagtttactggatgttttaacaaaaggagggcattccaggaccctacaagagatggagatgtcattgcctgaagatgaaggccatactaggacacttgacacagcaaaagaaatggagcagattacagaagtagagccaccagggcgtttggactccagtactcaagacaggctcatagcgctgaaagcagtaacaaattttggcgttccagttgaagtttttgactctgaagaagctgaaatattccagaagaaacttgatgagaccaccagattgctcagggaactccaggaagcccagaatgaacgtttgagcaccagaccccctccgaacatgatctgtctcttgggtccctcatacagagaaatgcatcttgctgaacaagtgaccaataatcttaaagaacttgcacagcaagtaactccaggtgatatcgtaagcacgtatggagttcgaaaagcaatggggatttccattccttcccccgtcatggaaaacaactttgtggatttgacagaagacactgaagaacctaaaaagacggatgttgctgagtgtggacctggtggaagttgaggctgcctggtatttgattatatattatgtacatactttttcattcttaacttagaaatgcttttcagaagatattaaatatttgtaaattgtgtttttaattaaactttggaacagcgaatttggatgttccagaggttggacttgtattaggtaataaagctggacctgggactcgtgaggaaggaatgtgcttggggctgttgcnataccctgtgcagcattctttcaaaatagtgcccttccaatgcntcctccttaatgtcccnccagacaggatcacncctaagaagccgt

SEQ ID NO: 86280 - DNA, 497 bp, Homo sapiens
taggaatttagcgagagcagttccttgcttctagtgagggagagaaggtggtaaattctaggccagcccccacattcccctggccaccctagagatcctgccatcaatacccattctccatgtggggcagccctagagttccactcatgttccaggctcattgctcactgcaatccgttctgtgagactggaatcacctatcatgtgcatcagcagacccagaggggaaactgggatctaagactaaaagaaacatattatcaagcacctactatgtgctaggctgagccggattctgggcagcaagagcatgaagccaatcacctcagccctctcaccttcccctccttcccaggtaccaggaggaacctccaaatgcacacaacagtcatactatctgtcccagagtgagcaagagttaggtcttgaacccacagctgactccccagtctgtccagaggcctgatttgggaaggagggtgcgatcttgctgggca

SEQ ID NO: 86281 - DNA, 372 bp, Homo sapiens
gagtggaagcccgcagccacgcagaagcccgtgcgcagacgccgccgtggactccagcagccggacggtggctacaacccagatggccgtcagcagaggaggaggcgtagtgtggccctccatgcactggaacacaacccagccatgaaaaggaagaagctctgactcaggccacggcgtggacgcaccttcaggacgccaggctcaatgagacactccaggctcaatgagacacgccagacacagaggacatgccgtgtgtgatcccatttctatgaaatgtccagggcaggcccagccacagagacagggagtaacgtggtggtttattataaatttttcatgaaaataaaatatacagtactctcgtga

SEQ ID NO: 86282 - DNA, 381 bp, Homo sapiens
atcacccctagaccccctcctttccaacacctccccccagcatgctcagatctgttcctgttgctctctcatgaggagcattcagaactggacgtcattaattatgaatcagaagaatcagaagaacgtgtgtgaattgtacattactatctctaacatatgtaggaattgccacttagttaatttacagttttcaacagatatcaacaactagagatctgttgacccaaattactagaaacagaatcaggaagagatttccttcaatggtttgaagtctgattttttccctgtgcttctgagattaaaagtaatacaaacagattcgtttttaaacttcagttagttgaaaagacaaaaatgaaagacagaaaaatattt

SEQ ID NO: 86283 - DNA, 414 bp, Homo sapiens
tcaaaagttctgacacagcctaggtgatcacaagaattactggagcactccctagaatagttttgccccagcctctctgctgtagatcttaattcagtggagctggcaggggcccaagaatctgtattttgaacaagctccctggcagttgttatgatcagataagcctggggacccacaagtgtaataaaatggtatattcacatatcatcattgcagtcacagcttctgaaatattatgtttttaatttgtatgtacatcattgtatctcaaccatcattcgattgtaagctccaagagggaaaggaccttgtctcattcactgggatgttctcagtatggaaaagaatgcaagcaagtggtggggattctgcagatatttgttgaataaataaatgaatttctgttttgta

SEQ ID NO: 86284 - DNA, 219 bp, Homo sapiens
atccgcctgcctcggcctcccaaagtgctgggattacacaagtatattttttaaaggcacggttcctctcctgaaatttggcttctattctatcattccactaaacctgcctttactatattcaccagcgtctatttcaaagatgcaatatagcatggctattaggagaatggattctgaagcttgactacttgggttcaattcccactctactcatta

SEQ ID NO: 86285 - DNA, 438 bp, Homo sapiens
aaaaagtgtcctgagcaatttaagctaaaagaatatgttgtttcttttgtgtgtatagcaagaagattatatatatttataaatttttttccagcaagtgtacttaaaagcatgtacttaaaattaaggacttaaaaaaactaagctgtacttaacaaaataatctttagaaagctttaaggccgggcgcggtggctcacgcctgtaatcccagcatcacgaggtcaggagatccagaccatcctggctaacacggtgaaaccctgtctctactaaaaatacaaaaaaaattagccggttgtggtggcgggcacctatagtcccagctactcgggaggctgaggcaggagaatggcgtgaacccaggaggaggagcttgcagtgagctgagattgcgccactgcactccagcctgggtgacagagcgagactccatct

SEQ ID NO: 86286 - DNA, 288 bp, Homo sapiens
gatcagactgtgctttctaattctaaaaaattgagcagtgttggtattctttcagtatttttactctcacctggaaaactacctggaagttgtcaggcatttgcttactggtagtggaggttacagctgtacatgaagcatgtactgactgtacttttaaattggtttgtcaagtatactttgaatcatatacctgatggatgtccaaaaatatttaagactctttgaaaagaagatagttacttttaaattagttaccctaaatttcatatcttaatacatgtacat

SEQ ID NO: 86287 - DNA, 330 bp, Homo sapiens
acccccggggcaagtgcctctgagcaacgtgccttgcaggttttgcatttgttggctttacctgcttcaggcgtgggaattttccttctttctcattttcctctctttctgcagtgccattgctggccatggggctgggggtggctgttggtggctagtggtgtcaacgatgttcctctttgagctccctctgttaggcaatccccatccagctctgtgacccatgagctgtcctcagcagaggctggcatgagctttttgcaaaattttttttttttttttttgcgacagggtctcactctgttgcccaggctggagtgcaatggtgtg

SEQ ID NO: 86288 - DNA, 330 bp, Homo sapiens
  misc_feature (277)..(277): n is a, c, g, or t
  misc_feature (317)..(317): n is a, c, g, or t
  misc_feature (320)..(320): n is a, c, g, or t
tctgcatgtcagggagggagagtgctgtgattgagaccctccattgaactcagtgctgttctgtcgaaggggaaagcaaaactgggctaaacttagccaatgaccacgaggtcaggagttcgagaccggcctggccaatatggtgaaaccccgtctctacttaaagtacaaaaaattggctgggtgtggtggcgcgtgcctatagttccagctcttcaggaggctgaggcgggagaatcgcttgagcccaggaggcggtggttgcagtgagcatagntcacgccactgcactccaggcctcggtgaccgagtgaaanctnaatctcaatg

SEQ ID NO: 86289 - DNA, 325 bp, Homo sapiens
aaatatacattgtgggcatcccagaagaaggagagagagaaaagggcagaaagactatttgaggaaattatggccccaaactccccaaatttgatgaaagacattaatctacatatccaagaagctcaccaaactccgcggaggataaattctaagagatcacatcgtaacacattatagtcaatttgtcaaaagacaaagagaatcttgaaagtggcaagagaaaaaagactcatcaagtacacaagggcctcaacaagatacaagtggatttctcatcagaaaccatgaaggccagaggtgctgacatgaaatatttgaaatg

SEQ ID NO: 86290 - DNA, 397 bp, Homo sapiens
gattaaagactgtgttaagtaaatgctgaaagcttaaataagccttaagttgtctagtttaaaacaattcagtcaatgaatactgctccctcttttgaatggtaatagcctttgcagttattctatagctgttttatatttgttaaggtattttaattcttagataagtttcatttgcatgatattttaagatgttatataggaaacatcttttctggtcatgggattgatagtttttgagtaccaacttgggagattcttaaatggcaaactgacaaacgtgtgttttccttacacctaaaatgtctcatttagtttttaaactctgctgggacataaaatggatatttgtgaggtaaatttaggtgttagaaccaatgcaaatattgcaatgaag

SEQ ID NO: 86291 - DNA, 518 bp, Homo sapiens
gcatgagccactgcaccaggacttgtctctttaccgtcctttccctgccctctgcagagggccttgggtcatttctgtggaaccgtggagtcggaaacactgctctcgagaagccaaaatagagtatccttgcaagtctggtctgtttaccttgttaaagtaaatttaagcttgcctaactcatttaaccaactgtgaacttaataccccagtattctgtattttgaatagaactccacggatgatttcagaggcccctttgggacctctccatttccacttggttctgcattgtgattggagtcatgctattttccaaaatcgtgcagggtttctattctgtagagcttccatgttgaggacagatagcatatttatatatgttgatcaaatacagttttaccctcatagaattctactttgccagagttgtcaatatagaaaatcagcttctatttttatcaaggagtggtacccatgtccaagtcatatggaccttttgttctcaaataaacttt

SEQ ID NO: 86292 - DNA, 213 bp, Homo sapiens
ctaagtttaaagtgaaaagtcaagggaataaattttgccttaaaaaggaggaaatgcaaagttacatggcagaaagagtggatacaagcagaagagaattgtggacaataacttaatctacaagaaaaagaacagctctattttccagggacataaaaatcagtttaaaaaagcttataagccctgtcataatcctcagttcaaactttatgc

SEQ ID NO: 86293 - DNA, 386 bp, Homo sapiens
ggccgttttcatcacctgattagagcagtggtcctcaaatggtgttctttggaccatctgtatgaaatgttcataggtcaaggataaaatggaaaaacagagacaatgtcacagaaatgtgcccattgttgaaagaccacgagctgtcctttttggaggattgttctttattctaaaaatgtatctattctattctattaaaacatttttgtatttacatttttttctcttatgaaatgccattgggtagaaatttgtaatgtatccaattctcctgtctccatgcattgcagtgtggtgggggaggggatgtggcaagtactggccaacaggctgggggcagaggtgcagtgtgagacttctagcctggagcatttaattcttag

SEQ ID NO: 86294 - DNA, 312 bp, Homo sapiens
atggtgcctcccccccacccccactacacacacacaaacacacacacacacacacacacaccacttccatggcgccaggagagagtttggtccttcagcaagatcacactcttctccatatgaccccagccaatgagcgggcgagacctggccatctctgccccatgcgggactctctcatgggccgtgctggctccagcatcgcagtctaacagctccctgccgcatttcgttccctctgtgctccttccccagtgtcactcctccttcaaaccccaagaacccgtttgccctccgcagtccttctcagca

SEQ ID NO: 86295 - DNA, 526 bp, Homo sapiens
cactccagtccatgaattcttcctggaactggtagctcagttttcaggctttagactgtcctttcctcgaaggtcgagtttcaccaaggacccatccctgcctgcctaggagtttgtcttctgtcactatcagtaggactgcagtgggtcagacctgaaaccagcacagcagttgatcacacccaaggtgagctgtaaccactacctggtaccaccagtaattgctcaaggtcctggggctttataatttgtaggtggtatcctacaaagggcttgccagcgttgtatcctttccttcagagtagtgagttccctcaggctctcggcaagcccatcggtgccatccaggagccaggggctagtcaataaccttaggagtctacttcgttttctgttgtactgtggtagagctagcaattaaaccgtaagattcagttcttcccatttttccgtccttattccacaggcagaagagcctcatcccattgctaccatcaccacaggcccatggggaataccgccaggc

SEQ ID NO: 86296 - DNA, 404 bp, Homo sapiens
  misc_feature (322)..(322): n is a, c, g, or t
ttgtaatgttgtgccattgtatcaccaatatattgctttaatcaggaagagaggatcctgtattccagattccatcttgttctcagtttctcaacctttaaatgtatttgttatcttggtcatctctgaatctgatggctaaaatctaatctaacttaagatagttttttttagtatttgaattccgggtctagtgtgctttccttcacttgtgttcttcaggccgacagtggaagttccccagtctttgggtttgcttagtttgttctttataatgtgggttatttttctctaagcatgttgtagttttgtaatgtccttncttaagttaattatcaccttttcagcccaagattttgttccaggtatggaaaatttttagtagtatcctactgttaaaaaca

SEQ ID NO: 86297 - DNA, 679 bp, Homo sapiens
  misc_feature (6)..(6): n is a, c, g, or t
gctagncgtgcacgactctcttaatttccaccgctacacgcggtgtgtagcatgtatttggcttaagcttagaataataatttttgtgctagatttcccaagaaaacataggctgcctttccagaaaattctaccagccctcagatgggttcaccctcaccctccttcagccccaagatggtttgatcaagagctggagtccagaggaaagcaggtcttttgtagcatctgaaattctgtgggagataaaattcagcaaggagctccaatttcatgagcgtttggtctctgggatcgcaccaaacctttttgatcaaaggaacccaagactgtggacatgcatcgtgggacatctcttcattagtacctttggcctctgaatctcaaacagtgaatgactttagtcttttgaaaagagtggcatgtggactttttcagaaagtgaagaagaaaacattacaatttcctcctgttgggaacttggtcacagtcattccagtactgtgttctttgctgtactttttcacattattgtttttttccttgtgggatttcatcagagctctctattcacttgggtgtgacgttgtgaagttcaatcctgtcatagactatattgaatagggagctgctctggtagcctgaataaagcccatgactttgaagaagttatttaacc

SEQ ID NO: 86298 - DNA, 655 bp, Homo sapiens
  misc_feature (9)..(9): n is a, c, g, or t
  misc_feature (15)..(15): n is a, c, g, or t
  misc_feature (30)..(30): n is a, c, g, or t
  misc_feature (48)..(48): n is a, c, g, or t
  misc_feature (55)..(55): n is a, c, g, or t
ggtgcctgnaatccnagctacttgggaggntgaggcaggagaatcacntgaaccngggaggctgaggttgcagtgagccaaggttgagccactgcactccagcctgggtaacaaaggctctgtctcaaaacaaaacaaaacaaaaaattatcaaagacttcactaaatatcttcatatctttaagggactatcaataaatatctttaagggattacccaattttttcaaaagaaaggaatattctgtagctaataatctacagtctcctggaagattttttccaatttcttattttcattatctttaaacagatggaagcaataaaaggcatccggcatgcttcccattctaattactaaactatagcttttaaaatactactgtccctttatctttaaaacaaactgtgtttgtggattgcccaaagttcaaaatattaagtgctcttaagcatattacgaagtgtctacagaactaaaatccttgactgtattacaatacttaattagaaaataaaaaggattctgtaattaaggtactttacatgatggaaatgtgaaatgaagagcttaaaatgaaatgatttgacagactctaaagacaactctttctctcacaacttttgattgcctctctgaaatggaagactgtaac

SEQ ID NO: 86299 - DNA, 719 bp, Homo sapiens
agggttagccatggaatcatacttcaaggccacctggcctctgcttgagtgtctcctctggtttcagttcattgtcatgaagcaaagaagctgacaggaaatctgcttcaggcagagattgaaaccaggtttatggttagcttcttacatcaatggaaacaactttgcagtaactggaaagaatctttaagtgtagcctatcaaataaccaactgtcaagcccttttgtcaaatagctaatgaaataaattttcaggagttgcaaagaagccattattttgagaaaaactgtgtgctatgagggtctttgctgtggcaggcctgagccttctcagcttgctttggggaagactagctcaaggtgctctgttatgaccatgctctaataagtgtcccctcagtaacccacactgaaaggaaacaaatctactgttgtgagaagctcaaactcactaatatctcaaataatactttctttgctatgtttcttatgtaatatttcaataatcttatgtaatatttcttccatgttcctattacatgtattctaatatacatattaaatttcttcaatatattaaaatttcaaaacactactctgaactcattaatctgttttaggcctatttatggacaatggaaaaaatatctctgcaatgttactttatgatattcaaaggaatctgtctgaattcttccaaattaaagatataaacaga

SEQ ID NO: 86300 - DNA, 407 bp, Homo sapiens
gaaaaggctctgcatgtttaaaaatatatatttttattttcttataaatcttaaatatctacacttaagatttatttgatatgtgggatccattcatattttggattcaacagttctgtcaaaactgtggcagtgataggggattctttttttcccactgaactatcacaaaattggaaaaagagtaattggagaaccccactggcttagccggcccgaagcccgggagagggcaggcagtgctgtggatggggtcatcccagcgcaacgctgcccctgctacctgcggatctcgctgaggcctgcctttgtcctttgacccttggccatttgttagtgtctctgagagctggactgctgtaccctacttccccagggggcctaacttcacacagcctctgccgcag

SEQ ID NO: 86301 - DNA, 778 bp, Homo sapiens
gattgtggaaaggccttttgtagaggctctcaacttacacagcatcagagaattcatactggtgagaagccacatgaatgtaaagaatgtgggaagacttttaagcttcattcatatcttattcaacatcagataattcatactgatttgaagccatatgaatgtaagcaatgtgggaaagccttcagtcgtgttggagaccttaagacacatcaatcaattcatgctggggagaaaccctatgaatgtaaggaatgtggaaaaacctttagacttaattctcaactaatttatcatcagacaattcatactggtttgaaaccctatgtatgtaaagaatgtaagaaggcctttcgttctatctcaggtctttctcaacataagagaattcatactggtgaaaaaccctatgaatgtaaagaatgtgataaggcctttaatcgcagtgatcgacttactcaacatgagacaattcatactggtgtgaaaccacagaaatgcaaagaatgtggtaaggcctttagtcattgctatcaacttagtcaacatcaaagatttcaccatggtgagagactcttaatgtaatgagagggaaagcctttagccatggcacatttttactgttgtcactattatgatgctatagtgaagattaaactagttaatatagaatataaatacttggaaaggcatctggcacatcgtatttgcttactaaatacattatttttatgataattgttagaattactaaaaataaatcttatagaaggaagac

SEQ ID NO: 86302 - DNA, 526 bp, Homo sapiens
ttgtttgacagagtaatcttcatgtttggttgatacggtggagattacttattttaagtaacataattgttacttaaagattttgtaatagtggaacgtgcgcaatccctagtattataacagtgcttattttatggactggtgtgtacatagtactgtaggaggtgctatggagatttttaaaaatagcttaagaaaatatttgtcttttaagatatttaaaataaagctagagaggaaagtatgccaatgctagcaaacacaaactgctgattataaataagtttcatttatgtgtaatggaaaaaattagagcagtgatgcttatgtaatgaggtttgtcaaggacagcttcttgaagaaggtgaatcttcagtgtgtcttaaagcatagaatctgcgttgatgacgagaacaccgtccacccaggtgtatggcacagtttgcagagaagttatgtgccatacgtattttagtctgcatagaataagctagtatattttttggcatagaaattgaaccttcag

SEQ ID NO: 86303 - DNA, 447 bp, Homo sapiens
tttatgaattggttaagtatttgcaagtctgtctcctctactggttgtgatttttcctgtaatcagttgttcatctctgctcagtattcctagcatctaataccaaatccagagcatatatttaagccagacgcagtggctcacacctgtaatcccagcactttgggaggctgaggcggaagaatcacttgagttcagcagtttgagaccagcctgggcaacatagcgagaccctgtctctactaaaaaatataaaaattaagccaggcacagtggctcacacctgtaatcccagcactttgggaggtggaggcgggcgaatcacaagatcaggagatcgagaccatcctggctaacacagtgaaaccccatctctactaaaaacacaaaaaattagccaggcatggtggtgggtgcctgtagtcccagctactcaggaggctgagg

SEQ ID NO: 86304 - DNA, 415 bp, Homo sapiens
ctgggaactaagtacaaaggaatggttctgtttctaaccctttggcttagagtatcatagagttttaaatttggccagattttaatttgacagataaaaaaatgaggcacagataaaaaaatcgagaagttgaatgaattatgaaaactcactagaggcagagttgaggacgttgtccagtgctctgttgtatcattatgtcactgcctgccctactgttttcctgctctttccctcttcttcttcctccctctcagccctggtccacctaccttagtgcatgcacacacgtatggcaaagatcaacaaggatgctgggttcagggtccttttcccactggagtctggcaacactgttcctgccttgatatggttcttggttgttggccacttaaaacaatggcatattttgaag

SEQ ID NO: 86305 - DNA, 285 bp, Homo sapiens
ttggcatttatagagacagagagaaaatgtatgtaagaaagaaaatgagccttaggaatgttatatgaactgatattaaggttatagtcacattcatggagacaataacatatcaataatgagatgtatgtgggagagaatcatattgaagagactacattagtaataaatgtctcagtcctgataagggtaataaattcctgccaaattgggttaggcataagtattcccattttaaagatgagaaaattaaggtacaggggtgttcataaagctgatcaaggt

SEQ ID NO: 86306 - DNA, 795 bp, Homo sapiens
aagcccatgctgcccaggccctgtgccaggtacgaggacacgaagactacctcctgctacaatagtccgctgctctccaggagttcccggggaacagaagagtaggcagtgacctgacttacgattcagctacaagacaaagagtacatgagagtgaatgcagcacctggatcagaccaggttggcaactagctgagggaggggcctcctggaagagctgaggctttgcctggcctcccttggaaacctctgggatagccatttccacctgcctgtctatgagtggaatcacaagtctggctttctgggccagttgctaatggtcactgggtgaaggctaatttatgaagatatttggcatttttaataaaacctaaaattacacctctaggtgaggcatgcaagacaaacagatatcagactcacttcacaaccggaaatcaacttggagtttacttaaggaacacatgttaacacctgagtgcctagcatggccaggcactgtccttagcgctgaattcaatgcctccagtaagttccctgtgaacctggtagtgccctgcccatgccccatcgacaggcgtggaaccagcatagaggggctcaaataactggaccgcggcatgcaggggtgggctctgcaggatgtgtcctcacagctcctacgagaggtgaggcctatggaagaactgctgagctagaggcagaaaggcttgtcagtgacctaagggcaggctctgcaaactgttctcacttcccactacaaaaaaggtttgggggtttgaaagaaggaag

SEQ ID NO: 86307 - DNA, 593 bp, Homo sapiens
aatgctgagggttaggaacaccattcaaaagatgtgtaatttctaccaggaaatggatctgtcgtcatttttgtctaacagatgctgaaaatgaaaataacaaatttaaaagagaatttgcaagcaggaaaaatatgaagagtgagaagaactaaaaaacacttcaaatgggacattaaaagatgatcatttatttaattttatttaacaaagacaagaattctaaaagttgaatattttcaacatatttccttgtgggagaatggctgaaaacatcaagggcacaggaggatagactttatctcttactatgattaactgcacaagggctagtcattaagccattcttatcccagttgccaaattcatagccagtaatacccataggtcaggtgacaggctgatatttcccttaaactgagtgctactccctattatgccatgattttccttagtgacaatgggacatttaaactctctggaccccccttttgtttttttgagacagggtcttgttttgtcactcaggctagagtgcagtggccccatcacaactcaatgcaccctccacctcccaacctcgatcaatcctc

SEQ ID NO: 86308 - DNA, 411 bp, Homo sapiens
caggtgtgagccaccgcatccatccagaataaactttgtaaacagcattttatttatcgcagcatgtccaaggtcagatatttattagcactttatatatggtgtagccatctgctttcatagcaatattttgtctgtatttgaggacattgtaaatgtttgtacagttttctgagaatcacaggagtgcaaaatgttgggaaccaggaaatggatgatgcttcagttaaagaaaaaagaagagttctgtggcttgtacacataaaacataaagataaaattggaattctagagcagtttcttgagggaagcagcagaaaggtcaaaaacttctgatgacagcagaaaaaggtaatcccttttgtaagatccaaaagatgatccttgcatgcatgaatctcggttaacaga

SEQ ID NO: 86309 - DNA, 357 bp, Homo sapiens
gaaaggctttttgtcagatctctggtagagaacaaaatatgaaccagccaaaacatttctatcattatttaatttttctttccaaaatacaattaaacttttaaagcacaaaaattttaagatattggtaaaagatggggtgaaaaagtccgtacctttcttgatattctgtgggaaatatgaagctgtaggtagcctctttcttctttaataaattgtgcttgaaaactttcaggacgtgcgtaattatttagattggaggttgacaaattacaacccataggccaaatctggtcagctgtctgtttttgtaaataaaattatattggaacacagccacgcctattttttatatgt

SEQ ID NO: 86310 - DNA, 748 bp, Homo sapiens
cgactagcctgccctcccgcccttggaaacttgtggaccccagaatctcagctttccgcctaccaaaggtgccccgatcccctcccactgccctagcagcggcccagccccaacgcctttggctagagattgaaatcctctggaaccaaccactggacgctctggattggggcggaacgcgcttccactgtctcgaaagcagcaccttctcggatttgagcctttgcggcgcgcctgggctgagatctgagaaatgcgccctgggccacaggcagcagcggaggcggggaaggaacaactttccctccgccctctaaccacaagggcggggtggggcggcctcgctggggtcgggctcctccactttcccagctgggatcccctgccggagctggcgtgggggccggggagggggaccagaggggcttccttctctccccaagccccgccagatgttggaaaggcaaacaataggggaaacgcggagaaacaaaaggccattcgccacgatctcagtcggctgcgtagagagatctctgtggggagggttaggggagagggtcaggaaagagcgcgaggggggggatcccgagagatttagagtctctggtacttgccaggcaccaggggtcggcgctttaccctcccagcaggggtctgaaggtgggaaggggcaatcaaagaaaacttgaagggttttcaccttcttccccagttcagggaaagggaggggctgggattccagatg

SEQ ID NO: 86311 - DNA, 416 bp, Homo sapiens
tctgtttctatgagatagagttgaagctccccagagaagggctgtttatccccagtatttaggacagtgcctggcatgtattagaggctccagagatatttatggagtgagtgaatggaagctggaaggggtggaggaattttaggagtcaaaacaggcaaaaggctgggccataaagctccacttcaggtggcactcgggtgcaggtctaggtctctgggtacactacgatacacagtgagtgttttgaaaggcatgggtgcagcatttggggaggtgcccctcctccaccctggtgctctcatggcctccatagtttgtgtaccaagaacaagtgggctctaacactctcttctggagagtgacatttttctcttggtccatcttcctgctgctgacttggcctgggtgaagcc

SEQ ID NO: 86312 - DNA, 445 bp, Homo sapiens
cttgcctgctgaggaggaaactagacctgggaaccgaccagggttgcagggcccagggcccgagggcatcgttcataccctgggctggtggctatggaactaataaagtcctttttgtttctttgtttctttttttgcttaagctagtctgagttaaatttccccatgcccaagtgaaagctttgactgagagaaataaacctaggccaggatttgtacacagaccatttggtaacttgttcaattaacatgttgaacatctcatttttctctttctgtttataagcaagcatgtatgtattgaagagaactttgaaattaagaagaacagtgctcgctgtggcagcatatacactaaaactggaatgatacagagaagattagcattgcccctgcacaaggacgacacacaaatttgtgaagcgttccatacaaaaatatattt

SEQ ID NO: 86313 - DNA, 415 bp, Homo sapiens
aagaggtgaagctttttatacatcgttatatattacatactctgtttagctgatgtgaactacaaacacatgaagcttcacaccattctttccctagaactaggttaacctacagataaaaaatgattacaatgtaatagattctatagttaattaacaatttaaatcaactctgaagagaaaatatagatgcccacacaaaagagaaggggggaaaatcttttatgtaacaatggaaaaagaagtagaagacattaggatgtatgatggaaatattacatcattggcaaatccaaaattgatgagaatctaattgtaatctcaagtctaaaccattcagctgccaggattgtaaatagaaacgttttaaaggccttgtgccatttacctggaggaggggttggagtgtaatgtt

SEQ ID NO: 86314 - DNA, 568 bp, Homo sapiens
caaatgcaggctgaagtgactcctgccagctcctctgactcaggtgtgccttcctggcactctcttccccttccaccacaggatgtgtgtgaatggtggattagagacgaaaagaaggagatatagtctggacatcaataggcagtggaatgagaggagtatggaaggaagggtgtgaaggaggaaggagtagagaaagatgctcaaattcatcaccttcccaacaatgtggacgttgatgttgctaccagcatgacgatcaccgaaggagaaccgggatatcagttaatgtccaggcagaaatcctgggctgttattttgagtatgaatttctattacacaaggactttaaaaaatgtaaagctataatcacatccaatgaaataaaccatatttatggtaaaaaaaaaaaaaaaaaaaaaaaaaaaaaaaaaaaaaaaaaaaaaaaaaaaaaaaagaaaaaaaagagagaaagaaaaaaaagaagaaaagagaggaaaaaaaaaagagaagagggggggggggagcgatgtagcccgcggggggggggcccagaggtgaggcgcgt

SEQ ID NO: 86315 - DNA, 285 bp, Homo sapiens
caccggcatatacagggcttggagaaaacagaaatgatgtgggaaagatgtgggcaagagcagatcactctcctggatctcagaaattttagaaagaataatactgtgggatgcagtaggaacaattatccatttatggcaaggctgactgggcagtttttaaacaggtaagaatggattttcatattgcataggcccttaggataccatctagaaagtttagttggtggtaataacattaatttaaaggttttgcgcagttttgaagaactgagtacaaagact

SEQ ID NO: 86316 - DNA, 377 bp, Homo sapiens
taaaccaaaaatataaattaagtctataaattcatataaaataaaagtgcatacaaaactgcaatattacagtaaaataaccacaaaaagtgtatggaaatactcattattcaaaatagcaatgaaaagaaagtgaaaaaagaaccaactaaaatattcacaatggggcatgacaaagtacattattacaatggaatgctgtataaccattaaaatcctaacacctgttgtgagggttggatataaaaaaaggaaatctatgacataatataatttacttaaatgtaatacatatcatttatcttttagggacaaagagacatagtatcaaataaatatgctagctgcgaacagtggttcacactttttataccagt

SEQ ID NO: 86317 - DNA, 1806 bp, Homo sapiens
  misc_feature (157)..(157): n is a, c, g, or t
  misc_feature (832)..(832): n is a, c, g, or t
ggcgggcgcccctccccccgcctcgctgccgccttgcagtttgatctcagactgctgtgctagcaatcagcgagactccgtgggcgtaggaccctccgagccagagatgggatcttactacattgcccaggctgaagtgcagtggctattaacagcntgtaatcataatgcattgcagctttgaattcctgggcttgagcgacctccccaccttagcctcctgagtagctgagactacaggcactgtcctaggtactgtggggaccaaaacattcaagacctgcttctaaggagtgcaagtccatggaagagtcagaataacaaatcaacatttgtactacaccagaccagctctcttctaaggttgctatgacttcccagcaggcattctaatatatgcattcttcataacaactgtgtgaaacatattaatatcctcattgttaacgatgaagaaactaaatctcaggaagaaaaactaagtgaagacaaaagaaggatttgactgaggtttgtcagactctcgggaccatgctgttgaagccactaaccacgctgcctctggggtcacttgattaattctgggagattctggggagtctttttctccaacgctcccagtggcatctgactatactgatggccctttgcaggtgtgaccctgagctctgctggatttcttgtgaagaaaactccaaggaatggatgaatgcctggaaacttactgctggaagtcataaggcaatgacaagaaaatagcatatcattggaagacttgacccatgggatctataaattcctagggaagctccttactataatttgtttggtntctatggaatccaacaagaaaataaatagcgaaacatgtgggttgtctcctctttggcactaagcctgggagaatatgaagatatctgaaaacaaagaggcttccttcaggtgttcaggagggggctaacactgcctacttgtatgtcaagggcccatgggagtagacactcccagaatgctaccacttggattctccagggatcatatgtgataccaatcagctgacaaagaaaataacaacccatctaaggggattcagcagctagaaagaaaatgagtatgccaagcaaactgaatacacgaccagcaaaatagaacttcaaaaggagacaaaatacaacattctctctctctctgtgtgtgtgtgtgtgtgtgtgtgtgtgtgtgtgtgtttgcatgtaaataacaaaattcaagttctggacacaatttttagagctaaacacatgaccttccaactaaactttttattagatatcaaagaagctggtcactgttgaggtgaagatcaagtgcaagatacattttgaggcacagagcaaaaatgtaaagaatcagaaaaagacaagagacttgaggatttaatccaaacaactgaacagctaaaaacaagagctacaggggcagaagaagaaaaagtttaagaaagagacagtatattattttctctgagaagaggtaaagctggaaacctgttgtaagcaagatttattgaattttctcatcatagtcttaaaagagcagtactccaataggtcttgtttactaaaggaagatttgttgaaagaatcaaacaactgatggaggctgatgaaaagaatacatgacgatcaatgacacttggtacacacgttcacactcacagacacatacacaaacgttggataggaaaaggctggctggcaacatgtggcaacagtgctctgtaaggactcttgaagtagaataaatagtcttactgaaagaggaatt

SEQ ID NO: 86318 - DNA, 658 bp, Homo sapiens
aggaagttatactagaataggcagcccaggcttccggttctaggtgcttcaggagccgtggcttaaggtgcagacatggccaagtccacaccatacaccaccagtcccgaaaatggcacagaaatggtatcaagaaaccgcgatcacaaagatacaaatctcttaagggggtggactccaagttcctgaggaacatgcgctttgccaagaagcacaaaagaagggcctaaagaagatgcacaccaacaatgccaaggccatgagtccacgtgccgaggctctcaaggccctcgtaaagcccaaggaggttaagcccaagatcccaaagggtgtcagccataaacttgatcgacttgcctacattgcccaccccaaccttgggaagcttgctcgtgcccgcatggccaaggggctcaggctgtgccggcccaaggccaaggccaaggatcaaaccaaggcccaggctgcagctccagcttcagtttcagctcaggctcccaaagctgcccagtgccctacaaagacttcagagtagatatctctgtctgccaacgtgaggacagaaggacaggtgccacccaccccgggctgccgtctgcatggggctggggtcctcctgcgctattggtacaaataagcctgaggcagaaaaaaaaaa

SEQ ID NO: 86319 - DNA, 434 bp, Homo sapiens
tgaggaaaagtgacttccccaaagtcacctggctagtcaatggcagagccagggttcaaacccaagcaagcagtgctccagaacatatgctctcaaccacttcatgccactgtgccacttgaacaagcataaagtttgtctgctatagagagctgtgcctgctctgaacaagatgccttttagctgcccagaacccacccattccataagggcagaaatgatatttaacaacacacactacaaaggactctctcataattttccttgttctagaatttgatcatacaaagattgcctaaaaaaagccagggctgagatgacatcttactaaactctcatgaaaggtttattgtaacaataattgcaacctaatttgacgtattctgaaagacgctcctgcatgattagccgacagctgttcctccccaccacac

SEQ ID NO: 86320 - DNA, 398 bp, Homo sapiens
tcaaaggaggaactaaagaacagctcacatctcccaatgaaacggctggctctgaagtcaggttgagaagattcactccatgactagaggcaaggattaccacacatttcagggaagtatccagtataaaaagagaacaattcaaacttttttgtaaagggggaatttgatttggatataaaagacaaaaatagattaaaaaaaaaagcaccagaaaactttaaactaattgccctctgagagattagaggttttattgcatccataataaaaacgaaaggctatgaagaaataaaaattacagaatataaaggagctcttggaaattagaaatgattatcaaattaaaaataaatacaattgtactgtaaagtcaacaaaatttcccaaagtaagag

SEQ ID NO: 86321 - DNA, 816 bp, Homo sapiens
  misc_feature (798)..(799): n is a, c, g, or t
ggcacgagggagacatggccagacatgactcctgcttccccttaggaagtaaatcttacttatggttgtgaactgcttggagtccaggatgcccagatgtgaggggcagatgaagggaatgttgctggaaaggtgccttttaaggctgctgagaatttctggactgtgtcctgatggacgcagcaccatcaaagcccagaatttctgaaaacggtgacaaggttaacataaggacaacaaatactccaccctgtcatggtatgtgaggtgtgggtgtggcggtttctgtgtacgtttgctcatacacgcacatccaaaagcctgtgcctcattcctggccatgggtgaggacttggtctgtcacggctgatgaggactcccacaaccggccaagttatgtcttattatacacccccagaaagagagaaagctgccttctggaggactgattccacatgctatattcagctgagttgatttctgtgtctatttcaacccataacctgaagaatgatcaccttattccttattcattaattttcttgattaatagggaaacttgggaatagctataaagtaaaacttgggtggaacctggggccctggcatcacacaagtgtgattaggatggtcaaggtcatcaggagtacagcctattatattcccacatcctgagaaaggtcatttctcccacacacgacaaagtcacagacatcctgcacctgccactaggcatcctcatcctactgacatgcccatttctccagttttcttaatctgagactcccttcccagttnncccgggcgagctcgatc

SEQ ID NO: 86322 - DNA, 2129 bp, Homo sapiens
ggcacgagggagacatggccagacatgactcctgcttccccttaggaagtaaatcttacttatggttgtgaactgcttggagtccaggatgcccagatgtgaggggcagatgaagggaatgttgctggaaaggtgccttttaaggctgctgagaatttctggactgtgtcctgatggacgcagcaccatcaaagcccagaatttctgaaaacggtgacaaggttaacataaggacaacaaatactccaccctgtcatggtatgtgaggtgtgggtgtggcggtttctgtgtacgtttgctcatacacgcacatccaaaagcctgtgcctcattcctggccatgggtgaggacttggtctgtcacggctgatgaggactcccacaaccggccaagttatgtcttattatacacccccagaaagagagaaagctgccttctggaggactgattccacatgctatattcagctgagttgatttctgtgtctatttcaacccataacctgaagaatgatcaccttattccttattcattaattttcttgattaatagggaaacttgggaatagctataaagtaaaacttgggtggaacctggggccctggcatcacacaagtgtgattaggatggtcaaggtcatcaggagtacagcctattatattcccacatcctgagaaaggtcatttctcccacacacgacaaagtcacagacatcctgcacctgccactaggcatcctcatcctactgacatgcccatttctccagttttcttaatctgagactcccttcccttgttttttaaagataccgtgcttctccacatcctcatccttcaaggagcatattttgctcttaggatggtctttgggattcaagaatagaataataaatccaaacttggtcattcccattttgaagagatgcaagagggcccagtgaggacatccgcctccctgaaagtggtgctagacagagctgaggtcattgtatctgtgtatccacataggatttctcttaattcagcttgaattgatggggagggaggtaagagtagggtcagagttactcatcccttttcaaagaattgtgggtggaagtttgtaaaggccattcatttgattttcaaaatcaaagcgacagctctacttccacttggccttagatctctgctataccctgccatagccttgatgccactgggcacaagccacctgccaaatacaggagtggcctctcccagcctggcatgataggggggtctgtgccctcagatgtgttgacagctgctcttctgaattgccacacctgtgctacacttggaattctgtgctctgactctgcagggtaggaccacgtgccatctcacacagaggtcaaccgatgagcccactcactcgtacatgccttcttccacagtgggaagcatgatctggcaggggccgccctgtaggctggggatgggctgctgtgtgaatgttgacgttcgtttcatggagaaaggggaggtgaaagattgaagagcaggttcctgtcaatgttctgagttcgagctggaggtgtagattgaatagtctacatggtctgtgagtgtgtgagatgaacccttccatcctttgacacctggttgtatgtgtaggctaagaaggaaggaccctcctgtcagtgtgcaaagctgtaatctcatggactagaggagagggggccaaggggatggacaggagaagtcatgcagaatctaagcaggaatgcagatagaacacatctaggctcttttccccaggagagtgatgatggagcatatagatctggctcaaattcagcctccatcacttaccagtcaggaaccctggcgatatcactttaactttctgaacctcagagtcttcacctataagacggggaaaataataccaccctttcaagattgttgagataaataagtgatataaaacatgtaaagcttagttctggccacagtgtagctactcaataaatgataatactaccttctgggtcttatttttttcttctcaaaggaggtgactgtagggagggttggataccaagggctcacccaactcacttctgagagaaagatagagcctgctgcacacaaaacttacggca

SEQ ID NO: 86323 - DNA, 1783 bp, Homo sapiens
ggcacgagggagacatggccagacatgactcctgcttccccttaggaagtaaatcttacttatggttgtgaactgcttggagtccaggatgcccagatgtgaggggcagatgaagggaatgttgctggaaaggtgccttttaaggctgctgagaatttctggactgtgtcctgatggacgcagcaccatcaaagcccagaatttctgaaaacggtgacaaggttaacataaggacaacaaatactccaccctgtcatggtatgtgaggtgtgggtgtggcggtttctgtgtacgtttgctcatacacgcacatccaaaagcctgtgcctcattcctggccatgggtgaggacttggtctgtcacggctgatgaggactcccacaaccggccaagttatgtcttattatacacccccagaaagagagaaagctgccttctggaggactgattccacatgctatattcagctgagttgatttctgtgtctatttcaacccataacctgaagaatgatcaccttattccttattcattaattttcttgattaatagggaaacttgggaatagctataaagtaaaacttgggtggaacctggggccctggcatcacacaagtgtgattaggatggtcaaggtcatcaggagtacagcctattatattcccacatcctgagaaaggtcatttctcccacacacgacaaagtcacagacatcctgcacctgccactaggcatcctcatcctactgacatgcccatttctccagttttcttaatctgagactcccttcccttgttttttaaagataccgtgcttctccacatcctcatccttcaaggagcatattttgctcttaggatggtctttgggattcaagaatagaataataaatccaaacttggtcattcccattttgaagagatgcaagagggcccagtgaggacatccgcctccctgaaagtggtgctagacagagctgaggtcattgtatctgtgtatccacataggatttctcttaattcagcttgaattgatggggagggaggtaagagtagggtcagagttactcatcccttttcaaagaattgtgggtggaagtttgtaaaggccattcatttgattttcaaaatcaaagcgacagctctacttccacttggccttagatctctgctataccctgccatagccttgatgccactgggcacaagccacctgccaaatacaggagtggcctctcccagcctggcatgataggggggtctgtgccctcagatgtgttgacagctgctcttctgaattgccacacctgtgctacacttggaattctgtgctctgactctgcagggtaggaccacgtgccatctcacacagaggtcaaccgatgagcccactcactcgtacatgccttcttccacagtgggaagcatgatctggcaggggccgccctgtaggctggggatgggctgctgtgtgaatgttgacgttcgtttcatggagaagtcatgcagaatctaagcaggaatgcagatagaacacatctaggctcttttccccaggagagtgatgatggagcatatagatctggctcaaattcagcctccatcacttaccagtcaggaaccctggcgatatcactttaactttctgaacctcagagtcttcacctataagacggggaaaataataccaccctttcaagattgttgagataaataagtgatataaaacatgtaaagcttagttctggccacagtgtagctactcaataaatgataatactac

SEQ ID NO: 86324 - DNA, 1630 bp, Homo sapiens
ggcacgagggagacatggccagacatgactcctgcttccccttaggaagtaaatcttacttatggttgtgaactgcttggagtccaggatgcccagatgtgaggggcagatgaagggaatgttgctggaaaggtgccttttaaggctgctgagaatttctggactgtgtcctgatggacgcagcaccatcaaagcccagaatttctgaaaacggtgacaaggttaacataaggacaacaaatactccaccctgtcatggtatgtgaggtgtgggtgtggcggtttctgtgtacgtttgctcatacacgcacatccaaaagcctgtgcctcattcctggccatgggtgaggacttggtctgtcacggctgatgaggactcccacaaccggccaagttatgtcttattatacacccccagaaagagagaaagctgccttctggaggactgattccacatgctatattcagctgagttgatttctgtgtctatttcaacccataacctgaagaatgatcaccttattccttattcattaattttcttgattaatagggaaacttgggaatagctataaagtaaaacttgggtggaacctggggccctggcatcacacaagtgtgattaggatggtcaaggtcatcaggagtacagcctattatattcccacatcctgagaaaggtcatttctcccacacacgacaaagtcacagacatcctgcacctgccactaggcatcctcatcctactgacatgcccatttctccagttttcttaatctgagactcccttcccttgttttttaaagataccgtgcttctccacatcctcatccttcaaggagcatattttgctcttaggatggtctttgggattcaagaatagaataataaatccaaacttggtcattcccattttgaagagatgcaagagggcccagtgaggacatccgcctccctgaaagtggtgctagacagagctgaggtcattgtatctgtgtatccacataggatttctcttaattcagcttgaattgatggggagggaggtaagagtagggtcagagttactcatcccttttcaaagaattgtgggtggaagtttgtaaaggccattcatttgattttcaaaatcaaagcgacagctctacttccacttggccttagatctctgaaagctgtaatctcatggactagaggagagggggccaaggggatggacaggagaagtcatgcagaatctaagcaggaatgcagatagaacacatctaggctcttttccccaggagagtgatgatggagcatatagatctggctcaaattcagcctccatcacttaccagtcaggaaccctggcgatatcactttaactttctgaacctcagagtcttcacctataagacggggaaaataataccaccctttcaagattgttgagataaataagtgatataaaacatgtaaagcttagttctggccacagtgtagctactcaataaatgataatactaccttctgggtcttatttttttcttctcaaaggaggtgactgtagggagggttggataccaagggctcacccaactcacttctgagagaaagatagagcctgctgcacacaaaacttacggca

SEQ ID NO: 86325 - DNA, 2008 bp, Homo sapiens
ggcacgagggagacatggccagacatgactcctgcttccccttaggaagtaaatcttacttatggttgtgaactgcttggagtccaggatgcccagatgtgaggggcagatgaagggaatgttgctggaaaggtgccttttaaggctgctgagaatttctggactgtgtcctgatggacgcagcaccatcaaagcccagaatttctgaaaacggtgacaaggttaacataaggacaacaaatactccaccctgtcatggtatgtgaggtgtgggtgtggcggtttctgtgtacgtttgctcatacacgcacatccaaaagcctgtgcctcattcctggccatgggtgaggacttggtctgtcacggctgatgaggactcccacaaccggccaagttatgtcttattatacacccccagaaagagagaaagctgccttctggaggactgattccacatgctatattcagctgagttgatttctgtgtctatttcaacccataacctgaagaatgatcaccttattccttattcattaattttcttgattaatagggaaacttgggaatagctataaagtaaaacttgggtggaacctggggccctggcatcacacaagtgtgattaggatggtcaaggtcatcaggagtacagcctattatattcccacatcctgagaaaggtcatttctcccacacacgacaaagtcacagacatcctgcacctgccactaggcatcctcatcctactgacatgcccatttctccagttttcttaatctgagactcccttcccttgttttttaaagataccgtgcttctccacatcctcatccttcaaggagcatattttgctcttaggatggtctttgggattcaagaatagaataataaatccaaacttggtcattcccattttgaagagatgcaagagggcccagtgaggacatccgcctccctgaaagtggtgctagacagagctgaggtcattgtatctgtgtatccacataggatttctcttaattcagcttgaattgatggggagggaggtaagagtagggtcagagttactcatcccttttcaaagaattgtgggtggaagtttgtaaaggccattcatttgattttcaaaatcaaagcgacagctctacttccacttggccttagatctctgctataccctgccatagccttgatgccactgggcacaagccacctgccaaatacaggagtggcctctcccagcctggcatgataggggggtctgtgccctcagatgtgttgacagctgctcttctgaattgccacacctgtgctacacttggaattctgtgctctgactctgcagggtaggaccacgtgccatctcacacagaggtcaaccgatgagcccactcactcgtacatgccttcttccacagtgggaagcatgatctggcaggggccgccctgtaggctggggatgggctgctgtgtgaatgttgacgttcgtttcatggagaaaggggaggtgaaagattgaagagcaggttcctgtcaatgttctgagttcgagctggaggtgtagattgaatagtctacatggtctgtgagtgtgtgagatgaacccttccatcctttgacacctggttgtatgtgtaggctaagaaggaaggaccctcctgtcagtgtgcaaagctgtaatctcatggactagaggagagggggccaaggggatggacaggagaagtcatgcagaatctaagcaggaatgcagatagaacacatctaggctcttttccccaggagagtgatgatggagcatatagatctggctcaaattcagcctccatcacttaccagtcaggaaccctggcgatatcactttaactttctgaacctcagagtcttcacctataagacggggaaaataataccaccctttcaagattgttgagataaataagtgatataaaacatgtaaagcttagttctggccacagtgtagctactcaataaatgataatactac

SEQ ID NO: 86326 - DNA, 318 bp, Homo sapiens
actgaaagcctcaattcagaaccaaagctggtaggctacgtggaggtcatttctatatgaagtaaggaaacactttcaatgggttgtgtggaccaaaactgttgatgctgccttgggtgcagtgagcctcccatcacaaaaggcaataaagctgaggttgcacacccaccatacgtggttttccttcaagcatgagaagatgatcagataggacaattaataaagccttctttatgtgagagagtctggaattttatgaattctgcctgtggggaaccccaggcagcagccgcgtgccttttgaatatgttgcatttc

SEQ ID NO: 86327 - DNA, 349 bp, Homo sapiens
aaatcacatcccactgcagaaccagaattgtcattgatgaagctgggctactatcacctgcttccctggaatgtttggaggattgagtgggataatgtgtatcaaagcatctagcatagtctagcagaaagcctccatatacacgtccttctcccatggggcatagtcacaggtgggtgagagctgtatgatttgtccagggctatccttctggcagagatgggatctgaatttaatgcagggggacagtttttcatgatgctttcccccaagcgcagtggctcacacctgtaatcccagcactttggaaggccgaggcgggtgtatcacctgaggtcaggagttcaag

SEQ ID NO: 86328 - DNA, 238 bp, Homo sapiens
ctgtggaaaacaatctggcaaatcctcaaaaaattaaacacagaatgaccaaatgaggccgggagcagtgtctcacacctctaatcccagcactttgggaggccgaggtggacagataacctgaggtcaggagttcaagaccagcatggccaacatggtgaaaccccgtctctactaaaaatataaaaattagctacgcatgggccgggtgcggtggctcatgcctgtaatcccagca

SEQ ID NO: 86329 - DNA, 1448 bp, Homo sapiens
aagtttcctgagacctccccagaagctgagcggataccagaaccatgcctcctatacagcctgtggaatcatgagccagttaaacctcttgtctttataaattacccagtttcaggtatttcttcatagcaatgtgagaactaactaatacagagagcctcaagtttaaggctacctagcgcaaagacgagtacggcctccagttgccttgttcattggtcactatcctaagaaaatgtatacaatcatctttaaactattctctcctgaggaactaccctacagtggtgcattgtggtattagacatacaaagatgcagatcacacacatgggcctcagcctagtggtgaagataagactaaaaacagatgtatccaacaatgttgccagtgcaatggtaagcagggttctcaacagcggtgctattgacatttggggccaggtgcctctttgttggggctgtcctgtgtgctgtatgaaggatattaagcagcatccctggcttccaccaactagtagcgctcacctgtcatgacaatcaaaaatgtatcccaacattgccaaatgtccccttggagacaaaacagccctcagttgagaccactgggaaagacgcacaaggtatcacgagagtatagaagaggaattcttaagccagagaggcataatcaaagaatgcttctcagagaaactgtcatctgaactgagtcttaaaagatgagtctggtcaacgggagagggattccaggcagaggagagagcatgaatagtgaaggaaacagggtagtgtgatgccttccagactacaaacagctcgttgtaaggtgcaaggcagcagcaggggagatgagcctggagagggagatgggccccagatcacaaatgtcaggtttgggaatctgggctttattctagatgcaatcactcttcacatgattagagtagctatgccagccttgaatcttcataaattctcattaaatgtccctgatagcatttctatccaagacaatatttctgctatttcagcaatggtaatcttgctaaatttttggtcaattgccaatctctggtatcttctttttcttttctcctggctttttgtccttgaagcccatttttccttactcattgatcccttgacagacacaggaccagttctcctcatgccccatctacccatcttagccgagtcccgcagtcactcaatttccactattttcctcccaaaatattacatctcacatccagtaaacagttgtcatctcataagccataaaacaatcaatcaatcaactatcaattctgaaacttttgcttatttggaaggttagcctagggtaggtgtttataaaaaatttaaaaacaaagacaacaactggctacatggcctgaacgtccctgcagaggacatgtgttttcttgatctgacatacatgtccctcaa

SEQ ID NO: 86330 - DNA, 319 bp, Homo sapiens
ataattttcatttttccacaggagctcacaaatcaaaagttttcatattattatagagattctaacaaagtctgtggtttatgcataaatactctcctctgaaatatatcaagtgcagaggtgggaaaacccacagataatagctagcttttaaaattggcattttcatgctaagcattcattgagtctttcaatatgacagcatgttttgggttgtgtgaaagagaaattgtcttaaattagtctgtcttctcagtggaaaagaagacaaattgccaacttcctagtgcgtcaccacagtaagttatagaagttaagg

SEQ ID NO: 86331 - DNA, 428 bp, Homo sapiens
cagaatggccatgacgtgaaataggaatcgctgcgacgtgattgatgatgccctgggaactggaagttgaaaggactgcaggcttctgacgtgccacgcagacgactttatggaggcgaagcacgtgtcttctgctcagccactaactttggccagggctccagaggtatgtgtgctgctcatacattttagggatgtgctaaaaccagtgaaacctacagattttctctcctagacagcacgagtctcatcccacacgaggccgggaacccgtggtcatatttgcttcttcgtttagaaatttctctgggaatagacgcagttctgtttgagcagccatgagattaatgtctggctggcttttgatctccgacttcgtgccactttcatgtattaaaatgagaataaatggatagaattgtatgtat

SEQ ID NO: 86332 - DNA, 214 bp, Homo sapiens
ctgccttctgcacaggtaactcatgataacagtatgtggcctataattttcagctcactcgcgcttacctgcatgtatgtgcacagatgttagagagtgcttttcttcatttttgttagaaatgggataataaaacagacttttttttttttttttttttttttttttttttttttttctttttttttttttattcttgcgggggggggggggg

SEQ ID NO: 86333 - DNA, 347 bp, Homo sapiens
tcaatggaggatatgtaaggcagcaatctaacagcaatacaacactaaacgttccttgagaaaaacacaaacaacaggcagaactcatgtctgagtagaagcttcttagaagaactgagtagaacttggaagaaacatgtacctccttcacacacataatattgttttatactatgctatcttgttgtaggggtacgtgttgatatataaccccattttgcatgtgaagtcaatgggctcagtgggctcagagagatacagtgattgatttgttctagttcctttttttttttttttttgagacagagtctcactgtgtcacccaggctagagtgcggtggctcaat

SEQ ID NO: 86334 - DNA, 406 bp, Homo sapiens
ttacttctgtgcctctgtgtcctcatctttcaaataagagaaaaatactaactacatcacacggttgttggaaggattaaatgaaatatatgacacacttggtgcagagtagctatgaaaatgttagctgttacagtttgtaatacattgacacctcatatgaacaatggaagccattgttcccagcaaaggggaagccactgaaggtttttgaggagcacaatgtcattatcaagggagtaaggggaaacagcccagaacagatttagagtgcagaccctggactcagcctgtgtttgaagtttgactttagcacttactgcctgtgatgtcttgagaaagtaaaataaatcgctgatgtcttaggttccttccttatctagaaaatgattaacataatagtagt

SEQ ID NO: 86335 - DNA, 603 bp, Homo sapiens
tgcactccagcctgggccacagagcgagactccatctcaaaaaaaaaaaaaaaaaaaaaagtgaagtctttacataaatggattacgtgtgctgccctttgagaagtttgttgatgaaaggagaaaggaaatagtagcaccagaggaaaagatcagggatttaccctgttcttacaggataacagctccttgctcttttcagctagcttttcaaaggacagggataggacagccccctgccttatttcggatacttggatctataacctccagaaattcaagctgaagtagctggaggtcggagaggaatgagaactgcctgggtggggtctgccagccagacactgccaggatagccacaaggagacgacttggaagaacagacagcaaccacgttggactcaggcagtcctgggtttgaatcctgtctctgtcaccacctagcctgatgaccttgggcacatcctgagcaccctgtgccttatctgtaaaatggaaacaatcatgccgacctttcagggtggttttgaggattagagactagctcctgacacacagtaggtaatcgtaaatgggtgctattgtttggcccgacccacgtta

SEQ ID NO: 86336 - DNA, 732 bp, Homo sapiens
gagagggataagcatgtgagcaggaggtaagggagaggggttagttagatggtgggagaagtctctgctctggaagacattatctcttcctgttccctctacaatacctaaccatcctattcctttctatgcatttgcgtattttcgttattcacattgcagatgcattcctcatttttctcttccagccacactatgctcagctttccattccagctcaaatttttcttcccaaaagctcttccttgtaagccccgttcctggtgagttcctggtccaaggggactgttctcctcagttcatttacagccgtcactgaattgctctgctaatactttaaagcgtgttcagctttcctcacctggctgggtacctgctgaggaagatgtcccttcaatgtttggttggagtcttttgaagcagaacagacctaagacaaagctgtgaaagagggccccaaattatacccagtatctcctccttttaccactcattcttccagagttctctcctaccatatgtgcccacccagaatttgtccttgcaaggacccttcaacgctcacagcacagtctcatcttagcctgttctctcaggatgcaggtgcttactagctggaaaaccagttgatgctactgggtgtggactggtttaaaccagcggttctcaaccctggggctacacactggaattccctgggggttttgaaaaaaatgtgaatgtacagatgtc

SEQ ID NO: 86337 - DNA, 171 bp, Homo sapiens
gtacttccagccccgctcctgtgccaggaaccggcggccctccgagccctccggagccggcctccgggccccgagcgcggcgagtccgcttgcccgctcgcccgctcgctcgctcgctggtccatccgcctcctcaccttcaggacccggatccctcccggccggcggctc

SEQ ID NO: 86338 - DNA, 172 bp, Homo sapiens
ccagaaaattcatcatgactaacaaggagtcatgctctttggagagtggctgagctgtttataaatcaccacgttgagcacccgcccgggcaagacgctttggctgagaatttccacgtgtcctgtgtttatgagcgtgtgtgggggagagaaatggataggggaggggcga

SEQ ID NO: 86339 - DNA, 371 bp, Homo sapiens
atcgagctggttgtcttcttgcctgccctgtgttgtaaaatgggagtcccttactgcattatcaaggggaaggcaagactgggccgtctagtccacaggaagacctgcaccactgtcgccttcacacaggtgaacttggaagacaaaggcgctttggctaagctggtggaaggtatcaggaccaatgacaatgacagatacgatgagatctgctgtcactggggaggcaatatcttgggtcccaagtctgtggcttgcattgccaagctcgaaaaggcaaaggctaaagaacttgccactaaactgggttaaatgtatactgttgagttttctgtacataaaaataatgaaaataatacaaattttcctta

SEQ ID NO: 86340 - DNA, 637 bp, Homo sapiens
ctcactaaatatttgctcaatgaatagatataaattgaagcttaggattttgtaacctgtatttttactctaccaaaaaaacacgaaaatccactgaaatactgctagtcatatacaacaattacatgagaatagacaataagtgatttagccttagtagtgcatactacacacagctgtaaacagccttccaataaacctctagcactataatgtgtatacagagtttgggtcaccatgtcattatttataggccatttttaaatactgtaacacaaagctatagtcactttccaacaagttcatcacaaaaatatttatttagagaattaattattttaagatcattaaagttgagattccaagatattcattcactataagggatttgtagcgctggatcattctatttgtatacgcgttgtctactattggctctttacatgccagggactcagatagttttaatgattaacttcatatccaggccaaaaccttaaaaaaacactgcaaaaggctgggcgcggtggctcatgcctgtaatcccagcactttgggaggccaaggcgggtgaatcacctgaggtcgggagttggagaccagcctgaccaacatggagaaaccccatctctgctat

SEQ ID NO: 86341 - DNA, 396 bp, Homo sapiens
tttgtggagatggggtcttgccatgttgctcaggctggtctggtctcaaaactgctctgggctcaagtgattgtcccactttggcctcccagagtgctgggattaaggtgtgagatactgtgtccggctatgaaaattttatttttaattaacttgtatatatttatggggtacaatgtcctatttctgtacatgtacacattgtggaatcaaatcaggctaatatatccatcacttcatatcattagcatgaatgagaacatacaaagccactcttagaaaattttgaaatttatgttatttcagcccttttatgctggaggttgcaaatgttttgtgaataatcagaccaaaaataaaaacaaaaaatgattgacttcagtcattcagtaagaa

SEQ ID NO: 86342 - DNA, 325 bp, Homo sapiens
cctcttacatgtctcaaatcgtacagagatttatcttactgcagtcacacagctcagcatcccaactctgggtgatctcaggaaagaacatctcatttaaagcaataataaccagtttaaatgtaggcagcctcagtgctacatgaccaaccagatggatcagctgtttacttattgagtccactggttcttttggcgttgttttaaggtggcttcttgaatgttaaaggaacaatctaggctctatctgaacctccttttgcatctttcattggtgacatgaggagcatacataggccatgtgtcctcttgtccttcggtatct

SEQ ID NO: 86343 - DNA, 187 bp, Homo sapiens
tggcatctgcctaaccttctccaaagagtaaattccttcacagcaacaactgccctgaacactttggaaaatgctttacatatatttggtgttcacgtatttgctgaattgaataaaacttacttctagaaagttaagtaatattatcattcaaccttataacaccattgataaatataaatgccat

SEQ ID NO: 86344 - DNA, 514 bp, Homo sapiens
acttgtaattaggctgcctaggtttgattatgctcatcccttctgacctgtgtgaatcaaggagaattgcataatctctcagtatctcaatttctcatccgaaaatgatcatgacaacggtgcctatatcagatcaacctcataatcattgtattgtttaggataatacctaatatagtaagttactaattaaagttagctctaattattttctatactttcaaaagagaaagacacacagagcctttattggttcattttcacactgctaataaggacatacccgagactgagtaatttatgcagaaaaagaggtttaatgactcagttccacatgtctggggaggcctcacaatcatggcaaaaggtgaagaaagaaaaagacatgtcttacacagtggcaggcaagagagtttgtgcaggggaactcctatttatgaaaacatcagatcttgtgagacttattcaccaccatgagaacagtataggggaaactgcacccatggttcaatta

SEQ ID NO: 86345 - DNA, 199 bp, Homo sapiens
ccatcccttcctgccttaaatcctggtgcttacttcttttccttacaaattggattaatgtcctctatggcaatttttttccagaatggggcacttccatctaatggggcacttccatctggcatttagggccaggcacagtggctcacgcctgtaatcccaacagtttggaaggctgaggcgggtggatcacctgaga

SEQ ID NO: 86346 - DNA, 526 bp, Homo sapiens
atatctgctttcatgctgcttccattctagtggagtaatacacatcgcaaaggaatggtcatttattgattgagcgtcttttaacaattcttgtcttgaaaattaactgattttagtattcaggaaagtatccaaggaaataagagacatatttttcttctttagttcttttaaataaatttcagaatttttttttaaatgtaagaagttaatgttagaaccctgatactgtatctaaggaaggaggtcgtgtagaagtgtttctctccttttgtgtctttttcatttacaaatgtagggggtagagcttacacttccagagtaatcatcacgtgcaaacgaatgctcattgccaatcagattgcaagtggagtttcacaaatttggtatacaaaggtctatagaaaaattggccaggcacggtggttcacaaatcccagagctttgggaggcagaggcaggaagattgcttgaggccaggagctggagaccagcctgggcaacataccaaagtcctgtctctaca

SEQ ID NO: 86347 - DNA, 393 bp, Homo sapiens
tgaagctctgagtccagggccctcacccaggacatcttggtgcttgggccaagatctgaaccaggtctgcccaagaacacagcctgagttcttgaccaatatcgcctccctccttgcaaaaggtgttctttccagccacctcctccctcaagcatggcagtcctgaagtgcccatactcaagttggctttgattttggggatattcgccagtgctccagactgcagagttgtcactacccaggggagaccagcctgatgcctcctgacgtcccaggaggtggcaccgtctctgaccttatgctcaggaagttctcctaacccgctctgggtacctccagagctgtgtcagagccagtcgggatcaggtagaatgtggcttgcccagggaggct

SEQ ID NO: 86348 - DNA, 251 bp, Homo sapiens
aagaatcttctgttatttggatgtgtaactttatcgaattttttgaatttctaaaggtagcacagaatgaatctctcttttctcaccttatgccagaaccacccccatcccccaccaaggttaaatttgacttatatcccaagaaatttttcatttttatagtattatttgttacaacagaaattcgtatgaaatagataatcaaaataggacttaacccttagggattttaattatgagagcactataga

SEQ ID NO: 86349 - DNA, 324 bp, Homo sapiens
gaaatgcaggttcagctatttgctgcttgcagagtccagttaataaaagtgagttctggtataaagaaagtgattttttttttttaaattattccaaagctagctgaggggaacaagtacaggcttcctgcctaggggtatcactttgcttttggagcaggaagtaagcacttttaaagggggcttaacatgaatggcacatggggtcgggggaagtaagcaagtgcagcatctacatgttagtttggtaccttatctactaggtagtcaaggtggtgactgcctgtgtctttgtgggcatgtgtactttgggttgtaaattga

SEQ ID NO: 86350 - DNA, 863 bp, Homo sapiens
gtttgttacccagctctcacgggtcactgttctttgttgcctgatgcccaatgtcttgaaaacattttttttttgtcttgtttttgtggtagtctcagataggagagtaaatttggtccctattactctttcttggctggaagtaaaagtctagctttaatgttttgatcttgttttatatttaattctttaatctatctggaattaattttctcgtatgccctggagtgccttttttccctcttgtcacactgttctaccttgcagctggacacgttattaggtaataaatgctggttaggtgatgtcttttcttgctagtgggttctgaattgggagcccacgaggtccctgacaagggcaggcagtgctcatggagtgttggtcacaccacccagtgcccctctatcatttaggactgaactatgcagcctctggatgatttctttggcctgactcttgatgtttttaatatctctgccctcctgattgggagagtgagtggcagggaattcaccttttttgagggaagcaaagaaaacataatttgttgggagattaacttagcgcctggacttttgaaaaatttcggaaattgttttgcagccaccatgctcaatttcaaatgagattgtaacttccctgctcagagcaggcagctccttttggaactgaggagccgatacctacctgcctagcaggaaactcccctgacggttccccctttctctctgtattagtccattctcacactgctataaagaaatacccagccagggctgggtgcggtggctcatgcctataatcccagcactttgggaggccgagacaggtggatcacgaggtgaagagattgagaccat

SEQ ID NO: 86351 - DNA, 230 bp, Homo sapiens
catatatttaataatgatgaaactcaactttcagtattatttaacaaatcatgtttttatctctctaaagtcatttgggaaataccataaaaatatcttgctatgaattgttcaattggttacttatttgccctgtcttaattcagttttaaattctcttaatctagataatgggcagctactgcaatctactgtcatggaaataaaataacattttgtggaaagatgaa

SEQ ID NO: 86352 - DNA, 276 bp, Homo sapiens
cgtctcccaggttcaagcgattcttgtgcctcagcctcctgagtagctgggattacaagcatgtgccaccacacctggctaatttttctatttttagcagagatggggttttgccatgctggccagggtgatcttgaactccagacctcaagtgatctgcccgcctcccagaatgctgggattacaggtgtgagccactgcacccggctgaggcctttttcttctgtgcgttcctgctgtcttccctccaggcagcagcaagctggtaggagctgt

SEQ ID NO: 86353 - DNA, 180 bp, Homo sapiens
cacgtcaaggacgaggtgccagctggtcattgaaggatggtggggctccattcagcagaggtgggggctgtgatgggggtggatgggtgtgtgaggtgattgggtttgtgtgtgatgagtgtgtgtgtgtgtggtgcatggtgtctgtgtgatggcccagtgtgtgtggctctgtgtgca

SEQ ID NO: 86354 - DNA, 315 bp, Homo sapiens
accccaacagggaagagagatcccatagatgtggacgctctttagtacgcatcgtggcatcctcctcccagtgtgtgtagaggggtttgggctcactgtgaatgtcctaggaaaaccaactctggggtccaaagccctgaccactcccttcttcttaacagctccctgggtctctcagatttcaagggcttaacctgtacagaggggcttaccctttgtatccctgtccatgcagatcataggtgggcctccctggggtgggtgcagctctgacatattaattcgtttaaaaaaaaaatcagatttgtgttattg

SEQ ID NO: 86355 - DNA, 209 bp, Homo sapiens
ggagctgaaaagcataattccttaattttaatatttatttttttcctgtggactgctgatcataactagaatataagaaatgccattttaaaactctgagatttgagtttattatgattgactctgtgtaaataggattttgaatcaaatctagccttcattctcagtctcccttcatctattctgtctgtatcctccgatttcctaaa

SEQ ID NO: 86356 - DNA, 328 bp, Homo sapiens
  misc_feature (196)..(196): n is a, c, g, or t
  misc_feature (214)..(214): n is a, c, g, or t
  misc_feature (263)..(263): n is a, c, g, or t
gtaacaaaagatgccaaaatatgtattatttcagtaagaaacattcatttcttggtcatcctacatgaatagcattggttaaggtgtgaagattgccatgctcctcagcgtcagtaaggaaccaatgttatggaggcttcatcggtttttagtgacgtcatccctagaggttgctgtggggttagagccccacagnctacccgactgcattctnccctagagctttgagcagcagggcactgaagcgagccattccccctgtngcatgcccccagtagcgtcggacatctgtcagctctctaaacacttctagcattcctttcagatc

SEQ ID NO: 86357 - DNA, 384 bp, Homo sapiens
actcttaatattcctttaaaattaaataattgtttccacagctcttaaaatagaatttaggaacctagcaacatgccactcatccattaacagtgataaattatttaattttataaacttttcattaaagtaactgatatagtttggatatgtgtacctgcccaaatctcatgttgaattgtaatccccagtgttggaggtggggcctcacgggagttgactggatcatgggggcagctttctcatgaatggtttagcaccatccacttggtgctgttctcatgatagtgagttctcatggtgtctggtcatttaaaagcatgtggcatggctcacacctgtaaccccaacactttgggaagccaaggtgggcagattgcttga

SEQ ID NO: 86358 - DNA, 500 bp, Homo sapiens
caaatgcacccaatctgatggagggaatctttagtgggtggggaatcctaagtgaagtatggggagaaggaaatgaaccatggcaagggagggaaaggattacttggaggtcttagttgaagggttagcattgaggggcgaggaggggctctctcggtataggtaaatgacgctaggacaggcagctgagaagaactgctgctctccctacggcaaggaaatccaaatggtatctcctgagcctgatcggagttctcctctgagttcacgaaggcctgctctctttcttagaattagtctttcaccattgtaggtgcaagattgcggtgtttgcaaacaccgcaatcttctccaaattgtttcatgctaccactcccaattaatctttccattttcgtctgcgtttagtaaatgcgttaactaggctttaaatgacgcaattctccctgcgtcatggatttcaaggtcttctaatcaccttcggttcaatctcttcctaa

SEQ ID NO: 86359 - DNA, 1370 bp, Homo sapiens
gaagctgtcctgaaggcctggacccctgcacagaatgtggttatttatcagagagttggatcaagggtcaggtgctagaaagccccaactgtatctagtgtggcatgcaaagctctttggtcagtttcctaatccagttcctcagaaaactataacaaagcaagaacttaagtcagtgtcttgtgttctcagacttttcgatttgatatgaagggtgaaagatcctggctggggagttatgaatgaatgaatgaatgaatgaatgaatgatctttagcattggccttcaattccagcccccccaccacatctcttccactgccttctactactagtaactggtgactgctttttcaccacctctgactgacccgtaccttttctttgcctgttaaaatatgctaataaggaaacatacttccatttcttttgaattgaggggcccataacttttcatttagaacttctatccctgatgggaaaaatagctgtatatctattggttgttatcttggttacagtagcctgattggagttcccctgtacaaatataatcttgtgtgtgtgtgtgtgtgtttaattgataggaggatatgggaccagaaatgtatggagaacaatttcacttaaaggttattggattggggtaagaatatgggtgtacaccaaaaaggagggagtataacagatctaagagaaaagtgccctgagggataaacaaggagtaagagataaaggaagaaaaataggaagggaagcctggtcatgcctttggtgttggcacctgcattatatttccagtaagaagtatgcgctgtggtctgaagataagcggtgcttccaacagggttatttactcataccaaagaacaatagtcctttgctgtacagggattattaatgatcagagggaaacagctttaggaaaatccattactaccacaaagcaataaattcaccaacaggccacacatttctctcctattcagacaaagcttagcatagataaaagagacctcgttgttcttcctctgtttcctcctattcaggtaacatttgcctttgttaactctcagtgctaagtgatgttacatggattatttcatgaataatccttacgactctgaaaggggttctgctattaccccattgtacattctaagaaaccaagtctcaggcagttaataatttgcccaatggggtaaagtcaagattcaaacccagccttgtccgcccagagcccaaaataaatgttcatttattttgtattatatctgctattccttacaaatgggacagacattccctactctgctatacagggcaagaacatctggttgctctgacattagcaagagcatttcaattct

SEQ ID NO: 86360 - DNA, 637 bp, Homo sapiens
gttatgaatgaatgaatgaatgaatgaatgaatgatctttagcattggccttcaattccagcccccccaccacatctcttccactgccttctactactagtaactggtgactgctttttcaccacctctgactgacccgtaccttttctttgcctgttaaaatatgctaataaggaaacatacttccatttcttttgaattgaggggcccataacttttcatttagaacttctatccctgatgggaaaaatagctgtatatctattggttgttatcttggttacagtagcctgattggagttcccctgtacaaatataatcttgtgtgcgctccggtgctggtatgatatatttagaatgggtgtgcttgcctcctgtgatcttgtttgggatagacattttagaagtctttcagacattttttgttttggccccgtgttctaaaaacttcccatattacagggcctaaactaaattattttcccttaggtaaaataaaaatgccatccaccctctcctccctgccccctattgctgacagaccatattcttatcattttctgtgtaaaaagatgctgtttcataaaatagctgcggtatgattaagtataccacacaagcatatcctgaaatttgc

SEQ ID NO: 86361 - DNA, 303 bp, Homo sapiens
gattcagattcagtctcctgatgtgtcaattagctgcactttgttacatgccaaagataatacttaagtccatccagttagagtaacaagaacaaaatgaatggatgagtgtaagaattccaccactattggctgcgcgaggtggctcacgcctgtaatctcagcactttgggaggcctaggtcggtagatcatctgaggtcaagagttcaagaccagcctggccaacacggcaaaaccccatctctactaaaaatcaaaaaattagatgggcgtggtggcgggcacctgtaatcccagctac

SEQ ID NO: 86362 - DNA, 516 bp, Homo sapiens
agataataatacacacgaaaaatcatgttttactgtagctgaaaaatatatgaacaggatataaaaattgaataaaaaacatttgaaaattataggtgagatgagtagggattaaaaataatatgactataattatagaatgcctatggaacaattttatgaacatgccaaggatatgcctaaataattgagatttttgtaagtaatgatgagagaggaaaaagtaattgagatattatcttttatattctaaaaaaaagtaggaagagaagctggtggtggttgacaactttttccctggttaaacaatactcatttctctaagtcagtagttaaggaactttgtatttaataaatttctggaaaatcttccccaaaaccagtttagccattgtaatatttaaattaaacataaaacttgtgtcgttgttaacaaaaagccaaatcactaccaaaagaaaaaaatctgagtgtatgtgcacacatggttaagaataaagaaatctggtataccta

SEQ ID NO: 86363 - DNA, 379 bp, Homo sapiens
tgatgaccataagcccatgcttttcatagatgtttaagggttaaatgaggtaatgcatgtcgagtgctcagccaactgagattcaggaagcgctcaatagatgctggctgtcattattaactgagtaagtaatccttttcccacagaagcagtagaaggctgacgatgtgtgtgaaaaggatggatacaattccctgggccacaaataaaggtttttttggttgttgttgtttaaatgaactgaaatgagtttgggagattcatatattattttacaatacttcttaatgctagtttaaaaagttcaacattgtcattctactccacttccgtatgagataagtatatgaggagcttaattccagataaactaagcaag

SEQ ID NO: 86364 - DNA, 364 bp, Homo sapiens
taagagacaggaccttgctatgttgcctagtctggacttgaactactgggctcaagcaatcctcccacctcagcctcccaagtagctgggactacaggcacatataatcatgcttggctttttaaaaacattttgcaggcagtcaccaggttatgtttaacatgcaagtcctggcctacttttattggctatggttccaataatagttcaactttcataacttctgtggtgttattttcatctgcttgatttacctagttccactagagcttccagtaatccctactggtgccacctaagaggacagaaggagctgatctagaccaggcacatgtgaggagatacctacccccattggtgttgc

SEQ ID NO: 86365 - DNA, 230 bp, Homo sapiens
ttcaagaccagcctgggcaacatgagaccccatctctgcaaaaaaacaaacacacacacaaggagctctttaagactaaagctgactaaagggacctccactaaatgtgacccaggattctctgctgctgtgaagataactggaaaaactggccaaacctcatacgaaggcctatagattggataacagtgctgtaccaatgttcacctcctgtgtccgtcacctcggta

SEQ ID NO: 86366 - DNA, 282 bp, Homo sapiens
ctctaaaactgtctttctcctaagactagaaagagcaagggagagttttctctgacaggtgcattgtagaaacatcttttacctaatattttcctgattatttgggctctcttcttatggcagccatattttgtgccaaatttattaagtccttagtggctgctgtggattttgccttctgagtaccttctacatttgattactcctcatttcctatgtcaaggtttttcactattgattaaaacgtaatctgatttttggaagctgctctccactgtagtc

SEQ ID NO: 86367 - DNA, 731 bp, Homo sapiens
taaaataatgctacttttatatctctgcttcttgagaagatgacaggttgggttaaaaaatagggacaggttaattaactttaattaactggaaagttcagggcaaaacacacagagctcctatctacctctaccattttccatttacccttgtgcagaaatgctttccctttctttagtatcttttaaacataaaagactggaaaattttaaatataggatttttataaagtgattaaaacagccactttgcagagaatacgttttgtcaacctttagtttagcaaagtaaattcttaggggaaaaacatttttcactccatgaataatgcagtttttttctttatagaaaacaatgagacaaccaggccaacattttaaaattttctttggaaaataattcctgaatttgaagctctaacaatacagcttcaaaaattcagaagcaatacacaccaccttatgatacggtttttgctttgctctagcagaaatcctctgaagtctcaatccccagcataatgtctcccagatgtctcaactagttgccatgccaactaaagcagcttaaattaaatgagggcctgaaaagacacctgcatcactccaggtctgttgcacattaaataaagctctcttgacagggactcagaggtgccattaacttgaacagcatctatctgattattgtttctgagaaatttaatgagggtctccaaacaagagtgaaa

SEQ ID NO: 86368 - DNA, 696 bp, Homo sapiens
ctgagggagaaggaaagggaccaagagtaggacattgtcaaacatggttttagtctcattttttacaaagaacatgtattaatatgttgtttgtctaattgaaaatgtttatttcttctctttttttcattctgataaatgtctgtcaatgttttatcacattaagtcatttggggaaacatatagttttatattaatttatttgcctgtactctcagaagtgggtatttaaaaaaactattatgtattagtaaattcactatgcttctgtaagatacctgctgttcaacatgaatttatggaatatttcttgagttatatttttattatgtatttagattttaagatctgtttgtttttatctagagcttttatgtgacagtttctttaaaatacttatatacctaccataatcttctttaaattcttaattctagtacattcctaaggtatttctcattctaatctttgtaaccagtttctcctcctttaacaaaattagtccatactaaaaaaatattgctttcttgttgggactatcctgtctctggctttcttcaaggccttctatgggttgaaacttctctgttcagacttgtcaaactagtttcatttcaactacttgtaatttgtttccttatttctttgagccgtagacttctaatacatctagagatgtcatatagttgattagaa

SEQ ID NO: 86369 - DNA, 451 bp, Homo sapiens
tgttttctggcacaactgatgattttcatcctgtaaccttttttttttccagtttgctcaggtacttattatgctccccgatagagagtgtgacaacttggggtagtattaaagtatttgacaactgttgggagttatgggaacatgcccctttttgttaatagaggcgtaactgtaaccaaagaaatttaatttcttctttagcaaacactaacatttctgtttcagaatgagtgctagagaaagaggaaatatgacagttaccatgtatcatgaatacattgagttctctctgtaataactcaaaactgatctatagctaaaattaaaaccatataagcgtatcgtaaatcatcttgactatttctgtgttcgcttctaattctgtttggaataaggcttcaaatgctttccagaatgatgtgagttacaaataaatagaaaaagagtt

SEQ ID NO: 86370 - DNA, 319 bp, Homo sapiens
caaatgcaaaaatcaagacttgtcataaattgtatgtccatagcctatactgtttaaattactttaactttatagtaagtcttgatgtttaatacagcaaatgttaaaccaagctttcactacagaaataaacagaaatttataggcgctcattatccttttagacaaagttgtatttgctttgctattgtttttgtttaggatttttgcaactatttcacaaacagaaacaaaaatatttaaattgttaatagaaatttcagttttctttagtctctggctactccaagtactgttgctgtgaatgttcttttatgag

SEQ ID NO: 86371 - DNA, 950 bp, Homo sapiens
catttttctcttttaatctcttagtatgataatttacatttttggattttccagaaacatctttggattcctagaataagccagatttatcacaagtggattatctttatcagatatatggctgctcttgagttactaatcttttacacttttgtgtgtaaggaatgtttttaatctaggtgaaattttgaatctatgctcatgagtaagaatatcctttctcatactatccttatctggccttagtactgagctttagattatcttggaggtttcatttcccttcctgtaatgattctcatgcctcatggtgcacacaaagttcccctttgtaaattttgtaaatttcagcatgcgctcaattcaataattactttgtcaccaaaaattggcgtctcccattaaacagtgaatttgcttctattgacgttaaactctaaaatgaatcacttagatctaaaaataccttccttgttcaggttgtgtgtaataaatacttatttttgccaaagatatacagagctaaaaacagaagataatacctagggaggcttaaaaaacatgtaagctgaacatttggttaaatctcaacttttccctccttagattttttgtttctttgatattcttgattttaaaacttagtcaattcatgttctttccagtctactattgaaaatgttgttgaaaatgaagacagttaattttcctttgagtgcagccttggcagaattttttttgatgtttatggacacactactatttattgtcatttttcaatagtttgcaactgaaattctgaccttcttttattaaattgctcaatttttctgaagtgaaagaattatatattagaagtgtaatgtcgatatgtgaatttctacaaagcctgcatgcctaaggacaggtggcctgggtaaagagtcaaattggtagaaccaataaagaat

SEQ ID NO: 86372 - DNA, 905 bp, Homo sapiens
ccttcctctgtaacctgggatgactaatacccctccctgcggatatctgtggaattaaatgtatttatgaatgcagtgcctggcatacagtgggtacccaacaaatatcagctcctcactactcatggtcctcgctccagattcattcagatcactcctgactcctgacccttgacccaactgtgccttgcagattggagcatctctgatgtccagcaatgtgggcagtggcttgttcatcggcctggctgggacaggggctgccggaggccttgccgtaggtggcttcgagtggaacgtaaggaagctggcctggtttctccagaatactgagggtctaacccacctctgtctctggcattagtgctgggaggatccttagagatgcctgggaggctacatggtgaatcgagaatccatttcacaattgagaatccatttcacagatgaggaaatcaaggtctggaggagacagagggatccatccaaggtcacacgggaggactggggtcaggtcccaggtctcttatttctctgttcgggggcctcccacagcacagcactgcctctgggtgggaagccgcccctctgtctacatccaggacctggataccttcttcttctccccactctcccaggcaacctggctgctcctggcccttggctgggtcttcgtccctgtgtacatcgcagcaggtgtggtcacaatgccgcagtatctgaagaagcgatttgggggccagaggatccaggtgtacatgtctgtcctgtctctcatcctctacatcttcaccaagatctcggtaggtgtcactgcaatgtggtcactgtgtctggaaatgctaattagggaactgctgagtgcatcaccatgtgcgtgttgctgaggggaagctgacaatcac

SEQ ID NO: 86373 - DNA, 955 bp, Homo sapiens
cactaacagatgagcaaggagctggcagcaatggggcctggagcttcaggggacggggtcaggactgagacagctccacacatagcactggactccagagttggtctgcacgcctacgacatcagcgtggtggtcatctactttgtcttcgtcattgctgtggggatctggtcgtccatccgtgcaagtcgagggaccattggcggctatttcctggccgggaggtccatgagctggtggccaattggagcatctctgatgtccagcaatgtgggcagtggcttgttcatcggcctggctgggacaggggctgccggaggccttgccgtaggtggcttcgagtggaacgtaaggaagctggcctggtttctccagaatactgagggtctaacccacctctgtctctggcattagtgctgggaggatccttagagatgcctgggaggctacatggtgaatcgagaatccatttcacaattgagaatccatttcacagatgaggaaatcaaggtctggaggagacagagggatccatccaaggtcacacgggaggactggggtcaggtcccaggtctcttatttctctgttcgggggcctcccacagcacagcactgcctctgggtgggaagccgcccctctgtctacatccaggacctggataccttcttcttctccccactctcccaggcaacctggctgctcctggcccttggctgggtcttcgtccctgtgtacatcgcagcaggtgtggtcacaatgccgcagtatctgaagaagcgatttgggggccagaggatccaggtgtacatgtctgtcctgtctctcatcctctacatcttcaccaagatctcggtaggtgtcactgcaatgtggtcactgtgtctggaaatgctaattagggaactgctgagtgcatcaccatgtgcgtgttgctgaggggaagctgacaatcac

SEQ ID NO: 86374 - DNA, 764 bp, Homo sapiens
agcaacgactggtgttgattctcagtcaatttaaaggatgaaaagggctgtaaaactattttacggtaggaataatagctaccactttttaagcactatgttacagggattttaaatatattagctaatttaagcctaatggcagccttgtcaggtaggtacctttgtccccagtttatatacaactgcaaattctgagacaaaggatagttagacagttctgcctgatcccaaagccagtgctcttcaattcactgcagtaagccacctctctggagctgaaaggagacatgaaactagggacatgagataaatggattttttttctctaaagaattgccatttttctggatcttggatagagctttatcttgagaagtaaccacgcttgctcttcacagacaagatacagcaacatctaatatggagaaaaactgtgagcatttccacttctgattaatgaatcaaaactgaaccaataaagtctagcctttgtgacagttctttgtctcctccttggccaagaatttctgtacacactgagtcagagtgtcagcactctcttaacttggcgcacgcaacttgacatgagtcaccagaaggatttgaaacttcgggttggaaaaagccactgctgttaagttggtacagacaaaaatatttgggcgtcaactcttgtgttcctggatatagcttgttcgttcatctgtgtgttgattcattcaataaatattctaatgtacccaataaaatacaaaatactg

SEQ ID NO: 86375 - DNA, 2425 bp, Homo sapiens
cacctccgccgtgctaactcctcgctagctctccctctcacacacgctcacacccggctcgagatggcggcggcggcggcggcggcgggggactcggactcctgggacgccgacgctttctccgtggaagacccagtgcggaaggtggggggcggcggcactgccggcggggaccgctgggaaggcgaggacgaggacgaggacgtcaaggataactgggatgacgatgatgatgaaaaaaaagaggaagcagaagtaaaaccagaggtaaaaatttcagaaaagaaaaaaatagcagagaagataaaagagaaagaacggcaacagaagaaaaggcaagaagaaattaaaaagaggttagaagaacccgaagaacctaaagtgctaacaccagaagaacaattagcagataaactgcggctaaagaaattacaggaagagtcagacctcgaattagcaaaggaaacttttggtgttaataatgcagtttatggaatagatgctatgaacccatcttcaagagatgactttacagagtttggaaagttactaaaagataaaattacacaatatgaaaagtcactatattatgccagttttttggaagtcttagttcgagatgtgtgtatttcattggaaattgatgacttgaaaaaaattaccaattcactgactgtgctttgcagtgaaaaacagaagcaagaaaagcaaagcaaagccaaaaagaagaagaaaggtgtggttcctggagggggattaaaagccaccatgaaagatgatctggcagattatggtggttatgatggaggatatgtacaagactatgaagacttcatgtgacattttatcttttcttggtgtcatctttatgttgcccacaatcccttgaacatgtagcacaacttcctttcctttcagttctgccaaatgctacaatcagaagtgcagtatcttttgtgctggttaaaattgggaacctaagttgctactaaatcatagttcaaaacctaataatgttgtcgttgttgctatctgatttcatagcagcagtcactaaattggaaacaaaaggttgcaacgtgacaaaaaaaattgtgtagtatttaccagcaccattcagtaatacagccttaaccatacctccttgaactacttcataacttgtcaagaaaagcagtttgcagcaagggcatgtggtgtgcacctagtattaaaattgctttgtcttaaaattgaacatgaggatattaaaaatacattgtgaagaatactgcttatctcagagtgaagatactgcggctgaaaagcactagtttgatataaaattaaaatgaccaaaaccctccaactttgaagctaaagaaggtaaacctttccattattgcattacatgttgtggaatctctcgagtgcaaagactgtctagttatttatcaggctatttctactgatgaactgcttcaggtgggggagggaaacttatttttatttgcctgatttaagtgtctgagaaacaaatctttgttctcttaggctgcaatggaacaactttaccagggttttggcatttcctttcctttcctttataaaacatgctcagcaaactgcaccagttaactacagtttggtaaattgttatgttaacaattatgacatctgcaatgttttataaagcaactaatttaataaaatcactgttgtgaggacttaaattttgtgttacctcccaatatatactttttgagagtatagaacacagctcttgggagtacagttctctacgttctctactaaatcttaataaatgcttggacatagttacagctttaaaacatgagtgatttgccaggtccttatgttgtcaccatagagcaacaaaggtatagggctgccttcctcttatttatttggggacattattttgttatttagataccaaggcctaattaattaagtacctataagaactatttatttggagtaactgagcctgtaactcaggtttatggctgttaagtatagattggggaatctttattatgtcttctcctaagcagtttaaccaaatgtgtggttagtgtttttttattcccctaagacagaaagaacaaaaaatgttttaaatttctcttatataggaaataataggaacgtcaaagctctgtatacctactaagtggaaaacaagaccatcatctaagtgatttgagaaattaacaaaagtagtgactacacagcaataattacagtaaattaaataaagattcctttaaggcagacaagggctaagatttccttagcagtaataatgacatacactgaattgaaaatctattttattacagaaagatcagtttctaacaaatgaaaatgtatcacctgttccttaactgtgtaaataataattaaatttctttgaaactgg

SEQ ID NO: 86376 - DNA, 254 bp, Homo sapiens
atgaggaagctgacataaagaaagattacgtaattgtctaaggtcatacagcaaataactggcattcctggaacccaaattccaggtgtcttgttccaaagcccatgttctttattctattctgcctctgccaaacaaaacccaaaccaaaaatgtcttcttcaaaacgtcttcatagaatgtgaccaacagcatgtccccatctactattaggagtcaaactgcaaatagccccacacagagcatctttgcat

SEQ ID NO: 86377 - DNA, 407 bp, Homo sapiens
gttgtgaactgctgggatgtatgtcacagctgatcaacatgtgaagatactggtacttgatagcctgttaaggaaaatttgcttccaaattttaagctggaaagtcactggaataactttaaaaaagaattacaatacctggctttttagattttctttacgtgtgttaagaattgtgtacaaattgaaatgtctgtactgatcctcaactaataaaatctcaattatgaatgaaaaaataagtagttttgcaggaggcctgatgtgggctggagtcactctgtgttctcctcctacagcagggcctcactctcctccccctcagcagccgactctccagttggggtcttctctgttggggattcagtgtccctgggataagaataacagtgccaaggttttgattc

SEQ ID NO: 86378 - DNA, 454 bp, Homo sapiens
gagaaatctccaagctgctttccacagtggctgaactagtttgcattcccagcaacagtgtattttattttctccatagactgaggagaatcagttctggttttttcttttgttttgtttttttgttttgcctttttaattattgctattctgactggtgagagatggtatctcattgtggttttgatttgcatttctctgatgactagtgatgttcaacgtttttttcatgtttgttggcctcttgtataccttcttttgaaaagtgcctgttcatgtcttttgcccatttttatttagactgatttttagcttgttgatttgtttaagttccttgtagattccggctgttagacctttgtcagatgcatattttacaaatattctctcccattctgtaggttgtctttttatgctgttcataattttttttttttgttgtgcagaagctcga

SEQ ID NO: 86379 - DNA, 261 bp, Homo sapiens
gtttttttttttttttttgctttttgttttgtttttggtaaattagctgtcaacatgctaagctgaaatattccagcatctactgaaaaaaatgaaaggtatggcaacactgagtccttaattcccaagcggcaacaatgtgcaggacctgagtacccagctgccacctctcagctggcacatctgctgggccccattatcctctttgagacctgagggacagtcattatttgtaattcttacgctgttgcttttctcttt

SEQ ID NO: 86380 - DNA, 346 bp, Homo sapiens
gtcttcagtaggcttgaatttacctaatcgtcctagcatttggtcgaagtgtctccatctcatcctcatgctcacaaaatgccccatgactccctctctcctagggctggttgcccccacaatgtgcttccatcattaacagcccattgttttattttctgtccattgctttcgtctgtctccccagtagactaggtgcattctgagaacaagaactgaatcttatttaagtctttgaatttccagaacctacaaaaattgtccaaatatacacaaaggcataagaatgatataatagactgtggggactcaggggaaattggtgggaggggggtgagggataaaa

SEQ ID NO: 86381 - DNA, 448 bp, Homo sapiens
ctacaaacaattgttttgttatattaatatttctctgctgagtaacatttggccaagacttaactacaaccattggatggcagcctaaattgccacccgctgaggcaggagaatggtgtgaacccggggggcagagcttgcagtgagccgagatcgcaccactgcactccagcctgggtgacagagcgagactctgtctccaaaaaaaaaaagaagaagaagaagaagagtgaacatacgtgaattgagattggtgttgtgttaaatgaaacaaagaaataatttgacatatatgtaatatattttttcagctggatgaatgattactatacatagatgttaattgattcatgtaaatcaccagggttacagtttatgggagccttttaaaaataagtgcaattacataatgaccaagtctgtagggaggtcttaccgcctttagaaa

SEQ ID NO: 86382 - DNA, 323 bp, Homo sapiens
tgccctctcatgttcgaaatgatttttatctatatgtttagaaaagaatcctaagaatttcaaatggcaatatctttgtttccaaaagtaaatcagaaggttttgttgctgggttttgctttattttttaaaattttaaattagaatagagatgggatctctctatgttgcccaggctgctcttaaactcctgggttcaggcgatccttccgcatgggcctcctgaagtactgggattccgggcgtgagccaccgcacccagcctgctttgttttaatatacctgcctgtgataaacagatggcagcacaggggcctggagta

SEQ ID NO: 86383 - DNA, 480 bp, Homo sapiens
tactagcccatttttgtcacatcagacagcataatctttaaaaacataaatcatattactctgtgagttaaaaatgtgccaataatttctacagtcacatcagtattcttgttcttggaatactgcaaaatttaaattttgatgaaatccaacttatctgtttttccatttgttgcctaagcttctgataccatatccaagaatccactgccaaatcggagttcatgaagatttattcctgttttaagtgttttattttcctgtatctattgagatgattatgtggtttttgtatttttactattgatatggtctactacattaatagatttttggatgttaatctaaccttacattcctgggataaatccctcttggtcattgatatggtttggctctgtgtccccacacaaatctcatcttgaattatactcccataattcccacgtgttggagggactggtgggagataactgaatc

SEQ ID NO: 86384 - DNA, 375 bp, Homo sapiens
cttagtcacttcatggcagaggtgagaacatgcttgtggaagagaagtccgtggcttggtgattctgcctgacctgcagtctctccatctgtgcagggtactaatgtgtcggagctcagggttccagaattcgtctagagaccggcaggagctcctccaccagttgtcatttctgtcttgcccgtctgtcagggttggaaaagtccaaaccttaggacccagtttcctttctttcctgatgttttcctgccaggacaccggtaggctgttacttgccttgagctggaagaagtttgcatttacactgtaaatgtattcattgttttaattgatgtaaggtttttatgtacaattcttaattctttaagagatgac

SEQ ID NO: 86385 - DNA, 828 bp, Homo sapiens
  misc_feature (749)..(749): n is a, c, g, or t
  misc_feature (754)..(754): n is a, c, g, or t
  misc_feature (824)..(824): n is a, c, g, or t
actaagtggtgatgagcatgagtaacaattggaaatctcatacattgctggtagaaatacaaaatggtaaagccatttggaaaaacaataggcaatctcttataaacatactcgtccatttgacatagcaatcctatttttaggtatttatccaagagaaatgaaagcatatccatacaaacacccgaatgtgaatgctcatagtagcctaattcaaagtagccctaaactagaaacaatccaaaagtctaacaactggtgcatggataaacaaattgtggcccatccacataatggaaagctacccagcaatggaaaggaacaaacaagtgatacatgcaacaacatggatgaatctcaaaagcactgtggtcagttgaaaaaaaaaaaaggcaaacacaaaggagtacataccatatgattccacttatatgacattctagaaaaggcaaaactatagggacaggaaacatcaatggttgccagggactgtgggtgaggagaggagacttgactataaaggaacatgaggaaatttttcagggtgacagaaatgttctgtatcttgatatggtggtgtaaaagtgaggtataatttatatacagtaaaatgcacaagtcttaaatgtacaactcaattaatttttacgtatgtatacaccatgaaaccttcacccacttcaacatacagaccatttccttcaccctggaaggacccttgcaccttattgaatcaatacctagtcctncggangtaaccattattctgatttctaccccatagattagtttgcttgatttgatgtcatatgaatggaatcatntctt

SEQ ID NO: 86386 - DNA, 301 bp, Homo sapiens
catggaagagaggatagttctgtaaaaacacgtaaaataactttcaaagatgaaaattttacatatgtaaaaacatttgtcaatgaaagtaataataattccattcatgcatttgttcatgtataaccaataacttacttgtgatgccatagaaaaaattcaagcatcaaactgaaaagcaaattttaataggtaagaaactagtggcctttaagctgacaatatatttgtttgaataaaaaatattattattttaaaataatcaaattagcaaaatacaaaaaaaagaacatttcacatg

SEQ ID NO: 86387 - DNA, 336 bp, Homo sapiens
ggtttttttgtaacagctttgagatataattcacatactacataatttgcccatttaaaaaataaattcattggtttttagtgtattctgtgttgtgcatccatcatcacaattttagaaaacattttcatcacccccccagggaccctctactctttagcagccatgcaactccccttccttatttcctgcattgaacccagccccagatatccaccatctgtagaagtgcctgttgtggacatttcatataagtgaactcatacagtatgtgattctttgtgtctggcttctttcacttagcataagtttccaaggctcatccacattgtagca

SEQ ID NO: 86388 - DNA, 796 bp, Homo sapiens
tgcaaagagatgaacggacctgtgcagacggctggccagtgacgccgggatctctaggtaacatgacccagtcacggtgtcacagacaggcggaccaggaggaaaccagagacacagatggattccagggaaagccagcgttacagaattaagaaaagctggggaagaaaaaggaaaacgagaatttccaaaactgccgctttcccagcagaagggagatgaagttgtcactttggctgcgagggtgcagagatggaggaagggttgggggtggggggtggtaccgcaagggagaaaaatagctataggcttcatcgcaaaggggttcatgcagaatacgcgaggccggcggctaactctaagattgctctctcgttattctgtgcctggtgcaaaacccactactcaggggacaacacatcccagcataaagaatgaaatcatttcagcagcgagggctgggcccgctagaccgtgaggctccggcggcttccgcccgttgtctggtgcaccccaccttcagaagcacctgcccaagatgggagcgactgaagagagaggccccagagactctccgaggggcggcacccccagattcccggccggcggaccaagttcgcagctctcaaaagacatgtctcacaccaagggccccgggcggggagaggagagaagaggggaggggagcagggcgctgctccagggcacctgcctgagctcgggcgcgatccccggccacaggcgcgcggggtcaccgccgggggaccgggactcagccctcggaaagtccgcgcca

SEQ ID NO: 86389 - DNA, 396 bp, Homo sapiens
actgcttgtcccatctcttgctaggcatctctgatcagcttttcttcccagtcttcacaacaacagtttcatacctcttcccttctcttttccagactcctgctcagtcttggcagatgaactcttctcctactttacatgggaaatgaaaagtaacatatggaaactccctcatcttcctgataccaagcaaataaacctacctaaacccatccaagcttccttgcatcctaaggcaaatctcccactggtgctttgctttgtatcccatcacttctagtttattaagaaagttaactctattgattatcctcccttttcttttatattcagcctcatcttatcagtgggatgttttccatgtgtttttaaacagacccaggtttcccccattaa

SEQ ID NO: 86390 - DNA, 105 bp, Homo sapiens
gatcaaatattttttattaacctatataaagaatttgactgcttatgattcaatacatatgatttaataaaatagattgcattttttaaaataaagaatgatttg

SEQ ID NO: 86391 - DNA, 518 bp, Homo sapiens
ccgcatgtttcctcgcgcttcctatctatgctgcaactatatccattaaccaacctctcatcatcctccccgtcactggtacccttcccagactctgcacccacaattctaattttctatatccatgagctcattttttttcagccatcacatatggttgagatcatgtggtatttatcattccctggcttgcttatttcacttagtgtaatgtcctccaggcttatccatgttgttcaacaagccagagaatgataaataccatgcggtgtacgtatgatatactatttggccataagatagaatgaaaatggaatactatctggccataaaaaaagaaaaaaaagaatgaaatcctgtccgggcacagtggcgcacgcctgtaatcccagcactttgggaggccgaggtgggcagatcacttgaggtcaggagttgaagaccagcctggccaacatggtgaaaccccatctccactaaagacataaaaattagcctggcgtggtggcgtgcgcctg

SEQ ID NO: 86392 - DNA, 690 bp, Homo sapiens
ggttctagcgattctcctgacagcctccccagtagctgggattacaggtgtgcaccaccatgcccagctcatttttgtatttttagtagagacagggtttcaccatgttggccaggctggtaactcctgacctcaagtgatctgcccacctcggcctcccaaagtgctgggattacaggtgtgagccaccacgcccggcctaacctgtctttatagcaggatatgctcacagttggagtgttttcaatacattgtgtattccgtggatttgttttaagtaaaatcaggcacttgagttaactccttctgggtgttaaattagtgatttatacaggaaagttggaaaaggtggttagcagttaacacaggaagttcaagagtttatggtgactttggaatattatttgaattactaatttaaagtgatttagtatctgttacatattattgaataaagtagaaagtgttcttggagttttacttaagaatgtttaactgagtcagttaataccggagaaaatttaactgaatcattcagcttgcatataatactgtgcagctacatcgggatggcatatttgatttttaatattagatttgatatttaatattttaaaaattaggtggcaaaggagaaactaaaaaagtaggaaaggggttcctgtgccttcagtgtgttaaaaagccagc

SEQ ID NO: 86393 - DNA, 538 bp, Homo sapiens
gggtgcaggttatcaacactatttaatactggaagcactagccaatccaactgcacaagaagataaaggtacaaatatttcagaagaggtgagaaagtcatcattaactgcagatactatggccatcttcggaaaaaatactaaaatgctgtccaaaaaaaccagtaaattcacttaaggctgccatttacaaagtatgtgaagtcaatcactttttatatgcagataatatgcgacttataatggaaggtcacgtttcaatagcaaacaaaaaagctataagtaacaaagaataacaaaactataaatgtataggctctacataaagaaaactataattccataaaggatctaaaataaaacgagtaaatggaaagacaagatgtgttgtgagatacgaagaatccatgattaagttagaggattcttggatgacagtagagtagaaagcaccaagaatgagtctgtatacccagagaacacttacgctggtagaatctatctcatacaactattatgaagctctcaaagtatactg

SEQ ID NO: 86394 - DNA, 1309 bp, Homo sapiens
aatgctttggagtgggaatgagtgccagactgttttctaaagtttccctagcattttgcattccaattacaaatatgtgagagttccagtagctttgtatctttaccagtatttagtaattttgtattatacatatatatgtatgtaaatatatatatatattcatttaaattttaatcattgttagaatttgtaattccccaatgatatatggtattatcttttatttgtttataattgacacataattatttatgggatacattgtgatgtttcagtacatgtgtacattgtataatgatcaaatcaggatatcacctcaaaccttatgatgatcttacagttaaagatgatatattcttgcaaagtgtctgttcagatcttttgctcccctttttattggattattccttttcttactgtttttatatgttttttaatatattgatacaaatcctttgtcagatacattatttggaaatagattttcctagtctgtgacttgtcttttcattctttgaacactgacttttttagagcaaaaattttaattttgatacaattcactttatcaatttttttacttttgatgtgcaatgtaagaacacttgtctaacccaatgtcatgaagattatatattattttcatccaggaattttatagttttaagttttacatttatatctatgatactttttgaataaaggtttgtataaagttagctatgggtcaaggttcagtttttaaaatatggctatctaattgttctagtaccatttgttgaaaagattgtttcttttttattgcattgcttttgcacttctgtcaaaaaatcaattgattatatttgtttgggtctaattctgggctgcctattctgttccattgttatccattcacaaataccacactttcctaatcataggaagtcttaaaattagatagtgtgtacaacttcgtccgtctcaaaaatcgtgttgattactactttgcttttccagaaattttagaattgttgctttctataaaaaattctgctagtatatctgttgagttagaactatagatgaatttgaagaaaatttacatcctcacaatattttgtctttaggccacaaacatgatatagctgtatatttattttggtcttgcttttttttccactttcagcatacagatcctggacatattttatatttataccaaatattttatatattttctactgttgtcaatggtagtggtttttaaattttcaaacattcattactagtatatagaaataaaatcactttttaaaaatgtaat

SEQ ID NO: 86395 - DNA, 865 bp, Homo sapiens
aggagtttcccacaatgcagcgcggcgcgctgtccccggtgctgatgctcagcgctgccccggagcctccgccgcgcccgcctcccgccctctccccaccgggctcgggcccaggctcgggctcccgccatggctcggctcgtcccggtcctaccccagagccgtcggggagcctgggcgcggcgctcgacagcagcctgcgtgccgccgtggcgttcaaggcagagggccagcgctgctatcgagagaagaagttccgggaggccatcggcaagtaccaccgagcgctgctgcagctgaaggcggcgcagggggcccgccctagcggcctgcccgcccccggcccccgggcccaccagcagccccgggccggcgcgcctcagcgaggagcagcggcgcctggtggagagcacggaggtggagtgttacgactccctcacggcttgcctgctgcagtcggagctggtaaactacgagcgcgtgcgcgagtactgtctcaaggtactggagaagcagcagggcaacttcaaggccacctaccgtgccggcattgccttctaccacctgggcgactacgcacgcgcgctgcgctacctgcaggaggcccgcagccgggaacccacagacaccaatgtgctccgctacatccagctgactcagctgaagatgaatcgttgcagcctccagcgggaagacagtggggctgggtcccagactcgggatgtaattggctgaggccaatccagggggacctctctatccctcgccctcccacctcaccatgtaacttcccccgactcatgtgtttgttggtaaaacacttgtcactggtgatcataacttgtgtggtgttcttggggggacc

SEQ ID NO: 86396 - DNA, 653 bp, Homo sapiens
gagggcagacacaacactcagttttgtattaagagccaatgaagaaggaagagggattacaacaggtgcagggttgtgggagccgagacgagattagttttcctgttaagtggctcggagagaacagacttcttgcagatgtcgctggaggatgagaagtgtgacgggagcctctgcgaagaggcattcctggcagagggtgccgcaaatacaggcgcacagaggtgtgcgatggctccgctgtgactggggactgccgactgtgactggggctttggggaagggctctggctctactggctgtgtgagcgagctgctggatacttcggagaatggggtgtgagccagggaggtgtggaagtcacctgctgccccgggacacccagatgatgccctgcccacctcccctgcagacaccaatgtgctccgctacatccagctgactcagctgaagatgaatcgttgcagcctccagcgggaagacagtggggctgggtcccagactcgggatgtaattggctgaggccaatccagggggacctctctatccctcgccctcccacctcaccatgtaacttcccccgactcatgtgtttgttggtaaaacacttgtcactggtgatcataacttgtgtggtgttcttggggggacc

SEQ ID NO: 86397 - DNA, 807 bp, Homo sapiens
aatgcagcgcggcgcgctgtccccggtgctgatgctcagcgctgccccggagcctccgccgcgcccgcctcccgccctctccccaccgggctcgggcccaggctcgggctcccgccatggctcggctcgtcccggtcctaccccagagccgtcggggagcctgggcgcggcgctcgacagcagcctgcgtgccgccgtggcgttcaaggcagagggccagcgctgctatcgagagaagaagttccgggaggccatcggcaagtaccaccgagcgctgctgcagctgaaggcggcgcagggggcccgccctagcggcctgcccgcccccggcccccgggcccaccagcagccccgggccggcgcgcctcagcgaggagcagcggcgcctggtggagagcacggaggtggagtgttacgactccctcacgggtacgccgtcggggggtggggggatggggcacgaggggagggggcaatcgggagagcttggcgacttgggggccaggggccctggggctgaagggtccagggctgtgggcttctgggggagccttcagagcttgatcaaggaaagggattaggggtaggggatgacaggggtctgtggctggagggagctgggatgcaggaaatggtctttgggtcgggtattcagggcctcgcttcccctgagtcattctttccaccccctggccgcacgtggacccaaggtgaggaagtctgccctgagccaggctctcgaggtcccggccctcgcccccgcgcggggccttagtgctcttgcccaccgacagctctgggtggatc

SEQ ID NO: 86398 - DNA, 396 bp, Homo sapiens
tgatctagcaggatcttagttactggcatttgatcaacggagtttcgccattttggccaggccggtctcaaactcctaacctcaggtgatccacctgcctcggcctcccaaagtgctgggattacaggtgtgagccaccattcccagccaacttctgccatactctattgatcaaaatagtcaggactttctataatattatgaaaaggcagaaagggagattggatgggtactggggattgattagccacagtctttgccacagactcttttggactgagccgataggtcaaaggttagcttatgcagtagcatgggctgtaggttttttgcactgatcaacaccggaacttttagaagacttttagaagatttgttgctgctgtgagtgacatc

SEQ ID NO: 86399 - DNA, 378 bp, Homo sapiens
  misc_feature (38)..(38): n is a, c, g, or t
agaggatctcgtactggcatgatcatagagtcgcattnggcagccggtctcaaactcctaacctcaggtgatccacctgcctcggcctcccaaagtgctgggattacaggtgtgagccaccattcccagccaacttctgccatactctattgatcaaaatagtcaggactttctataatattatgaaaaggcagaaagggagattggatgggtactggggattgattagccacagtctttgccacagactcttttggactgagccgataggtcaaaggttagcttatgcagtagcatgggctgtaggttttttgcactgatcaacaccggaacttttagaagacttttagaagatttgttgctgctgtgagtgacatc

SEQ ID NO: 86400 - DNA, 772 bp, Homo sapiens
agcgggttctctgccccctcccagctctggtgtgggcggcctccgctatggctgcgtgtggcggaggcggcatggaggcggcggcggcgctggggggagctgagcgtggcggcggcggccggcggggggctggtcggcctggtatgctaccagctgtacggggaccccagggccggctcgccggcgaccgggcgaccctcaaagagcgcggccacggagcccgaggacccgccccgcggccgggggatgctgcccatcccagtggcggctgccaaggagacggttgctattggcagaacagacattgaagacttagacctttatgccacatctcgggagaggcgatttcgtttatttgcttctatagaatgtgaagggcagttattcatgactccgtatgattttattttggctgttacaacagatgagcccaaagttgccaaaacttggaagtcactttccaaacaggaattaaatcaaatgctcgcagaaacaccaccagtttggaaaggctcatcgaagctatttcgaaatcttaaagaaaaaggtgtgatttcttacacagaatatctttttcttttatgtattttaacaaagccacatgcagggttcagaatagctttcaacatgtttgacactgatggcaatgagatggtggataaaaaagagtttttggtgcttcaagagatattcaggaaaaaaaatgaaaagagagaaattaaaggagatgaagaaaagcgtgcaatgctggtaagaatactttatagtagct

SEQ ID NO: 86401 - DNA, 881 bp, Homo sapiens
agcgggttctctgccccctcccagctctggtgtgggcggcctccgctatggctgcgctgcgaaggctcttgtggccgccaccccgggtgtctcctccactctgcgctcaccagcccctccttgggccgtgggggcggcctgcggtgaccacccctcaaagagcgcggccacggagcccgaggacccgccccgcggccgggggatgctgcccatcccagtggcggctgccaaggagacggttgctattggcagaacagacattgaagacttagacctttatgccacatctcgggagaggcgatttcgtttatttgcttctatagaatgtgaagggcagttattcatgactccgtatgattttattttggctgttacaacagatgagcccaaaggaattaaatcaaatgctcgcagaaacaccaccagtttggaaaggctcatcgaagctatttcgaaatcttaaagaaaaaggtgtgatttcttacacagaatatctttttcttttatgtattttaacaaaagccacatgcagggttcagaataggctttccacatgtttggcctgtgggcctgggatgtggtcaccacacagtttgggggcttccagaaaattttcggggaacatgggacgcgaagaatttcggggatgaaaaaaccgtcacagcgggcctggggcacctgaagtatgacacccattgggcctggggccatagtagagttacctttgggcccacccacaaagttcgaaaaggagcagacacaccacacttagtcggacacagctaaatgtgacgtcagccggtatcgaaaaacccactaaccaaaggactaaaaacactctgagagcaataatcatatctacccttcattcgcctactggg

SEQ ID NO: 86402 - DNA, 918 bp, Homo sapiens
agcgggttctctgccccctcccagctctggtgtgggcggcctccgctatggctgcgctgcgaaggctcttgtggccgccaccccgggtgtctcctccactctgcgctcaccagcccctccttgggccgtgggggcggcctgcggtgaccaccctgggccttcctggccggcccttctcctcccgagaggatgaggagagggctgtggcggaggcggcatggaggcggcggcggcgctggggggagctgagcgtggcggcggcggccggcggggggctggtcggcctggtatgctaccagctgtacggggaccccagggccggctcgccggcgaccgggcgaccctcaaagagcgcggccacggagcccgaggacccgccccgcggccgggggatgctgcccatcccagtggcggctgccaaggagacggttgctattggcagaacagacattgaagacttagacctttatgccacatctcgggagaggcgatttcgtttatttgcttctatagaatgtgaagggcagttattcatgactccgtatgattttattttggctgttacaacagatgagcccaaagttgccaaaacttggaagtcactttccaaacaggaattaaatcaaatgctcgcagaaacaccaccagtttggaaaggctcatcgaagctatttcgaaatcttaaagaaaaaggtgtgatttcttacacagaatatctttttcttttatgtattttaacaaagccacatgcagggttcagaatagctttcaacatgtttgacactgatggcaatgagatggtggataaaaaagagtttttggtgcttcaagagatattcaggaaaaaaaatgaaaagagagaaattaaaggagatgaagaaaagcgtgcaatgctggtaagaatactttatagtagct

SEQ ID NO: 86403 - DNA, 273 bp, Homo sapiens
gtgtgatttcttacacagaatatctttttcttttatgtattttaacaagtaagtatacttattgcttttatttctggatgcagctttattttttaaacgaatcttggaaagcagatcttaggttctcttactcttgaaaatcaatatccatgctgttctgcaaaattcatgtttaatgctacagaaaaatgctaagcatagcactgtaaagagtcaaaaacataaatgctacagcttatggtatagtaataaatgctcataaattataaattt

SEQ ID NO: 86404 - DNA, 616 bp, Homo sapiens
acataaaagtttggttatgagttatggttgtagatggttagcaaatatggatatatattccatgaagtatttattatctaattatcttacatttgtttattttagttgccaaaacttggaagtcactttccaaacaggtgagttaaagctcttggtagatatacacaaattttatatgtgcatgcatatatacatatataattaaaatatatttcataaaatatattatgtatttttatatattttatgattttttggcaaatcaaatcacatcagagttcctttttttatcctccagattgtcagaaaataaaaaggtggacgtttctaagggctggtgaaaatgtagattactggtaaatctcatgtgttggtatactcactttggaaaacaatttggcattatctactaaaattggcgatatgcctaccctatacctagtaaatacatgcctgcatttaaattctgcagtagtgcatgcgcatgtaccttgtaaagttgaacttgaatagactctgtgatctagtaatttctactaaatacactggtatctagcatataccagtgtatatacctagggaaattcttgcttatatgcaggagaggttcacaaga

SEQ ID NO: 86405 - DNA, 757 bp, Homo sapiens
tcactaacgaggacgctgtatacgacatcgctaatgaggacgttgtatatgacatcgctaatgaggatgctttacaagacatagcgaatgaggttgctgtatatgacatcgctaatgaggacattgtatatgacatcgctaatgaggacgctctatacgacatcactaatgaggacgctgtatacaacatcgctaatgaggacgctgtatatggcatcgctaatgaggatgctgtatacgaattcgctaataaggacgctgtatatgacattgctaatgaggacactgtacaagacatctgtaaaaaagaagatgctgccaatgtaagacacttttctttgtcttgaacagaaatgttactttcctggcttctttccaatcagatgtagacatgaacatctgccagtgtgcattatcgatgtcatctgcagtttaatcaaatgtagacatgaacatctgccaatgtggactatttatgacatctgcaattcccttggtgtggtgctattgattggcagcctctcaccaacccatgccaggcacactggggtgtggtagatggcagcatccacgatccactgcaatgcagaggtgtttccctccacagcagttttcccccatggattaagagttgtgaaactgccaatctagatacactttaaagataaattctgtgggaaaaggtcttgtcttttccacaggtgtcttccgtgccagttttgggggactttgacctttgactcaatcactatacccc

SEQ ID NO: 86406 - DNA, 333 bp, Homo sapiens
gatctaattggcttttattagcaattcatgagcccggcagcatccagtctacaaaatagaaaggagtgccaataagctagacagaatggatgggttttatggcagaaaaaagtggaagcaagcaagaacaatgaacaaattaatggatggattgttttaagattacatttcttttatgggagtaaacaaaatcttgttagcctaatggaatttggcatcatctcctgatttctcagaaggtcatatcttgtaagtgaaccatttaggtttggtgacctggaaccttggcataagtgactccattttgggcctgctgccttttctttaaaaaag

SEQ ID NO: 86407 - DNA, 1329 bp, Homo sapiens
tttgttaactgttgatttatcaagagaaactattaggccacatgttcatgtttcatagttcaggaacacaagtcaaagacaaacttctgtgtattaatgattcagtccaaagaaattctttatattccaaaatcactttgcactctgaaacataatagcactcttcatctcagattctttcatggaatcataacttctgtagaaatcagcatgtcctttctgttttggttcagccacagcaaacagagagctgcaaccccagggatataaggaatgctcccacaatatgaaatcacagacacttggccagaagaccacatatctgaggttttgtcaaagcactgaaagccatattagttattgtctgctactttaatataaagcacatctataattacacaacaaatttgtttttaatattttgataactttcaataaaatggcttccttttgtaatcctttatattttaattttaacattttctaaaaatcacccataaggtttgggaattatatctcaatacagctattatttagagtagtctaatgaccagactgccaaagggatccatggcttacaaaaaggttaattgtattagttcgttctcacgctgctatgaagcaacacctgagactgggtcatttataaaggaaagaggtttaattgactcacagttccacatggctacagaggcctcaggaagcttacagtcatgtaagaagcaaacacgtccttcttcacatggtggcaggagagagaagtgcagagcaaagtggggaaaaaccccttataaaaccatcagatctcctgagaactcactatcaggagaacagcatgagggaactgcccccaccatctgatcacctcccacgaggtccctcccccaacacttggagattatcattcggattacaattcaagatgagattttgggtggggacacagccaaaccattatcagaacccctgagttaaatagtctttcatgttgtattctaagttctctgatatctccaaatccttattagccatgataccctctcttttagagtaattccactggcttttgttagttgttattcccttcctaaatattttgtttccagtttgtaaacatttttaagagaagtgaaacgcaggcttcatctaacctaaggagctctgcttgaagctcttcccttgattaatcaaaagaaaaaaatactagaaaagactaaacatcaatcacactgctttgttttaatgttacctaatcattaatggtttttcattcctcacgtatttcttgatggcctactatgtgccagataccatggattcacgtttcag

SEQ ID NO: 86408 - DNA, 492 bp, Homo sapiens
gtacctactgtatgctgggtacaaagctaggcacactggatacaaaggtgaacaagaatccctgccttaatgagtttttacaatctacgatatagactttgtcttatcaacagtggtactttcaagaatacagatttactaacataaaggcaagtaacagcaaagaagacagagtctgggaaattcaggtattagggctttcccattctttcctctaactcatctaaggtcccaccctcaatcattctgcttataaggactgtgactgtttctccaaagaatagtgcagattgcaaagggtcattgtcccaacaaagcagtcaactgaactctcagcactaaagttaatcagatgcctcagagtcaaggaatcttccacaatcttttaaaggaattaaattcttaattttgtgagaaaacagcgaaagcacacaatggcgactcgtcttttttgatcttgcatttgatttctggagtggcaggttaattcac

SEQ ID NO: 86409 - DNA, 400 bp, Homo sapiens
cgccctggtctctgtgcttgctcattcctccgtgtctgaagattatatagttgccttcacccagacccctgacaccagccccaaaccaggcattatggtggcattttggggcacttgcctcagtgatatttagaaaccaaaggcagttttgagacaggaacagttggaagggtatgtcattgccttcctgactctgtaaggcccatagtctcatataaagacagactcagttagtcggttcatgccagttttactactctcccattaggagggcacactgcatccttcagtgcagggttttcaaccttgccactactgacatgttgggctggataattctttgtagtgagggactgttctgcgctttgcaggatgctcagcaggatctgtagagtctacc

SEQ ID NO: 86410 - DNA, 360 bp, Homo sapiens
cactgaagataaatggttcatctggagtccaaccacgaccccccaaaatgcagtaagccttgtaggagttacagtgcctaaaataaccaaaaaattctaatagccttctgccaaaggtgctggcagttcttggcttgttttatagaaacagattttatgaagtaatttggtattatctattttaggtaatgaggctatgactgaatggagtttgctgtgagtacaagacttcactgtcaagttttgaagacatttgaataggttgctgaaatgtttaaatgcaagaaaacactgctgaaaactgaacttgagtaaaattaacattgctatttttagtttaaaaccatgcaaaattttctg

SEQ ID NO: 86411 - DNA, 286 bp, Homo sapiens
gataaaagagaaacagcgaagtttcaagagaaaaacttgaggtcttaataattgttgggcaacttgacagcagaacagggtaaaaatgagttagctacaaaggctcatcagaaaatggcaatagattccagagagatttaataactacttacaaactctgctataggtgacaaatctgaccatgataaaagcaccgtaaatgatataggtaacactgagcatatgaaaactcagactgtgcactagataaaaaggaaaccaacatacagtgttaacacatgtaaat

SEQ ID NO: 86412 - DNA, 151 bp, Homo sapiens
ggacactgtgatgtggctaggtgagagcacactggggcactatgatggggttaggtgagcgcacactgggacactatgatgaggctaggtgagcgaacactggggcactatgatgacgccagatgactgcacactggggtactatgatgag

SEQ ID NO: 86413 - DNA, 757 bp, Homo sapiens
aaaaaaaaaaaatcaatcccacccttcattcaggaagtagccacctacctaacagaagaaacacctcaaccctattcataagccccagagcttaagtgacaacttaagacatattaaagaaactcaccaacagttcaatatgctgagtttcaaaatcaaactaggaaattctatgccccacccaaccaaatactcaggaaccttctcttcaccataaagctcaaatcccatttgagaacactgaccagaagtcaggaaatgcctgattgaattcacgaagccccacccacctggtaggaaggtcaatcttatgctcagaagtcccacccaccacccgagaagtcttcactttccctcccagggcccatcacacacagtccaatgcccactcagttaccctgacatccaacccactcaagaagttccacctagctctcggtaggtcccactcatttacatcttccaggaagtttccatccccgttcccatcactctcagccagctcaggaagtctaacacctttctagataccacaacaggcaattcagaaagtctatgcaccttcccaggaagccaccccactcctgtacaagtcacaccttcgagccaattctgagactccactggtctgcttggttactatgatattcagctcaggaatttcccccaaaagctctaccttccacagccaaatgaagaagtctcctctccacttcaggaagtatccatcatcctaaagtcctaacttccatcaaga

SEQ ID NO: 86414 - DNA, 398 bp, Homo sapiens
aaaaaaaaaaaatcaatcccacccttcattcaggaagtagccacctacctaacagaagaaacacctcaaccctattcataagccccagagcttaagtgacaacttaagacatattaaagaaactcaccaacagttcaatatgctgagtttcaaaatcaaactaggaaattctatgccccacccaaccaaatactcaggaaccttctcttcaccataaagctcaaatcccatttgagaacactgaccagaagtcaggaaatgcctgattgaattcacgaagccccacccacctggtaggaaggtcaatcttatgctcagaagtcccacccaccacccgagatcgcaccactgctctccagtctgggtgacagagagagaccgtctccaaaaaaaaaaaa

SEQ ID NO: 86415 - DNA, 424 bp, Homo sapiens
gttcttatagaaactaataatttattacagagtaaacatccgataaatattgatataattggtgtattggtactgggaggccttggaattaacgtctgtcattatcatctgtcctggataagccaagcagagcactgaagctgtgatgtgggccctgagtccttgagtttaacttccagtctcatgttcttctaaggtgctttctgtgtatcctaactgagacaaggttagaataagtccaggcctatttttattgtactgggataaaggaagattgtattgatttcctgagcatcttcagggaacaatatttagggattcatatggaaactttttttggacattgctttgcaatgacaaataattaaattgtagcagattttaaagcactagtgttcagcctaaataaaaacaggtggtgtct

SEQ ID NO: 86416 - DNA, 620 bp, Homo sapiens
tccagtcatgcatttggtctttatttcatagagctggagataactgtgttccttaccttcagtttcctacgggtaaaatggaagtgattgctaccttgcaaagtacagacatacctcggaggtattgtgggtttagttccagactacaataaagcagttcatgaatttttttggcttcccagtgcatataaaagttgttggctgggcactatggctcatgcctgtaatcccaacactttgggaggccaaggcaggagtgcttgagcccaggaccagcctaggcaacatagcaagacactgtctacaaaaaaataaatagccaggtgtggtggtgcacacctgtagttctagctactgtggaggttgaggcaggaggatcactttgaacccaaggagttggggctgcagtgaactatgatcatgccactgcgctccaggttgggtaatagcaagaccccatctgtatctgtaaaacagtaatttttaaaatgtagcctttggtgcctgggacattaaatgatagctgctatttgattatggggcccttaaaagttatgtaactaataatttgtgtagggggtaatgttaaaagcacaaaataaattgcataccttttattg

SEQ ID NO: 86417 - DNA, 432 bp, Homo sapiens
  misc_feature (312)..(312): n is a, c, g, or t
agtagagacggggtttcaccatgttggtcaggctggtctcgaactcccgaccttgtgatccgcccacctcagcctcccaaagtgctgggattacaggcatgagccacggcgcctggccctcccttttttattctctttctctgaatgataatgtacaattccacagttttacatatggtctatattattagttttaattcgattccacattcaacaaatagttgtctaagccatcttgggcaagtaatttaacactgagtctcagtcatctcatctgtacaatgggaaataataatgggcatcaactatatnaaaattattcagaggaattcaataaagaagttaggaggcagagccagggcacagtcagcacttatacacttgtttatttattattaggcgtttttactattgcggttattccaaaattcc

SEQ ID NO: 86418 - DNA, 144 bp, Homo sapiens
gatcaattcaattagattaaaatgaagaaccttggggcagagtttgggttttgtaaaatgaaaagagttctggagttaagcatcgtgaacatgcttaacactactgaactgtacactcattttataataaaactattaaattgt

SEQ ID NO: 86419 - DNA, 136 bp, Homo sapiens
acacacaaaacatactttacggtgaatatctgtttgatgaatggcatgttttcttcatcagatgataagagcaagcacccaatttgccacctttatcatcatatcccaaatgtcaaaaacagtgccaggcacacaa

SEQ ID NO: 86420 - DNA, 260 bp, Homo sapiens
atggagcagaatgtgccttgaggagggtggcaggaggtgagctctgtgagtcactagtggggtcagatggtgtagggccttgtaagaactttggccgttaactctgagggagaggagagagctgtgtctgctctaatacattcaggaaagtggcagctctgaagaccgaagtgcctcctggcttgcctctctccctcccgcagcctcttcctcttcctcttcctcttcctcttcctcttcctctccctctccctgaccct

SEQ ID NO: 86421 - DNA, 564 bp, Homo sapiens
cttgaaagcagaacgttattttggtcattgtaactcacttcggagacaatgcagcagctcctctttgctctgtaaatcattccgtggcctttgaaatttgggaacacaaacctgatctgatataaatctcagaattgttggagagggaaatctgccccaaacctgtgtcaaactgtgagtactagagttaaatactcttccatgaggtccgctcccacttctcccagggtgctggctctaatagagtcagaccaaggttctagcccaggctctgctcccaacatcccatagaactttgggcaaatcagttgatgcctgtggtcatcagtcttcccatctatcaaatgagttcaataagacataccctgccagcctctcagcttccagggtttttgagatgagaagcaaatggaaaataaacataaaccttctgtaaggatagcaaagtgctgagcaaacaggaaagcaaacataaaccttctgtaaggatagcaaagtgctgagcaaacaggaaagctttaattatattatctctccaatggcccacgcccctctcttggctga

SEQ ID NO: 86422 - DNA, 526 bp, Homo sapiens
cagagctttgctcatattctaagagcacaggtaagttctgttcttttgactgtggttagtttgtaactagttcctggagcttatcccaaaacattccgagatgacaacatgccccaagacaccagtgtttagctgaggaatttggaaaactctgaaaatttgtaccaaagaaaaaaagaagaaagcgaagcaccaaggcggctcacagaccacaccaatcttaaagcaggaggtggagcctgcaggccagcacagtgggctgggtgggcatcagggggtgcggtccactcacagccacctgccccagcacagcgctgtgcccacagtgcagcctgattgggtcaggggcaggaaaatgtcccctaattccctggagctcacttctttttttttttttttgagacggagtctcgcactgtcacccaggctggagtgtagtggcgcaatctcggctcgctgcaagctccacctcccaggttcactccattctcctgcctcagcctcccgagtagctgggactacaggc

SEQ ID NO: 86423 - DNA, 710 bp, Homo sapiens
agaagattatgaaagattatttaaagtgtgacttgtgtgatttctaaagctgtgttcattgtgttgtcagccagaaagctagtctaaatcaactcctagatcaaagcaagggctcctttttggcaatagactgctagattgaggaagcctgacttggttgtctgtataactttctcaaagtactaggtggccttggagcagttaccacagttagtcattaccttcttgattatgtgattgtgtggttaatagctatttcctccacttggtcacaagcttcatgaaggcacaagccttgctgttgtttcgaaaatcagcattgtggctgagtgtggggactcatgcgtgtaatctcagcactttggagggccaaggtgagagaactgcctgagcccaggagtttgagaccagcctgagcaagatagtgagacatcctctcttaaaaaaaaaaaaaaattacctgggtatgatggtgcacctataatactagctatttgggaggctgaggtgagaaaataatttgagtccaggagttcgaggctgcagtgagccgtaatcgtgccactgtactccagcctgggagatagagcgagatcctgtctaaaaaagaaaagaaaagaaaagaaaagaaaagaaaatcagcattgtatccccagaacctgctacagtgtactgtacacttaataaatattggttgaatgaatgaactg

SEQ ID NO: 86424 - DNA, 172 bp, Homo sapiens
tctgcgaattctgcctgcaccaggagctcctgcatccatgaggtgcctgtgaccacaccagggacagaggaggctgtcagcagcaccaccctccctacctggccagccttgccctgggatggattggccagagcctgcactcggcaggtgtgttgaccatgagcacagtcat

SEQ ID NO: 86425 - DNA, 363 bp, Homo sapiens
gatacagcaagctggccatctgcaaaccaggaacagggccttcaccaggaaccccaccagctgacatcttggtcttggactccctaccttccaaaactgtgagaaataagtttctattgtttaagccacccagtcaatagcactttgctacagcagcctgagtgaattaaggcagtccaaaagctttgtcatacgctgcaagctgcacaagtctagcaggcctagaacaatgggtgtctgtgggggagcccaggagtcgatggcagagagcagataaaagcaagccatgccaactgctgtgggctgtaggagcctctgatgggcattaagcatgagatgatccaatttttatttagaaaggtt

SEQ ID NO: 86426 - DNA, 522 bp, Homo sapiens
ggtgtggccagccttgagggtaggagatcaggacaggcagctgggacaaggtgtggccccatagaccgaggccctgggtgagggccttgcttctctattccctcctctgaacacaggttgggggactgggagcaaggccacaaggaaggatcacactggcaggcctcacagcttgggcctccaacattcaggaagttgaaccctttaagtatggcatcatctggtagtcatagtggcctcttacaggccaggtttttggggtttggggcttctgaggagtcagacaattgtgccactcactggctttgttatttggagcaaacacctctgacctctgcctctccaagcccggctttcctcatcgcttcggggagaatcatttccagctacagggggtattagggggattaacggagacctcgtacatgctgctagaatgcctagcagtctgcctgctactgataagtggcaataaacgcagccattgctttttagatgtttattatcctgagggctagggat

SEQ ID NO: 86427 - DNA, 300 bp, Homo sapiens
ggccaagaaatttagaatttatgctgctgcttggtctttatctcctaaggattactggcttctttgtgagtataaataatgatcataataggtcagattgatactacagaatcaaagtataagaagaataaattgcttcaggctcatgccagaatagttagcataaattattggttttggtgaatttaatgtgtttataacagtatctcaaagtcaccattggtattttaatctttgtgaattattaaactatttttgtttttcttgagatatggtctaggtagagtgacctagtgtaca

SEQ ID NO: 86428 - DNA, 316 bp, Homo sapiens
ccgggatttcaggcagaagggtgctgactttaaggatgtggcccttgccacgcgtcaggggctcctgtgtcctccctgggtcaaccaggtaagctgcttctcccgccctttcctggcataaggggccctgagtctctgtatttcccctagcaccctcgtggctcagctcagtttcctcctcctgaaccccagtgtcataacttagaagccaccaacccctaacgtgtccagatgaggaaatagtctttttatttttttttttttgagacggagtcttgctctgtcgcccaggctggagtgcggtggcacgatcttg

SEQ ID NO: 86429 - DNA, 596 bp, Homo sapiens
tggaaagctgaggtgggcggatcacttgagctcaggagttcaatgccaggctaggcaacatggcaaaaccccatctctacaaaaaaaaaaaaatacaaaaatcagctgagcgtggtggcacaagcctgtagccgccgctactcaggaagctgaggtaggaagattccttgagccccaggaggtcaaggctgcaatgagccaagactgcgccactgcactccagcctgggtgacagagtgagactctgtctctgaaaataaaattaagttcatctgaatttaaaatgagacctaatagtgtgctttcatggctccatttgtagagccagaatttaccagataggcactgactttgccagcagagggagcagccagctctttctgtgggtgacttgttaaaccttacgcttcttagcactcagcaccccctgggctgtcaaaccctcacttatttacacaggaccttcatttgaaatgggtcattctggtttccgaccatctcttattctaacaatttgtcatctgcatgcattgggaagcacagattagggaattggagcagctagttctcatttttttgctctgtatccagaggcc

SEQ ID NO: 86430 - DNA, 280 bp, Homo sapiens
cctctctcccttcggttctccatttaccgagccacagtatttcttaaagctcgttggcagcctgcacctctgcttattcttgggagacacgtgtttgcatcctattacaacccatagtttttgcataaccatggtgagaggaaccatccttcccaatcccaacctcaaccaaagcttagaaaaagtgccattcttaacctttcagaatcactcataagtaaatcctatagcagtctctgctaatgcaaatttcaatgtgtgcccgatataggtaactttt

SEQ ID NO: 86431 - DNA, 283 bp, Homo sapiens
atattgaggattgggagcactgtcaagaaatgttcagaccatataaataggaggctcagggtcaggctgtggagccagaagataattatttttttccttagctattacttcttattctgttttcctaatctggaaatctgttttccaaatctttgtttgagtttgggtctccctcattatatcctaatctgtgttggtaatcaaattaacttttgtgtcaaatattttgatttagcattttcattcctttctccagcaaatactagctgtgggctgcctctaa

SEQ ID NO: 86432 - DNA, 340 bp, Homo sapiens
ccaacaggccaaggaagtgcaatccttccttacatgtgcttaaaagggaaatggaaacatttgttgaacagtactaatgactacaacaaggcccccagccttcacgagggtatgagtctcagagtaggccagtcgtgatcttacaccctcctgcatacaatgattggtccactagtggtcatataacataggcaggccaaccagcccttttatggaatgaatgtatgttacaggcagaaacatcttgtgattactgaataggaggatgggagactgggactgtcagaagccatcctatcagctttatggagagagcctgcatccagttgtgactgttcaa

SEQ ID NO: 86433 - DNA, 247 bp, Homo sapiens
attggtgcataggtcttagtttttaatagtttcttactccgtccccccccaaaaaaagtttcttactttgaatctaagtactcctttatgagacccttcaaggttgatcttgtgtgtgtgtgtgcatgtgagagagcgagagcaagagcgagagtgagcgagagcgagagtgagagcgagagcgagagagagagaaagagagagagtgaatatgatgggaaatgaggcagaaggggaggagaaaaag

SEQ ID NO: 86434 - DNA, 308 bp, Homo sapiens
tcaagttatgcagtctgtggtattctgttatagcaacacaaaacagactaagacacactccatatccaaactgtcagggagttgttggttgcaccctcaacatatatccaggatccctccacttctcacctctatagctacccaggctttggcctaagctactattatctggtgcctgggtcattgtggtagcttccaagtagtttccctgccgcttcccttctctattcttaaaacagaagccagcataggcctttagtaagagacattagctcatgtcacaccaatgccaactctctactggcttt

SEQ ID NO: 86435 - DNA, 2951 bp, Homo sapiens
tgggaacttaaatattaacgccagtattaccactggtagggtgcatgagatcgcacgatggtgccaaaggtgtctctccaccgcccagcccagcgacactgttcccctagaaggcattgtcgtaaaaacaaaaaaaaaaaaaaaaaacgaacaaacaaaacaccaaaacacggaaactaaaagcaaatacttaaaagacatgcaggaaaccagcccaaggaaaaatttatgtggagccacgtctgcgcctgcgcctgcgccaagcccacggcgcgccacttgcacatgcgcagtagctgtaggagggggtgggcgctccattgggcgtttctcttggtttttcctttccgcgcggcttgggcggacgtctcgtgagacgtgggacttctcgcgggaactgcattcaaatatcccaggcgcttactcgagagctagctgagcgaatgggccggcgactgtggagttagcgtcctcaatgtggacgccctgagctcccattaggagccgctggctgcggcagcaggggactagcgtgagagttggctaaaaaaaagaaaagaacatggaggcagatataatcacaaatcttcgatgcaggctcaaagaggctgaagaagagcgactaaaagctgcacagtatggtttacaactagtagagagtcaaaatgaattacagaatcaattggataaatgtcgtaatgaaatgatgaccatgactgagagttatgaacaagaaaaatatacccttcaaagagaagttgaactcaagagtcgaatgttagaaagtttgagctgcgaatgtgaagctattaaacaacaacaaaaaatgcacctggagaaattggaagaacaactaagcagaagccatggacaggaagtgaatgaactaaaaactaagatagaaaaactgaaagtggaattagatgaagccaggcttagtgaaaagcagctgaagcaccaagtagatcatcagaaggaactcctctcttgtaaatcagaggaactgcgcgtaatgtctgaacgtgtgcaggaaagcatgtcttcagagatgctggctcttcaaattgagctgacagaaatggagagtatgaagaccaccctcaaagaagaagtgaatgaactacaatacagacaagaacagctagaacttcttattactaacctaatgcgccaggtagaccggcttaaagaggaaaaagaggagcgagagaaagaagcagtttcttactataatgccctagagaaagctcgtgtagcaaatcaagatcttcaggtacagttggaccaggcactccagcaagccttggatcccaatagtaaaggcaactctttgtttgcagaggtggaagatcgaagggcagcaatggaacgtcagcttatcagtatgaaagtcaagtatcagtcactaaagaagcaaaatgtatttaacagagaacagatgcagagaatgaagttacaaattgccacgttgctacagatgaaagggtctcaaactgaatttgagcagcaggaacggttgcttgccatgttggagcagaagaatggtgaaataaaacatcttttaggtgaaattagaaatctggagaaatttaagaatttatatgacagtatggaatctaagccttcagtcgactctggtactctggaagataacacctattatacagatttacttcagatgaagctggataacttaaacaaagaaattgaaagcactaaaggtgaattgtccatacagcgaatgaaagcattatttgagagccagcgggctctagatattgagcgaaaactttttgcaaatgaaagatgcctccagctttcagaaagtgaaaatatgaaactgagagctaaactagatgaattgaaactaaaatatgaacctgaagagacagttgaagtgcctgtactgaaaaagaggcgtgaggtgctccctgtggatataaccaccgctaaagatgcatgtgtcaacaacagtgctctcgggggagaagtttatcgattaccgcctcagaaagaggagacacagtcctgccctaacagtttagaagataacaacttgcaattagaaaaatcagtttctatacacacaccagtagtcagtctctctcctcacaaaaatctgcccgtggatatgcagctgaagaaggaaaagaaatgtgtgaaactcataggagttcccgctgacgctgaggccttaagtgaaagaagtggaaacacccctaactctcccaggttagctgctgaatcaaagcttcaaacagaagttaaagaaggaaaagaaacttcaagcaaattggaaaaagaaacttgtaagaaatcacaccctattctatatgtgtcttctaaatctactccagagacccagtgccctcaacagtaaagacttttctttaataagagtacggtgccacttgcctcaaaagttactatggtgcttaagattgtcttgatctgacatatatcaccttctgggttatttactcattgtgccaggacctggcattttcatgtgcctttgaccaagtgttcagaatttgcttgactctaacctggagagcttcttaagtgatgccccttcatggagcttctatgacagtgaataaactattaattgaaggaaaatgttataattaatgtatctatttgctgcattgtatatggattaaatgataaaaaacaagtaatctaccctcagagccatgtatttgagaatgcttcaatcatattttcctatgtacttttttttataaacttagttttagactatgttgtaaaaatgggaaggttgtaaactatgttgtaaaaataggaaatgtggcttaaaatatatacattatattgtttcaggattttgtcagtgtttaaagaaccaatgttcatctttgtatttatatacatgatttaaattttgtctaaaattttaaataaaactgcagtgatttatccttaaa

SEQ ID NO: 86436 - DNA, 2661 bp, Homo sapiens
tgggaacttaaatattaacgccagtattaccactggtagggtgcatgagatcgcacgatggtgccaaaggtgtctctccaccgcccagcccagcgacactgttcccctagaaggcattgtcgtaaaaacaaaaaaaaaaaaaaaaaacgaacaaacaaaacaccaaaacacggaaactaaaagcaaatacttaaaagacatgcaggaaaccagcccaaggaaaaatttatgtggagccacgtctgcgcctgcgcctgcgccaagcccacggcgcgccacttgcacatgcgcagtagctgtaggagggggtgggcgctccattgggcgtttctcttggtttttcctttccgcgcggcttgggcggacgtctcgtgagacgtgggacttctcgcgggaactgcattcaaatatcccaggcgcttactcgagagctagctgagcgaatgggccggcgactgtggagttagcgtcctcaatgtggacgccctgagctcccattaggagccgctggctgcggcagcaggggactagcgtgagagttggctaaaaaaaagaaaagaacatggaggcagatataatcacaaatcttcgatgcaggctcaaagaggctgaagaagagcgactaaaagctgcacagtatggtttacaactagtagagagtcaaaatgaattacagaatcaattggataaatgtcgtaatgaaatgatgaccatgactgagagttatgaacaagaaaaatatacccttcaaagagaagttgaactcaagagtcgaatgttagaaagtttgagctgcgaatgtgaagctattaaacaacaacaaaaaatgcacctggagaaattggaagaacaactaagcagaagccatggacaggaagtgaatgaactaaaaactaagatagaaaaactgaaagtggaattagatgaagccaggcttagtgaaaagcagctgaagcaccaagtagatcatcagaaggaactcctctcttgtaaatcagaggaactgcgcgtaatgtctgaacgtgtgcaggaaagcatgtcttcagagatgctggctcttcaaattgagctgacagaaatggagagtatgaagtatgaaagtcaagtatcagtcactaaagaagcaaaatgtatttaacagagaacagatgcagagaatgaagttacaaattgccacgttgctacagatgaaagggtctcaaactgaatttgagcagcaggaacggttgcttgccatgttggagcagaagaatggtgaaataaaacatcttttaggtgaaattagaaatctggagaaatttaagaatttatatgacagtatggaatctaagccttcagtcgactctggtactctggaagataacacctattatacagatttacttcagatgaagctggataacttaaacaaagaaattgaaagcactaaaggtgaattgtccatacagcgaatgaaagcattatttgagagccagcgggctctagatattgagcgaaaactttttgcaaatgaaagatgcctccagctttcagaaagtgaaaatatgaaactgagagctaaactagatgaattgaaactaaaatatgaacctgaagagacagttgaagtgcctgtactgaaaaagaggcgtgaggtgctccctgtggatataaccaccgctaaagatgcatgtgtcaacaacagtgctctcgggggagaagtttatcgattaccgcctcagaaagaggagacacagtcctgccctaacagtttagaagataacaacttgcaattagaaaaatcagtttctatacacacaccagtagtcagtctctctcctcacaaaaatctgcccgtggatatgcagctgaagaaggaaaagaaatgtgtgaaactcataggagttcccgctgacgctgaggccttaagtgaaagaagtggaaacacccctaactctcccaggttagctgctgaatcaaagcttcaaacagaagttaaagaaggaaaagaaacttcaagcaaattggaaaaagaaacttgtaagaaatcacaccctattctatatgtgtcttctaaatctactccagagacccagtgccctcaacagtaaagacttttctttaataagagtacggtgccacttgcctcaaaagttactatggtgcttaagattgtcttgatctgacatatatcaccttctgggttatttactcattgtgccaggacctggcattttcatgtgcctttgaccaagtgttcagaatttgcttgactctaacctggagagcttcttaagtgatgccccttcatggagcttctatgacagtgaataaactattaattgaaggaaaatgttataattaatgtatctatttgctgcattgtatatggattaaatgataaaaaacaagtaatctaccctcagagccatgtatttgagaatgcttcaatcatattttcctatgtacttttttttataaacttagttttagactatgttgtaaaaatgggaaggttgtaaactatgttgtaaaaataggaaatgtggcttaaaatatatacattatattgtttcaggattttgtcagtgtttaaagaaccaatgttcatctttgtatttatatacatgatttaaattttgtctaaaattttaaataaaactgcagtgatttatccttaaa

SEQ ID NO: 86437 - DNA, 2927 bp, Homo sapiens
tgggaacttaaatattaacgccagtattaccactggtagggtgcatgagatcgcacgatggtgccaaaggtgtctctccaccgcccagcccagcgacactgttcccctagaaggcattgtcgtaaaaacaaaaaaaaaaaaaaaaaacgaacaaacaaaacaccaaaacacggaaactaaaagcaaatacttaaaagacatgcaggaaaccagcccaaggaaaaatttatgtggagccacgtctgcgcctgcgcctgcgccaagcccacggcgcgccacttgcacatgcgcagtagctgtaggagggggtgggcgctccattgggcgtttctcttggtttttcctttccgcgcggcttgggcggacgtctcgtgagacgtgggacttctcgcgggaactgcattcaaatatcccaggcgcttactcgagagctagctgagcgaatgggccggcgactgtggagttagcgtcctcaatgtggacgccctgagctcccattaggagccgctggctgcggcagcaggggactagcgtgagagttggctaaaaaaaagaaaagaacatggaggcagatataatcacaaatcttcgatgcaggctcaaagaggctgaagaagagcgactaaaagctgcacagtatggtttacaactagtagagagtcaaaatgaattacagaatcaattggataaatgtcgtaatgaaatgatgaccatgactgagagttatgaacaagaaaaatatacccttcaaagagaagttgaactcaagagtcgaatgttagaaagtttgagctgcgaatgtgaagctattaaacaacaacaaaaaatgcacctggagaaattggaagaacaactaagcagaagccatggacaggaagtgaatgaactaaaaactaagatagaaaaactgaaagtggaattagatgaagccaggcttagtgaaaagcagctgaagcaccaagtagatcatcagaaggaactcctctcttgtaaatcagaggaactgcgcgtaatgtctgaacgtgtgcaggaaagcatgtcttcagagatgctggctcttcaaattgagctgacagaaatggagagtatgaagaccaccctcaaagaagaagtgaatgaactacaatacagacaagaacagctagaacttcttattactaacctaatgcgccaggtagaccggcttaaagaggaaaaagaggagcgagagaaagaagcagtttcttactataatgccctagagaaagctcgtgtagcaaatcaagatcttcaggtacagttggaccaggcactccagcaagccttggatcccaatagtaaaggcaactctttgtttgcagaggtggaagatcgaagggcagcaatggaacgtcagcttatcagtatgaaagtcaagtatcagtcactaaagaagcaaaatgtatttaacagagaacagatgcagagaatgaagatgaaagggtctcaaactgaatttgagcagcaggaacggttgcttgccatgttggagcagaagaatggtgaaataaaacatcttttaggtgaaattagaaatctggagaaatttaagaatttatatgacagtatggaatctaagccttcagtcgactctggtactctggaagataacacctattatacagatttacttcagatgaagctggataacttaaacaaagaaattgaaagcactaaaggtgaattgtccatacagcgaatgaaagcattatttgagagccagcgggctctagatattgagcgaaaactttttgcaaatgaaagatgcctccagctttcagaaagtgaaaatatgaaactgagagctaaactagatgaattgaaactaaaatatgaacctgaagagacagttgaagtgcctgtactgaaaaagaggcgtgaggtgctccctgtggatataaccaccgctaaagatgcatgtgtcaacaacagtgctctcgggggagaagtttatcgattaccgcctcagaaagaggagacacagtcctgccctaacagtttagaagataacaacttgcaattagaaaaatcagtttctatacacacaccagtagtcagtctctctcctcacaaaaatctgcccgtggatatgcagctgaagaaggaaaagaaatgtgtgaaactcataggagttcccgctgacgctgaggccttaagtgaaagaagtggaaacacccctaactctcccaggttagctgctgaatcaaagcttcaaacagaagttaaagaaggaaaagaaacttcaagcaaattggaaaaagaaacttgtaagaaatcacaccctattctatatgtgtcttctaaatctactccagagacccagtgccctcaacagtaaagacttttctttaataagagtacggtgccacttgcctcaaaagttactatggtgcttaagattgtcttgatctgacatatatcaccttctgggttatttactcattgtgccaggacctggcattttcatgtgcctttgaccaagtgttcagaatttgcttgactctaacctggagagcttcttaagtgatgccccttcatggagcttctatgacagtgaataaactattaattgaaggaaaatgttataattaatgtatctatttgctgcattgtatatggattaaatgataaaaaacaagtaatctaccctcagagccatgtatttgagaatgcttcaatcatattttcctatgtacttttttttataaacttagttttagactatgttgtaaaaatgggaaggttgtaaactatgttgtaaaaataggaaatgtggcttaaaatatatacattatattgtttcaggattttgtcagtgtttaaagaaccaatgttcatctttgtatttatatacatgatttaaattttgtctaaaattttaaataaaactgcagtgatttatccttaaa

SEQ ID NO: 86438 - DNA, 1562 bp, Homo sapiens
aaatatggcttttattgggaacttcactattgcatgctttacaaaactaattggtgttcttgttaccgagaatctttacaggcctttaagaatctctctactgtttatcttttctttattctactagttgaaactcaattttttaatatgaaacaaatagacatctattcatgcagcccaagattccatgttatttttgtcttgccttttgtatgtcatgttaacattaaaatattgctgtaacatttcagtttttgtgttaggtgtgcttatcatgataggtgccctgtcatattttctttaatttagggcttgccatgactttttaaagatattctttagacttaaaaaataattggcccagcgtggtgcctcacacctgtaatcccggcactttgggaggctgaggcaggtggatcacgaggtcaagagatcaagaccatcctgaccaacgtggtgaaaccctgtctctactaaaaatacgaaaattagctgcatgtgggggtgcgcacctatagtcccagctactccggtggctgaggcaggagaatcgcttgaacccgggaggcggaggttgcagtgagccgagatcatgccactgcgctccagcctggtgacagagtgagactctgtctcaaaaagtaataataacaataattgagcctattgatataaaaagacttttagacagccagtgacttaatattcttacagtattagagtcaactatattttttttccttgaataccatgccttattggaggcccattatactgggggtttgtttcttcaatccttcataaccacatttgaattcagagtggatgctttaatgcctgtaggttagctgctgaatcaaagcttcaaacagaagttaaagaaggaaaagaaacttcaagcaaattggaaaaagaaacttgtaagaaatcacaccctattctatatgtgtcttctaaatctactccagagacccagtgccctcaacagtaaagacttttctttaataagagtacggtgccacttgcctcaaaagttactatggtgcttaagattgtcttgatctgacatatatcaccttctgggttatttactcattgtgccaggacctggcattttcatgtgcctttgaccaagtgttcagaatttgcttgactctaacctggagagcttcttaagtgatgccccttcatggagcttctatgacagtgaataaactattaattgaaggaaaatgttataattaatgtatctatttgctgcattgtatatggattaaatgataaaaaacaagtaatctaccctcagagccatgtatttgagaatgcttcaatcatattttcctatgtacttttttttataaacttagttttagactatgttgtaaaaatgggaaggttgtaaactatgttgtaaaaataggaaatgtggcttaaaatatatacattatattgtttcaggattttgtcagtgtttaaagaaccaatgttcatctttgtatttatatacatgatttaaattttgtctaaaattttaaataaaactgcagtgatttatccttaaa

SEQ ID NO: 86439 - DNA, 400 bp, Homo sapiens
accatacctgctactatgaggtttcttgattacttttttgttattcccttaattttgattatatggatagtggtccaattatgagaccaaacttaccttaacatattggaagcttagcatacaacaactgaacagttttctgatggtgaactgtttagaagcaaaattaaatgtattctattccactctttaatttttgatcccaaatcagtaacagaattgtcagaacagttcttgctcttggaacaagaatgcaaatttgactacttattagtcaggaagaaaattttaatgtttttatacgacagtagtattgagtagatatgtttcttctgttattgatattattgcatggagttttttgtataagcttaagtagttttatttcctctatttacag

SEQ ID NO: 86440 - DNA, 479 bp, Homo sapiens
gcattcaaatatcccaggcgcttactcgagagctagctgagcgaatgggccggcgactgtggagttagcgtcctcaatgtggacgccctgagctcccattaggagccgctggctgcggcagcaggggactagcgtgagaggtaggggcaaggggcctggtgggaggtgggtgtggagagcggcagtggggagagtcgaacaggccctaaagaaagctaggggccggggtctcggccgaggcctttagctgaaacatctccttccccggaaccctggggtcttatacactgggttccgagccggtcttatcttccgctggaccacctcgccgccctcagggattctggacaaatatggaaggttgggtcggttgccgggtcctcaaaattataaccgccactggatctgcgctgtgcggtacggtagcctctagcccgaactaagaaatggtgcagatgggagatacatattgggtttca

SEQ ID NO: 86441 - DNA, 3079 bp, Homo sapiens
tgggaacttaaatattaacgccagtattaccactggtagggtgcatgagatcgcacgatggtgccaaaggtgtctctccaccgcccagcccagcgacactgttcccctagaaggcattgtcgtaaaaacaaaaaaaaaaaaaaaaaacgaacaaacaaaacaccaaaacacggaaactaaaagcaaatacttaaaagacatgcaggaaaccagcccaaggaaaaatttatgtggagccacgtctgcgcctgcgcctgcgccaagcccacggcgcgccacttgcacatgcgcagtagctgtaggagggggtgggcgctccattgggcgtttctcttggtttttcctttccgcgcggcttgggcggacgtctcgtgagacgtgggacttctcgcgggaactgcattcaaatatcccaggcgcttactcgagagctagctgagcgaatgggccggcgactgtggagttagcgtcctcaatgtggacgccctgagctcccattaggagccgctggctgcggcagcaggggactagcgtgagagaatctgaactgcccagaatggaacctagtatataaggcattcaagaaatacttgttcagtgaatgactacattgacttgagacatgggggaacatcttgcaatgacctggtgccctttgaaggcaaagttggctaaaaaaaagaaaagaacatggaggcagatataatcacaaatcttcgatgcaggctcaaagaggctgaagaagagcgactaaaagctgcacagtatggtttacaactagtagagagtcaaaatgaattacagaatcaattggataaatgtcgtaatgaaatgatgaccatgactgagagttatgaacaagaaaaatatacccttcaaagagaagttgaactcaagagtcgaatgttagaaagtttgagctgcgaatgtgaagctattaaacaacaacaaaaaatgcacctggagaaattggaagaacaactaagcagaagccatggacaggaagtgaatgaactaaaaactaagatagaaaaactgaaagtggaattagatgaagccaggcttagtgaaaagcagctgaagcaccaagtagatcatcagaaggaactcctctcttgtaaatcagaggaactgcgcgtaatgtctgaacgtgtgcaggaaagcatgtcttcagagatgctggctcttcaaattgagctgacagaaatggagagtatgaagaccaccctcaaagaagaagtgaatgaactacaatacagacaagaacagctagaacttcttattactaacctaatgcgccaggtagaccggcttaaagaggaaaaagaggagcgagagaaagaagcagtttcttactataatgccctagagaaagctcgtgtagcaaatcaagatcttcaggtacagttggaccaggcactccagcaagccttggatcccaatagtaaaggcaactctttgtttgcagaggtggaagatcgaagggcagcaatggaacgtcagcttatcagtatgaaagtcaagtatcagtcactaaagaagcaaaatgtatttaacagagaacagatgcagagaatgaagttacaaattgccacgttgctacagatgaaagggtctcaaactgaatttgagcagcaggaacggttgcttgccatgttggagcagaagaatggtgaaataaaacatcttttaggtgaaattagaaatctggagaaatttaagaatttatatgacagtatggaatctaagccttcagtcgactctggtactctggaagataacacctattatacagatttacttcagatgaagctggataacttaaacaaagaaattgaaagcactaaaggtgaattgtccatacagcgaatgaaagcattatttgagagccagcgggctctagatattgagcgaaaactttttgcaaatgaaagatgcctccagctttcagaaagtgaaaatatgaaactgagagctaaactagatgaattgaaactaaaatatgaacctgaagagacagttgaagtgcctgtactgaaaaagaggcgtgaggtgctccctgtggatataaccaccgctaaagatgcatgtgtcaacaacagtgctctcgggggagaagtttatcgattaccgcctcagaaagaggagacacagtcctgccctaacagtttagaagataacaacttgcaattagaaaaatcagtttctatacacacaccagtagtcagtctctctcctcacaaaaatctgcccgtggatatgcagctgaagaaggaaaagaaatgtgtgaaactcataggagttcccgctgacgctgaggccttaagtgaaagaagtggaaacacccctaactctcccaggttagctgctgaatcaaagcttcaaacagaagttaaagaaggaaaagaaacttcaagcaaattggaaaaagaaacttgtaagaaatcacaccctattctatatgtgtcttctaaatctactccagagacccagtgccctcaacagtaaagacttttctttaataagagtacggtgccacttgcctcaaaagttactatggtgcttaagattgtcttgatctgacatatatcaccttctgggttatttactcattgtgccaggacctggcattttcatgtgcctttgaccaagtgttcagaatttgcttgactctaacctggagagcttcttaagtgatgccccttcatggagcttctatgacagtgaataaactattaattgaaggaaaatgttataattaatgtatctatttgctgcattgtatatggattaaatgataaaaaacaagtaatctaccctcagagccatgtatttgagaatgcttcaatcatattttcctatgtacttttttttataaacttagttttagactatgttgtaaaaatgggaaggttgtaaactatgttgtaaaaataggaaatgtggcttaaaatatatacattatattgtttcaggattttgtcagtgtttaaagaaccaatgttcatctttgtatttatatacatgatttaaattttgtctaaaattttaaataaaactgcagtgatttatccttaaa

SEQ ID NO: 86442 - DNA, 3755 bp, Homo sapiens
tgggaacttaaatattaacgccagtattaccactggtagggtgcatgagatcgcacgatggtgccaaaggtgtctctccaccgcccagcccagcgacactgttcccctagaaggcattgtcgtaaaaacaaaaaaaaaaaaaaaaaacgaacaaacaaaacaccaaaacacggaaactaaaagcaaatacttaaaagacatgcaggaaaccagcccaaggaaaaatttatgtggagccacgtctgcgcctgcgcctgcgccaagcccacggcgcgccacttgcacatgcgcagtagctgtaggagggggtgggcgctccattgggcgtttctcttggtttttcctttccgcgcggcttgggcggacgtctcgtgagacgtgggacttctcgcgggaactgcattcaaatatcccaggcgcttactcgagagctagctgagcgaatgggccggcgactgtggagttagcgtcctcaatgtggacgccctgagctcccattaggagccgctggctgcggcagcaggggactagcgtgagagttggctaaaaaaaagaaaagaacatggaggcagatataatcacaaatcttcgatgcaggctcaaagaggctgaagaagagcgactaaaagctgcacagtatggtttacaactagtagagagtcaaaatgaattacagaatcaattggataaatgtcgtaatgaaatgatgaccatgactgagagttatgaacaagaaaaatatacccttcaaagagaagttgaactcaagagtcgaatgttagaaagtttgagctgcgaatgtgaagctattaaacaacaacaaaaaatgcacctggagaaattggaagaacaactaagcagaagccatggacaggaagtgaatgaactaaaaactaagatagaaaaactgaaagtggaattagatgaagccaggcttagtgaaaagcagctgaagcaccaagtagatcatcagaaggaactcctctcttgtaaatcagaggaactgcgcgtaatgtctgaacgtgtgcaggaaagcatgtcttcagagatgctggctcttcaaattgagctgacagaaatggagagtatgaagaccaccctcaaagaagaagtgaatgaactacaatacagacaagaacagctagaacttcttattactaacctaatgcgccaggtagaccggcttaaagaggaaaaagaggagcgagagaaagaagcagtttcttactataatgccctagagaaagctcgtgtagcaaatcaagatcttcaggtacagttggaccaggcactccagcaagccttggatcccaatagtaaaggcaactctttgtttgcagaggtggaagatcgaagggcagcaatggaacgtcagcttatcagtatgaaagtcaagtatcagtcactaaagaagcaaaatgtatttaacagagaacagatgcagagaatgaagttacaaattgccacgttgctacagatgaaagggtctcaaactgaatttgagcagcaggaacggttgcttgccatgttggagcagaagaatggtgaaataaaacatcttttaggtgaaattagaaatctggagaaatttaagaatttatatgacagtatggaatctaagccttcagtcgactctggtactctggaagataacacctattatacagatttacttcagatgaagctggataacttaaacaaagaaattgaaagcactaaaggtgaattgtccatacagcgaatgaaagcattatttgagagccagcgggctctagatattgagcgaaaactttttgcaaatgaaagatgcctccagctttcagaaagtgaaaatatgaaactgagagctaaactagatgaattgaaactaaaatatgaacctgaagagacagttgaagtgcctgtactgaaaaagaggcgtgaggtgctccctgtggatataaccaccgctaaagatgcatgtgtcaacaacagtgctctcgggggagaagtttatcgattaccgcctcagaaagaggagacacagtcctgccctaacagtttagaagataacaacttgcaattagaaaaatcagtttctatacacacaccagtagtcagtctctctcctcacaaaaatctgcccgtggatatgcagctgaagaaggaaaagaaatgtgtgaaactcataggagttcccgctgacgctgaggccttaagtgaaagaagtggaaacacccctaactctcccaggttagctgctgaatcaaagcttcaaacagaagttaaagaaggaaaagaaacttcaagcaaattggaaaaagaaacttgtaagaaatcacaccctattctatatgtgtcttctaaatctactccagagacccagtgccctcaacagtaaagacttttctttaataagagtacggtgccacttgcctcaaaagttactatggtgcttaagattgtcttgatctgacatatatcaccttctgggttatttactcattgtgccaggacctggcattttcatgtgcctttgaccaagtgttcagaatttgcttgactctaacctggagagcttcttaagtgatgccccttcatggagcttctatgacagtgaataaactattaattgaaggaaaatgttataattaatgtatctatttgctgcattgtatatggattaaatgataaaaaacaagtaatctaccctcagagccatgtatttgagaatgcttcaatcatattttcctatgtacttttttttataaacttagttttagactatgttgtaaaaatgggaaggttgtaaactatgttgtaaaaataggaaatgtggcttaaaatatatacattatattgtttcaggattttgtcagtgtttaaagaaccaatgttcatctttgtatttatatacatgatttaaattttgtctaaaattttaaataaaactgcagtgatttatccttaaaaaaaaaaaaaaaaaaaaaaaaaaaaaaaaaaaaaaaaaaaaaaaaaaaaaaaaaaaaaaaaaaaaaaaagggggggacacccacaaaacaaaaccagggggggggggcgccaaaccccccccgggggggcacaggggggcccaggggggaaagggggcccccggggggaaacgcgcaggggaggaacagcgccacaaccagagcgcaaccgcttccaagaaaaaacacccaccaaccgcgccgtgaccacaccaaaccccccaccccccctgctgcacgacaaaaaaaaagccccaccacccgcaaacgaaccaactacagagccccaaagcagcacaaaccacaagcgcgacgacaacaacgacgcaaaacaaaagccgccacataccgcatacacaacagaacccctccacccgccaggcactcaagacaacaacacccacccgcacacggacccacttaaacaaccacccgccgccacccacacaacccacacacaccaacacaacaacaaacaagcgcacagcagaagaccaagcaacagaccgcaagcgcaacagacagcaaagcaaaacaaacgaaacagcagacaagcacaagcaccaccacgcaccccaaaacagccgaacaacccaccaagacgcgccacaccacacgcaacagaaaccaacccacacgcacccgagaaccacccaaccgcacaaacaagccagagccacgacaaagcaccccgaacgaccaaagcaccacaacagcagcaacacacccgaccaagaagcgcacagcaacacccacgccacccca

SEQ ID NO: 86443 - DNA, 123 bp, Homo sapiens
gtataaaacaagttctgtatgttctagttactttgcatggcaagtggtactgattgttttagtttactgtggcaatataacatttctttttggaataaatgttaataactaaacaaattaagt

SEQ ID NO: 86444 - DNA, 957 bp, Homo sapiens
aaagttaaccacagaaaatgagagaaaaaatgaaggatagagcaaattaaggatgcgagtccctcaatggttattggccttaatggtgttataaaaatgatgtcggcttttaccaggaataatttatattctgaattaaataaggatatgtatctataaatccattctataaaacttaattttccatctagataggctgattactttgggctcggcatacctttaccggttgttaattactgcgggatggtttaacactattttccaaatcagcatgcatgcataaaatgactgcaatccaatttgacacattattagtgatgattattgtcatagataaattagattgaacagaaaataaccttcatccttagcatgttttagctctcagaattaatgtgatttggtgaacacatataaataaaaatctgacgagtccctgctgactacagggcctgttggtgctgaagtgtatcaatttcatgcagatgatgaattccttaagcattcagtgataatcatgcttgatttgacaagactttctcatgctattttagggccttaattttctgtgaagttctgtcaagtgctcatcaagcacccacttatctccgtatcttaacctggcagccaatcacaaggttgcctaacagtacagctacggagtgccagcccattaatattcgggtcacgtgactgtccaaggagagaaaccaatcaatggctgattaacattcaggtcacatgactcccgaggagagtaaatgagttacacagtaagacatcaaacaaattttcatcttgaaagagtgattgctttttctgctgctgtgatgtttgtcaaattcgctctagccttgtccaattaagctccatgagctgaattaataatgaagagatgtaagcaccgagccagcatgagcgctgcgatctgtgccacgtaataagaactgctta

SEQ ID NO: 86445 - DNA, 372 bp, Homo sapiens
tggtgaaagaagagaaggaaaccttggtctgcatggcacttggtacttttgtattgcctccatgccctccactgcagctcctgccctgctctgtgtgcatccctcatgagactcaagacagataacctctccttgccctttcatgtcccagccctggatcttggactcaaccatccattgcatccccatggaggattctgccagtcctcaggactcaggagcaacccaaggatgtcccagggtcacaggaagacttgttgaggggacccacaggggtgcccacaaattatcagtccatggagaaaaagtagagagggaggctcaaggacctcagcacgtaagggacatttgaattctacagtcacggtggat

SEQ ID NO: 86446 - DNA, 248 bp, Homo sapiens
ggatcagcttggcctctggactctggactatgccatataattttccttgaccaatgagatatttaggagatatgatacaagcacagtatggaaatgtaacttcttcaacactggggctttcttttctatcaggagaagaatgacaaacatgtggccctagcaaagcccaccagtcaagcctactttagaatagagccccccaaaaatcaacagacgtatacataagctcagctggtacaagctgatgc

SEQ ID NO: 86447 - DNA, 407 bp, Homo sapiens
ggtgttctgaaaactaatatttgcatgttactctggagcaaggttccaacctcaatatgtcacattaacatttaataaccagtgtgttcaaggcctcctagtttatccatcaatgaaggctctcaaagctttaaagagacaatcttctaaaccacaaaacacagctatccttctctcctccatggccatcatatgcccattcctttttaatcctctaagcaatgtacaaggtctagaatttctatttctctggtctaaaacgtatacccatgtctggatttgagatgtttgcacatttgtttcttaggaatacaggatgtactcagactactgtagccttcttgtttctcatctttaatatgtctgaaatgtcttctataatatatgcaaataaacactgtaaaatg

SEQ ID NO: 86448 - DNA, 671 bp, Homo sapiens
cacaccacctctccttcattcacgtcctatggaagagaccataaaggcttcaaaactagaagtgcgcatgaaggatgcttcatgccctgttccccacacagagaagagatgaagagggggaggtacggtcagctttcaaaacaatatgccccccgcccatcccatgtgtgaggacatggtgactcggtgactgtaacagtaggacacatcccatcatgcggtcagagtgcagaaacccggtcagcgtgcagaaaccagctgtctgctgatgaacggcccatctgcacagcggcagcaaggattaccccaagggcaggaaaaaagtctttggaaatagattgaaaatcagtttctttatttttttcaaacactgttttattgagttctaaacccagtggattaaaaagtcatttgggtcctgggaagcactgggaaagaagggagagccggggaggatagggcaggagtctggccaggagcccaaggtcaagtctggctgtcaactgacaaagagaagagaagacaagtctgtggcccagacaggatgccaagtctgggggcagcagcagggtccttgagagaacaggggagcaagcctgccccagtacccaaaaaacaatggctatcatgtactggggttattctctgtgcctgacactttacctgtagta

SEQ ID NO: 86449 - DNA, 393 bp, Homo sapiens
aatttttttttctctaactggatttacctagcagccttagtgtaggagcagaagagactggtggtttgattgatttggggttgggcttttatcaggttagcgagtggagagtgcaaggataatggtaaggaactgatcaagaatatggattgtggggtctggcctctgaagaaaagaaacttaatagagaggactgatagaataagaggaaatggaggcattaaggaaggcttaggacatatccatgagttgatggatagatcccatttgaatcaacagagttcattctcagaaacataatgtggaatgaaaaaagaaagttgcgggattcatcagattcaagaggtggttacctttgggaagaaagggaaaggaatggacttggtgacaaat

SEQ ID NO: 86450 - DNA, 456 bp, Homo sapiens
  misc_feature (406)..(406): n is a, c, g, or t
  misc_feature (420)..(420): n is a, c, g, or t
  misc_feature (442)..(442): n is a, c, g, or t
gttgctgagaacctcgcctcttttagatttacacataagcaaaacaggaatggggaagcaagacgagcagccagcagttcgtttgaggggaatctcagagcaagtgaaattgtttaggctctggttcacacattgcttctgtctggtctacgaaggtgtctgatttggtcttgactgtccaaagcttctctaggtgtaccctgcctcagccttctcaggaattcattaaaatactgtcagcaaagtagtaccagaacaaggatttgagtttaaagaatagacttagttggccgggattacaggcgtgacagctggcgacctgcctatcctcacagcttttatcccacttggattaaatggcttccagttcagtggttgctttttgcccatggatgcttttttaaantaggtaaggattgnaattaaggttacacaattaggnggcgtatttcctat

SEQ ID NO: 86451 - DNA, 220 bp, Homo sapiens
gacaggacacctcgtgagaatttaagatggtatcaaaatatgaagggccgtgaatgtcaggatgttttgtcttgtgagaaattttaaagttttctgagctggagaagtaattaatccatgtagtgttcagacagttcagttttcttcaacaagattatgagaagaaaaaagagacagatggagggaaagccagtggattaaaagagactgaaaagatgca

SEQ ID NO: 86452 - DNA, 918 bp, Homo sapiens
tcgtcatcgccactctgcagatgggaaactgaggcccggaggtcccgccgctccggagcgaggagccgccggaccccagcgccgcaccgccgggcggacgcgctctgtgccgagctcccggcgattgggtccgctcccacggggctgggaacagaggggcagaggatgcttcccccgagccgctggcaggagtgcccttcccccttcagtctggagctcagagtttgtgcgtccctgggggtgaaggggcgtccacgctgtgatggtcgcctctgctcagtcctgggggccaagccagggtcggggtgatcgagcaggcccttttaccaggtgtccccagtaagttaactaagtaacttgagatgtgacttcagggtggaggacctgcacccagtggccacctacctggtgacctgacccttcccatcattaggggatggaggctggcccagaagccgggcactggggtggcggccgtgtgggagctgcctctcccacttcctcgaagcaggcactgtctgctgttcttagatctgagtatccgttaacttttgtcctcttttcccgttcctttcttcactccctgccccagattaggagttcctactctatcacagtatgaaagaaaagtcacttttcacattggactcaagccgtttttgcaaagtaaactaagaagtgtcttggagccctgagtgagtctcccagtgctgctgcagggctggactaggggattccagcctgcagtctctgagggctctgtagggtctgaggaagagagttgccctctggaaacgtctcttctctgctgttcgggaaaaaccttattaagatttcctccaaaacactcatgcgcagcaggcatggttcggttttcagccctcccacagggccagcagctgaggtttttctggaaga

SEQ ID NO: 86453 - DNA, 472 bp, Homo sapiens
cttatggccaattttggcagcaaaacgataggattaaaaatagcttgaagatgatctagtcttaaataatatatttcatgatgaactttccttgggaaagtgcatctttctgcctacaagaatcacatgacccctttcaataatttatgtagtagagaaaaacacactatttctcatagagttttcagtcatgtgctgtggtgtgattgtttctggacattcataaaattttatagttaactgaattctcttttctgtttttttgctatttaacgtccattgaaaacatggctttcttttgcgcattctgttactttcagctgtactttctaataagaatggattgccctttttagcaatctttgattgaactggtacatttcagattacttaaatgtcatcaggccacacagcataccaggtaacagaaagccataaattaaaaataaaaaaaaggcaagcaaaaaaaaaa

SEQ ID NO: 86454 - DNA, 356 bp, Homo sapiens
cagctttgcaaatcaaatagaattcattttgcctcctctgatcttacaactattctctggagtaggcaggctggttgaacttcaagagaagaggcgttcctgagagcctccttggtgagcttgcacacctgggggccagatgtgctttgccctccttgcaaagcctctctagtctggtgcccagagaatacagcttcagcagcagctcactttgcttttcagtttagatgagaaaaaacagcaaaatagtccatcaaggacaaattcttgccaatggatttgcttttgcaaggaagttcacctttgttcctcaagcatcatctttaagtgtgaatgcctgatgggaggtccaggtt

SEQ ID NO: 86455 - DNA, 159 bp, Homo sapiens
gatctaaatataagagcaaaaaccataaagcatctaaaagtaattgaaggagaaaatcttagtgccttttgttctggccaagattttttaaagaggacatagaagtcaggaactataaaagaaacaattttaaattttactttatcaaaattaaaagcc

SEQ ID NO: 86456 - DNA, 552 bp, Homo sapiens
ccatgtggcagcatgcagtttgaggcctctgtcctgcatatggaccttggctgtgggaaggtgttcctgctggggcctcatttgaccatttcctggtcattctgtctggctgtctcacctgctggtgtggtaggccatgagagtccagggaagcttctctgctgtgggcctcagctgggggatgggaacatggggcggggggttaatgtctctccctagaactctgcctttgcttggctggggcctctcctcacaccttccagggacacttccagggtttcccggatttggtgggtggagagaatggtgcctggtggggtctaggatcctgagtatttgttgaaattgtgtttcctgagggccttctcttcagcccttgttccttccatctctgtggatttaggatccacttgaaagctgagttccttggctgggcacggtggctcatgcctgtaatcacagcactacaggaggccaaggtggcaggatcacttgagcccaggagttagagacaagcctgggcaacatagatcctgtctctacaaaaaatta

SEQ ID NO: 86457 - DNA, 1043 bp, Homo sapiens
atagcaaaaactatctttaagaatggaaaataaaatgaatgttttagataaaatattgcaagccattatgtgtagagttaatgtatggaaatttgcatttgtttttctgaatcatggtgtacattaatcactcattgaattctatttctaagcaaataagagaatcaaacatttctaaaaggaacatatgtcttgctattaataacaaggagacaggtaaaatagtaaggtaatataagcaaaaaaaaaaatgtaatgaatttagctatcctaaattggaatttttacagattgcatgcatacttagaattttaaatttttaaaagatttacaattgagtatggtacccacagagagtgagtaccaagggaaggaagacctaatacaagtgatgttgcctgataaatcacatcttgccaaaaaaaatatattttagtaaatacagttctttaggaagaaaaatgttgccctttcacactcacagtgtaaatacattcataatattccttcaatcatctaaattaccgccaggtcatgaaaggacgcgatcaatgatgacctattgcactcacaggtaacattgactcaaattttggcaatattgctatattatctagataattcttgtgatgtttttatgtcactatcaacattaaaaatattttgttaaacaactatgaaactttcaaaagtttgcatataactgtatgggcactctcatttcactgcatacatacaatactttgtatacacatacttctcgtgtggatattttataattttatttaatctaacatttaacttttaggtttttgtggtactcatctgaaaggttggcatttgttttctttttatgttatatatgtattttagatgaatcaataatgtgtattcctagaaattttttctaggcataaatagatcattttatgttggcatttaagagatatcatttttgttttattgttctgtgtaaaccatattcattgtacactgtgtgtatatttttgtttaaataaatgatttttattttttaaaaaact

SEQ ID NO: 86458 - DNA, 829 bp, Homo sapiens
atttaaaagtctccacccctaagagaacatgggccatatgtaacacgttttttcagtacacatgcgttaggaccaccttcataaatattcatagcttctcctgtaactgttgagtatgtatacttggccaacccattcagcataaatccctgttctaccctcctgtccctcaaagtgcctgtcttttggttgaccctttataagaaatagtttcctctccagagttacagatcctatgatttttttgttgacacttctaattatccagcctatataattttcctatacatataatgctgtagttttaaatgacaaaacattctggaatcattgtcactaatccagtaattaggaacagtctctactgtcaacaactgaactgtgtttgaagtacaaattccccaaaatcctaaatcttaacttcctcaagtggatcatcttaaacaaaaattattcttaaagacaatagtgctcattaggagaataaaatgggcttggccctccctcgagaaagtatcagcaatccaaataacctctcaccatatccattcaccaatcagagtgggaaatgactctatcatcaaagcacaaaaaaagattttgcacttctgaacctttccgattggtgctgaacctacatacacggatgaatgggtggatgtgggatggatgaccagttatgtataattgatgagaaatttgtacatgactgccaaccttgaacaaaattttcagcgttcaggaaatttttttttgagacagagtttcactcgttacccaggctggagtgcaatggcgcgatctcggctcactgcaacctctgcctccc

SEQ ID NO: 86459 - DNA, 482 bp, Homo sapiens
aaagaattaaaggaatgtatgagcataatgtctcacgaaaaagagaatatcaataaaaaggcaaaatataaaaaagaactgaatagaaattcttgagttgaaaagtacaataaaggaaatggaaaattcattgaagggtctcaacaacatatgtgagccagcaaagaatcaacaaaagtgaacatatgtcagttgaaattgtctggtgggaggtacagaaaaaaaagaatgaagaaaaatgaaaagaccttttgagagctgtgaaaccccatcaattttaccaaaatatgcataatagaaatagaaatttcagaagggaaacagagagcaaacaagggacacaaagaatatttaaagaaataatgaccaaaaacatcccaactttgatgaaaaatattaatctatccattcaatgaattcaaattggatgaattcaaatccatacctagacacatcatagtcaaactgatgaaagacaaaga

SEQ ID NO: 86460 - DNA, 434 bp, Homo sapiens
agactgcagcagatgaactggcaaaagtgagccccctaggtcaaacgtcttgaatttttctgattttgatgaaacgctattgcctgtataattacacaagaaatgtttctgtcacttgtttgtgtgaagactgataataataccttcctttttgagtccccctgtgccagggatgatgcagagtacttttacaagcactcttgcctttatcaacccaaggagaaaggccgagttagcccatttatgaagtgaaaaaatgggggctctgtgaggttgggtagcttgtgtatgtgcctgtggttcatgaggccaagacagctgaggcgtgcctggccgtgtggctgtttctcatgatgccgcagccgttcttcagcagataccttatgctcagtaaccacacagaatttgaggtggccataatttttattcttcct

SEQ ID NO: 86461 - DNA, 448 bp, Homo sapiens
ggagttcgagatcaactggccaatatggtgaaaccccatctctactaaaaatacaaaaattagctgggcatggcggtgtgcgcctgtagtccgtgctactcgggaggctgaggcaggagaatcacttgaacccaggtggcggaggtttcagtgagctaagattgcgccattgcactccagcctgggcaacagagcaagattccgtctccgcctccaccccctgcaaaaaacaaaaacaaaaacaaaaacaaaaaagatcatacaaatgaatacaataaacaaagatgttggagactttactgttttgggggagttttcagtgccttggtaacatgcatttctttccagacaacaatccctattaagtatgtgtcttattcccagtttattaatgttgtccccatggacacctctatgaggcagctttctgttaggccagattgtcatc

SEQ ID NO: 86462 - DNA, 135 bp, Homo sapiens
cttgttgctatttgaaatttttcattaactagattttgtattttgagaccttaagagttaaataaaaggagctaagtttccagctttatgcaactgcttatttaacagttctccacacgtgactctggcatggtg

SEQ ID NO: 86463 - DNA, 463 bp, Homo sapiens
tggttctgggcccagacagagcctctcagcagggccggtcggggcatcagtgtttctcgttcctctctggggcctcctctgacctcctcccctgaatgctccattgcctttgcattgccatgactcccttgaactcaactcttgacttgggggtgtgaagtcagtgtttcctgaagccggctccccaccaacctgctaaaatggtgcagctagacttccccagaggcaaaatccttaggattcagagtcgtttttaaatgtattactttactttctcaatttttgtgtaaaaaggtattgattttgtgatcaaaaatagaaagggtagggccaggtgtggtggctcatgcctgtaatcccagcactttgggaggccgaggtgggtggatcacctgaggtcaggagtttgagaccagccttgccaacatggtgaaactgtgtccctaataaaaatacaaaaatt

SEQ ID NO: 86464 - DNA, 402 bp, Homo sapiens
aaccttccatgaccaactctttcttctcttaattcgtgcattctctctcagcaattatatattgagcatctccttctccagcttctacttatataagtgttattcactatgtgccaaatgtttctttaagcttttcatatgtattatctcatttaatccttaccacaactctagaagggaggcttttctcattttataaacttgaaaatcaaggctcagagaggttaaataacttgtctaaggttacacaattactaagtcaagatctaaacttccttgagacatttttgctaaaatctgaaagatgaatagaagtttttctccactcccatatgaaaaaaagagaccaagggcatatgttaggaggaactccttgaggctgaaacactgagaataagggaa

SEQ ID NO: 86465 - DNA, 1320 bp, Homo sapiens
  misc_feature (1)..(1): n is a, c, g, or t
  misc_feature (3)..(4): n is a, c, g, or t
  misc_feature (6)..(7): n is a, c, g, or t
  misc_feature (10)..(14): n is a, c, g, or t
  misc_feature (441)..(441): n is a, c, g, or t
  misc_feature (1313)..(1314): n is a, c, g, or t
  misc_feature (1319)..(1319): n is a, c, g, or t
nanncnncannnnnctcctatgctgaatgcttccttccctcgaacatcagactctgggttcttcagttttgggactcagactgctttcagcttgcagacagcctactgtggaaccttgtgatcgtgatctatttggaggtactaagaaaaataagacatcagtctgaaaagagctcctatcaaaacaccataaattctgctaaaaggcaagcaaggagaaacatcaaatttatggtgaagcttggggggaagaatgatgaaatcattgatactctatgaaaagtttatagggacaatggccccaaagaaatcagcagtttacaaatggataactctttttaggaagggactagaaaactgttgaaaatgaagcctgaagcagcagaccatccatgttaattttcaaggaaaaaattaatcttgctcattccctaaataaanaggactgataattgacagcaaagacaatagccaacaccatagccaactcaatggttcgacttacacaattctgactgaaaagttaaagttgagcatttccactcaaaggtacaaaaatttatgtgtccagatcagctgcagacaagagcagagctttcagtggaaatttcaaacaagtagaattgagatcctaaagcatttcttcaaagagttgcaacagaaggtgaaacatggctttaccagtaccatcctgaagacaaagcacaatcaaagcaatggctaccaagaggggcaagtggtccagtcaaagtaaaagcagactggtcaagagcaaaggtcatggcaacagttttttggaatgctcaaggtatttttcttgttgactttctggaaggccaaagaatgacatctgcttattatgagagtgttttgagaaagttagccaatgctttggcagaaaaatgcccaggaaagattcactagaaagtccttctccaccacgacaatgctcctgctcatttctctcatcaaacaaaggcaatcttaagttcctatgggaaatcattaggcatccaccttaccatcctgcttcggttccttctgacttgcttttgtttcctaatcttaaaaaatatttcaagggcactcatttttcttcagttaataatgtgaaaaagattacattagcatggttaaattccctggagcctcagttctttggggatagacaaaatggctggtatcatgtcttacaaaagtatcttaatcttgaatgagtttatgttttaaaaaaaaagtatattttttaaatttttatcttttatttccatttttcataaaatgtttgaaattccctcatgtacaatttaaannccaant

SEQ ID NO: 86466 - DNA, 609 bp, Homo sapiens
gctcaagagcgtgctttaagttcaataaaataatatcattgttcatattaatgttattaaggtaaacttattcattttgtgaccctgcatttccttcaatatttgttctaaaactgttttgtatgagagtataagcataaccataaaaacctggttgggtaatataataaaaataatgtggcaacaataagagggaacaagattttgacgttcctttaaaagtttctgtatattttacttaagtataaagaaaattgttatgaatgataggaggaaggatttttgtccacctattaaaaaaaaactgctgtgaagcataggaagtttcaagcataaaatcaagcagtagataaatgttctttgaacttatgaatttcaaattataaatttcaaccatgctattaaagatattcaacacagtggatattccttttgctttcaaatttatctaaatatatgagacaggcaaaagctcaatgcaaaaggcatgactttataaaatggatccattttgccaatagctcaaagaattatggtaatattgtgggaactgagtgaaaattcagagtaggttttgaaatgtgatacaagtagaattttaaaaagaaa

SEQ ID NO: 86467 - DNA, 179 bp, Homo sapiens
ctcacctcagcttcctgagtagctgagatgacaagtgtgcatcacgacgcccagctaagttttaaaattttttgtagagacagagtcttgccatgttgttcgagctggtcttgaactcctgggcagaagcaattatctcgccttggcctcccaaagtgctgggattatagctatgagcc

SEQ ID NO: 86468 - DNA, 276 bp, Homo sapiens
agccgaaggcagactctgttcagcttctcttctaagggcttccacctaatagtgcaaactgctctttcctcacatggtgagacctgggcttgctattccatgtttcataactaaacaatatgtggctcagatagaaatggatatactgggagtaaacctgcagagaaagggaagaggattatcaaaacaaagatccagttagtggatatggacatgtggatgagatgttctatttctttttttttttttttttttttgagactgagttttgctctt

SEQ ID NO: 86469 - DNA, 784 bp, Homo sapiens
gttgagcagtaccccacctatatgatcatatacagtggccctagtaagaaaaaggtgtttaaagcatttttaaaattatatataaataatatacaatggcccaaaccctggctgggtttggacagagtctcactctgtcgcccaggctggagtacagtggcacgatcttggctcactgcaaactctgcttcccaggttcaaacaattctcccacctcagcttcccgagtagctgggattactgggattaccggctcgtgccaccatgccccgctaatttttgtatttttagtagagacggggtttcaccatgttggccaggctggtctcgaactcccgacctcaggtgatccacctgccttggccttccaaagtgttgagattacaggcgtgagccaccgtgcctggctggtttggggattttcatattgcatgtgacagaaaacctatctgtaactagctaaatagccctttcccctactgccccccaaaaggcggggtttattgtatcatctgattcagaaatctacgctgggcttggtagtttggtttcgggaacatctggattccaggtctcaaatgacatcatcgctattcatttttctctttctctggttctgccctccaccacgtatcagctttgttctgtgttggcctcagccccattctcaagttcacattcagcatgaaaaggctgatcacctcttccagtcactcaagcaaaaagccccaggtttgctgcaatgggctagaatagtttgactgtaatcacatgaccacctcta

SEQ ID NO: 86470 - DNA, 370 bp, Homo sapiens
catataacttgcttttgggttcatgattgcttttcacctgtactttccatctgtcatgaacagggatccctgagatgttcatactctgcattctcatgtgcatgatccttagatttaaaaagggtgagtgggagaaagttgctttatagaaatataagttcacagcattcatgttttgtgtgttccactgcaaatattgcatgctgcatacttgtatgctgcatacttgtatttctctgaaaatgaagaacataggctcataagtacacaaaaaattagtttcgtttttgccaatagttggaacagatgaaggaatgttagatgtaataccttttctattttttctaaaatgaattctgtagtatttttc

SEQ ID NO: 86471 - DNA, 96 bp, Homo sapiens
gatctacataaggaaaggaagaatattaaagaagaaataaatgaagacgagataaaatcttttttcttaattatcaaataaaagtttgttaaaagt

SEQ ID NO: 86472 - DNA, 94 bp, Homo sapiens
gtgaagagaagcatagatgctgtggaaaaacagatgaaaggccccgacccatcacagtagtagtggtgagggatgcttcacaaaggagaagatc

SEQ ID NO: 86473 - DNA, 744 bp, Homo sapiens
ctatttctttgtcaagcaggaggagatagcttcagggtcacaagaaaattttgcagaaggaatgaatgtctttatgcctttaaggacattgcaatcaaactgctgacgcccagaagtctggttgttcaagatgttatctgagactgaagaaacacagatttttcccttggttcctggcaactccccctctcttattctctagctgcataaaaactccctgctgatttttgttgttattgttgttaagatggatttgagagttcttgccctcctgccctctcactttggccaaatccaatgaacctttcacatctccaaccacctgtgtgtcggtatttggtgtcaactgcacatcaggtacataagcctcaacttgggcttctataacaaagtcacaaactattactgcatttattcatcatcttctcccataatctacctttccatcatccatgaagactagaactcaatagatagtccaataaggtccagaggttctgatttggttccctgtcttcttgcttattctaatagatgatgcaactagtgcacaaagctaaatgtcttctttaagcttgcataaaatgcgtggctcagtgattggcatgctgttctccgcgcccccccttacatccacaaccaattctaaccagttaattcttcattttattttaatgacctatcccagataaaaagctaaagacaccccattcagcaccatataagaattaaaatgaaaaggaa

SEQ ID NO: 86474 - DNA, 153 bp, Homo sapiens
ggagttgaaggctgcagtgagttacgatcaagccattgcatgccagcctggaaatagtggaatgagcaagaccccatctctacaaaaaatagaaaattagctgggcttgttgatgcacacctgcagtcacaactactcgagaggctgagggag

SEQ ID NO: 86475 - DNA, 642 bp, Homo sapiens
aggctgaacagagaattaagcctggagtaaaataagacagccccagtgtcatgatatatggcagctgaccttcagtgtcagtgcctgggagtcattagggagaagtgagaactgtgggcatctaaagggcacatatcatttgatgacaccaaatcttcctatttttccaaagctagaaatctggatttttatatgaagtctcctgaattttatcctttggctacttattcaaatattgtatcagtgcgtgggccaaacaacccatgtttgtgagtctacaagcctctagactgcctgatttctaagccctctgaatgtagaaggggtgggcaagcaagtagaggaagtaagttacagcatggcagtggggatgggagagacagaaaaacattttgaattattacacaacgtcaaagtgcagttgtttagaatcacttagtagaggggaaaacatctctatgttcacattaaagacactatgttctctaatttgactatagtataataattaatgacacatgtcaactgatatgtcaggttctacgttgattttaacagtaaccttgaaagggaagaattcttgtcctgcttgtagataaggaaactgggcctcaagtttagtaagtacaaatcccctattta

SEQ ID NO: 86476 - DNA, 419 bp, Homo sapiens
tagagagagccgccccgccatttctcaggcacatactgtgagcccagcaaggccatggatgttacatctcattctgacagcgggcctgccatgcaggtggaagtgtcctgtttcacagagggctcacattcaccttgagctcacagctcacaaatggctgatgctggaagtccaggggggcctggggaagcaaatgaggcctccccactcgtacctggatctggcagcaactgtgcctggggactgctccaggccaaatggtagagtcattggtgtttgtgctcactgcctctacccccagcaaccccctctacctctcttctctctagctttgcccctccatcccttgcccagttctcttggaagaaggaatgagactggataaattcgattcaggacagagctgagcttacctggag

SEQ ID NO: 86477 - DNA, 485 bp, Homo sapiens
aacggcagtctcagtggttagcagcacaaggtagggtccttcccaggctggctcaagtttttcttctttctgacctttgatgaggatgtggtttccaggctggtgctggtgtactggaaattctaggggtggtacctgtgctaaaagacttagttctgagggaagggaaagtggaagataaaccaagtatataatttctgagaaactgatcttttgttttaaatgtggggacatcagcagtggaatgtaagtaaggcaacctataggtatttttttttttttttttttactttatagttcctagtgtcttcttgttgagaaatttccttttttaaaaatgtttacttagttgtttctgagggaccctttggggcttcttattttgttaggactttgcatatcttggggcttgaggccccatggtgatgcctcctgccccatccctacttagtgttgcctaggggacctggtggccctgcccctct

SEQ ID NO: 86478 - DNA, 758 bp, Homo sapiens
ccctgatgtgggcctattgattgttgatagaatcaccaccacacaaatcatgacaaacaaaaatattttggaattgccaaacatctcctgtggggcaaaattacactcccaccccgcctcctgcaaccctccatctcccattgataatcactgtcttagggcactgcagatactgagtgattggtgtgatgggatgccatacacacagaatggggagtccaggacttaggacactgaccttgggcaattcgcttaaactctatgggtttcggtttcgagtagaatgaagtagatatgcagaaaaatgagcaataaaggggaaaagttgccaggatagaaatacataaggaggccgctaggacaacgtaggaggtcaggaagctttcatgttgatagtgttgctttgtggagttccccagtcattgcgaacttcatatcttatttatctctaatctggtatttggcacatagtggatgcatagttccagatatttcagtcatggtgtctgcactcaagaccactttttaactaaaagaattcacccatagcccctgctgaatgcatagcctctctgaatgtgaaagtccctccacctctgccatagttgactggactaaaggtggtgcctgtgacgagggcaaccactctactggatggcagcaactgtgagaaggggtgagtggggccaatcaggttatctcccttaggaggatgaacttcaaaaacacaacccagggagagccagcagtagtaggag

SEQ ID NO: 86479 - DNA, 2666 bp, Homo sapiens
agaccactttcttcattcttttctaaactgctgcagattgccgtgaactctatcaatagtctcttttccgcaggcaaagtggcattttctaaacatgtttgcttactgccaggtggtttgaaatctatgatttactgcagtagtatgtgcttaaaacaactgttgaggtcttttaagcaggaaagttcaaaaggaagtgtcctgataatggtactggtttttctacaaatataagtagtcattagaagtttgcaaccaccaccaagtctgagagaactctgggatattctgtgggttttggcatattagatagagaaaatgacagatctagatgaagggagcttttggatgtgtgcctttaaaaactgattatgtataaatactgatatttcacatacggagatatttgaagacccaagtctgcctttcacagagccctccattccaagtttagtttttgtcaaaatatgaatcattttatttgactgtactatcagtacacaaatgcatgagtatgtttatacagtgttagactgatgtgaatttgcatttgttacattacattgccagcgcatatcatttagcaagttggcattaacatttatgctttaattaaatgccagtatacctatgtgtgcagcagtaaaaaattagtgagaaaaagcaactttttgtcactcttaggaaatattttgtcttattagtgttcttggcacatgtatattactaaagtagataattccaatgagaaatactaccagattattgttataaaattaatttacaatgtccctgatattgagctaactcttaaaaaaaccaaacaaaactcgtatctgagtgtaactttgccaatattttaaaagccaaaatattctctggacaacaaatttgtattgctcagggacagtttaccttgcctggtaaaccttcccaaacagaaatatagctatactatctttggttttgtttttttgttttttttgtttgtttgtattagatggaatttcactcttgtcgcccaggctggagtgtagtggcgcagtctcagctcactgcaacctccacctcccgggttcaagtgattctcctgtctcagctccctgagtaactggaattacaggtgcacgccaccacgcccggctaatttttgtgtttttagcagagacagggtttcaccacgttggccagggtggtcttggactcctgacctcaggtcatcctcctgcctcggcctcccaaagtgctgagactacaggtgtgagccaccgtgctcagccactagctttggttttttaaacatagattatattcctcaagatgaagggcttaacatatccacagcttcctcagtttgctaactccccatgcatctttgtgaaggacagtatctagtttatctgtaggtcagtgttccttgtgctgtcatttcccttatatctggaatttgtcagcattcctgaaaacctacacgtgtatatcagtaaccaaaatgctatgccttttttgcacctttgtacagcagccaaatcatgaactcaaaatgtatttgatcacagttctataatgtttttacctacctattatggaataatcagtttttacagagattattaatatggtagaaccctgttatgtaattccaaaacttaagaaccatatttacattgcttaacacagaattttacatctaagcaaggactggctttagaagcagtgtagttctacctctcattttacagatgagaaaaccgaagcccagaaaaactctcatttgctcaaagtcacagagaaaattagtggcaaagccaaaaagattcagatcttctgactcgaagttgagagttctttatactctattatgctgcctctccagtgtaatatttgcctttctgtaaatgggattaaatatgatttgtaaataaaggacatctgacctccttttttggtacattaaggcactttataaatggacttttattgtctcatttttcgtatataattatttccatcatattctttatggaagatgcaattaattttaacttttttactcttataaaaccagttcctgacattttaaaaaacaatatctgtaaaatggatccttttatgagtgaatttttctgctaattgcccaaggctaaatccaatttaaggattgcttagtttctttattttgtttatggtctctgaactggtatttttttataaaccaggctaattcacaggtcataccatttcattcttgtcgtgttggcttccagtcactggaaaagcttttgcattttaaagatttttagagccatgcaaaactgggcattaaatgttgcataaagcaaatcttttaagtaaggtaaaatgttgaagtcttaaccagaattcctacaactaattactaaaactgctatttctaactcttcatgaaagcattacctttggaaagttaaactttttttttcctttcatcaccgtctttgaaacaaattattttccaattcataagaactttggtaaaaaaaaaaataaaaggaaattatatgtttttctttggacattcattggaaggcttgttgaagacatgatcccccagaagccttagtgacccagatctcaaccagagactcaagatagcctcaaatacagtgaaagattatgtatccaaa

SEQ ID NO: 86480 - DNA, 1895 bp, Homo sapiens
tatccggtatgcatatttattcaatacctatatggctcaccatgctgattctctgctttcactatttcgtatgttttttgccaatattttaaaagccaaaatattctctggacaacaaatttgtattgctcagggacagtttaccttgcctggtaaaccttcccaaacagaaatatagctatactatctttggttttgtttttttgttttttttgtttgtttgtattagatggaatttcactcttgtcgcccaggctggagtgtagtggcgcagtctcagctcactgcaacctccacctcccgggttcaagtgattctcctgtctcagctccctgagtaactggaattacaggtgcacgccaccacgcccggctaatttttgtgtttttagcagagacagggtttcaccacgttggccagggtggtcttggactcctgacctcaggtcatcctcctgcctcggcctcccaaagtgctgagactacaggtgtgagccaccgtgctcagccactagctttggttttttaaacatagattatattcctcaagatgaagggcttaacatatccacagcttcctcagtttgctaactccccatgcatctttgtgaaggacagtatctagtttatctgtaggtcagtgttccttgtgctgtcatttcccttatatctggaatttgtcagcattcctgaaaacctacacgtgtatatcagtaaccaaaatgctatgccttttttgcacctttgtacagcagccaaatcatgaactcaaaatgtatttgatcacagttctataatgtttttacctacctattatggaataatcagtttttacagagattattaatatggtagaaccctgttatgtaattccaaaacttaagaaccatatttacattgcttaacacagaattttacatctaagcaaggactggctttagaagcagtgtagttctacctctcattttacagatgagaaaaccgaagcccagaaaaactctcatttgctcaaagtcacagagaaaattagtggcaaagccaaaaagattcagatcttctgactcgaagttgagagttctttatactctattatgctgcctctccagtgtaatatttgcctttctgtaaatgggattaaatatgatttgtaaataaaggacatctgacctccttttttggtacattaaggcactttataaatggacttttattgtctcatttttcgtatataattatttccatcatattctttatggaagatgcaattaattttaacttttttactcttataaaaccagttcctgacattttaaaaaacaatatctgtaaaatggatccttttatgagtgaatttttctgctaattgcccaaggctaaatccaatttaaggattgcttagtttctttattttgtttatggtctctgaactggtatttttttataaaccaggctaattcacaggtcataccatttcattcttgtcgtgttggcttccagtcactggaaaagcttttgcattttaaagatttttagagccatgcaaaactgggcattaaatgttgcataaagcaaatcttttaagtaaggtaaaatgttgaagtcttaaccagaattcctacaactaattactaaaactgctatttctaactcttcatgaaagcattacctttggaaagttaaactttttttttcctttcatcaccgtctttgaaacaaattattttccaattcataagaactttggtaaaaaaaaaaataaaaggaaattatatgtttttctttggacattcattggaaggcttgttgaagacatgatcccccagaagccttagtgacccagatctcaaccagagactcaagatagcctcaaatacagtgaaagattatgtatccaaa

SEQ ID NO: 86481 - DNA, 419 bp, Homo sapiens
ggccctgcctaagctatctctacctccccctacagcttcatctctgtttaccaggttctacccattctggcattcttatactttcttgatctaggacagctctttctcacccatgatctttgcctatgctactctccttttagtccttacctagctaacttctccttctggtcttcagttaaatctaactttcacagggaagtattccttgaccccataaatataaggatgtctccactgttatcctccctttaaaaagcactctatggctgggtgcagtggctcacaactgtaatcccaatcacttgaggtcaggagttccagaccaccctggccaacatggtgaaaccccatctctactaaaaatacaaaaattagccaggcattatggcatgcacctatagtcccagctacttggg

SEQ ID NO: 86482 - DNA, 554 bp, Homo sapiens
cagatgcaaaagacgaaagaaagctgtgatgtaactgatgggtccctgagtgtgaaagtgtgggctgcagagggagcctactgttcacacagggagttcaggaagaacaggaagcgtgcaggttaagtatggagaaagctgcttcacacgcggatacacagagatataatttattggaatggatagcagagtcacaaatatcacattaccttatattatcaaattgattttatattactatcgcaatcatcaattttctattgtcagttgtaaaatagttacagtcatccctcggtctacatgggggattggttccaggtcccccgtgtgctcccaaatcctcacacactcaagtcctacagaacccacatagtctgccctccatttgcctgggtttcacatcctggggggctgtatttttgatccgagtttggttgaaaaataatccatctataagtggacttgcacagttcaaacccttgttcaggggtcaactgtaatgaaataaaagaggattaatgtaagatgatataaaaacttttcatattgtattg

SEQ ID NO: 86483 - DNA, 644 bp, Homo sapiens
ggaagactagatttctgtacctttgtttcacatcagatcactttgtaaaacgacagaggaaaaaaagagaaattatatcatcttatatttgcaaatattttcatgttatctcatttaataaaaaaatcagtttgcagatgcacaaattgaagaagcaccagagattaattacgtctgaggctggaagctgggaaacccaataaatgaactcctttagtttattacaacaagaagacgttgtgatacaagagattcctttcttcttgtgacaaaacatctttcaaaacttaccttgtcaagtcaaaatttgttttagtacctgtttaaccattagaaatatttcatgtcaaggaggaaaacattagggaaaacaaaaatgatataaagccatatgaggttatattgaaatgtattgagcttatattgaaatttattgttccaattcacaggttacatgaaaaaaaatttactaagcttaactacatgtcacacattgtacatggaaacaagaacattaagaagtccactgacagtatcagtactgttttgcaaatactcagcatactttggatccatttcatgcaggattgtgttgttttaactgttgttgaggaaactaataaataattaaattgtaaaaagtc

SEQ ID NO: 86484 - DNA, 2055 bp, Homo sapiens
acagaaaggagcagcaactggaaaacaagcattgcattgcatcaggatgtctatgaaatggacttcagctcttctgctgatacagctgagctgttactttagctctgggagttgtggaaaggtgctggtgtggcccacagaattcagccactggatgaatataaagacaatcctggatgaacttgtccagagaggtcatgaggtgactgtattggcatcttcagcttccatttctttcgatcccaacagcccatctactcttaaatttgaagtttatcctgtatctttaactaaaactgagtttgaggatattatcaagcagctggttaagagatgggcagaacttcctaatgacatacttagaaagttctgtaaggatatagtttcaaataagaaacttatgaagaaactacaggagtcaagatttgatgttgttcttgcagatgctgttttcccctttggtgagctgctggccgagttacttaaaataccctttgtctacagcctccgcttctctcctggctacgcaattgaaaagcatagtggaggacttctgttccctccttcctatgtgcctgttgttatgtcagaactaagtgaccaaatgactttcatagagagggtaaaaaatatgatctatgtgctttattttgaattttggttccaaatatttgacatgaagaagtgggatcagttctacagtgaagttctaggaagacccactacgttatctgagacaatggcaaaagctgacatatggcttattcgaaactactgggattttcaatttcctcacccactcttaccaaatgttgagttcgttggaggactccactgcaaacctgccaaacccctaccgaaggaaatggaagagtttgtccagagctctggagaaaatggtgttgtggtgttttctctggggtcgatggtcagtaacacgtcagaagaaagggccaatgtaattgcatcagcccttgccaagatcccacaaaaggttctgtggagatttgatgggaataaaccagatactttaggactcaatactcggctgtacaagtggataccccagaatgatcttcttggtcacccaaaaaccagagcttttataactcatggtggagccaatggcatctatgaggcaatctaccatggaatccctatggtgggcgttccattgtttgcagatcaacctgataacattgcacacatgaaggccaagggagcagctgttagtttggacttccacacaatgtcgagtacagacttactcaatgcactgaagacagtaattaatgatcctttatataaagagaatgctatgaaattatcaagaattcatcatgatcaaccagtgaagccccttgatcgagcagtcttctggattgaatttgtcatgcgccataaaggagccaagcaccttcgggttgcagcccacgacctcacctggttccagtaccactctttggatgtgactgggttcctgctggcctgtgtggcaactgtgatattcatcatcacaaaatgtctgttttgtgtctggaagtttgttagaacaggaaagaaggggaaaagagattaattacgtctgaggctggaagctgggaaacccaataaatgaactcctttagtttattacaacaagaagacgttgtgatacaagagattcctttcttcttgtgacaaaacatctttcaaaacttaccttgtcaagtcaaaatttgttttagtacctgtttaaccattagaaatatttcatgtcaaggaggaaaacattagggaaaacaaaaatgatataaagccatatgaggttatattgaaatgtattgagcttatattgaaatttattgttccaattcacaggttacatgaaaaaaaatttactaagcttaactacatgtcacacattgtacatggaaacaagaacattaagaagtccactgacagtatcagtactgttttgcaaatactcagcatactttggatccatttcatgcaggattgtgttgttttaactgttgttgaggaaactaataaataattaaattgtaaaaagtc

SEQ ID NO: 86485 - DNA, 2109 bp, Homo sapiens
acagaaaggagcagcaactggaaaacaagcattgcattgcatcaggatgtctatgaaatggacttcagctcttctgctgatacagctgagctgttactttagctctgggagttgtggaaaggtgctggtgtggcccacagaattcagccactggatgaatataaagacaatcctggatgaacttgtccagagaggtcatgaggtgactgtattggcatcttcagcttccatttctttcgatcccaacagcccatctactcttaaatttgaagtttatcctgtatctttaactaaaactgagtttgaggatattatcaagcagctggttaagagatgggcagaacttccaaaagacacattttggtcatatttttcacaagtacaagaaatcatgtggacatttaatgacatacttagaaagttctgtaaggatatagtttcaaataagaaacttatgaagaaactacaggagtcaagatttgatgttgttcttgcagatgctgttttcccctttggtgagctgctggccgagttacttaaaataccctttgtctacagcctccgcttctctcctggctacgcaattgaaaagcatagtggaggacttctgttccctccttcctatgtgcctgttgttatgtcagaactaagtgaccaaatgactttcatagagagggtaaaaaatatgatctatgtgctttattttgaattttggttccaaatatttgacatgaagaagtgggatcagttctacagtgaagttctaggaagacccactacgttatctgagacaatggcaaaagctgacatatggcttattcgaaactactgggattttcaatttcctcacccactcttaccaaatgttgagttcgttggaggactccactgcaaacctgccaaacccctaccgaaggaaatggaagagtttgtccagagctctggagaaaatggtgttgtggtgttttctctggggtcgatggtcagtaacacgtcagaagaaagggccaatgtaattgcatcagcccttgccaagatcccacaaaaggttctgtggagatttgatgggaataaaccagatactttaggactcaatactcggctgtacaagtggataccccagaatgatcttcttggtcacccaaaaaccagagcttttataactcatggtggagccaatggcatctatgaggcaatctaccatggaatccctatggtgggcgttccattgtttgcagatcaacctgataacattgcacacatgaaggccaagggagcagctgttagtttggacttccacacaatgtcgagtacagacttactcaatgcactgaagacagtaattaatgatcctttatataaagagaatgctatgaaattatcaagaattcatcatgatcaaccagtgaagccccttgatcgagcagtcttctggattgaatttgtcatgcgccataaaggagccaagcaccttcgggttgcagcccacgacctcacctggttccagtaccactctttggatgtgactgggttcctgctggcctgtgtggcaactgtgatattcatcatcacaaaatgtctgttttgtgtctggaagtttgttagaacaggaaagaaggggaaaagagattaattacgtctgaggctggaagctgggaaacccaataaatgaactcctttagtttattacaacaagaagacgttgtgatacaagagattcctttcttcttgtgacaaaacatctttcaaaacttaccttgtcaagtcaaaatttgttttagtacctgtttaaccattagaaatatttcatgtcaaggaggaaaacattagggaaaacaaaaatgatataaagccatatgaggttatattgaaatgtattgagcttatattgaaatttattgttccaattcacaggttacatgaaaaaaaatttactaagcttaactacatgtcacacattgtacatggaaacaagaacattaagaagtccactgacagtatcagtactgttttgcaaatactcagcatactttggatccatttcatgcaggattgtgttgttttaactgttgttgaggaaactaataaataattaaattgtaaaaagtc

SEQ ID NO: 86486 - DNA, 535 bp, Homo sapiens
aatgttttcattaatccaattccaaaaagcagaattatttaatttcctctctgtgagtctaatttatatctcttctccatctagaaaggactttgagacagctctaaaaatgagtatcttggaaaatatcccaaatttaggaataataacgtattagagaaaccaatagggccgaagacaaatgggagaaatattttctcaaagtaaacaacacgtcgcttgctattttatgtctaatgcaagcaaccacctcccagcagagtagccagcagccaggggcaagtgcattggcaaccaagggcctatgtcagggctcagatgcctctgattcagccctcaatttacagaaagttcacagatccccttattttagccacaaatgcactcaactcctcactgatgctttctggaaactgccagcttctcagtgcatggctctaggttggctgcctcatattgcgctagttttcaaggcagcctgtttggtggtgatgtcctgggtcagctgtgtgaaagggacttggctattggatat

SEQ ID NO: 86487 - DNA, 268 bp, Homo sapiens
ggcatcatggggccactggagtggagagagtttcagagggttctggctggggtcggtcccctgaggcatggctctgcagctgatatgcttgcatgcattgagtgtggagaacttagtgtggagaacttctgtggttttggcaaatgcataatgtcatgtatccaccaccacagaatcatgcagaatagtttcactgcctttaaaaaaatcccaggctgggcgcagtggctcatgcttgtgatcccagcactttgtgaggccagggcag

SEQ ID NO: 86488 - DNA, 392 bp, Homo sapiens
cttgtccccacccagtttcctgctctagacaagttgtacctctgggctctttctcctctacttttgcccctctgtaactgtcagtgtgtcatttctgcctcactctggacaagcctgccatctctgcaggtgtgatttattgccagatggttattttgttagcagtggttgagtcttatgaaatgtaatcccaactgatcttttttccctctgtgtgaagtgtgtggcgtgcacagtttgtgccatttgtataccctggtgctgaggtgtggtggtttatgggggagctccgtttctggccgccatgtggccatgggagattgacaacaacgctcaccctcagcacttcagagacagccatgaatgttttcagataatctgttcagaaatgg

SEQ ID NO: 86489 - DNA, 807 bp, Homo sapiens
ctttattgcgaggctgagtatgatgggctccatccagcacgaacacaaagccctgtgagaggaggcagagtgagatgaagtcgaactgtgggatatgaaaggcattttgaaggagtaggcatcaggttgggttttaaaggaaatctactcaggagcttgggaggattgcttgagaccaggagttcaagaccagcctgggctacagagcaagaccccatctttttgaaacttcctgcaactcgcatctggaaaagtgctgttatttgaaagggtgccgacattgtgaaaaacacggagtattgatctctgaagctgagatttttgtcctaaagaatactcaagatgtgtccctggctgggcacagcagctcgtgcctgtaatcccagcactttgggaggctgaggcaggaggatcgcttgaggccaggagttcaagaccagcctattgtgaatagtaccactataaatagagaaagcgtgccgctccaagtgtcgagggttagaaatgagaattcgaagtcttgtgtcctggaaagttttgataagcaaatacggctgagctcccgcgctctcttcattggctgcttgttcaccgccagattttgacacaaataatcagattgaaaatcagggaggggaacagaagaggaaaaacacacagagagacagagcaaaaaggagaagtatctatttgtgcaaagagtcacacagttgacagagtggaggccagtcccgagagaggctttgcagttcccacctcgggaagctccggcagaacccaggcgagggacagctccggacaggtgag

SEQ ID NO: 86490 - DNA, 222 bp, Homo sapiens
  misc_feature (215)..(215): n is a, c, g, or t
  misc_feature (220)..(222): n is a, c, g, or t
tgctaagtatcttattttgatgtcttgccaattccctttaattatacattttagtcacatgaacctgtctgtggatcctgacacacaccactgggtttcataactttgtgtcattccataggctggactccatttctttcctgcctcgtgaactcctagttgttaaaacgcggtacaaacttcctcagtttttttgcctgcccactgcccacacngattnnn

SEQ ID NO: 86491 - DNA, 685 bp, Homo sapiens
gatctatctgagaacaaagaagtcgacagaataacattgatgactttttaaataattaatttatttgaagaatgcttgcatacaaaaagcttcctgcaggaattttaaacaagctgtccttggttatcccaggcaatgtcagttgatttaattaagtttacatgcaaaagagaatacaattgtaacattaattggaacattaagttggcttataagcagtatttccactgctcctacaattgattttagttatttgataatttatttaatatttgtatttagtgtggtaaactcctgtagttcataatattttcaagagtgtcatttgtatttttgttagttcttaatgaataatggaaaagttatcttataatttcattggagccaaagattttaaaataaaaataaaaacaaacacacaaataaggcaccttgtgtttgtttattttctgtcctctgatcatcacccagttaatgagcaaacaaggtaggtggcacccatgagcctgctgtgacatttaccacggggcacattctcctaagagtaactgcaaggcaatgtgtataatgataaaatgatcttacttgatttcttttaatgaacattatatcccagatgaatgtcctgttcccaactctttgtggaaataacaaaccctttctctaagttatgtgaagattttag

SEQ ID NO: 86492 - DNA, 420 bp, Homo sapiens
gtgcaatggatactactgagctgctgggtggatttgagcaggttgatcttatacgaccttggaggaggctgctagagaaggtggagggaactgtaagggcactgttaagggatagcctccttatcagtgctgatgatgcagaagtagtgctgcgagcctggagtcattttcttctgacatataagcctaagtgtcttggagaaggtggtaaagctatcacgatggagattgtcaacaaactagaagcagtgttattgcttatgcagcgactcaacaataaaatcaactcatactgcaaggcagagtttgccaaacttgttgaagagttccgaagctttggtgtgaagcttacgcagttggccagtggccatagccatggcacatttgaatgggttgacagcatgttggttcaggccctga

SEQ ID NO: 86493 - DNA, 1574 bp, Homo sapiens
cccctcatagctcactccccgtcaaagctgaggaccatcgttgtcaaagcatctactccccgggaaatgagagagggaggttggtagcaacatcagagtgacagttggctgtctctcatttcttggggtcatcagtctgatttgtttagagcctgggatcatcccagttcctggaagaatctttggaaaagggtccccttgttcttgggacatgtgtcatggtcactaagccccctttccctcaggctactgttgctcagggacacaatgagataccccaaggacatctagacctgacttttcatgaactctcttgcctctgtggtccccacattggagacctccctccctcctccttcccttgtgtgaaggagacacctcccgagcaatcctaactcatccagctcacttttaacaaagcaaagagcagagggcactgaagactggatggctgtgaatggtacaccttggggttgaaaccgtgttggcaggaacctggtgataaaagctgcctacttcctgggtgtgtgaatttgcacatatcttttcccctcactggacttcagaagcctactgtgaactggggacgatgctatctactttccctcctgaagcccttctaactttcaaatgtatggtcctggggccatgagtcctgcacagaaactgcagccttgccagattgcttcccttggtgcagaaaagtgtgtgtgtgtgtgtgtgtgaaatatacgtacggttttacgtcaaaaacagtcgaatatcagctatttcatatggttcaccctaatgtacctgcctctctctttggctttaggtctgagaatgacttgtctttgtcaaggtatactattgttagaaacgcattaccaaatgcatctcttctgtcggatcagcgtattcctagattaggaattcaaattaatgaaaattcacatatgaaaggaaaatccattgctatttctggagaggacctcagtcctgggcttttccctggcattgctacctgggtgggtgctcaccactcaggtgctggtgttggaaggcaggaggaggaagctgaaatcctgccgattaaggctaattaacagggtttaggtgcctaattatcatgactcagcccgggacttatggttagccgtgcaggccaggtgagtctcttatggacttcctctcagactgctctttctcattttgtcctgatgagatattgacagtcatgtccacccgcttcctcatccatttcccgtcttgggccctggaagtacgggggcctctgtaggctgcctagggagccctggctttgctcttcgtgttgggctcactccatgatcaggagccggtgggactggtccttcctgattcttactgtctgtggttccccatcccctacggggagcctgctttgggccttgagctggatagagagaagagctttggggcccagctggttataggagctgagcttttccacacctctctttgttaacccttggaaacagacctgcctttcacctgacccatcttcctacctgtctggtctgacctgccctctttgaaagcactcatcacct

SEQ ID NO: 86494 - DNA, 411 bp, Homo sapiens
  misc_feature (1)..(1): n is a, c, g, or t
  misc_feature (152)..(152): n is a, c, g, or t
  misc_feature (233)..(233): n is a, c, g, or t
ngactctagatccctggagctggttttctcctagagcttcaaaaggaaggcagttgacacctaatttggcccagtgaaactcattttggacttctgaattacagaactataagataataaatttgtgttgttttaagccacttggtggtagnttgttatagaagtaataagtaataggaaaataaacacagaagtgtatatgatgaaatacaataaataatatctatagccgnctcaaaatatgaacacaaattgccactcagaatatgccagaattcactgtttttgatcagtatgttaaaatattcacggccgggtgcagtggctcacacctgtaatcccggcactttgggaggccaaggtggtcagatcacctgaggtcaggagttgaagacctgcctgaccaacatg

SEQ ID NO: 86495 - DNA, 272 bp, Homo sapiens
aatttgcagccaagtcagacaaaagtaggtagcctgagtactttgtttgtgactggcatctaaagtgaggactgttcgtgtgggactgaacccttaaaccatggagtctctaactctagctagtatcagaactgaactgaattggagtcagaaaaaacttgagagtactctgttaaaaatccttttataagtttgttgactgtatactctgaaagacaagaccatgtttgccttgtctaccattgtatccccaggcacctggcacagtgcct

SEQ ID NO: 86496 - DNA, 492 bp, Homo sapiens
gcacatgggccatgttcccaggcattttctacctcagcctctagtgcatatgattacggaagtctttgccctgccatggggacctgcacagataccttccttgccaactggtatcctcagctctgctgttgctcgtctctctcctgactttctcccatgccctgacagaactttctgccgaataactcacatccaagaagcaaaccctagccactcttcccataatcttgtgtctccctaaacattattctgcctcctttgcaaacacctcagattcactttatttcctttctactcttccaaattgttcttatatcttctccctcccgtctctctccctccctccctcaatgactagacattgtcaggtaaaggtcaggcctggtagaccagttggagtcactgccacattgcctcaaaagctgcacctggggcctccaccagtactgagtgaccatcctgctcccacagcctcttcacttttccatttaa

SEQ ID NO: 86497 - DNA, 379 bp, Homo sapiens
aggcgagaggcttcggcggcgggagaaggggcttcgtcccaccgccatctttgcgggaattgaacagcttggacttggagacagtgagttaaaacagaaataagaaggcggcagaaaaagactaccagattgaaatgtgttggatattcatatccacccagcacctcagaatgtggccatggaggatggagacagagattggagtgatgcatcttcaagcctaggaacactaaggattgctggtaatcaccagaagctggaagaggcaagaaagtgtcctttcctagagccttcagagagagcgcagccctgccaacaccttgattatatgcttcaagcttctagaattgtgagagaataaatttctgttgttataaac

SEQ ID NO: 86498 - DNA, 157 bp, Homo sapiens
gatccccaagtgtgaacagtctgaaaagggctttttgcttgctgcagggacctgagaattgagaaacagctgtgaaactttgaaccctggctggaaggtcctggtattgactgtggcaagaaaacgggggagctaatctgtaatctgcttagatgga

SEQ ID NO: 86499 - DNA, 190 bp, Homo sapiens
cagtgcatccacatgcacacacattcaagcaggacataaggcggccggccggtccacttcagatcataaccaaaagtcttggcccctcaccactcacctgtcagcctcaggcagccagggacccagcatgggaggcacacctcatgagaactaccccaatgctcaagtgcccgcaaatgcccacaaaccc

SEQ ID NO: 86500 - DNA, 168 bp, Homo sapiens
aaacaaagtgacttaatttacagtgtctggtttgcctaatcattcagctctctcatgtagtattccttctttttttaatttaaaatttttttatttcaataggttgttgggaacaggtggtgtttggttacatgcgtaggttctttagtggtgatctgtgagattttg

SEQ ID NO: 86501 - DNA, 159 bp, Homo sapiens
caacccaacaaggaactaagctaaccccaccatgcacaacgcaacagggaacctaaactaaccccaccatgcacaacccaacagggaacctaaactaaccccaccatgcacaacccaacagggaacctaaactaaccccaccatgcacaacccaacagg

SEQ ID NO: 86502 - DNA, 293 bp, Homo sapiens
ggatcagtgaccagcaccccaggaccaattttttatcccaagttcctagcagtccctgctgtcaccctgggtctttctatttggatttctcatgagcaatttaaacacaacatgtctaagactaagtccaccattttccaaaaacaacctactcctctaccacccctgcccaccagcctaacaaggataacaaccttccataacaaggatatgacaatcggctacccgtgtgcccagccctggggtggcttccttaggtgcacacaactgcccccacgatgtgtggttttccc

SEQ ID NO: 86503 - DNA, 412 bp, Homo sapiens
aatagcttcagctgattgggtgagtcctattcatgttataaaaggtactctgctttccttaacattccataaatgttaatcacatctgcaaataccttcacagcaacatctagactagtgtttgacccaacaactgggcacaatagtttagccaggtttacacataaaacatcatcacactatgcttctcttctgtgttctttgttaccacgtatctgttccatgtgtttttctttgtatatatcctatcctgtcatatctctcctatggttttgtggaaactataagccttctgggggtaaacactatatcttgttcattgttatacatcgtatagcatatcatgcctggcgcattgttaaccctcattaatacagctggcagcagattttagcattcgtcatgtgtgcca

SEQ ID NO: 86504 - DNA, 168 bp, Homo sapiens
ggaatcgtgctcttttaaatatatctttttcataaaagttattttaaaatgtggcagtttaaaatgcctgctgaaagagttgatcttacctgtaagatcactgatttctttctttaaaagctagtggatacccaacttgtaaagcaccaaagtaggacttagtgtggg

SEQ ID NO: 86505 - DNA, 1326 bp, Homo sapiens
atggatgttaacagcagcggccacccggacctctacgggcgcctctgctctttcctcctgccggaggtggggggcaggctgcccgacctgagccccgacggtggcgccgaaccggtcgcggtctccgggacgccgcatctgctgagcgggggcccccgaggtgacggccagcccggcgcccacctgggacgcaaccccgggcaatgcctccggccgcggggagcaaatcaagaaagggccgagaaagttgtgatcggctctgtcctgacgctcatctctctgcgatcgcgggcaactgcctggtggtatctccgtgtgcttcgtcaagaagctccgccagccctccaactacctgatcgtgtccatggcgctggccaacctctcggtggccatggcggtcatgcccttcatcagtgtcaccgacctcatcgggggcaagtggatctttggacactttttctgtaacgtcttctccatgaatgtcatgtgctgcacggcctggatcttgaccttgtacgtgatcagcatcgacaggtaccttgggatcatgaagcctctcacgtaccctatgaggcagaaggggaaatgcatgacgaagatgattctttctgtctgccttctttccgcctttgtcactttacctaccatttttggtcgggctcagaatgtaaacgatgataaggtgtgcttggtcagtcaagactttggctacacgatttactccaccgcagtggcatcctaatccccatgtgcgtcatgcttttcatgtactaacagatttacaaggccgccaggaaaagcgcggcctaacacaggttacctggcttccctcgagtggagccagacagcagtagtcaccctgaatggcacagtgaagttccaggaggtggaagagtgtgcaaacctttcgagactcctcaagcatgaaaggaaaaaatatctccatctttaagcggaaacagaaagcagcgactaccttggggatcatcgtctgggcctccaccatgtgctggccgccctttttcctcctgacagccagacccttctgtctatggcactgcctgcagctgcatcccactgtgggtggagaggatatttccatggctgggctatgcaaactctctcattaacccttttatttatgccttcttcaactgggacctgaggaccacctattgcagccggctccagtgccagtaccagaatatcaaccagacactctcagctgcaggcatgcatgaagccctgaagcttgctgagaggccagagagacctgagtttgtcctacaaaactctgactactgtagaaaaaaaagtcatgattca

SEQ ID NO: 86506 - DNA, 274 bp, Homo sapiens
ttttcacactcaagttgaggacatacttaaattagccaaccaaataaaggtatgtaatacaacaataccctttttggaagctagggaagcagtattttttactggtagagatcaaaaaattttccctaagtgagtgttgtatactttgtgaatgtgtgaatatatgaatgagtcagagggcaagtctttaggaattttctttgtaactctgagtaaaacagtagtgtcaatattcccttgggttaatgtaagcagatctgctattaatactagg

SEQ ID NO: 86507 - DNA, 290 bp, Homo sapiens
tctttgcattgatagattagttatttatgccagtcgtctctgtctggcttgttttggtttttattgcatttgtttgctagagattcgttttagtttttcaatttctttctctgtacacctgcccctcccccaccccaccactgggttactacctcctttttggcactacatgatgccttaagcccaggtttgcctaagctttcataacagatcccagcactgctcatccccagtggtggaggttctaaatgggataacctgatagtgtgggaaggctggctgggggttgt

SEQ ID NO: 86508 - DNA, 685 bp, Homo sapiens
ctgccaggacgccgcgcctccgccagacgcgcccgggggcggggcgggtgatgtgccgctgcgcccgcgctttcctgctctcccccgctcgtctgcccgcggagggcggccccggggtacccctccccacctgatggcaccgacgtccctggccttagcgccccaccccgactcttcctcatggcgggcacctgtgtttatcaaactagccggaccacaggtgccctgctgagtgcgcaccgggcgctgaaaccagagccgcgctctacagggtccagagtgaggcccacagagtggatggaacccctgagccacacagctggtcagagaatggcacagacacaacccaggcctccatctactcgacagacctcaccacgagcctactatgtgctgggtgtggtccccaccctctgggatctcctgcgaccacgctgagtgccgaggacaggagccctgtctacacctgtgtgtccccttctcccctccaggaccagcccagcagaggctcaggagcccagaggacaacagtccctgcagtgcgccttccatccactgggaggcacaagaccagtctgaacagcagagggagcaggaggatggggctacagggaaagggtcctggctggaggcctgtgggcaggcagggctgttctgggccctctggagaggagctggttgacag

SEQ ID NO: 86509 - DNA, 139 bp, Homo sapiens
aagcattcttacacatacacctcattctgtcttaagattaagaaactttccaagactctcgagaaagctttccagaccctagtccctagctaaagatgagatagagattgaatgcaacactcccacttgcagttacaat

SEQ ID NO: 86510 - DNA, 649 bp, Homo sapiens
ctgactgaaatcaggcttggatttgtgaatcactgttttttccccctgtggtcactcctgtgatgaggtcaactgcttcaatcctttaggttttgtagacaggtttccggattccaggagtcccagaaggtccagggagcgctccccacattttagccagaagtaattaactaaaacataaaggccccactttctcttttcacactttgagccacagatcatctaattcctagcttgagacatcagatttcagatcattagtgcaaagcatcttccacaggaggcaataaaatgtcactttatgtaactcagctacagttacactgccttcagaaagcaggaatctccctgaaaacaaatttacatgaaaacagtcccattgtttgagaatttatgcaaatgttgcacaaaggggtttgatagtgattttaaaaacttaaatctttatcactgcctcaaagatatcctgagaaacttggttacctctaaagaattccattgcacttattttttaaaatgcctataatatagagttgttttaaaaattttccctaaactctaaacttctttctcagcttcaaagccttccgtaatgaatatcctaaagagagcctagtgcatattggtttaacacttactaggatcactc

SEQ ID NO: 86511 - DNA, 329 bp, Homo sapiens
tttgctcatagggctgcctcttctccagctccaaccactggaaattccatccctcaaagcccagatcaactgctaactgcttcataaccacctagtccaaaatgaatatgatcattatgttccagaactcctctatgcttcaaattagagtactccctgatctaccactacctgctggactagtcacttaacttctcttcgcctcagtttcctatggtagaaccgactagtcggttctaccataccatcaatatcttcaccatcaccatcctcatcaccttcaccatcaccatctacatcatcaccatcctcatcaccgtcaccaccat

SEQ ID NO: 86512 - DNA, 1219 bp, Homo sapiens
taaatgaaaagaactgtattttctagaattgaaaaataattcttttagatgatagataagatgtttacatcaacctgcaaaaagtcaatgttgaagaggtctcattgtatctcacagaattttgatttgcctactcacccacaggagacatttctgggacagtagcaacataaggtccatcccaaaactttggctcattatcattaatatcctgcactttgatgatgaattctgattcaggctccaggggctttctggtttctatgtccacagcctgagcacgaagagtgtagaaaggtttttcttctctatctaggctccttattgcatgaatgtcccctgtggtttcatcaatggtaaaaacggtgccagcgccatctcctgagagggtgtatttcgcagtgccctctcccttgtctaagtcggaatggagctttagggaagagagggagagagagaggaagagaaagagaaggacaaagaaagaacaccattaaaaggatgttgccaaattaaaaagtcataatttgcaatacaattcctttaatcaaaaatgttaaataaaaatcttatggttctgttttcttgttttttatttctccaacttctttttataaaaatttcaacacaaaaagttgaaaactgcaatgaacacatatacatatacatccaaacattcctccattcgtctattaatctgcttgccttatcagataggtctcatatccattcttctgttcatccttctcttaacccatttttttttttgaggtgttacaaagatcagaacaaaagtacaacctcagatatagcagcaggcaaaaaaaaacaataaattttgaaaatttgtatttagttcttctgtatccctttgggataacattttcataaaatgaaatgcacaaaacttcagtgtacttattgtttcattttaaataaacattgcaataaaaataaattagctcatagacaccacaaaataaactttccaagtgttctgaagatgaaatcaatgacctgaatccagtgggagatagtgcaaaggaactcagaaaacactaagcattttcatttgtaaagaagggaaaaatctggcaaatcaagaggttttcagtgatatagggcagagcgtctcattttaacaggctgagtttgaatgagtttaccactatgattggtagaatcactgattatcctttcagattcacaaatagcttgt

SEQ ID NO: 86513 - DNA, 952 bp, Homo sapiens
acagaaaaccaaacaccacatgttgtctcttagaagtgggagctgaacagctccttattgcatgaatgtcccctgtggtttcatcaatggtaaaaacggtgccagcgccatctcctgagagggtgtatttcgcagtgccctctcccttgtctaagtcggaatggagctttagggaagagagggagagagagaggaagagaaagagaaggacaaagaaagaacaccattaaaaggatgttgccaaattaaaaagtcataatttgcaatacaattcctttaatcaaaaatgttaaataaaaatcttatggttctgttttcttgttttttatttctccaacttctttttataaaaatttcaacacaaaaagttgaaaactgcaatgaacacatatacatatacatccaaacattcctccattcgtctattaatctgcttgccttatcagataggtctcatatccattcttctgttcatccttctcttaacccatttttttttttgaggtgttacaaagatcagaacaaaagtacaacctcagatatagcagcaggcaaaaaaaaacaataaattttgaaaatttgtatttagttcttctgtatccctttgggataacattttcataaaatgaaatgcacaaaacttcagtgtacttattgtttcattttaaataaacattgcaataaaaataaattagctcatagacaccacaaaataaactttccaagtgttctgaagatgaaatcaatgacctgaatccagtgggagatagtgcaaaggaactcagaaaacactaagcattttcatttgtaaagaagggaaaaatctggcaaatcaagaggttttcagtgatatagggcagagcgtctcattttaacaggctgagtttgaatgagtttaccactatgattggtagaatcactgattatcctttcagattcacaaatagcttgt

SEQ ID NO: 86514 - DNA, 311 bp, Homo sapiens
acaaatatcaaacaaagatggcaggggaaaaaaagaaagccaaccaatatcctttatgaatacagacacaaaaaatccttaataagtcattagcaaaaaaaaattcagaaatatattttttaaattatacactgtaagaaattagggtttattccaaatatgcaaggctcattcaaatgtgtgaaaatcaatcagtgcaacccaccacattaacaagctattattttgtacaactgcatatgaatctacgattatcttaaaataaaagttttaagtaaacaaatgaaagaacctgccccaagaaagcaaat

SEQ ID NO: 86515 - DNA, 395 bp, Homo sapiens
cagtattttcaagtgttgataaactgtggcataagccccaccaatccacaacttaatgtcttgcacactacacagattttcagtgtccaagcacatcaatagagttactaggaaaacgggactgccacagccaaagacatcacagagtgcacacagttctcacaggagagccacaatcaagaagtggtttacattagaaataattctacaaaaaaaaccatgggaatataagtcatttaagatgttcaagacatattaaatgcacgactgtgactccaaattgccattttgtatgctttgtattacatgatacaaaaaccaccccaatgcacccatggaatgttaagctgatctaaggtgcttatttttgttttgttttgttttgttttgcttga

SEQ ID NO: 86516 - DNA, 497 bp, Homo sapiens
  misc_feature (5)..(5): n is a, c, g, or t
  misc_feature (10)..(10): n is a, c, g, or t
  misc_feature (488)..(489): n is a, c, g, or t
  misc_feature (494)..(494): n is a, c, g, or t
  misc_feature (496)..(496): n is a, c, g, or t
gcccngcccnacagcgggtggtaactccagttctagccaggacagattcagagccctcaggactcaggggcacacacaagccacacaggtggggctgcagatgtggggctcaccgtgctggagccaggctggttggcactggcatgggacctggggaatcagccctcggctgggcagccaggatgcctcctgctctctttcctccatcccaccccttccacttccagaggccccgggatatttttaaggggaaggggaaggatagagagaaatgcaggcagggctggggtctgggcctgtgggatcctcaggcaggaggggagggctatatcatgatggcctggagctggggctggaggtgagtcttcccggatgctgggaatcaccaggcgggcaggagggctgttccaggctgagggaagggcaggtgcaaagcccagagtggggaagacgctgggcagcagtgtgggtggtgcagccggactggnnggagngng

SEQ ID NO: 86517 - DNA, 473 bp, Homo sapiens
gagttcaaggttacagtaaactacgattgtgccactgcactccaatctgggtaacagagtgagaccttgtctctaaaaacttaaaaaatatttttgtttattgaatgtctcttcctgctacactgtgacctccctaaggaccccagtccacatcagtttggtttgctaatgtatcccaagcccccaggacagagcatggcaatgtaggctctcagttaatatttgctgaatcaatgaatggtgcagcagcactgtccaccttctatgtcctgtttgcccaacccagtcttggacttaggtgtgtgttccctgaatggaatcacctggtgacccacagacacagagctgttccccccatgtgtacatccagctgatactagaaaggagaggtgggcccgagttttggctctgctgcatcactggcttgctgttccaggtcggaattttcctctttctgagcctttgtttctcac

SEQ ID NO: 86518 - DNA, 675 bp, Homo sapiens
aatggaactggaatccccagcaactgagtaattcacaagtatgccatcagggaaatagttttgatgattgccaagagatgacacatggcaaatgtgtcagtgaaaatactcttgtttgaataaaacttcttctagtctattctactggaccctgctggcacctcaaagagttttttgtttgtttgtttgttctccaaaaataaatggcatgggtaactgggtctctcagtttgtcatgagttcagtgtctaggtatattactacaaacataaaatatgcatctcttattacatatgtctgattactacggtaatacataagtattgtagaaaatttggaaaattaaaattaaagaatttaaaatcatcttaaatcctacccaggaatgatcaccaataacacttttagaatacagtctttagattttattttatatgaacacacataaaaagatgggaccttgtcactttgagctaaaaccaggcaaagctcaccaccttagattttcatgatatcagaatggcgtctagacctgaagttgtcattacctggctgactctaagaaattccctttgcaaccttagctctcagttttcttatctgtgaaatggccttgatcaacattttgaaaatcatatttcctggaatgttatggatgtttcttgaaagaatctg

SEQ ID NO: 86519 - DNA, 166 bp, Homo sapiens
gactctgcttttctaagacgactcttttttaaaaaaatagtaatttggtagtaatttggcagaaattcagaaattttatttgagcggttaagacatcaaataaaaaaacattttagcaaatgtttttggaatgtaatagatacactaagcatgttcagtagtttag

SEQ ID NO: 86520 - DNA, 401 bp, Homo sapiens
caaagaaagcaagaagggagggtattcagagcaaaacatggaaggactcacctatggtagaagagagaccattccacagaaattgcagggaagaaggataaatgggtgtgaacacttgcttaaatagaagttttttggttacatttatgagcagcccagttgaaccagtttatgcaaaaagagagaatataatgtttagaggtgtctcctcagacctcagagcaggaaacacacctcactagggactagaagtaggagccagaaactcttcaagattcaaaatcccactctctagggctatgggtttctcatttctgcttcccttggtagctctgcttcaatgccacatagcctgcttttttatgtgcacatggctcctgagtcttacatggcagttcaaa

SEQ ID NO: 86521 - DNA, 379 bp, Homo sapiens
cttttactgggaaggggatcatccctcaacaactggatttgttgtggtggtggtggtagtggtttgcatctcgggaaaattttgcacccagaatgctacagctgtagggatatttacagagcatctaattcaattccttagtttcatccattaggaaacaagccctgaaggggaactgactggctcattgcttcataagtgagttttagagttctaacaggaatccctgccaacttacctcaactgtcattctttagactaataccatacttgggaggaagatccaaaagtgtctagaattttacttttggtattgatatgttagatatgttatgaatgtgtcgaggcttgctgacataataatggctttatggacttt

SEQ ID NO: 86522 - DNA, 387 bp, Homo sapiens
tacatgattccttttctggctaccctaggtatgtatgtacaggatggtaactgtttcggcaaacactaaactctgatcctggacaggttagcaagtctgggccattgctaataatttttctcataatcctgtgtgctctgtcccggagaccaggacttttatgtattttcattcttaacctaaggatcctgctccaaatcccaaagttgggtctcagaaagaccctttcactcatagccaagaagctcctctactaagatccccttttgccaagtctccagatgcctctcaccttcccccaaactcatttcatctgcggatgttttatttacttcaagttgctatggcatccttttctgttagtaccatacagcgtgggggtgaaga

SEQ ID NO: 86523 - DNA, 378 bp, Homo sapiens
gcaaaactgcatgctaaaatctgcttggggagattcataaaacacttttctggctcaaaaattaggctcttcattcaaacatttcaggcttctttttttccttttacccatccgataggttgtgagaatgctatgattatagtttcctcatcataaattctttatccacaatctatttttaattaccccttatcaattttaattttgacataatgtattttttgacagcaaagattttaaatactacatatagacatacatatgtatacatacatatacacacattcttttcttaacacagatcccttaatacaaaaaaagtgacaattcctgttgacatcttccccagtccaccgggttggtagtcataggatggtg

SEQ ID NO: 86524 - DNA, 486 bp, Homo sapiens
tggtgcccggccgccctaccctttttcttagctttttgcagaaagctgtcatctgtatttcctcactattcaagtcatgttggtcctaggttctatatatctctatatattattttctatatagatttctctaaccatcattcttagagccatctcagaatttgatagcccatttactttgttcttgattatccctaattaccttattattgcttctatctccctttgctctttttccattttccacacacctttcctaaaagcctgcttagatcttcgcaattctggctcacattcctattaagctggtgctacccaacagaaccacactgtttgtggatcacttgaggtcaggagttggagaacagcctgacgaacatggtgagactccatctctactaaaaataaaaaaactagctgggcgtggtggcgtgcacctgtaatcccagctactgggaaggctgaggcacgagaatcgcccgggaa

SEQ ID NO: 86525 - DNA, 257 bp, Homo sapiens
gattaaattagttcccagagaaggttgactccaaaagagagagcacaggaagatgatggaatagaaaacaccagatcctccttcccctatggagatgaattaacaatgttagatggcctctgtgagaaatccagaaactagttaagaggtttctgtaccccaagtatgccaagaagaacctcatgaaagccagcagaaaagttcatggcatatactttccacagcctctccccagcacagcatagcaccattggaaa

SEQ ID NO: 86526 - DNA, 121 bp, Homo sapiens
gatccagtcagagccagggagagtgtttgccttaaggagggactcccttgtccaggatggggctggcactagggatggggtgaatcttaggacaggagtgggggtcagaaatgggaggggt

SEQ ID NO: 86527 - DNA, 799 bp, Homo sapiens
attatatgtgacggtaagcatcattgccactgctgtgctttatcatcaaaacagtcaataaactcttgctttgatttcacatattcattcattcattcatccatccatccatccatccatccatccatccatccatccatccgtctaccacctacttaccccctcctccacatatgcacagacacacagatgtactggggtgtctgttacatggaggcattgcaaagtgtgcttgaatgctacttgccagcctggtttctccctgacaatttgggcatgcacaggattgggactcaggattgaaactaccattatctcaaattgaggctttgtaaaagtctcttcatacctagaagttgtctattgttttttctcattttttgaagacaagattggattgatgattttttggataacttccactgtttaaatttcagggattttttgtttttctgataatgccattaccttagttatgttatattcttcctggataataaggcagagtaagccctgtttcacagatacaagcaagtatgatgagaggattcagtgtctaagattttttagtgagtttagctgaagctaaaaatggttatagagtgtcctgattcccatttagttttccatcagatcaataagatacttggaataattactcatagtggtttggaacaactttttgacttaaaattttccattatatttttcactaataaagatttttttaaagttaccatgtttgcagtagagttaaaagaattcaattattgctgttaatccttaccagtcatattta

SEQ ID NO: 86528 - DNA, 443 bp, Homo sapiens
gccccttccctccttctcatctttccctacttccttcacactatctgaggcatcctggcctgcttgaagtatgcaaataaatatccccatttacatggggtactttctgaagtaaatactacacagaagtgaaatcaacgaactgccccctcccttcacctttaattcctggtcagccctgctccctccttgcccatccattatagcaggagccaccagcagacccataaagaatgcgcccatcaaccctgtgagcagcctccctcccagccaacagcagggtcctcaggcccagctggaggctcccctgtgtggtaccggctctccagggctgtaaggccaccttttgtgtgtgacggtggctggaagccactaggcatgtgctaagtactcctcttgcctctcccctcacctgctccgaatgctcaaaccctcaaggccaa

SEQ ID NO: 86529 - DNA, 2621 bp, Homo sapiens
  misc_feature (915)..(915): n is a, c, g, or t
  misc_feature (1992)..(1992): n is a, c, g, or t
ttttcatgcttccatagaatcatccctgacctcaggaaaaaatacaaaaatggaacaaacaaaacagaatagtaaaacctgaagtaagaaaaaaagaaatgaatttgacattgtacagatcaggagaaagaaagttcattaacagtttcaagatccctgcgttttcacccagcaggaaacaaattaccatgagttaaggtggggaaattactggcaattcattgccttcttttaaagactttaaaaaaaaatgagtaaataattttagactattaccccctttccatgagagatacacagctagttaaactgccatgcatattaattttttgttttcattttattccacctaccaactacacagtgtctgctttccaaaattagtttgaaagccaatgacctgtgtttgaactgggtgaaatagcatagcagttcacacctggaataaaagaatgattgtgtgtgagtctgttaatggctgtgtagagctatatctctatatggagctatataaaaatatattttatacatgccagattcatttagacttgaattgaccctgtggtaaagcagcaggaataaaatatttttttgataaagcactcactcaaatagagaaatgagctcttgcagttaccatttaatctgtgacttctttttgagatgcagaaaaactccattataaagtgctcagttcatccagggacacagacacactgtgggttataacacaccctcatctgcatggtgaggtacatgagtcagctgctcttctctcaggagggtggctttaaagctccacagtcatgcatgctgccaattccagattgtccaaacctgtaggttagcaaggacacaggtgagccataggtatgacatgttcataaaaagaaaaatatattttaatacaaaacntgtcaggggagtggagagtgtcaaattgaggacaggagagacctagattcaatgccatagttcttggctaatctctgagaagcttgttagtcaccctctttctccttcccttactctcctgtatcttcccttacatactgcatagtcccttgtaatttacaagacataaaatacttcctttgttcatctgtatactgaatgtaagaatgaacaaaaggtcatcataaggacagcctgtgagtttatgcactgcatactgcaaatgacccactccagcaatgggaagacacccctaacattgcttctctccttataacgaaaatattattcatcatcagctttaaaatggatcttctcactctgtgcagtctccgtggtaacgtcccataagcccagggttttaagacctttctcctgtgctctaagcctacatatctaactgcctaatggcctttccacttgaatgacacatcattcagtttcagtgtcctaaactgaagtttcaactccaagtctgtttttttctcttgtagtcttcatgtcagtcaatcagtcttttatcctaaccagaaatatgtgagttctcatggattcctccctctcactcacttttcagttctataatcacccagttcctacattgtttgcatcttaaatatctcttctagtcctcccttctcctttatacccactgccactgccacaatgttagctccttcagatctcatattttctcacttttattgctatagacataccccccgcagttatcctacctctaggcaaatcccttccaaaatgcagctgccagtgtgatctttgtaaaatgcttttatgataaagttcaaactcattagcaaagcacacaaagacctttgtgatgtggtattgctgaattaaactactggcagccctagaaaggtaaagtgtatttgatgcttctgtgctgttcccttagcccagaaagcccttccagtttctgtttagtaaagtcctattcatctttcactactcaatgagtcataagtaatcccattaggaaagcctgtgtgatctacctcctccctaatttgccancttgagtttgcttcaccccttcataatactcagtcaatcataatgtcttataatccatcatagcacctcacacaatgaactccaatgtctggtttgttgggatgtccgccttactacattgtaagcttcttaagggtagaaaccagttctgataggcttagggcagtgaccaccaacagaaaaagtacttggtaaatgtctaacacaatctgttttactttttccagagcacgaggcatgcatgaaagagattaatttactccacatgggaagttactacccaggcttaccaaaaggtcaggtttatataaagtggcgttcctttttttcccccttagtaagacattaaaaaaagaaaccacaattgaaaagccaagagctatctgtgatacggaatatgaacacagaatcagattctcatagcagctaagctgttccccaggcagtggttctcaaggtgtgcttccaagaacagcagcagcagcggcatcacacatgcaaattactggactctgccccagatccacagaattggagactggggatggggcttagcattctgttttaacaagtcctccagatgattctgttgtgtatctagcttgagaatcactgccctggagaatgga

SEQ ID NO: 86530 - DNA, 525 bp, Homo sapiens
gagaactacattaacatgcagatgcccgagatcgagcctggagctaaggagtcagttccctctgctgtggggcccaggtatgggtaggagtctgctcatgactcaaatcatagcctggctgacccagtggactagtttctaaaaacatccactccttcctgtttcaacaatcatacaccagagcctgctaccacgtttgaatttatttcaatgatatgcaggtcagaaccttatctgtttatatttcaatgccaaaatattttaaaaatgactttttaatgatgtgtaaaattgttccaactttataaataacctccatttgtttgctttcagattttgtacatttgttttttatcttaataaaccaaatctattcacagaactaggaagatgcttattaataccagattgcatggtccatatatcaagtttagcaaataagcattatccacttatttgctaaaagcaatctttttccctccaggtaatttagatgattctcaaagatgacatatcattttgcaa

SEQ ID NO: 86531 - DNA, 565 bp, Homo sapiens
gatacaggacttttaatactgaaccaggaaagtcctgggcaacctggaataaggtggttaccttctgaagaccagctggcaggggtaaggctctgaatttcacagccaacgtgttgtggttggccaggctaccaactagaaggaaagcagctctctgattggccatccttggctatgtagggttagtcttttagcccatagagctaaaaggtgaaatagtctaatagaagagataaatgagaacaaataggaaaggggaggagagagggtttgcgtgagaggagcagtggtcaccaggcagcctgcaatggaccctggaagaggaagagaggaaatgaagaggaaggagaccagcagttccactatccacagccagatgacatggatggctttgcacagctcagcagcacctgcctcaaaggcctagagcagtggttcttcatcctacttggccattagaattacttgaaaacttctgaaaatgcagatatctgagctatccaccaggccaatttgaagtagagtttctgggggtgggcacaatcattggtctttaaaaaaaaaa

SEQ ID NO: 86532 - DNA, 418 bp, Homo sapiens
aactcctgacctcaggtgatccacccacctcagcctcccaaagtgctaggattacaggagtgagccactgcactcgtccaacaccctgattttgtacttctagcctcaagaactgagacagaacacatttctgttgttttaagctgcccagatagaaactactatagttgatgacagaataagaactagactccagattttttaacctctagcctagacctcttttactccattgctgcctccccaaaccagcaataaacatttatggaaatttacttatttggaaaaaaattgacacaatctataatttttaagcactttaagttgttgcctgacacaataggcatttaataaatattttactgtccagttgataaaatgatagacattaaaatgttatattttgttatacaaatct

SEQ ID NO: 86533 - DNA, 816 bp, Homo sapiens
acacccacctgcacacgctgcttctctgggctctgcctcacggttctcacgctgcagctccggtctcgcgcctccttttacgttgtttaggtttctttctgacatgactgagggaaggatcacctccctggggagagaggtgtgcaggcggcccgttgttcaccgggccccggcctcgctaaattcacacctcggcggcgtctggcagcttccgcggcgtgggctttagcacaacacaaccccgtcggccctcagagctgcagggttgccgacgtgccctcctgcgcgtgccagtccctcgccccagcacgtcccccgccactgttgtccttgattctggttggaggtgtgatttcccacatacatattcatgtggtgtgtttgcagcgtggggtgtgagtcacacggatattttaatggggagagtgggggggcttgcggaggcgccgggcggatggacgtgtccatctggctgcgtggggagacccggggccctcagatggtgcgatgtctgaggctgccctcctcacattgatgggagccagggcctacttggcttgctgcccccaaggggaacgtggccctagataccgggggaggccccgccgcagcctcaagtgactgactcaggcccccaggtttagcacagctgccacaggcctggcggaaactccggatgggggtctgaaaagcctttgtggggtcggggcaccacacgggttgggctgatggcgcgctgggggcggggctccagggcacattgtcagatagatgaccccacggggtgggctgaggactgctggtcatggtgagggg

SEQ ID NO: 86534 - DNA, 333 bp, Homo sapiens
gggcattatatacatgtaccttgccttttacaaatttcatttaatacaactagaagtcactgatccatctcaaatttttttgttgtttttttgagacagagccttgctctgtcgcccatgctggagtgcagtggcacaatctcggctcactacaacctcctcctcccaggttcaagcaattcttgtgcctcagcctcccatgtagcagggattacaggcatgagccactgcgcccggcctgctcatctcaattttttttaacttgaaaggatgaatgatatatgttctaatagctgtccactgttttgtttcaaaagcaagtgcattttgtta

SEQ ID NO: 86535 - DNA, 270 bp, Homo sapiens
  misc_feature (187)..(187): n is a, c, g, or t
ggttggttcaggtgagctctaaaagtcccaaagataaaaaggtgcaggtttgggggggatctcagcatacctgtatgacccctagtcggcaaatggccacttggctctatttcaaatctggacccagtgagccactaaggatctatattggaagactggcccttccaggttcacatttgttcacatntacctacctacctacctacctacttacctatctgtctgtctgtctacggtgtttataagtatcaagcatgcctgaaaataagg

SEQ ID NO: 86536 - DNA, 364 bp, Homo sapiens
tacagacaaagtcttgtcatgttgcccaggttggtcttgaacccctgggctcaagtgatcctcctgcctcagcctctcaaagtgttgggattataggagtagccaccacattttgtcccaccccacttttataacagaaaatgttattgaacaagcaaggaaaagtgctaagaggatgttctcattcccaaaaggcagaatgactggatctgggaaggacaggcaagcctcacagcctgagatgtgctgaacaaactaaactgtgctcagagttcacccaccaccagctttagctacgccacagtctgctggctcttattcaatgtgcctaggttttgatagacccagtgaggcctctacatcc

SEQ ID NO: 86537 - DNA, 249 bp, Homo sapiens
cctcccgggttcacgccattctctctccactcccgggagtggaaatgaatgaatatatgggagtgggtggaaagtatgaaaatctttgtttcatgtgttaatgcccaccagaaagtatccaatacagaagagccaatgaacagccaaggagacaaaatgactcaactagctgacatcggtcacccagaagtggcaagatggggacataaatggagaggtcactgtggcagaaatagagatggaagcaga

SEQ ID NO: 86538 - DNA, 774 bp, Homo sapiens
aaacaatcaggcctgcttcccagtctggaaatgagcagagggcactgccccagggtcgaggctgcaagctatgggtagatgaggggaatctgtaggccccaaaaggctggtggctctagtctgaaggcaagaaaactatttgggcaaccaggcactgaaggagaaggaacattggtagaacctatttcgtgtctgtctcccactctgcccttgtgttcctggagagtgggggctgcctctgactgttcttccaaacaccacacccggcactaagacccagtgcatgtgtgtggagtcgatgaattaatgaaagggaagcccctttccatgggtaaagccaaattacctggatgtgagtacagcacaaatccatatgcccgtggaggatggagcatctgtatctgctcccgaaggtgcagatgcccagacctcggcacacccagcgccagcattgtctgctttgacccatcataaccactctgagaggccaaggaggttgtttccattttacagaggggaatgccgaggatcagagagattggctgacatgcctgttgtgcgttttgtaagcggcacagggggattcttctgccccacttctactgactccgtgatccagtgctgccttgaatcttcggaaactctaaagtaggggctccccgcttctgagaaagactccgtagctctcttttggacacagctgcagtgccatccttctgggagagccagcctggagcagaacagctggggctcatctatctgctgcccaacaaa

SEQ ID NO: 86539 - DNA, 349 bp, Homo sapiens
aatgatttccttaagataactaagcaaaagtagaattggtgggacaaagaggagtggaattgttggaaggtggccgggcgcagtggctcacgcctgtaatcccagtgctttgggaggccaaggtgagtggatcacctgaggtcaggagttcaataccagcctggccaacatggtgaaaccccatctctactaaaagtacaaaaaaattagctgggcatggtggcaggcgcctgtaattcccaggtactcaggagggtgaggcaggagaatcgcttgaacccgggaggtagaggttgcagtgagccgagattgcataccagcctgggggacaagagcaaaactccttctc

SEQ ID NO: 86540 - DNA, 267 bp, Homo sapiens
tcctgactgcctgatggggtggaggtggaggggtgctggcccaggatcaggaggtagccacacacagatggcagaaacaagggcatccagagtctctgcatcccaaggctgccctgaccagaagacccagagggacagttaaggagaagccactgttgcatgagtggttttcaaaccatggtcccaggaccctcagccatttcccctcaacctgggaaatgatggaatgcaaacactcaggtcccccaccaggcatgctcaatcaga

SEQ ID NO: 86541 - DNA, 355 bp, Homo sapiens
gtttcctaaatgtcactgaactgtacacttcaaatggttgaaatggtaaattttatgttatgtatgttttaccacaatataagagaaaaagagaaggtggagctgacattcagacttaggacttcctgatgacgcctcctttccctatgctgcatccagacttcttctgctgattttaaagggaaaatctccctgcctaaaagcctctaagaaaccatttttaatcttcgcagtgggggcgggggatgtacagactcctttgagaagctaatgaaaagttatcatcgcctatcatctccccttcctattccctcccccataccttcacatacactttacatttttgtttacagtt

SEQ ID NO: 86542 - DNA, 115 bp, Homo sapiens
aggaggacagagctgttcattacaacagccctgaccctggaactgaggccttggaactctggtccagggctctttgcactacaccagactgatgtcagtccccaggtcttgctga

SEQ ID NO: 86543 - DNA, 389 bp, Homo sapiens
gtaaatcgtactgcgtatgttttatgctttgctatcatagagagtgacagctttgtggggacactgtcgctgcctcgaaattggagtataacgaagtcatatgatagaggggaaaacaaagtatagaaaatccatccaatatgactatgatgttggtctggaaaaaaacctgggagaggacacacgctttacaaattaaaatcataatgtggtatgctgtgcttgtgggattgtggtttctttttttttgtttccctgccaattaaaagattacaaatatataagtgtgtttctcatttaaagggagggcccatctcctctttaggaggaggagaataaaagtattctattctcaagacattgagaaacaaatatgggcttgaatatag

SEQ ID NO: 86544 - DNA, 300 bp, Homo sapiens
gttggaccctttctaaggacatttcagtgtacataagcatcgttcccatagagtgtccccagcatccctgggcacatacattatcaacttagcatccatacagaaagaaagtaaaatgtagattctgattcagtggatctgggacagggccccagctctccatttctgataaggtcccttgtgctgccattgctttgaatactagggtttcaaaccagaattggtgcatcggaatctcttgcgagacttattaaaaatgcagatttttggccccatcccagagcttctggatccagctct

SEQ ID NO: 86545 - DNA, 336 bp, Homo sapiens
ggaagtagtgcttgataatttgtaattccaatgaagttatacataaaacccttgcagcatttatttatttcttgtagtagcttattttatagacttgctattttgtcaatcaaaggacaacaggctgtaatataataacttacagacaagtagatatattgaaactactcatattactcaaaaagaaacgaatacattacaattaaatttggagatgaaaactaacataaaatacataaaacaaaataaacatataggtcattactaaattgttactttttttataccagaattacaatgactccctataattttttatactttttttataatatt

SEQ ID NO: 86546 - DNA, 394 bp, Homo sapiens
tggcattttggcaggatccattataatataaaagtatttcacacacttgacatttcagtatctatccaagagaaatacttgtgcatgtgtgtgtagtacaaatactctgttttcctttcctttcttcttggtcttgataatgactatttggtgaacaattacaattctaagtaatattttgaggcatgtttgttcagtcctttcatcattcaaatatttattaagcatctagtgtatagcaagcagaacactaagtgttggggatatagcagtgaacaaaactaagtacctaccattatggaaagagacacacacacacactagtgaaaagtgctaggaagaccaatgggagaacagagtgagtgacgactagtaagatgctgtttgatacaag

SEQ ID NO: 86547 - DNA, 298 bp, Homo sapiens
ttctggaatcaggcttgaaaaggagagaccttccctgtgacattagtaaaaacaaaaaagtctgagtcatgtggatcacctgaggtcaggagtttgaggccagcctggccaacatggtgaaacctgtctctactaaaactacaaaattagccaggtgtggtggtgcgcgcctgtaatcccagctgcttgggtggctgaggcaggagaatcgcttgaacccaggaggtggaggttacagtgagctgagattgtgccactgcactccagcctgggagacaagagggaaactcctcattta

SEQ ID NO: 86548 - DNA, 142 bp, Homo sapiens
cttccaaactacccagtaaagcattatccccattatctccatttctctgatgaaggcagttggcttagaataaatcagaacttgcgcaggttaaaagtgagtgactggcacagccatggcaaggggccttggactgattttc

SEQ ID NO: 86549 - DNA, 323 bp, Homo sapiens
acctgcatctgctgcttcctctaatacactcctgttcctcaccttcctttcactaccaaacatttcacataaaagttcatgaattacttcactcatcttctccataaaaaccagccttcttatttatgttattctgaataccaaaatgcacaaaatctagttctctctctctctttatatatctatacgtataggaaggtagataaatatagatatatctaattagctaaatccaatgccttttctgccttcttcacatttcttcacctactttgtatttttgctaaatatgtcactattcacccacccactctgatcaatga

SEQ ID NO: 86550 - DNA, 366 bp, Homo sapiens
actgaatacacattggctatttgtattagtgtgtgtgtgagtttgtgcatgtgtatatggcacacactatattagctgcaacagtctctgatgtttcagtttccttgtctgaaaaatagaagtttagattggaccatcactaaaattccttcttgctccgaaatatcaggaacatgagtctaatacaaatcttctattttttgaattctaagactttaatagcaatctgttatttaacttgtatagcagatgaaatggaagatcataaaacaaataaatagcaaagcctctgtccttaagagtcttaaaatattttgttttaaaaagtaaagataagtttcaatttgttccctcagatatatatca

SEQ ID NO: 86551 - DNA, 1040 bp, Homo sapiens
atacaatagtcttgctaccagcaccttaatctcccacatccaagttaaaattcatccaacactcaatctcccagctatcctgactgctcctatacaggtatctctcccactatatatatatcaagtgctattagtggctattatttgttgggttacacaaagccagaaatcatctacatctactctcttttcttctggttttgaatagcaaaatgcaacagggagatgttctcagatagagggagaacaacaaaaagaagggtccatgctgaacaaacttgtttgctttgaaatcggaagttctagaggaggtattctgacagtggccaggaaaacctcctgcccgcagaattttgtctaatccaccccagacagagttatccaacagcctggtatggtgcagaccaggggctctcgaaaggtgggctccaggcagcagcaccagtagcacctgggaaattgttggaaatgcaaattcttgggctccaccccagatcaacttaatcggactctctgggagtagggcccatcaatctgtgtttaacaagtcctccaggtgattccgatcctaatcaagtgtgagcccactgtctaatgcggtgcataccaaagcaggtgcacgggtcttaatcatcacctcagtcctctgaaacaggcaagtgtgtccattttacagaagaaggaactaaggcctggaaggcaagtccttgcctgagactaaacagaatcccagcaacataggacgaggctggaattcccacacctggactaatgcacagccagtgtttcaacgtcgccaacccagaaatgttttctctccctgtcatgctaattttcagccctttctgggtgacttgttcatcatccaaatatattatttttgttttgtttgactaaaggcaattatatttacattttctctaagtactggaatgtaatggttgaaattcctattcagtgatctggaagaactctaatgttctaaagtgattctttgataattaaagaaagatgtaattatgtataatgtgatttgtaag

SEQ ID NO: 86552 - DNA, 575 bp, Homo sapiens
agagggtggattatcttcacctgaattttcagagctctgtatttggttaggctctcaaataaaatcattatgcaacttggaagaaagtatcacgtctgctggaagagatgatctagagagcttccagcttgagataagtggctttttaaaagaaatggcatgtccatattctgtactcatatcaggagatattaaagatcgtttaaaaaagaagaaggaactaaggcctggaaggcaagtccttgcctgagactaaacagaatcccagcaacataggacgaggctggaattcccacacctggactaatgcacagccagtgtttcaacgtcgccaacccagaaatgttttctctccctgtcatgctaattttcagccctttctgggtgacttgttcatcatccaaatatattatttttgttttgtttgactaaaggcaattatatttacattttctctaagtactggaatgtaatggttgaaattcctattcagtgatctggaagaactctaatgttctaaagtgattctttgataattaaagaaagatgtaattatgtataatgtgatttgtaag

SEQ ID NO: 86553 - DNA, 717 bp, Homo sapiens
agctagaaaatatatgtatgtatactcacacatttatacacatctgtacttatttatacaattatccatctgtacgtatactaaaaacaatgatttcatgaagcttttgatcccaatccaacactagataaagactatataggcccatttatttgcaaatcatcacataaacatagaagaattattaacaatataagctgtagcttatgctaaatgttgataggaacagacaataagttatggagaacttcagaggacactaaggttggatgggattttggaagttgtacaggtcaatgccactccatctattggctgagtttcactaggttaatacatgaacaacaacaaaaataacctagatcagaagttaaagatcattttattgactatctgccgtgtctgtgccattgcagtgtactaggtgcacttacgagtcctctacttacaaactgcttttcacaaaatatgaaactccaggcaaaggttcagacatacgacgtttgtttttaaaatctttctacagccttgtatcctttttcctttccttcctttcaccctttttaaaatgtgttatgagttttatcttagactaacatcatctgtaatgttgctatacgccagtattcagttgctgtgtttgatgaatcataaaatggtgtaaaacttcaattagtgtactttttaaataaagtatctatgaatgcatccaaaaaa

SEQ ID NO: 86554 - DNA, 256 bp, Homo sapiens
gttattttctgtcatgtcatttttatctccacaatatctttttttctttttataacagggatctccctatgttgtccaggtcggtcttgaactcctggactcaagcagtcctccagcctcagcctctcaaagtatgggcatgagccatagtgtccagcccaaaatatcttttgattctgacctcttttagtccttaacatcttacgttagggcctcattttttgggaactgactgtgaactatgtatggctcatta

SEQ ID NO: 86555 - DNA, 864 bp, Homo sapiens
agccgcacgaccggtacaaatcctgcatgccagtgagtgcttgtcataagaccaaagttaccactgatgcaacaggaaatggcatgcctctggctcaccaaaatgaaggtgttctcttttggggctccgcacactaatttagaaagcttgaagaaccaggaattatagaatggagaaaagcactcatgggggaggtttgcagcctggtggcctatagcccagtttgggatttgagtgcctcttggccaggcatgctccctgctgtttaccagggtcctggtcacctgcacatccttacacttcctccatctcgcttctttgtcacttgtctgacccacagagaaaactgagttatcaatctttgaataaaactagaaggatgtggcctggagaaaagagggaaggaggtaattaaataatgctccatgaagaactttaaaaatatgcttcttaattaatacatgtggaaagaatacatatgggttaaaaatacaataatgtaaaagaatagaaaatcttccattatcttgtgtcctagagataaccacttttagtaattggtgtctacctttttttccccttttcttttaaataatagagatggggtttcgctatgttgaccaggctggtcttgaactcctggcttcaagtgatcctcccatctcggcatcccaaagtgctgggattataggtctgagtcatcatgcctggtgggtgtctatcttataaaaagcactaaacttaaagatttaaaggtgagagcctgtattaggccattctcatggtgctataaagaactgcccaagactgagtaatttataaaggaaagaggtttaattgactcacaattccacatggctgggg

SEQ ID NO: 86556 - DNA, 239 bp, Homo sapiens
gggacgcatccagggtcccaggcccagaaaacagtggagccaagagaggaacgaggtctctggattccggacgccctgctgctacttggcctccaaccaaaaaattgttcttctccttccttttttagtaggggagagaggagcaattttccatggaatatatctgatggcaggtcttgaggtcagtctgtcagaggcctgggagatcaggggacaagggtgaaattcgaatagattgt

SEQ ID NO: 86557 - DNA, 433 bp, Homo sapiens
agcgaaagtatctgtgttttggtcactgttttgctgtgaatgctgtgtttatgaggctgcctagcagttttcaccctttcctgcaactcagcacattccctggggcggagtcaggtcatgggctgcaacctggagagtttatggcaaacagaagcccctgttacctcatccaatggagataacccttgctgcctaggagatgtgctgtatattcttccaggtcttgtttttcttgatagactcatggtagcttttacatcatttccatttgcgaatgaaactcagttgacccttgaacaacatgagcttgaactgcatgggtccacttacatgcagattattttcaatcaatatatttcggagattttcaacaacatgaaaacactcatagatatacaccatgtataactgtgtagcctagatataccaaaaa

SEQ ID NO: 86558 - DNA, 321 bp, Homo sapiens
gaataaccaaaatcctgggatatttctgaaactcagtcgaggtcagtagatctgtctgggactacattttccatcccagttcctaacaaagtttcattttcttttctttattctctgatgtaagagttaacagtgaaatgaccaaaatcctgaaagccaatggagcaacaataaacatactcagatagattgcctcataaattctttcaagttagtttttaaaagtaacacattttttaaaagtccactttggcaaaattgataatttaatatctggttatcagcctctccaaaggattcctggaaaagttattttctttt

SEQ ID NO: 86559 - DNA, 293 bp, Homo sapiens
tgttattaaaatataacaaggttgtaagtgaccaagaatccatttgtgttgaatctcctgtcttatcagaaacaaaaattgcagctatttcaggaagacagttctaattttggggtttccggagaaggggatctcaggatctcattacaattttagcagcccccaagtgaaaagaaattcttacatcccattgtgggaattttaaatatgtccacaaattctttgatactctgaccttctcaagaggaggaggttaattcttttctccttgagtgtgggctgaacttagtgac

SEQ ID NO: 86560 - DNA, 709 bp, Homo sapiens
ccggcctctgggcggagatctgctgccgcgttctacccttccggcccgtgttctatccgccgcctccaccttccatccggcgccggctttcggcgcgacggtcgccgcgttccatcgtcgcgcggcccttcgggcgcccgagcccgcaatgtcgggccccaacggagacctggggatgccggtggaggcgggagcggaaggcgaggaggacggcttcggggaagcagaatacgctgccatcaactccatgctggaccagatcaactcctgtctggaccacctggaggagaagaatgaccacctccacgcccgcctccaggagctgctggagtccaaccggcagacacgcctggagttccagcagcagctcggggaggcccccagtgatgccagcccctaggctccaagagcccccaaccgggacccaaccctgcctccctgggctaggctctggcctgggcactcaccccctggcttagacaccttctcaagggctggccttcagggacccctggtgggtctgcctgcctgggccacccttcctgcctgggcctccccttggcctacctgggccagcccccaccacctggcatgccctcctggggccaagagtgggcctgcaacccacccacttgcctgcccacccaactcctgggcgctccccactctgcccaggccttgagtgtccacattaaatgggtctcccaca

SEQ ID NO: 86561 - DNA, 764 bp, Homo sapiens
  misc_feature (740)..(740): n is a, c, g, or t
ccggcctctgggcggagatctgctgccgcgttctacccttccggcccgtgttctatccgccgcctccaccttccatccggcgccggctttcggcgcgacggtcgccgcgttccatcgtcgcgcggcccttcgggcgcccgagcccgcaatgtcgggccccaacggagacctggggatgccggtggaggcgggagcggaaggcgaggaggacggcttcggggaagcagaatacgctgccatcaactccatgctggaccagatcaactcctgtctggaccacctggaggagaagaatgaccacctccacgcccgcctccaggagctgctggagtccaaccggcagacacgcctggagttccagcagcagctcggggaggcccccagtgatgccagcccctaggctccaagagcccccaaccgggacccaaccctgcctccctgggctaggctctggcctgggcactcaccccctggcttagacaccttctcaagggctggccttcagggacccctggtgggtctgcctgcctgggccacccttcctgcctgggcctccccttggcctacctgggccagcccccaccacctggcatgccctcctggggccaagagtgggcctgcaacccacccacttgcctgcccacccaactcctgggcgctccccactctgcccaggccttgagtgtccacattaaatgggtctcccacaaaaaaaaaaaacaaaaaaacaaaaaaaaaanaaagggggcgggatgaaaaaaatt

SEQ ID NO: 86562 - DNA, 579 bp, Homo sapiens
ccggcctctgggcggagatctgctgccgcgttctacccttccggcccgtgttctatccgccgcctccaccttccatccggcgccggctttcggcgcgacggtcgccgcgttccatcgtcgcgcggcccttcgggcgcccgagcccgcaatgtcgggccccaacggagacctggggatgccggtggaggcgggagcggaaggcgaggaggacggcttcggggaagcagaatacgctgccatcaactccatgctggaccagatcaactcctgtctggaccacctggaggagaagaatgaccacctccacgcccgcctccaggagctgctggagtccaaccggcagacacgcctggagttccagcagcagctcggggaggcccccagtgatgccagcccctaggctccaagagcccccaaccgggacccaaccctgcctccctgggctaggctctggcctgggcactcaccccctctgtgctgctcacctcctctgtgctgtccacctcctctgtgctgtccacctcctctgtgctgtccacctcctctgtgctgtccacctcctctgtgcctcctctgtgc

SEQ ID NO: 86563 - DNA, 2148 bp, Homo sapiens
ccggcctctgggcggagatctgctgccgcgttctacccttccggcccgtgttctatccgccgcctccaccttccatccggcgccggctttcggcgcgacggtcgccgcgttccatcgtcgcgcggcccttcgggcgcccgagcccgcaatgtcgggccccaacggagacctggggatgccggtggaggcgggagcggaaggcgaggaggacggcttcggggaagcagaaaggtacaacttgctggggtaaagcagagctgaaattcaaacccaagtgaccctgacccccaagtccaatcctgagtttcggctgttaccaacctggaggaccctgggcaggttccttccttctgaggcctcggtttccctagctatataccatgagggggttggactttaagatgcagccgatttcccaggacgctgtcgtctgtgagggtggctggctctaggcaacgggtgccctttcccagaacacaggcacatatgcacccataacccagatacgctcctccagctcctccaccggctgcttcccccttggtctcaagctggcagctgagtgtatgtgagtcatgggctggctcagaactgggtcccgcagtgggcacaggcccagaccttgagtcctcagggacactgtgttgctgagcagggcagctctggagtggccgtggaggggagggagtgatggtttctagtggagaccagggaaggcttcttggaggaggcattttgagctggtccttgaagggctgttgtggttgaggcattctaggttgcagggatagttgagcaatggcggagaggctggaaagtcagaggcttcattcattcactcactcagtcattcaacaaatgcttatcgcaaaactgtgagggcaccagggagccagcagcgaacacaggaccgttcatctttcatggggaaacataacagcactcagataagcacagcagtcaatcctggagagaaggtcgtggagggctgaggagggctaggggctcagcatagaggcctgatccagtctggggcattgggtgggctcccggtggtgacatccatactgagacttgaaggatgagtgggactcatccaggaggagagaagggaaggaagatgggaggacccagcaccttccaggcagagacagcagcatgttcaaagggcctgaggtaggtaaaggcaggtgtgagagaggaaaggaagaggcagggaggcagggctagctaggaggcaggggctggagactccgctgggtgttttatcctgagggagccacagaagggctggcgaacagggcccatctggggacagaggccttgaatgcccaactcaggaatgtgggctctggccactaagcagctgctgcaggaagtgcagagacttggcatctggcaggacttcccatgtaggacactggctcgccaccctatgaccaccctaaccctagaaaaaaggatgcagtactaaagtgtcattcattcaaagccactcctcttttggtattccacccattttccagacggtgacactgaggctcaggaagcagtagggacttgcacaaagccctttgggaagcaggctgggaaacagtggagggagggtgtccattagccccaaggagacacaggatctgggctctgtctttcgccttcctcccagaatacgctgccatcaactccatgctggaccagatcaactcctgtctggaccacctggaggagaagaatgaccacctccacgcccgcctccaggagctgctggagtccaaccggcagacacgcctggagttccagcagcagctcggggaggcccccagtgatgccagcccctaggctccaagagcccccaaccgggacccaaccctgcctccctgggctaggctctggcctgggcactcaccccctggcttagacaccttctcaagggctggccttcagggacccctggtgggtctgcctgcctgggccacccttcctgcctgggcctccccttggcctacctgggccagcccccaccacctggcatgccctcctggggccaagagtgggcctgcaacccacccacttgcctgcccacccaactcctgggcgctccccactctgcccaggccttgagtgtccacattaaatgggtctcccaca

SEQ ID NO: 86564 - DNA, 958 bp, Homo sapiens
ccggcctctgggcggagatctgctgccgcgttctacccttccggcccgtgttctatccgccgcctccaccttccatccggcgccggctttcggcgcgacggtcgccgcgttccatcgtcgcgcggcccttcgggcgcccgagcccgcaatgtcgggccccaacggagacctggggatgccggtggaggcgggagcggaaggcgaggaggacggcttcggggaagcagaatacgctgccatcaactccatgctggaccagatcaactcctgtctggaccacctggaggagaagaatgaccacctccacgcccgcctccaggagctgctggagtccaaccggcagacacgcctggagttccagcagcagctcggggaggcccccagtgatgccagcccctaggctccaagagcccccaaccgggacccaaccctgcctccctgggctaggctctggcctgggcactcaccccctggcttagacaccttctcaagggctggccttcagggacccctggtgggtctgcctgcctgggccacccttcctgcctgggcctccccttggcctacctgggccagcccccaccacctggcatgccctcctggggccaagagtgggcctgcaacccacccacttgcctgcccacccaactcctgggcgctccccactctgcccaggccttgagtgtccacattaaatgggtctcccacaacaaaaaaaatacaacaacgaaaaacactccgagaataaagctctcatccccatgaatgcagtacgtgtgacgcattagctttagagagcctaaatatctaggcgaaccgcttcacgaaggttactaatgcgacccctgtgcaacaaacctttaccccttgacaataagcgtggttcacacacccactattttgtatcacacactctcccgacactacaatcacacaacaaacttggcaaggaaaaatc

SEQ ID NO: 86565 - DNA, 1444 bp, Homo sapiens
ccggcctctgggcggagatctgctgccgcgttctacccttccggcccgtgttctatccgccgcctccaccttccatccggcgccggctttcggcgcgacggtcgccgcgttccatcgtcgcgcggcccttcgggcgcccgagcccgcaatgtcgggccccaacggagacctggggatgccggtggaggcgggagcggaaggcgaggaggacggcttcggggaagcagaaaggtacaacttgctggggtaaagcagagctgaaattcaaacccaagtgaccctgacccccaagtccaatcctgagtttcggctgttaccaacctggaggaccctgggcaggttccttccttctgaggcctcggtttccctagctatataccatgagggggttggactttaagatgcagccgatttcccaggacgctgtcgtctgtgagggtggctggctctaggcaacgggtgccctttcccagaacacaggcacatatgcacccataacccagatacgctcctccagctcctccaccggctgcttcccccttggtctcaagctggcagctgagtgtatgtgagtcatgggctggctcagaactgggtcccgcagtgggcacaggcccagaccttgagtcctcagggacactgtgttgctgagcagggcagctctggagtggccgtggaggggagggagtgatggtttctagtggagaccagggaaggcttcttggaggaggcattttgagctggtccttgaagggctgttgtggttgaggcattctaggttgcagggatagttgagcaatggcggagaggctggaaagtcagaggcttcattcattcactcactcagtcattcaacaaatgcttatcgcaaaactgtgagggcaccagggagccagcagcgaacacaggaccgttcatctttcatggggaaacataacagcactcagataagcacagcagtcaatcctggagagaaggtcgtggagggctgaggagggctaggggctcagcatagaggcctgatccagtctggggcattgggtgggctcccggtggtgacatccatactgagacttgaaggatgagtgggactcatccaggaggagagaagggaaggaagatgggaggacccagcaccttccaggcagagacagcagcatgttcaaagggcctctgggctaggctctggcctgggcactcaccccctggcttagacaccttctcaagggctggccttcagggacccctggtgggtctgcctgcctgggccacccttcctgcctgggcctccccttggcctacctgggccagcccccaccacctggcatgccctcctggggccaagagtgggcctgcaacccacccacttgcctgcccacccaactcctgggcgctccccactctgcccaggccttgagtgtccacattaaatgggtctcccaca

SEQ ID NO: 86566 - DNA, 3261 bp, Homo sapiens
  misc_feature (402)..(402): n is a, c, g, or t
  misc_feature (406)..(406): n is a, c, g, or t
  misc_feature (409)..(409): n is a, c, g, or t
  misc_feature (414)..(415): n is a, c, g, or t
  misc_feature (419)..(421): n is a, c, g, or t
  misc_feature (980)..(980): n is a, c, g, or t
  misc_feature (1297)..(1297): n is a, c, g, or t
gtgagagctgcaggtcaccagtcccgttttacagatggggaaactaaggcagcttcggggacactcgcccttgtgggccttgctccaccacttccttcagtcctgggggagaccgaggcacctgagggaggcagggttgagcttagcggaggggccgggccgggacgtggagttggggacgcgggggcgtcgctctgccgattcagcatccccagccacccggctttgctggtgtagcctcacagccttgccaaatgtcagcagcttacagagcagccttttgcgtgcttacgagtgcaggggtggggtgtgaagagaaccatcggctcccttctcaccttcttcagcctcagtttccccctctataaaataggaataacgattagtgtctgctgcactggnatgngtnagaannaaannnaaaaaaaaggaaaatccttagcaggttctagcatgcaagagttcagtaaatggttatcgtcattattatctttggtatagtaaagattggcatgttaacatacactgaggatttagtaaatgtggtgtaagtatggtgcatgctctttgttttgtttggcgtaacagctttattgagctatacaacttacccatttaaactgtacagttcagtaggctttagtgtattcccagggttgtacatccatcacaatagtttcaggtagctctgcattgggcaatgctgttgggagcatcaggaagagcttcccaggaggtcacattaagtggatgttggcagacaggacttagaacagtggggaggagggtggtgtcccaggcagaagcaaaggcttggaactgggaagtacccttgacacagataaagcctggcctggaggggtgtggggcacctgcctccccaattcctcctcctagcctgtatcccaggacacagagttcgaaatattgataataatgaccatccactaagtacttgctgtggccagatcctgtctgancttttttttttttttgagtcggagtcttgctctgttgcccaggctggagtacagtggcgtgatcttggctcactgcaacctccgccttctgggttcaagcgattctcatgcctcagcctcccgagtagctgggactacagacgcctgccaccacgcctggctaatttttatacatctttagtagagacaatgtttcaccacgtcggctaggctggtctcgaactcctgacctcaggtgatccacccgccttggcttcccaaagtactgggattacaggcgtgagccaccacaccggccactgtctgaactcttgatntgtttgaatcctcacaaccttttttattttcccttttttccagaaaggtacaacttgctggggtaaagcagagctgaaattcaaacccaagtgaccctgacccccaagtccaatcctgagtttcggctgttaccaacctggaggaccctgggcaggttccttccttctgaggcctcggtttccctagctatataccatgagggggttggactttaagatgcagccgatttcccaggacgctgtcgtctgtgagggtggctggctctaggcaacgggtgccctttcccagaacacaggcacatatgcacccataacccagatacgctcctccagctcctccaccggctgcttcccccttggtctcaagctggcagctgagtgtatgtgagtcatgggctggctcagaactgggtcccgcagtgggcacaggcccagaccttgagtcctcagggacactgtgttgctgagcagggcagctctggagtggccgtggaggggagggagtgatggtttctagtggagaccagggaaggcttcttggaggaggcattttgagctggtccttgaagggctgttgtggttgaggcattctaggttgcagggatagttgagcaatggcggagaggctggaaagtcagaggcttcattcattcactcactcagtcattcaacaaatgcttatcgcaaaactgtgagggcaccagggagccagcagcgaacacaggaccgttcatctttcatggggaaacataacagcactcagataagcacagcagtcaatcctggagagaaggtcgtggagggctgaggagggctaggggctcagcatagaggcctgatccagtctggggcattgggtgggctcccggtggtgacatccatactgagacttgaaggatgagtgggactcatccaggaggagagaagggaaggaagatgggaggacccagcaccttccaggcagagacagcagcatgttcaaagggcctgaggtaggtaaaggcaggtgtgagagaggaaaggaagaggcagggaggcagggctagctaggaggcaggggctggagactccgctgggtgttttatcctgagggagccacagaagggctggcgaacagggcccatctggggacagaggccttgaatgcccaactcaggaatgtgggctctggccactaagcagctgctgcaggaagtgcagagacttggcatctggcaggacttcccatgtaggacactggctcgccaccctatgaccaccctaaccctagaaaaaaggatgcagtactaaagtgtcattcattcaaagccactcctcttttggtattccacccattttccagacggtgacactgaggctcaggaagcagtagggacttgcacaaagccctttgggaagcaggctgggaaacagtggagggagggtgtccattagccccaaggagacacaggatctgggctctgtctttcgccttcctcccagaatacgctgccatcaactccatgctggaccagatcaactcctgtctggaccacctggaggagaagaatgaccacctccacgcccgcctccaggagctgctggagtccaaccggcagacacgcctggagttccagcagcagctcggggaggcccccagtgatgccagcccctaggctccaagagcccccaaccgggacccaaccctgcctccctgggctaggctctggcctgggcactcaccccctggcttagacaccttctcaagggctggccttcagggacccctggtgggtctgcctgcctgggccacccttcctgcctgggcctccccttggcctacctgggccagcccccaccacctggcatgccctcctggggccaagagtgggcctgcaacccacccacttgcctgcccacccaactcctgggcgctccccactctgcccaggccttgagtgtccacattaaatgggtctcccaca

SEQ ID NO: 86567 - DNA, 980 bp, Homo sapiens
ccggcctctgggcggagatctgctgccgcgttctacccttccggcccgtgttctatccgccgcctccaccttccatccggcgccggctttcggcgcgacggtcgccgcgttccatcgtcgcgcggcccttcgggcgcccgagcccgcaatgtcgggccccaacggagacctggggatgccggtggaggcgggagcggaaggcgaggaggacggcttcggggaagcagaatacgctgccatcaactccatgctggaccagatcaactcctgtctggaccacctggaggagaagaatgaccacctccacgcccgcctccaggagctgctggagtccaaccggcagacacgcctggagttccagcagcagctcggggaggcccccagtgatgccagcccctaggctccaagagcccccaaccgggacccaaccctgcctccctgggctaggctctggcctgggcactcaccccctggcttagacaccttctcaagggctggccttcagggacccctggtgggtctgcctgcctgggccacccttcctgcctgggcctccccttggcctacctgggccagcccccaccacctggcatgccctcctggggccaagagtgggcctgcaacccacccacttgcctgcccacccaactcctgggcgctccccactctgcccaggccttgagtgtccacattaaatgggtctcccacaaaaaaaaaaaaaaaaaacagaagtataaaagataataacatcagtctatccactaataacaagaacgacacgacgcggggggcactatttttgcggggggcgcgggcacacaagaacgggtgtcatcaaacggggcggcgacgtgcgcgcaaaagcggtggctgctcgacgaccccgcttttgtgtgtgaccaaaggggggtaacataccgggggcggcccccacattgaggaggccgcgcataatcttgcgctaacccccgggttcctgt

SEQ ID NO: 86568 - DNA, 422 bp, Homo sapiens
cccccctggctttgctcagagtctagtaagggcttagcttaattaaagtggccgtggaggggagggagtgatggtttctagtggagaccagggaaggcttcttggaggaggcattttgagctggtccttgaagggctgttgtggttgaggcattctaggttgcagggatagttgagcaatggcggagaggctggaaagtcagaggcttcattcattcactcactcagtcattcaacaaatgcttatcgcaaaactgtgagggcaccagggagccagcagcgaacacaggaccgttcatctttcatggggaaacataacagcactcagatgagcaagccaggagacctgagcaagccaggagacctgagcaagccaggagacctgagcaagccaggagacctgagcaagccaggagacctgag

SEQ ID NO: 86569 - DNA, 1655 bp, Homo sapiens
ccggcctctgggcggagatctgctgccgcgttctacccttccggcccgtgttctatccgccgcctccaccttccatccggcgccggctttcggcgcgacggtcgccgcgttccatcgtcgcgcggcccttcgggcgcccgagcccgcaatgtcgggccccaacggagacctggggatgccggtggaggcgggagcggaaggcgaggaggacggcttcggggaagcagaaaggtacaacttgctggggtaaagcagagctgaaattcaaacccaagtgaccctgacccccaagtccaatcctgagtttcggctgttaccaacctggaggaccctgggcaggttccttccttctgaggcctcggtttccctagctatataccatgagggggttggactttaagatgcagccgatttcccaggacgctgtcgtctgtgagggtggctggctctaggcaacgggtgccctttcccagaacacaggcacatatgcacccataacccagatacgctcctccagctcctccaccggctgcttcccccttggtctcaagctggcagctgagtgtatgtgagtcatgggctggctcagaactgggtcccgcagtgggcacaggcccagaccttgagtcctcagggacactgtgttgctgagcagggcagctctggagtggccgtggaggggagggagtgatggtttctagtggagaccagggaaggcttcttggaggaggcattttgagctggtccttgaagggctgttgtggttgaggcattctaggttgcagggatagttgagcaatggcggagaggctggaaagtcagaggcttcattcattcactcactcagtcattcaacaaatgcttatcgcaaaactgtgagggcaccagggagccagcagcgaacacaggaccgttcatctttcatggggaaacataacagcactcagataagcacagcagtcaatcctggagagaaggtcgtggagggctgaggagggctaggggctcagcatagaggcctgatccagtctggggcattgggtgggctcccggtggtgacatccatactgagacttgaaggatgagtgggactcatccaggaggagagaagggaaggaagatgggaggacccagcaccttccaggcagagacagcagcatgttcaaagggcctaatacgctgccatcaactccatgctggaccagatcaactcctgtctggaccacctggaggagaagaatgaccacctccacgcccgcctccaggagctgctggagtccaaccggcagacacgcctggagttccagcagcagctcggggaggcccccagtgatgccagcccctaggctccaagagcccccaaccgggacccaaccctgcctccctgggctaggctctggcctgggcactcaccccctggcttagacaccttctcaagggctggccttcagggacccctggtgggtctgcctgcctgggccacccttcctgcctgggcctccccttggcctacctgggccagcccccaccacctggcatgccctcctggggccaagagtgggcctgcaacccacccacttgcctgcccacccaactcctgggcgctccccactctgcccaggccttgagtgtccacattaaatgggtctcccaca

SEQ ID NO: 86570 - DNA, 2137 bp, Homo sapiens
  misc_feature (402)..(402): n is a, c, g, or t
  misc_feature (406)..(406): n is a, c, g, or t
  misc_feature (409)..(409): n is a, c, g, or t
  misc_feature (414)..(415): n is a, c, g, or t
  misc_feature (419)..(421): n is a, c, g, or t
  misc_feature (980)..(980): n is a, c, g, or t
  misc_feature (1297)..(1297): n is a, c, g, or t
gtgagagctgcaggtcaccagtcccgttttacagatggggaaactaaggcagcttcggggacactcgcccttgtgggccttgctccaccacttccttcagtcctgggggagaccgaggcacctgagggaggcagggttgagcttagcggaggggccgggccgggacgtggagttggggacgcgggggcgtcgctctgccgattcagcatccccagccacccggctttgctggtgtagcctcacagccttgccaaatgtcagcagcttacagagcagccttttgcgtgcttacgagtgcaggggtggggtgtgaagagaaccatcggctcccttctcaccttcttcagcctcagtttccccctctataaaataggaataacgattagtgtctgctgcactggnatgngtnagaannaaannnaaaaaaaaggaaaatccttagcaggttctagcatgcaagagttcagtaaatggttatcgtcattattatctttggtatagtaaagattggcatgttaacatacactgaggatttagtaaatgtggtgtaagtatggtgcatgctctttgttttgtttggcgtaacagctttattgagctatacaacttacccatttaaactgtacagttcagtaggctttagtgtattcccagggttgtacatccatcacaatagtttcaggtagctctgcattgggcaatgctgttgggagcatcaggaagagcttcccaggaggtcacattaagtggatgttggcagacaggacttagaacagtggggaggagggtggtgtcccaggcagaagcaaaggcttggaactgggaagtacccttgacacagataaagcctggcctggaggggtgtggggcacctgcctccccaattcctcctcctagcctgtatcccaggacacagagttcgaaatattgataataatgaccatccactaagtacttgctgtggccagatcctgtctgancttttttttttttttgagtcggagtcttgctctgttgcccaggctggagtacagtggcgtgatcttggctcactgcaacctccgccttctgggttcaagcgattctcatgcctcagcctcccgagtagctgggactacagacgcctgccaccacgcctggctaatttttatacatctttagtagagacaatgtttcaccacgtcggctaggctggtctcgaactcctgacctcaggtgatccacccgccttggcttcccaaagtactgggattacaggcgtgagccaccacaccggccactgtctgaactcttgatntgtttgaatcctcacaaccttttttattttcccttttttccagaaaggtacaacttgctggggtaaagcagagctgaaattcaaacccaagtgaccctgacccccaagtccaatcctgagtttcggctgttaccaacctggaggaccctgggcaggttccttccttctgaggcctcggtttccctagctatataccatgagggggttggactttaagatgcagccgatttcccaggacgctgtcgtctgtgagggtggctggctctaggcaacgggtgccctttcccagaacacaggcacatatgcacccataacccagatacgctcctccagctcctccaccggctgcttcccccttggtctcaagctggcagctgagtgtatgtgagtcatgggctggctcagaactgggtcccgcagtgggcacaggcccagaccttgagtcctcagggacactgtgttgctgagcagggcagctctggagtggccgtggaggggagggagtgatggtttctagtggagaccagggaaggcttcttggaggaggcattttgagctggtccttgaagggctgttgtggttgaggcattctaggttgcagggatagttgagcaatggcggagaggctggaaagtcagaggcttcattcattcactcactcagtcattcaacaaatgcttatcgcaaaactgtgagggcaccagggagccagcagcgaacacaggaccgttcatctttcatggggaaacataacagcacccacttgcctgcccacccaactcctgggcgctccccactctgcccaggccttgagtgtccacattaaatgggtctcccaca

SEQ ID NO: 86571 - DNA, 1583 bp, Homo sapiens
gtttttctagatttaagtttctgagtgagcctcgttttaccttttaaaattataaccccttctgtttcaaattatatattttttgccatcagaagaagagtttcgttcaggaaatacggagaccctgctctgcctttaccatgtcctccagagccctagactagagtaatggctttttggatggaggtaaccaatgtaggagtcattagcggggagattgagtgggatgtttgggggccagtggcgcggccagttgtgactgtagcagagtgaaggcgaatgcacaaagagataggccagggcaaggtcatagggatcttgaattctagaaaggacttagagttttattctaagtgtgatgggcagccatggaaggctgtgccatgatcgtactcatactttaaaaagattatgtaggcagctgtgtagagaccaagcgtagtggagcaacaatggaggcaagatgaccagtaaggaagctgttgtaatagttgaggtgagagatgatggcaccgtgggctagggtgacagcatcacagatggtggtcagaggctgggtatttttggaagtagagcccacaggatttgctgcacagcatatgggctatgagagaaaagaaagaagtctagaatgattcagatatttttggcctgagcagttatgtgaatgatggtactatttgctaaaatagtttgcttgggaaggattaggtttaggggtaaaattaacaatatgaatgaatgacctaatcttataatgcaaagacaaaatattatgacatggatagttcctgaatacattctcatgcaagcatcaaagagtatagacgtatacagtgtaaaagcacccccttttcctagctaacaatcattgttagcagtttggtatgcattttttcttgtcctttttctgcgtgtttttttcataaatgggattatactataaggattattggtgttttgcttttcgagttgatcatttgtcttgaagaccttccatgtcagtacatgcatgtagtgcattctttttaatgactgcagagagctttatgtggatatgccatagttggtatttactcagtttcctgttgaaggatatttggattgtctctgttgttcactattagaaggcgtgctgcagtgattatttgcacacctgcttttgtgtgtggattccagcatttccctgagatggattccttcaagtggaatggttgctggctccagtttttacaagccctttgacatctgttgtttaggtcctttgcatccttgtagccggttgataatttggtgctcctttgagtatgttagattgtttctgaagcttaatcttttggttaaatcagaagcatccttaacagacccttctgttagacactgacactgattttaaaacaaccaagggatagaaaaaaaaaaaaacttagtgtgtgtgtatgtgtgccagggaaagagagatgacaattaattggatgtgtccctattagccctggaactgcttgatatgctttctgagtggcatgttcttataggtcagatgggagatgggatggggctttgcccatatctaagagtctatt

SEQ ID NO: 86572 - DNA, 1529 bp, Homo sapiens
gtttttctagatttaagtttctgagtgagcctcgttttaccttttaaaattataaccccttctgtttcaaattatatattttttgccatcagaagaagagtttcgttcaggaaatacggagaccctgctctgcctttaccatgtcctccagagccctagactagagtaatggctttttggatggaggtaaccaatgtaggagtcattagcggggagattgagtgggatgtttgggggccagtggcgcggccagttgtgactgtagcagagtgaaggcgaatgcacaaagagataggccagggcaaggtcatagggatcttgaattctagaaaggacttagagttttattctaagtgtgatgggcagccatggaaggctgtgccatgatcgtactcatactttaagcaagatgaccagtaaggaagctgttgtaatagttgaggtgagagatgatggcaccgtgggctagggtgacagcatcacagatggtggtcagaggctgggtatttttggaagtagagcccacaggatttgctgcacagcatatgggctatgagagaaaagaaagaagtctagaatgattcagatatttttggcctgagcagttatgtgaatgatggtactatttgctaaaatagtttgcttgggaaggattaggtttaggggtaaaattaacaatatgaatgaatgacctaatcttataatgcaaagacaaaatattatgacatggatagttcctgaatacattctcatgcaagcatcaaagagtatagacgtatacagtgtaaaagcacccccttttcctagctaacaatcattgttagcagtttggtatgcattttttcttgtcctttttctgcgtgtttttttcataaatgggattatactataaggattattggtgttttgcttttcgagttgatcatttgtcttgaagaccttccatgtcagtacatgcatgtagtgcattctttttaatgactgcagagagctttatgtggatatgccatagttggtatttactcagtttcctgttgaaggatatttggattgtctctgttgttcactattagaaggcgtgctgcagtgattatttgcacacctgcttttgtgtgtggattccagcatttccctgagatggattccttcaagtggaatggttgctggctccagtttttacaagccctttgacatctgttgtttaggtcctttgcatccttgtagccggttgataatttggtgctcctttgagtatgttagattgtttctgaagcttaatcttttggttaaatcagaagcatccttaacagacccttctgttagacactgacactgattttaaaacaaccaagggatagaaaaaaaaaaaaacttagtgtgtgtgtatgtgtgccagggaaagagagatgacaattaattggatgtgtccctattagccctggaactgcttgatatgctttctgagtggcatgttcttataggtcagatgggagatgggatggggctttgcccatatctaagagtctatt

SEQ ID NO: 86573 - DNA, 1777 bp, Homo sapiens
cgtgcgtgtctcgagtcgcacggacggcaaccgtcgacgggcttagcgcctcaactgtcgttggtgtatttttctggtgtcacttctgtgccttccttcaaaggtggtgctttgtccctgtgggtcatctgtactgattgcgccaagaaagcatttgttctccaaatgtcaactgtcaaggagcagctaattgagaagctaattgaggatgatgaaaactcccagtgtaaaattactattgttggaactggtgccgtaggcatggcttgtgctattagtatcttactgaaggatttggctgatgaacttgcccttgttgatgttgcattggacaaactgaagggagaaatgatggatcttcagcatggcagtcttttctttagtacttcaaagattacttctggaaaagattacagtgtatctgcaaactccagaatagttattgtcacagcaggtgcaaggcagcaggagggagaaactcgccttgccctggtccaacgtaatgtggctataatgaaatcaatcattcctgccatagtccattatagtcctgattgtaaaattcttgttgtttcaaatccagtggatattttgacatatatagtctggaagataagtggcttacctgtaactcgtgtaattggaagtggttgtaatctagactctgcccgtttccgttacctaattggagaaaagttgggtgtccaccccacaagctgccatggttggattattggagaacatggtgattctagtgtgcccttatggagtggggtgaatgttgctggtgttgctctgaagactctggaccctaaattaggaacggattcagataaggaacactggaaaaatatccataaacaagttattcaaagtgcctatgaaattatcaagctgaaggggtatacctcttgggctattggactgtctgtgatggatctggtaggatccattttgaaaaatcttaggagagtgcacccagtttccaccatggttaagggattatatggaataaaagaagaactctttctcagtatcccttgtgtcttggggcggaatggtgtctcagatgttgtgaaaattaacttgaattctgaggaggaggcccttttcaagaagagtgcagaaacactttggaatattcaaaaggatctaatattttaaattaaagccttctaatgttccactgtttggagaacagaagatagcaggctgtgtattttaaattttgaaagtattttcatttgatctttaaaaaataaaaacaaattggagacctgtgacataactctagtctctcaagattagaacgagcaaatggtaaagagattttcctctttaagaatcatttatagctctattctaatgatacccaatctgtacaggtgtaagttatacttctgaggtatgtcacatatgttagagtgccttcagatgtagtagaatatgtataatcactataatacagagctttgattcttttcacaaaccaagccctttttctagtattacaattttatcttgtactttcatccgttagagtaccagcatattcacttcattacattagcgtcatatgtttatgtataatcattataaatgtggccgggcactgcagctccagcctgggccacagaggaagactcagactcaaaagaagaagaagaacacagaagaaaagcagaaacaagaagaagatacagatgtaactttacgatgtaaaaaatctaaataagattgtattcaactctgcaagtattatactagtcatataaac

SEQ ID NO: 86574 - DNA, 1251 bp, Homo sapiens
cgtgcgtgtctcgagtcgcacggacggcaaccgtcgacgggcttagcgcctcaactgtcgttggtgtatttttctggtgtcacttctgtgccttccttcaaaggttctccaaatgtcaactgtcaaggagcagctaattgagaagctaattgaggatgatgaaaactcccagtgtaaaattactattgttggaactggtgccgtaggcatggcttgtgctattagtatcttactgaaggatttggctgatgaacttgcccttgttgatgttgcattggacaaactgaagggagaaatgatggatcttcagcatggcagtcttttctttagtacttcaaagattacttctggaaaagattacagtgtatctgcaaactccagaatagttattgtcacagcaggtgcaaggcagcaggagggagaaactcgccttgccctggtccaacgtaatgtggctataatgaaatcaatcattcctgccatagtccattatagtcctgattgtaaaattcttgttgtttcaaatccagtggatattttgacatatatagtctggaagataagtggcttacctgtaactcgtgtaattggaagtggttgtaatctagactctgcccgtttccgttacctaattggagaaaagttgggtgtccaccccacaagctgccatggttggattattggagaacatggtgattctagtgtgcccttatggagtggggtgaatgttgctggtgttgctctgaagactctggaccctaaattaggaacggattcagataaggaacactggaaaaatatccataaacaagttattcaaagtgcctatgaaattatcaagctgaaggggtatacctcttgggctattggactgtctgtgatggatctggtaggatccattttgaaaaatcttaggagagtgcacccagtttccaccatggttaagggattatatggaataaaagaagaactctttctcagtatcccttgtgtcttggggcggaatggtgtctcagatgttgtgaaaattaacttgaattctgaggaggaggcccttttcaagaagagtgcagaaacactttggaatattcaaaaggatctaatattttaaattaaagccttctaatgttccactgtttggagaacagaagatagcaggctgtgtattttaaattttgaaagtattttcatttgatctttaaaaaataaacaactggcctcgttggcctcagcggtggagctctgcggccg

SEQ ID NO: 86575 - DNA, 787 bp, Homo sapiens
atagaatgttaaacaggcaggcaggctacagtatactcacgtcagatcctcctttcctctgcggctatctcatggcaataaagaaagaactctttctcagtatcccttgtgtcttggggcggaatggtgtctcagatgttgtgaaaattaacttgaattctgaggaggaggcccttttcaagaagagtgcagaaacactttggaatattcaaaaggatctaatattttaaattaaagccttctaatgttccactgtttggagaacagaagatagcaggctgtgtattttaaattttgaaagtattttcatttgatctttaaaaaataaaaacaaattggagacctgtgacataactctagtctctcaagattagaacgagcaaatggtaaagagattttcctctttaagaatcatttatagctctattctaatgatacccaatctgtacaggtgtaagttatacttctgaggtatgtcacatatgttagagtgccttcagatgtagtagaatatgtataatcactataatacagagctttgattcttttcacaaaccaagccctttttctagtattacaattttatcttgtactttcatccgttagagtaccagcatattcacttcattacattagcgtcatatgtttatgtataatcattataaatgtggccgggcactgcagcctgggtgacagagtgaggctctgtctcaaaaaaaatcattataaatgcttatttttaagaccatatatatcaaaaagaaataaaaagctgagtgctgtggct

SEQ ID NO: 86576 - DNA, 1721 bp, Homo sapiens
cgtgcgtgtctcgagtcgcacggacggcaaccgtcgacgggcttagcgcctcaactgtcgttggtgtatttttctggtgtcacttctgtgccttccttcaaaggtggtgctttgtccctgtgggtcatctgtactgattgcgccaagaaagcatttgttctccaaatgtcaactgtcaaggagcagctaattgagaagctaattgaggatgatgaaaactcccagtgtaaaattactattgttggaactggtgccgtaggcatggcttgtgctattagtatcttactgaaggatttggctgatgaacttgcccttgttgatgttgcattggacaaactgaagggagaaatgatggatcttcagcatggcagtcttttctttagtacttcaaagattacttctggaaaagattacagtgtatctgcaaactccagaatagttattgtcacagcaggtgcaaggcagcaggagggagaaactcgccttgccctggtccaacgtaatgtggctataatgaaatcaatcattcctgccatagtccattatagtcctgattgtaaaattcttgttgtttcaaatccagtggatattttgacatatatagtctggaagataagtggcttacctgtaactcgtgtaattggaagtggttgtaatctagactctgcccgtttccgttacctaattggagaaaagttgggtgtccaccccacaagctgccatggttggattattggagaacatggtgattctagtgtgcccttatggagtggggtgaatgttgctggtgttgctctgaagactctggaccctaaattaggaacggattcagataaggaacactggaaaaatatccataaacaagttattcaaagtgcctatgaaattatcaagctgaaggggtatacctcttgggctattggactgtctgtgatggatctggtaggatccattttgaaaaatcttaggagagtgcacccagtttccaccatggttaagggattatatggaataaaagaagaactctttctcagtatcccttgtgtcttggggcggaatggtgtctcagatgttgtgaaaattaacttgaattctgaggaggaggcccttttcaagaagagtgcagaaacactttggaatattcaaaaggatctaatattttaaattaaagccttctaatgttccactgtttggagaacagaagatagcaggctgtgtattttaaattttgaaagtattttcatttgatctttaaaaaataaaaacaaattggagacctgtgacataactctagtctctcaagattagaacgagcaaatggtaaagagattttcctctttaagaatcatttatagctctattctaatgatacccaatctgtacaggtgtaagttatacttctgaggtatgtcacatatgttagagtgccttcagatgtagtagaatatgtataatcactataatacagagctttgattcttttcacaaaccaagccctttttctagtattacaattttatcttgtactttcatccgttagagtaccagcatattcacttcattacattagcgtcatatgtttatgtataatcattataaatgtggccgggcactgcagcctgggtgacagagtgaggctctgtctcaaaaaaaatcattataaatgcttatttttaagaccatatatatcaaaaagaaataaaaagctgagtgctgtggct

SEQ ID NO: 86577 - DNA, 1668 bp, Homo sapiens
cgtgcgtgtctcgagtcgcacggacggcaaccgtcgacgggcttagcgcctcaactgtcgttggtgtatttttctggtgtcacttctgtgccttccttcaaaggttctccaaatgtcaactgtcaaggagcagctaattgagaagctaattgaggatgatgaaaactcccagtgtaaaattactattgttggaactggtgccgtaggcatggcttgtgctattagtatcttactgaaggatttggctgatgaacttgcccttgttgatgttgcattggacaaactgaagggagaaatgatggatcttcagcatggcagtcttttctttagtacttcaaagattacttctggaaaagattacagtgtatctgcaaactccagaatagttattgtcacagcaggtgcaaggcagcaggagggagaaactcgccttgccctggtccaacgtaatgtggctataatgaaatcaatcattcctgccatagtccattatagtcctgattgtaaaattcttgttgtttcaaatccagtggatattttgacatatatagtctggaagataagtggcttacctgtaactcgtgtaattggaagtggttgtaatctagactctgcccgtttccgttacctaattggagaaaagttgggtgtccaccccacaagctgccatggttggattattggagaacatggtgattctagtgtgcccttatggagtggggtgaatgttgctggtgttgctctgaagactctggaccctaaattaggaacggattcagataaggaacactggaaaaatatccataaacaagttattcaaagtgcctatgaaattatcaagctgaaggggtatacctcttgggctattggactgtctgtgatggatctggtaggatccattttgaaaaatcttaggagagtgcacccagtttccaccatggttaagggattatatggaataaaagaagaactctttctcagtatcccttgtgtcttggggcggaatggtgtctcagatgttgtgaaaattaacttgaattctgaggaggaggcccttttcaagaagagtgcagaaacactttggaatattcaaaaggatctaatattttaaattaaagccttctaatgttccactgtttggagaacagaagatagcaggctgtgtattttaaattttgaaagtattttcatttgatctttaaaaaataaaaacaaattggagacctgtgacataactctagtctctcaagattagaacgagcaaatggtaaagagattttcctctttaagaatcatttatagctctattctaatgatacccaatctgtacaggtgtaagttatacttctgaggtatgtcacatatgttagagtgccttcagatgtagtagaatatgtataatcactataatacagagctttgattcttttcacaaaccaagccctttttctagtattacaattttatcttgtactttcatccgttagagtaccagcatattcacttcattacattagcgtcatatgtttatgtataatcattataaatgtggccgggcactgcagcctgggtgacagagtgaggctctgtctcaaaaaaaatcattataaatgcttatttttaagaccatatatatcaaaaagaaataaaaagctgagtgctgtggct

SEQ ID NO: 86578 - DNA, 781 bp, Homo sapiens
gtgaaaatttatccttcattccctcattatatgtttcttcatattcataaaggggagaaattaatgttccttttattttaatttctgaagtaatttcattctaagttattaaggtaatttttcctatgatattctattctcataccttaatgtattaaagctttattttcaaaggtttggatttcccactgtaactattcacacatagaatacttgatattttatattatatttggtaagttttttccagcaacaattaaaccttcacaaaaagttttggattttcatgcacaacagaatgcttttttttttccagaagatacatgaagaggttttgagtgggagtagtacaagtgagaaagcgatgagcttcctgtctttgctgtggcaataattgaagaacattgttatgtacttatataagacactgccatgttttttttccagtgcaaattgatagctccttaatttaatagcaataaatctattttgatctgcataatctttggggaaaagtgggaggtattgttttccatttctcatctgattttagtatgatttttattacaaaaaaatttaaaattactatgccttattttgtagcattatgtattagataaatgtagtatgtgtttttcactaaatttattttgagaaatgatagttatttgaaatgagctattcaacttttatgtcttataatacaatggatattattttatgattcctacttgttatttgataccaaattatgtataatacagaatagttttatattcac

SEQ ID NO: 86579 - DNA, 254 bp, Homo sapiens
tcagacttgtagataatctgaatctcagatgtatagagttccttttctataaagtgaagatagtgctgcataagtttcagggttgctgagaggattaagggaagagttatgaaagtgcctggcacagtccaggtatattgaggcactcagtaatgctactttcccttctcccataaaattgagattgaagtaatcatcaaatatgcattgaatatcaaaaatgtacaaaaattaattttcatccaaatttagta

SEQ ID NO: 86580 - DNA, 268 bp, Homo sapiens
agaaaaattgaaactaaaaacaggccaaagcaaaaaatgcaaaaggtacttttgtaatttattcaataaaggaaaacataatctgatatttaaggtagctggtaaaatactgctgctactattttcatcttcattctttcactctacaaatctttactttgtggcacctatgtgccaagcactgatctaagttgttaggacatggtgatgaacaaaacagtcttagacttcatggcacttgtgtttctcagtcttccaaatctcatac

SEQ ID NO: 86581 - DNA, 268 bp, Homo sapiens
gaagaaacgaaaaaaggccagggtttgtgtctaaacactatggtactgagagaaaaacaaatatagagacacacacaaatgaatgtgatcacaactgtgaaaaaaaactgcacacgcaaaagactacagggaaatatgtaattgattatgttgttttctctcagtgataagatggggtggtttcttctttgtacttttgtattaatttcttacggtgtttgtattacttttataatcaagaactttgttttaaaaaataaatcagaaa

SEQ ID NO: 86582 - DNA, 858 bp, Homo sapiens
caggtgaccaggataaattccctctactttcctgaagcattttaatagtgctttagagttgacaaagctttcacacatctcagatcactgtttgcttatagtctggtaaggcaggtgttaccattcccattttacagcagaggaaggggaggagcaggaactcacacacattcccacattgagaacatggtggagccagggctcaagcccaggtctattcacatccaaatctctttccatagagaccccagcatgccttcagtcaatcttctttacgtcacgtgtaaagctgccttcttccagaacttctgttaaacattaagtacatttcatgctgctgagtttcctgccaaacattgttaagaatatgcttcttatgcattgttagtttcctgtggaagaggcttcctccagtctatgttttattgatcaacctgctctcactttcctcaccgcttaccctgacaagtacttcactgtagattgtgctgttgaaggagtacatggggagaaagataacagtgctctaaagcgtgagcaattcacccttcatacaggtaacctcaggtaaacctccatcctgcagcagcccagacaacttctccagtacgaacaaagttgagtcctttatttaatatacagcatgtggctcagggtgggaaaaaaatggaaagaagaggtggtttcattagatatttaccatgtcaaggatggatctctgttttgtaaaatctgtaccttgctggggaaatggggattttcttttccaattcagataatcccaactcgaaagagaagcagctggaatcagtatacagcatcctactctcatgtcatttttagtatcattacctatcg

SEQ ID NO: 86583 - DNA, 326 bp, Homo sapiens
actttggggaggcccaaggtgggctgaatcacctgaggtcaggagttcaaagaccagcctgacccaacatggctaatttttttcatttttagtagagatggggtttcaccgtgttagccaggatggtctcaatctcctgacctcgtgatccgcccaccttggcctcccaaagtgctgggattacaggcgtgagccaccgcgccctggccctgagtcacttattaatgtggaaaaaattttattttttaatccaaactgtatttcttttcctatatacatggtgtgtttgtcacatttacaattgctattagaaaagatgggtgtag

SEQ ID NO: 86584 - DNA, 307 bp, Homo sapiens
gtgtggcatgttccatgggggatgataggacagtgacggcaaggcctgccagccatgtggatgggtctcagacgtgctgtggaatatgagtggcagcttccatatgttactcatttctatggagctaaagacagggaggggcagctggtccttgcaatgggagcccttacagcccttttccgtggggaccctggctgggaggggacacaaggtaggctcctggggccgatgtcttccccttggctggctggtggctgcatggcagcgtgcatttgtaagagtccctcactcagagtagattctttcc

SEQ ID NO: 86585 - DNA, 2824 bp, Homo sapiens
acttccggaatctctcggcgtgtgagcttggttgtcctaccaaagccagcgtttcggctcgcgtgcgccggcctagtttgctcgcgtcctcacgcgctttgggtttcccggtctcatggccggcctgaccttatttgtgggccgcctcccgccctcggcccgcagtgagcagctggaggaactgttcagtcaggtggggccggtgaagcagtgcttcgtggtgactgaaaaagggagtaaggcatgtcgaggctttggctatgtcactttttcaatgctggaagatgttcagagggccctcaaggagattaccacctttgaaggttgcaagatcaacgtgactgttgccaagaaaaaactgaggaacaagacaaaggaaaaggggaaaaatgaaaactcagagtgcccaaagaaggagccgaaggctaaaaaagccaaagtggcagataagaaagccagattaattattcggaacctgagctttaagtgttcagaagatgacttgaagacagtatttgctcaatttggagctgtcctggaagtaaatatccctaggaaaccagatgggaagatgcgcggttttggttttgttcagttcaaaaacctcctagaagcaggtaaagctctcaaaggcatgaacatgaaagagataaaaggccggacagtggctgtggattgggccgtggcaaaggataaatataaagatacacagtctgtttctgctataggtgaggaaaagagccatgaatctaaacatcaggaatcagttaaaaagaagggcagagaggaagaggatatggaagaggaagaaaacgatgatgatgacgatgatgatgatgaagaagatggggtttttgatgatgaagatgaagaggaagagaatatagaatcaaaggtgaccaagcctgtgcaaattcagaagagagcagtcaagagaccagcccctgcaaaaagcagtgatcattctgaggaggacagtgacctagaggaaagcgatagtattgatgatggagaggaactggctcagagtgataccagcactgaggagcaagaggataaagctgtgcaagtctcaaacaaaaagaagaggaaattaccctctgatgtgaatgaagggaaaactgtttttatcagaaatctgtcctttgactcagaagaagaagaacttggggagcttctccaacagtttggagaactcaaatatgtccgcattgtcttgcatccagacacagagcattctaaaggttgtgcatttgcccagttcatgactcaagaagcagctcagaaatgccttctagctgcttctccagagaatgaggctggtgggcttaaactggatggccggcagctcaaggttgacttggcggtgacccgtgatgaggctgcaaagcttcagacgacgaaggtgaagaagccgactggcacccggaatctctatctggcccgagaaggcttgattcgtgctgggacgaaggctgcagagggtgtgagtgctgctgatatggccaaaagagaacggtttgagctgctgaagcatcagaaactcaaggaccagaatatctttgtctcccgaaccaggctctgcctgcacaatctcccaaaggctgtagatgacaaacagctcagaaagctgctgctgagtgctactagtggagagaaaggggtgcgcatcaaggagtgtagagtgatgcgagacctcaaaggagttcatgggaacatgaagggtcagtccctgggctacgcctttgcggagttccaagagcacgagcatgccctgaaagccctccgcctcatcaacaacaatccagaaatctttgggcctctgaagagaccaatagtggagttctctttagaagatcgaagaaaacttaaaatgaaggaattaaggatccagcgcagcttgcaaaaaatgagatccaagcctgcaactggtgagcctcagaaggggcaaccagagcctgcaaaagaccagcaacagaaggcagctcaacaccacacagaggaacaaagcaaggtgcccccagagcagaagagaaaggcgggctctacctcatggaccgggttccagaccaaggctgaagtggagcaggtggagctgcctgatggaaagaagagaagaaaggtcctggcgctcccctcacaccgaggccccaaaatcaggttgcgggacaaaggcaaagtgaagcccgtccatcccaaaaagccaaagccacagataaaccagtggaagcaggagaagcagcaattatcgtccgagcaggtatctaggaaaaaagctaagggaaataagacggaaacccgcttcaaccagctggtcgaacaatataagcagaaattattgggaccttctaaaggagcacctcttgcaaagaggagcaaatggtttgatagttgatgatggcagcaggctgggtaagaagctgggttgtgtactttctggtgacactcctgggctcctccccatcccccgtgtctctcactgagggaaagaaaatccccaagggcactgccactgtgctcggaggtgccctggactgtgtacatctgaactttggtccatcctttgatgtgtggttcgttagccacaaagagaaatatctgaaagtcaacatgatgcttcttgcatattatccagattattgtatgaagttgtgtctataattattaccaatttttattctttatttctcaaatggaaacacctgaaaaagcattctggagtgctgaatttttaagatgtatattttgttaagcatattctctaaatgagatattgtgtggctttttagtaacaacgtcatttctaatatgtgtgactccttta

SEQ ID NO: 86586 - DNA, 2770 bp, Homo sapiens
acttccggaatctctcggcgtgtgagcttggttgtcctaccaaagccagcgtttcggctcgcgtgcgccggcctagtttgctcgcgtcctcacgcgctttgggtttcccggtctcatggccggcctgaccttatttgtgggccgcctcccgccctcggcccgcagtgagcagctggaggaactgttcagtcaggtggggccggtgaagcagtgcttcgtggtgactgaaaaagggagtaaggcatgtcgaggctttggctatgtcactttttcaatgctggaagatgttcagagggccctcaaggagattaccacctttgaaggttgcaagatcaacgtgactgttgccaagaaaaaactgaggaacaagacaaaggaaaaggggaaaaatgaaaactcagagtgcccaaagaaggagccgaaggctaaaaaagccaaagtggcagataagaaagccagattaattattcggaacctgagctttaagtgttcagaagatgacttgaagacagtatttgctcaatttggagctgtcctggaagtaaatatccctaggaaaccagatgggaagatgcgcggttttggttttgttcagttcaaaaacctcctagaagcaggtaaagctctcaaaggcatgaacatgaaagagataaaaggccggacagtggctgtggattgggccgtggcaaaggataaatataaagatacacagtctgtttctgctataggtgaggaaaagagccatgaatctaaacatcaggaatcagttaaaaagaagggcagagaggaagaggatatggaagaggaagaaaacgatgatgatgacgatgatgatgatgaagaagatggggtttttgatgatgaagatgaagaggaagagaatatagaatcaaaggtgaccaagcctgtgcaaattcagaagagagcagtcaagagaccagcccctgcaaaaagcagtgatcattctgaggaggacagtgacctagaggaaagcgatagtattgatgatggagaggaactggctcagagtgataccagcactgaggagcaagaggataaagctgtgcaagtctcaaacaaaaagaagaggaaattaccctctgatgtgaatgaagggaaaactgtttttatcagaaatctgtcctttgactcagaagaagaagaacttggggagcttctccaacagtttggagaactcaaatatgtccgcattgtcttgcatccagacacagagcattctaaaggttgtgcatttgcccagttcatgactcaagaagcagctcagaaatgccttctagctgcttctccagagaatgaggctggtgggcttaaactggatggccggcagctcaaggttgacttggcggtgacccgtgatgaggctgcaaagcttcagacgacgaaggtgaagaagccgactggcacccggaatctctatctggcccgagaaggcttgattcgtgctgggacgaaggctgcagagggtgtgagtgctgctgatatggccaaaagagaacggtttgagctgctgaagcatcagaaactcaaggaccagaatatctttgtctcccgaaccaggctctgcctgcacaatctcccaaaggctgtagatgacaaacagctcagaaagctgctgctgagtgctactagtggagagaaaggggtgcgcatcaaggagtgtagagtgatgcgagacctcaaaggagttcatgggaacatgaagggtcagtccctgggctacgcctttgcggagttccaagagcacgagcatgccctgaaagccctccgcctcatcaacaacaatccagaaatctttgggcctctgaagagaccaatagtggagttctctttagaagatcgaagaaaacttaaaatgaaggaattaaggatccagcgcagcttgcaaaaaatgagatccaagcctgcaactggtgagcctcagaaggggcaaccagagcctgcaaaagaccagcaacagaaggcagctcaacaccacacagaggaacaaagcaaggtgcccccagagcagaagagaaaggcgggctctacctcatggaccgggttccagaccaaggctgaagtggagcaggtggagctgcctgatggaaagaagagaagaaaggtcctggcgctcccctcacaccgaggccccaaaatcaggttgcgggacaaaggcaaagtgaagcccgtccatcccaaaaagccaaagccacagataaaccagtggaagcaggagaagcagcaattatcgtccgagcaggtatctaggaaaaaagctaagggaaataagacggaaacccgcttcaaccagctggtcgaacaatataagcagaaattattgggaccttctaaaggagcacctcttgcaaagaggagcaaatggtttgatagttgatgatggcagcaggctgggtaagaagctgggttgtgtactttctggtgacactcctgggctcctccccatcccccgtgtctctcactgagggaaatctgaactttggtccatcctttgatgtgtggttcgttagccacaaagagaaatatctgaaagtcaacatgatgcttcttgcatattatccagattattgtatgaagttgtgtctataattattaccaatttttattctttatttctcaaatggaaacacctgaaaaagcattctggagtgctgaatttttaagatgtatattttgttaagcatattctctaaatgagatattgtgtggctttttagtaacaacgtcatttctaatatgtgtgactccttta

SEQ ID NO: 86587 - DNA, 2599 bp, Homo sapiens
acttccggaatctctcggcgtgtgagcttggttgtcctaccaaagccagcgtttcggctcgcgtgcgccggcctagtttgctcgcgtcctcacgcgctttgggtttcccggtctcatggccggcctgaccttatttgtgggccgcctcccgccctcggcccgcagtgagcagctggaggaactgttcagtcaggtggggccggtgaagcagtgcttcgtggtgactgaaaaagggagtaaggcatgtcgaggctttggctatgtcactttttcaatgctggaagatgttcagagggccctcaaggagattaccacctttgaaggttgcaagatcaacgtgactgttgccaagaaaaaactgaggaacaagacaaaggaaaaggggaaaaatgaaaactcagagtgcccaaagaaggagccgaaggctaaaaaagccaaagtggcagataagaaagccagattaattattcggaacctgagctttaagtgttcagaagatgacttgaagacagtatttgctcaatttggagctgtcctggaagtaaatatccctaggaaaccagatgggaagatgcgcggttttggttttgttcagttcaaaaacctcctagaagcaggtaaagctctcaaaggcatgaacatgaaagagataaaaggccggacagtggctgtggattgggccgtggcaaaggataaatataaagatacacagtctgtttctgctataggtgaggaaaagagccatgaatctaaacatcaggaatcagttaaaaagaagggcagagaggaagaggatatggaagaggaagaaaacgatgatgatgacgatgatgatgatgaagaagatggggtttttgatgatgaagatgaagaggaagagaatatagaatcaaaggtgaccaagcctgtgcaaattcagaagagagcagtcaagagaccagcccctgcaaaaagcagtgatcattctgaggaggacagtgacctagaggaaagcgatagtattgatgatggagaggaactggctcagagtgataccagcactgaggagcaagaggataaagctgtgcaagtctcaaacaaaaagaagaggaaattaccctctgatgtgaatgaagggaaaactgtttttatcagaaatctgtcctttgactcagaagaagaagaacttggggagcttctccaacagtttggagaactcaaatatgtccgcattgtcttgcatccagacacagagcattctaaaggttgtgcatttgcccagttcatgactcaagaagcagctcagaaatgccttctagctgcttctccagagaatgaggctggtgggcttaaactggatggccggcagctcaaggttgacttggcggtgacccgtgatgaggctgcaaagcttcagacgacgaaggtgaagaagccgactggcacccggaatctctatctggcccgagaaggcttgattcgtgctgggacgaaggctgcagagggtgtgagtgctgctgatatggccaaaagagaacggtttgagctgctgaagcatcagaaactcaaggaccagaatatctttgtctcccgaaccaggctctgcctgcacaatctcccaaaggctgtagatgacaaacagctcagaaagctgctgctgagtgctactagtggagagaaaggggtgcgcatcaaggagcaaaaaatgagatccaagcctgcaactggtgagcctcagaaggggcaaccagagcctgcaaaagaccagcaacagaaggcagctcaacaccacacagaggaacaaagcaaggtgcccccagagcagaagagaaaggcgggctctacctcatggaccgggttccagaccaaggctgaagtggagcaggtggagctgcctgatggaaagaagagaagaaaggtcctggcgctcccctcacaccgaggccccaaaatcaggttgcgggacaaaggcaaagtgaagcccgtccatcccaaaaagccaaagccacagataaaccagtggaagcaggagaagcagcaattatcgtccgagcaggtatctaggaaaaaagctaagggaaataagacggaaacccgcttcaaccagctggtcgaacaatataagcagaaattattgggaccttctaaaggagcacctcttgcaaagaggagcaaatggtttgatagttgatgatggcagcaggctgggtaagaagctgggttgtgtactttctggtgacactcctgggctcctccccatcccccgtgtctctcactgagggaaagaaaatccccaagggcactgccactgtgctcggaggtgccctggactgtgtacatctgaactttggtccatcctttgatgtgtggttcgttagccacaaagagaaatatctgaaagtcaacatgatgcttcttgcatattatccagattattgtatgaagttgtgtctataattattaccaatttttattctttatttctcaaatggaaacacctgaaaaagcattctggagtgctgaatttttaagatgtatattttgttaagcatattctctaaatgagatattgtgtggctttttagtaacaacgtcatttctaatatgtgtgactccttta

SEQ ID NO: 86588 - DNA, 2347 bp, Homo sapiens
acttccggaatctctcggcgtgtgagcttggttgtcctaccaaagccagcgtttcggctcgcgtgcgccggcctagtttgctcgcgtcctcacgcgctttgggtttcccggtctcatggccggcctgaccttatttgtgggccgcctcccgccctcggcccgcagtgagcagctggaggaactgttcagtcaggtggggccggtgaagcagtgcttcgtggtgactgaaaaagggagtaaggcatgtcgaggctttggctatgtcactttttcaatgctggaagatgttcagagggccctcaaggagattaccacctttgaaggttgcaagatcaacgtgactgttgccaagaaaaaactgaggaacaagacaaaggaaaaggggaaaaatgaaaactcagagtgcccaaagaaggagccgaaggctaaaaaagccaaagtggcagataagaaagccagattaattattcggaacctgagctttaagtgttcagaagatgacttgaagacagtatttgctcaatttggagctgtcctggaagtaaatatccctaggaaaccagatgggaagatgcgcggttttggttttgttcagttcaaaaacctcctagaagcaggtaaagctctcaaaggcatgaacatgaaagagataaaaggccggacagtggctgtggattgggccgtggcaaaggataaatataaagatacacagtctgtttctgctataggtgaggaaaagagccatgaatctaaacatcaggaatcagttaaaaagaagggcagagaggaagaggatatggaagaggaagaaaacgatgatgatgacgatgatgatgatgaagaagatggggtttttgatgatgaagatgaagaggaagagaatatagaatcaaaggtgaccaagcctgtgcaaattcagaagagagcagtcaagagaccagcccctgcaaaaagcagtgatcattctgaggaggacagtgacctagaggaaagcgatagtattgatgatggagaggaactggctcagagtgataccagcactgaggagcaagaggataaagctgtgcaagtctcaaacaaaaagaagaggaaattaccctctgatgtgaatgaagggaaaactgtttttatcagaaatctgtcctttgactcagaagaagaagaacttggggagcttctccaacagtttggagaactcaaatatgtccgcattgtcttgcatccagacacagagcattctaaaggttgtgcatttgcccagttcatgactcaagaagcagctcagaaatgccttctagctgcttctccagagaatgaggctggtgggcttaaactggatggccggcagctcaaggttgacttggcggtgacccgtgatgaggctgcaaagcttcagacgacgaaggtgaagaagccgactggcacccggaatctctatctggcccgagaaggcttgattcgtgctgggacgaaggctgcagagggtgtgagtgctgctgatatggccaaaagagaacggtttgagctgctgaagcatcagaaactcaaggaccagaatatctttgtctcccgaaccaggctctgcctgcacaatctcccaaaggctgtagatgacaaacagctcagaaagctgctgctgagtgctactagtggagagaaaggggtgcgcatcaaggagtgtagagtgatgcgagacctcaaaggagttcatgggaacatgaagggtcagtccctgggctacgcctttgcggagttccaagagcacgagcatgccctgaaagccctccgcctcatcaacaacaatccagaaatctttgggcctctgaagagaccaatagtggagttctctttagaagatcgaagaaaacttaaaatgaaggaattaaggatccagcgcagcttgcaaaaaatgagatccaagcctgcaactggtgagcctcagaaggggcaaccagagcctgcaaaagaccagcaacagaaggcagctcaacaccacacagaggaacaaagcaaggtgcccccagagcagaagagaaaggcgggctctacctcatggaccgggttccagaccaaggctgaagtggagcaggtggagctgcctgatggaaagaagagaagaaaggtcctggcgctcccctcacaccgaggccccaaaatcaggttgcgggacaaaggcaaagtgaagcccgtccatcccaaaaagccaaagccacagataaaccagtggaagcaggagaagcagcaattatcgtccgagcaggtgagttctgcaggacatacagctttggtatggcatggttctgccaggtcgtagccatgtttgtaccttggttagttgagcaaaaaa

SEQ ID NO: 86589 - DNA, 1921 bp, Homo sapiens
acttccggaatctctcggcgtgtgagcttggttgtcctaccaaagccagcgtttcggctcgcgtgcgccggcctagtttgctcgcgtcctcacgcgctttgggtttcccggtctcatggccggcctgaccttatttgtgggccgcctcccgccctcggcccgcagtgagcagctggaggaactgttcagtcaggtggggccggtgaagcagtgcttcgtggtgactgaaaaagggagtaaggcatgtcgaggctttggctatgtcactttttcaatgctggaagatgttcagagggccctcaaggagattaccacctttgaaggttgcaagatcaacgtgactgttgccaagaaaaaactgaggaacaagacaaaggaaaaggggaaaaatgaaaactcagagtgcccaaagaaggagccgaaggctaaaaaagccaaagtggcagataagaaagccagattaattattcggaacctgagctttaagtgttcagaagatgacttgaagacagtatttgctcaatttggagctgtcctggaagtaaatatccctaggaaaccagatgggaagatgcgcggttttggttttgttcagttcaaaaacctcctagaagcaggtaaagctctcaaaggcatgaacatgaaagagataaaaggccggacagtggctgtggattgggccgtggcaaaggataaatataaagatacacagtctgtttctgctataggtgaggaaaagagccatgaatctaaacatcaggaatcagttaaaaagaagggcagagaggaagaggatatggaagaggaagaaaacgatgatgatgacgatgatgatgatgaagaagatggggtttttgatgatgaagatgaagaggaagagaatatagaatcaaaggtgaccaagcctgtgcaaattcagaagagagcagtcaagagaccagcccctgcaaaaagcagtgatcattctgaggaggacagtgacctagaggaaagcgatagtattgatgatggagaggaactggctcagagtgataccagcactgaggagcaagaggataaagctgtgcaagtctcaaacaaaaagaagaggaaattaccctctgatgtgaatgaagggaaaactgtttttatcagaaatctgtcctttgactcagaagaagaagaacttggggagcttctccaacagtttggagaactcaaatatgtccgcattgtcttgcatccagacacagagcattctaaaggttgtgcatttgcccagttcatgactcaagaagcagctcagaaatgccttctagctgcttctccagagaatgaggctggtgggcttaaactggatggccggcagctcaaggttgacttggcggtgacccgtgatgaggctgcaaagcttcagacgacgaaggtgaagaagccgactggcacccggaatctctatctggcccgagaaggcttgattcgtgctgggacgaaggctgcagagggtgtgagtgctgctgatatggccaaaagagaacggtttgagctgctgaagcatcagaaactcaaggaccagaatatctttgtctcccgaaccaggctctgcctgcacaatctcccaaaggctgtagatgacaaacagctcagaaagctgctgctgagtgctactagtggagagaaaggggtgcgcatcaaggagtgtagagtgatgcgagacctcaaaggagttcatgggaacatgaagggtcagtccctgggctacgcctttgcggagttccaagagcacgagcatgccctgaaagccctccgcctcatcaacaacaatccagaaatctttgggcctctgaagagaccaatagtggagttctctttagaagatcgaagaaaacttaaaatgaaggaattaaggatccagcgcagcttggtacagaaattaaatggt

SEQ ID NO: 86590 - DNA, 342 bp, Homo sapiens
tgagacagggtctcgttctgctacccaggatggagtgcagtggtgtgattatagctcactgcagccttgaattcctaggctcaagcaatcttcccacctcagcctcccagtaggtgagagtataggtacacgccaccatacccagttaattttctttttctttttctttttttttttccatttattttgatgttttgtagagacacagtcttgctacattgcacaggctggtctcaacctcctggcttcaaataatcctcctgcctcagcctcccaaaatgctgggattacaagcataagccacatgcccagtctattttatgacttttcaataacaggcat

SEQ ID NO: 86591 - DNA, 1403 bp, Homo sapiens
gggggctggagcggggaagaaaagggaattccaacctgtggaaccttggggggtccccggggtcggcgccttcccattgactgtgggcggtgcaagggacggagcctctggcggctcgtgggggtgttggggtccgcagggggagggaggggagtgtcagagtgtgagcggggtacgggaattccaaatttgagggcctcccggctctggcgccggggagggagagctcaggccgccatgcgggacaggacccacgagctgagacagggggatgacagctcggacgaagaggacaaggagcgggtcgcgctggtggtgcacccgggcacggcacggctggggagcccggacgaggagttcttccacaaggtccggacaattcggcagactattgtcaaactggggaataaagtccaggagttggagaaacagcaggtcaccatcctggccacgccccttcccgaggagagcatgaagcaggagctgcagaacctgcgcgatgagatcaaacagctggggagggagatccgcctgcagctgaaggccatagagccccagaaggaggaagctgatgagaactataactccgtcaacacaagaatgagaaaaacccagcatggggtcctgtcccagcaattcgtggagctcatcaacaagtgcaattcaatgcagtccgaataccgggagaagaacgtggagcggattcggaggcagctgaagatcaccaatgctgggatggtgtctgatgaggagttggagcagatgctggacagtgggcaaagcgaggtgtttgtgtccaatatcctgaaggacacgcaggtgactcgacaggccttaaatgagatctcggcccggcacagtgagatccagcagcttgaacgcagtattcgtgagctgcacgacatattcacttttctggctaccgaagtggagatgcagggggagatgatcaatcggattgagaagaacatcctgagctcagcggactacgtggaacgtgggcaggagcacgtcaagacggccctggagaaccagaagaaggcgaggaagaagaaagtcttgattgccatctgtgtgtccatcaccgtcgtcctcctagcagtcatcattggcgtcacagtggttggataatgtcgcacattgttggcactaggagcaccaggaacccagggcctggccttctctcccagcagcctggggggcagggcagagcctccagtcggaccccttcctcacactggcccctatgcagaagggcagacagttcttctggggttggcagctgctcattcatgatggcctcctccttcaggcctcaatgcctgggggaggcctgcactgtcctgattggccgggacacacggttttgtaaaaaattaaaaaacaaaaaaagagcataaaaa

SEQ ID NO: 86592 - DNA, 1539 bp, Homo sapiens
  misc_feature (486)..(486): n is a, c, g, or t
  misc_feature (584)..(584): n is a, c, g, or t
gggggctggagcggggaagaaaagggaattccaacctgtggaaccttggggggtccccggggtcggcgccttcccattgactgtgggcggtgcaagggacggagcctctggcggctcgtgggggtgttggggtccgcagggggagggaggggagtgtcagagtgtgagcggggtacgggaattccaaatttgagggcctcccggctctggcgccggggagggagagctcaggccgccatgcgggacaggacccacgagctgagacagggggatgacagctcggacgaagaggacaaggagcgggtcgcgctggtggtgcacccgggcacggcacggctggggagcccggacgaggagttcttccacaaggtccggacaattcggcagactattgtcaaactggggaataaagtccaggagttggagaaacagcaggtcaccatcctggccacgccccttcccgaggagagtgagtgaaaccccggntgcagggcgcatgctccgccccagggattgtgggggttgtagttccacgcaggtggtggccagagtggtttgttgaggtgggggctgctgtttgggantcttggccttctcttattcaggcatgaagcaggagctgcagaacctgcgcgatgagatcaaacagctggggagggagatccgcctgcagctgaaggccatagagccccagaaggaggaagctgatgagaactataactccgtcaacacaagaatgagaaaaacccagcatggggtcctgtcccagcaattcgtggagctcatcaacaagtgcaattcaatgcagtccgaataccgggagaagaacgtggagcggattcggaggcagctgaagatcaccaatgctgggatggtgtctgatgaggagttggagcagatgctggacagtgggcaaagcgaggtgtttgtgtccaatatcctgaaggacacgcaggtgactcgacaggccttaaatgagatctcggcccggcacagtgagatccagcagcttgaacgcagtattcgtgagctgcacgacatattcacttttctggctaccgaagtggagatgcagggggagatgatcaatcggattgagaagaacatcctgagctcagcggactacgtggaacgtgggcaggagcacgtcaagacggccctggagaaccagaagaaggcgaggaagaagaaagtcttgattgccatctgtgtgtccatcaccgtcgtcctcctagcagtcatcattggcgtcacagtggttggataatgtcgcacattgttggcactaggagcaccaggaacccagggcctggccttctctcccagcagcctggggggcagggcagagcctccagtcggaccccttcctcacactggcccctatgcagaagggcagacagttcttctggggttggcagctgctcattcatgatggcctcctccttcaggcctcaatgcctgggggaggcctgcactgtcctgattggccgggacacacggttttgtaaaaaattaaaaaacaaaaaaagagcataaaaa

SEQ ID NO: 86593 - DNA, 243 bp, Homo sapiens
ttttttttagggtgtggagatgtatcccagcagcctggggggcagggcagagcctccagtcggaccccttcctcacactggcccctatgcagaagggcagacagttcttctggggttggcagctgctcattcatgatggcctcctccttcaggcctcaatgcctgggggaggcctgcactgtcctgattggccgggacacacggttttgtaaaaaattaaaaaacaaaaaaagagcataaaaa

SEQ ID NO: 86594 - DNA, 1761 bp, Homo sapiens
gggggctggagcggggaagaaaagggaattccaacctgtggaaccttggggggtccccggggtcggcgccttcccattgactgtgggcggtgcaagggacggagcctctggcggctcgtgggggtgttggggtccgcagggggagggaggggagtgtcagagtgtgagcggggtacgggaattccaaatttgagggcctcccggctctggcgccggggagggagagctcaggccgccatgcgggacaggacccacgagctgagacagggggatgacagctcggacgaagaggacaaggagcgggtcgcgctggtggtgcacccgggcacggcacggctggggagcccggacgaggagttcttccacaaggtccggacaattcggcagactattgtcaaactggggaataaagtccaggagttggagaaacagcaggtcaccatcctggccacgccccttcccgaggagagcatgaagcaggagctgcagaacctgcgcgatgagatcaaacagctggggagggagatccgcctgcagctgaaggccatagagccccagaaggaggaagctgatgagaactataactccgtcaacacaagaatgagaaaaacccagcatggggtcctgtcccagcaattcgtggagctcatcaacaagtgcaattcaatgcagtccgaataccgggagaagaacgtggagcggattcggaggcagctgaagatcaccaatgctgggatggtgtctgatgaggagttggagcagatgctggacagtgggcaaagcgaggtgtttgtgtccaatatcctgaaggacacgcaggtgactcgacaggccttaaatgagatctcggcccggcacagtgagatccagcagcttgaacgcagtattcgtgagctgcacgacatattcacttttctggctaccgaagtggagatgcagggggagatgatcaatcggattgagaagaacatcctgagctcagcggactacgtggaacgtgggcaggagcacgtcaagacggccctggagaaccagaagaaggcgaggaagaagaaagtcttgattgccatctgtgtgtccatcaccgtcgtcctcctagcagtcatcattggcgtcacagtggttggataatgtcgcacattgttggcactaggagcaccaggaacccagggcctggccttctctcccagcagcctggggggcagggcagagcctccagtcggaccccttcctcacactggcccctatgcagaagggcagacagttcttctggggttggcagctgctcattcatgatggcctcctccttcaggcctcaatgcctgggggaggcctgcactgtcctgattggccgggacacacggttttgtaaaaaattaaaaaacaaaaaaagagcataaaaaaaaaaaaaaaaaaaaaaaaaaaaaaaaaaaaaaaaaaaaaaaaaaaaaaaaaaaaaaaaaaaaaaagggggggggcgctgtaaaaattgtcctcctagtggggcgccgacacttctaagacgcagccaccgcagcctttttatcgtacaaagaaggggcgcccacaaataagaggaggcgatttaactatttatatcagaggaagcagccgacgagcgcggcgtgttaacaacaaacccgctcggaggtcgggagagaaacctcggtgcagcgaggcaacatcttctggagagaagagaaacaccaccactctctgggggggggagcaaacaaaattgggcgagacacctcataaagt

SEQ ID NO: 86595 - DNA, 870 bp, Homo sapiens
acccagtccgttcgactgagcccagaaggaggaagctgatgagaactataactccgtcaacacaagaatgagaaaaacccagcatggggtcctgtcccagcaattcgtggagctcatcaacaagtgcaattcaatgcagtccgaataccgggagaagaacgtggagcggattcggaggcagctgaagatcaccaatgctgggatggtgtctgatgaggagttggagcagatgctggacagtgggcaaagcgaggtgtttgtgtccaatatcctgaaggacacgcaggtgactcgacaggccttaaatgagatctcggcccggcacagtgagatccagcagcttgaacgcagtattcgtgagctgcacgacatattcacttttctggctaccgaagtggagatgcagggggagatgatcaatcggattgagaagaacatcctgagctcagcggactacgtggaacgtgggcaggagcacgtcaagacggccctggagaaccagaagaaggcgaggaagaagaaagtcttgattgccatctgtgtgtccatcaccgtcgtcctcctagcagtcatcattggcgtcacagtggttggataatgtcgcacattgttggcactaggagcaccaggaacccagggcctggccttctctcccagcagcctggggggcagggcagagcctccagtcggaccccttcctcacactggcccctatgcagaagggcagacagttcttctggggttggcagctgctcattcatgatggcctcctccttcaggcctcaatgcctgggggaggcctgcactgtcctgattggccgggacacacggttttgtaaaaaattaaaaaacaaaaaaagagcataaaaa

SEQ ID NO: 86596 - DNA, 1496 bp, Homo sapiens
gggggctggagcggggaagaaaagggaattccaacctgtggaaccttggggggtccccggggtcggcgccttcccattgactgtgggcggtgcaagggacggagcctctggcggctcgtgggggtgttggggtccgcagggggagggaggggagtgtcagagtgtgagcggggtacgggaattccaaatttgagggcctcccggctctggcgccggggagggagagctcaggccgccatgcgggacaggacccacgagctgagacagggggatgacagctcggacgaagaggacaaggagcgggtcgcgctggtggtgcacccgggcacggcacggctggggagcccggacgaggagttcttccacaaggtccggacaattcggcagactattgtcaaactggggaataaagtccaggagttggagaaacagcaggtcaccatcctggccacgccccttcccgaggagagcatgaagcaggagctgcagaacctgcgcgatgagatcaaacagctggggagggagatccgcctgcagctgaaggccatagagccccagaaggaggaagctgatgagaactataactccgtcaacacaagaatgagaaaaacccagcatggggtcctgtcccagcaattcgtggagctcatcaacaagtgcaattcaatgcagtccgaataccgggagaagaacgtggagcggattcggaggcagctgaagatcaccaatgctgggatggtgtctgatgaggagttggagcagatgctggacagtgggcaaagcgaggtgtttgtgtccaatatcctgaaggacacgcaggtgactcgacaggccttaaatgagatctcggcccggcacagtgagatccagcagcttgaacgcagtattcgtgagctgcacgacatattcacttttctggctaccgaagtggagatgcagggggagatgatcaatcggattgagaagaacatcctgagctcagcggactacgtggaacgtgggcaggagcacgtcaagacggccctggagaaccagaagaaggcgaggaagaagaaagtcttgattgccatctgtgtgtccatcaccgtcgtcctcctagcagtcatcattggcgtcacagtggttggataatgtcgcacattgttggtgagatgttgtgggctgccccctggcctgccccagccctggccccagccctccctcctccctcagaccctgttctccctcctttccttacaggcactaggagcaccaggaacccagggcctggccttctctcccagcagcctggggggcagggcagagcctccagtcggaccccttcctcacactggcccctatgcagaagggcagacagttcttctggggttggcagctgctcattcatgatggcctcctccttcaggcctcaatgcctgggggaggcctgcactgtcctgattggccgggacacacggttttgtaaaaaattaaaaaacaaaaaaagagcataaaaa

SEQ ID NO: 86597 - DNA, 1464 bp, Homo sapiens
  misc_feature (667)..(667): n is a, c, g, or t
gggggctggagcggggaagaaaagggaattccaacctgtggaaccttggggggtccccggggtcggcgccttcccattgactgtgggcggtgcaagggacggagcctctggcggctcgtgggggtgttggggtccgcagggggagggaggggagtgtcagagtgtgagcggggtacgggaattccaaatttgagggcctcccggctctggcgccggggagggagagctcaggccgccatgcgggacaggacccacgagctgagacagggggatgacagctcggacgaagaggacaaggagcgggtcgcgctggtggtgcacccgggcacggcacggctggggagcccggacgaggagttcttccacaaggtccggacaattcggcagactattgtcaaactggggaataaagtccaggagttggagaaacagcaggtcaccatcctggccacgccccttcccgaggagagcatgaagcaggagctgcagaacctgcgcgatgagatcaaacagctggggagggagatccgcctgcagctgaaggccatagagccccagaaggaggaagctgatgagaactataactccgtcaacacaagaatgagaaaaacccaggtggaattcaagaagtcaggaagaggaacttccttgggcaacactgaagagnaaaacccagcatggggtcctgtcccagcaattcgtggagctcatcaacaagtgcaattcaatgcagtccgaataccgggagaagaacgtggagcggattcggaggcagctgaagatcaccaatgctgggatggtgtctgatgaggagttggagcagatgctggacagtgggcaaagcgaggtgtttgtgtccaatatcctgaaggacacgcaggtgactcgacaggccttaaatgagatctcggcccggcacagtgagatccagcagcttgaacgcagtattcgtgagctgcacgacatattcacttttctggctaccgaagtggagatgcagggggagatgatcaatcggattgagaagaacatcctgagctcagcggactacgtggaacgtgggcaggagcacgtcaagacggccctggagaaccagaagaaggcgaggaagaagaaagtcttgattgccatctgtgtgtccatcaccgtcgtcctcctagcagtcatcattggcgtcacagtggttggataatgtcgcacattgttggcactaggagcaccaggaacccagggcctggccttctctcccagcagcctggggggcagggcagagcctccagtcggaccccttcctcacactggcccctatgcagaagggcagacagttcttctggggttggcagctgctcattcatgatggcctcctccttcaggcctcaatgcctgggggaggcctgcactgtcctgattggccgggacacacggttttgtaaaaaattaaaaaacaaaaaaagagcataaaaa

SEQ ID NO: 86598 - DNA, 855 bp, Homo sapiens
tgcaaactgccgtaggtctctttgagatctgcccagtcggcggctgccgttttccagcctccccatcagcgtttggagccttcctctaggtcctttaggagttgatagtcatcgctgtccgaggtgtcatacaccaggttgttgccgaacatactcctgaggaaccgcacgggctccagccacgactcgatgagcagcagggagattggagcagatgctggacagtgggcaaagcgaggtgtttgtgtccaatatcctgaaggacacgcaggtgactcgacaggccttaaatgagatctcggcccggcacagtgagatccagcagcttgaacgcagtattcgtgagctgcacgacatattcacttttctggctaccgaagtggagatgcagggggagatgatcaatcggattgagaagaacatcctgagctcagcggactacgtggaacgtgggcaggagcacgtcaagacggccctggagaaccagaagaaggcgaggaagaagaaagtcttgattgccatctgtgtgtccatcaccgtcgtcctcctagcagtcatcattggcgtcacagtggttggataatgtcgcacattgttggcactaggagcaccaggaacccagggcctggccttctctcccagcagcctggggggcagggcagagcctccagtcggaccccttcctcacactggcccctatgcagaagggcagacagttcttctggggttggcagctgctcattcatgatggcctcctccttcaggcctcaatgcctgggggaggcctgcactgtcctgattggccgggacacacggttttgtaaaaaattaaaaaacaaaaaaagagcataaaaa

SEQ ID NO: 86599 - DNA, 1474 bp, Homo sapiens
gggggctggagcggggaagaaaagggaattccaacctgtggaaccttggggggtccccggggtcggcgccttcccattgactgtgggcggtgcaagggacggagcctctggcggctcgtgggggtgttggggtccgcagggggagggaggggagtgtcagagtgtgagcggggtacgggaattccaaatttgagggcctcccggctctggcgccggggagggagagctcaggccgccatgcgggacaggacccacgagctgagacagggggatgacagctcggacgaagaggacaaggagcgggtcgcgctggtggtgcacccgggcacggcacggctggggagcccggacgaggagttcttccacaaggtccggacaattcggcagactattgtcaaactggggaataaagtccaggagttggagaaacagcaggtcaccatcctggccacgccccttcccgaggagagcatgaagcaggagctgcagaacctgcgcgatgagatcaaacagctggggagggagatccgcctgcagctgaaggccatagagccccagaaggaggaagctgatgagaactataactccgtcaacacaagaatgagaaaaacccagcatggggtcctgtcccagcaattcgtggagctcatcaacaagtgcaattcaatgcagtccgaataccgggagaagaacgtggagcggattcggaggcagctgaagatcaccaatgctgggatggtgtctgatgaggagttggagcagatgctggacagtgggcaaagcgaggtgtttgtgtccaatatcctgaaggacacgcaggtgactcgacaggccttaaatgagatctcggcccggcacagtgagatccagcagcttgaacgcagtattcgtgagctgcacgacatattcacttttctggctaccgaagtggagatgcagggggagatgatcaatcggattgagaagaacatcctgagctcagcggactacgtggaacgtgggcaggagcacgtcaagacggccctggagaaccagaagaaggcgaggaaggtgagcctcccaggcccggccactgccccaggcaccctgtgtgacttccctgaccccctcctctcccacagaagaaagtcttgattgccatctgtgtgtccatcaccgtcgtcctcctagcagtcatcattggcgtcacagtggttggataatgtcgcacattgttggcactaggagcaccaggaacccagggcctggccttctctcccagcagcctggggggcagggcagagcctccagtcggaccccttcctcacactggcccctatgcagaagggcagacagttcttctggggttggcagctgctcattcatgatggcctcctccttcaggcctcaatgcctgggggaggcctgcactgtcctgattggccgggacacacggttttgtaaaaaattaaaaaacaaaaaaagagcataaaaa

SEQ ID NO: 86600 - DNA, 1319 bp, Homo sapiens
gggggctggagcggggaagaaaagggaattccaacctgtggaaccttggggggtccccggggtcggcgccttcccattgactgtgggcggtgcaagggacggagcctctggcggctcgtgggggtgttggggtccgcagggggagggaggggagtgtcagagtgtgagcggggtacgggaattccaaatttgagggcctcccggctctggcgccggggagggagagctcaggccgccatgcgggacaggacccacgagctgagacagggggatgacagctcggacgaagaggacaaggagcgggtcgcgctggtggtgcacccgggcacggcacggctggggagcccggacgaggagttcttccacaaggtccggacaattcggcagactattgtcaaactggggaataaagtccaggagttggagaaacagcaggtcaccatcctggccacgccccttcccgaggagacccagaaggaggaagctgatgagaactataactccgtcaacacaagaatgagaaaaacccagcatggggtcctgtcccagcaattcgtggagctcatcaacaagtgcaattcaatgcagtccgaataccgggagaagaacgtggagcggattcggaggcagctgaagatcaccaatgctgggatggtgtctgatgaggagttggagcagatgctggacagtgggcaaagcgaggtgtttgtgtccaatatcctgaaggacacgcaggtgactcgacaggccttaaatgagatctcggcccggcacagtgagatccagcagcttgaacgcagtattcgtgagctgcacgacatattcacttttctggctaccgaagtggagatgcagggggagatgatcaatcggattgagaagaacatcctgagctcagcggactacgtggaacgtgggcaggagcacgtcaagacggccctggagaaccagaagaaggcgaggaagaagaaagtcttgattgccatctgtgtgtccatcaccgtcgtcctcctagcagtcatcattggcgtcacagtggttggataatgtcgcacattgttggcactaggagcaccaggaacccagggcctggccttctctcccagcagcctggggggcagggcagagcctccagtcggaccccttcctcacactggcccctatgcagaagggcagacagttcttctggggttggcagctgctcattcatgatggcctcctccttcaggcctcaatgcctgggggaggcctgcactgtcctgattggccgggacacacggttttgtaaaaaattaaaaaacaaaaaaagagcataaaaa

SEQ ID NO: 86601 - DNA, 826 bp, Homo sapiens
aggggcctgtactggccggaattaggatgaaaacccagcatggggtcctgtcccagcaattcgtggagctcatcaacaagtgcaattcaatgcagtccgaataccgggagaagaacgtggagcggattcggaggcagctgaagatcaccaatgctgggatggtgtctgatgaggagttggagcagatgctggacagtgggcaaagcgaggtgtttgtgtccaatatcctgaaggacacgcaggtgactcgacaggccttaaatgagatctcggcccggcacagtgagatccagcagcttgaacgcagtattcgtgagctgcacgacatattcacttttctggctaccgaagtggagatgcagggggagatgatcaatcggattgagaagaacatcctgagctcagcggactacgtggaacgtgggcaggagcacgtcaagacggccctggagaaccagaagaaggcgaggaagaagaaagtcttgattgccatctgtgtgtccatcaccgtcgtcctcctagcagtcatcattggcgtcacagtggttggataatgtcgcacattgttggcactaggagcaccaggaacccagggcctggccttctctcccagcagcctggggggcagggcagagcctccagtcggaccccttcctcacactggcccctatgcagaagggcagacagttcttctggggttggcagctgctcattcatgatggcctcctccttcaggcctcaatgcctgggggaggcctgcactgtcctgattggccgggacacacggttttgtaaaaaattaaaaaacaaaaaaagagcataaaaa

SEQ ID NO: 86602 - DNA, 1925 bp, Homo sapiens
gggggctggagcggggaagaaaagggaattccaacctgtggaaccttggggggtccccggggtcggcgccttcccattgactgtgggcggtgcaagggacggagcctctggcggctcgtgggggtgttggggtccgcagggggagggaggggagtgtcagagtgtgagcggggtacgggaattccaaatttgagggcctcccggctctggcgccggggagggagagctcaggccgccatgcgggacaggacccacgagctgagacagggggatgacagctcggacgaagaggacaaggagcgggtcgcgctggtggtgcacccgggcacggcacggctggggagcccggacgaggagttcttccacaaggtccggacaattcggcagactattgtcaaactggggaataaagtccaggagttggagaaacagcaggtcaccatcctggccacgccccttcccgaggagagcatgaagcaggagctgcagaacctgcgcgatgagatcaaacagctggggagggagatccgcctgcagctgaaggccatagagccccagaaggaggaagctgatgagaactataactccgtcaacacaagaatgagaaaaacccagcatggggtcctgtcccagcaattcgtggagctcatcaacaagtgcaattcaatgcagtccgaataccgggagaagaacgtggagcggattcggaggcagctgaagatcaccaatgctgggatggtgtctgatgaggagttggagcagatgctggacagtgggcaaagcgaggtgtttgtgtccaatatcctgaaggacacgcaggtgactcgacaggccttaaatgagatctcggcccggcacagtgagatccagcagcttgaacgcagtattcgtgagctgcacgacatattcacttttctggctaccgaagtggagatgcagggggagatgatcaatcggattgagaagaacatcctgagctcagcggactacgtggaacgtgggcaggagcacgtcaagacggccctggagaaccagaagaaggcgaggaaggtgagcctcccaggcccggccactgccccaggcaccctgtgtgacttccctgaccccctcctctcccacagaagaaagtcttgattgccatctgtgtgtccatcaccgtcgtcctcctagcagtcatcattggcgtcacagtggttggataatgtcgcacattgttggtgagatgttgtgggctgccccctggcctgccccagccctggccccagccctccctcctccctcagaccctgttctccctcctttccttacaggcactaggagcaccaggaacccagggcctggccttctctcccagcagcctggggggcagggcagagcctccagtcggaccccttcctcacactggcccctatgcagaagggcagacagttcttctggggttggcagctgctcattcatgatggcctcctccttcaggcctcaatgcctgggggaggcctgcactgtcctgattggccgggacacacggttttgtaaaaaattaaaaaacaaaaaaagagcataaaaaaaaaaaaaaaaaaaaaaaaaaaaaaaaaaaaaaaaaaaaaaaaaaaaaaaaaaaaaaaaaaaaaaagggggggggcgctgtaaaaattgtcctcctagtggggcgccgacacttctaagacgcagccaccgcagcctttttatcgtacaaagaaggggcgcccacaaataagaggaggcgatttaactatttatatcagaggaagcagccgacgagcgcggcgtgttaacaacaaacccgctcggaggtcgggagagaaacctcggtgcagcgaggcaacatcttctggagagaagagaaacaccaccactctctgggggggggagcaaacaaaattgggcgagacacctcataaagt

SEQ ID NO: 86603 - DNA, 1329 bp, Homo sapiens
gggggctggagcggggaagaaaagggaattccaacctgtggaaccttggggggtccccggggtcggcgccttcccattgactgtgggcggtgcaagggacggagcctctggcggctcgtgggggtgttggggtccgcagggggagggaggggagtgtcagagtgtgagcggggtacgggaattccaaatttgagggcctcccggctctggcgccggggagggagagctcaggccgccatgcgggacaggacccacgagctgagacagggggatgacagctcggacgaagaggacaaggagcgggtcgcgctggtggtgcacccgggcacggcacggctggggagcccggacgaggagttcttccacaaggtccggacaattcggcagactattgtcaaactggggaataaagtccaggagttggagaaacagcaggtcaccatcctggccacgccccttcccgaggagagcatgaagcaggagctgcagaacctgcgcgatgagatcaaacagctggggagggagatccgcctgcagctgaaggccatagagccccagaaggaggaagctgatgagaactataactccgtcaacacaagaatgagaaaaacccagcatggggtcctgtcccagcaattcgtggagctcatcaacaagtgcaattcaatgcagtccgaataccgggagaagaacgtggagcggattcggaggcagctgaagatcaccaatgctgggatggtgtctgatgaggagttggagcagatgctggacagtgggcaaagcgaggtgtttgtgtccaatatcctgaaggacacgcaggtgactcgacaggccttaaatgagatctcggcccggcacagtgagatccagcagcttgaacgcagtattcgtgagctgcacgacatattcacttttctggctaccgaagtggagatgcagggggagatgatcaatcggattgagaagaacatcctgagctcagcggactacgtggaacgtgggcaggagcacgtcaagacggccctggagaaccagaagaaggcgaggaaggtgagcctcccaggcccggccactgccccaggcaccctgtgtgacttccctgaccccctcctctcccacagaagaaagtcttgattgccatctgtgtgtccatcaccgtcgtcctcctagcagtcatcattggcgtcacagtggttggataatgtcgcacattgttggtgagatgttgtgggctgccccctggcctgccccagccctggccccagtagcctaggcccctaatgtaaaaactccccgaactccctagatctctcgcacagtagtagacag

SEQ ID NO: 86604 - DNA, 451 bp, Homo sapiens
ccatgtgggatactgggttatgttcttgtccctatgggattggtcatgggatgttatttagacagaaagagtgatgaacggctaacgggtcttaagtatggcttatgagagaaagcaaggcatccaggatgactcgcaggttttatgcctcactagaatgatggagatgccttgatcagagatgagggtgactctgggaggggaagaaagatgaaagtgctcagctatctgagtgggatgtggagtagatggatagtagttgatacaaaggtctagagttcaagagagaactctggtctggaaaataggagttttcataatatgtgaaaccgtgaggaactcaccatggcagtgagtgcccaggcccaagtggcccaagcagggggaccagcaaaaggttctagatgcctccccatcttctgaacctcccccagctcaattcctttttcag

SEQ ID NO: 86605 - DNA, 359 bp, Homo sapiens
acctacttgagaggctgaggtggaaggatcacttgagtccgggaggtggaggttgcagtgagccaagacaacttgggcaacggagcaagacacttaaatttaaaaaaggtaaaatgaggcactgcacacataaagcttaaaaaatttagttcccttctcttttaaagggttatagcctccacagactcctgtagagttgtatttcccttctatcagttggggaaacagcattactgggcaaagaacataaacttttgagctaaccagatctaggtttgagtcccagtttcctaatttgttcgttgtgttgccttggacaagttactttgcttgtctgtgcttcagattcctgatgtata

SEQ ID NO: 86606 - DNA, 3594 bp, Homo sapiens
gctgggcagtgcttctgggccctctgctgctcctgcttgtcggttgctaggcgctgggacgcgcctcccgaagggtgcggggcacaggtggcctcttcggggtggaccgcgcctggccggggccgaggacaccgcggccgcccgggcctgcgggaagcgatggagcccgggaagagaagaaccaaagatgatacctggaaagcagatgacctcagaaaacatctctgggccatacagtcaggtggttccaaggaagaaagaaagcacagagagaagaagctgcgtaaggagtctgagatggaccttcctgaacataaggagccgaggtgcagggatcccgaccaggatgccaggagcagagacagggtggccgaagtccacaccgctaaggagagtcctcgtggggagagggacagagacagacagagggagaggagaagagacgcaaaagaccgggagaaagaaaagctgaaggagaaacatcgagaggcagaaaagtctcacagcagaggaaaggacagggaaaaagaaaaagacagaagggcccggaaggaagagctccggcagaccgtggcccaccacaacctgctgggccaggagacacgcgaccggcagctcctggagcgggcggagaggaaaggccgctcagtaagtaaagtaagaagtgaagagaaagatgaagactctgaaagaggagatgaagatagagaaagaagataccgagaaagaaagctgcagtacggagacagcaaggacaaccctctcaagtactggctttataaagaagaaggcgagaggagacacaggaagcccagagagccagatcgagacaagaaacaccgagaaaaaagcagcacaagggaaaaaagagagaaatattccaaagagaaaagtaattcattctctgacaaaggggaagaaagacataaagaaaagcgacacaaagaaggttttcattttgatgatgagaggcaccgaagcaacgtggatagaaaagagaaatcggcaaaagatgagcccaggaaaagggaatcccagaatggtgaacacagaaatcgaggtgcaagctcaaaaagagatgggaccagcagccagcatgctgagaatttagtaaggaatcatggaaaagataaagattcaagacggaagcatggccacgaggaaggctcttctgtgtggtggaagctggaccagaggccgggaggcgaggaaaccgtggaaattgaaaaggaagaaactgatttagaaaatgctagagctgatgcatatacagccagttgtgaagatgattttgaagactatgaagatgactttgaggtttgtgatggtgatgatgatgaaagcagtaatgaacctgagtcaagagaaaaactggaagaacttcctctagctcaaaaaaaggaaatacaagaaattcaaagagctattaatgcagaaaatgaaaggattggcgagttatctttgaaactgtttcagaagcgaggtagaacagaatttgaaaaggagcccaggacagatacaaacagttccccttccagagcctctgtttgtggaatttttgtggattttgcctcagcttcacaccgtcaaaagagtcggactcaggcccttaagcaaaagatgcgaagtacaaaactgcttcggctcattgacttagatttttcatttactttctctctcttggatctaccaccagtaaatgaatatgacatgtatatcagaaactttgggaaaaaaaataccaagcaggcatatgttcagtgtaacgaagataatgttgaaagagacattcaaacggaggaaatagagaccagggaagtgtggacccagcacccgggagaaagtactgttgtatctggaggcagtgaacaaagagatacctctgatgctgtagttatgccaaagattgatactccaaggttatgtagctttctgcgggctgcttgtcaggtgatggccgttttgctggaagaggatcgcttggcagctgaacccagctggaatcttagggctcaagacagggccctgtattttagtgacagctcatctcagctgaacaccagtctaccattccttcaaagtcacgtgttgctgcttgagccctttgaaagcatttttactgtttgccggaacagcgcacggctcagttgtcgtctgggatttgagagaagactcaaggctgcattactctgtgacgctgagcgatggcttctggacgttccggaccgccacgttttccaccgatggaatccttacctcagtaaaccaccgaagccctcttcaagcagtagaacctatctcaacgtccgtccacaaaaagcagagctttgtgctttcacccttttctactcaagaagaaatgtcaggtttgtccttccacatcgcttccttggatgagagtggggttctcaatgtatgggtggttgttgaattaccaaaggcagacatcgcaggttcaataagtgatttaggtctgatgcctggagggagggtcaagctggtacatagtgctctgatccagttgggtgacagtctttcccataaaggtaatgaattttggggcactacacaaacactgaatgttaaatttctgccttcagatcctaatcactttattattggcacagacatgggtctcataagccatggcacaagacaagatttgagagtggctcccaaactattcaaacctcagcaacatggtataagaccagtgaaagttaatgtcattgatttttcaccatttggagaaccaatatttttggccggctgttcggacggaagcatcaggctgcaccagctgagctccgcgtttccgctcctgcagtgggacagcagcacggacagccatgcggtcaccggcctgcagtggtccccaaccaggcctgccgtgttcctggtgcaggacgacacatccaacatctacatctgggacctcctccagagcgatctgggtcctgtcgccaaacagcaggtctcccccaacaggctggtggccatggctgcggtgggtgagcctgagaaggctggtggcagcttcctggccctggtgctggccagggcgtctggctccatcgacatccagcacctgaagaggcggtgggcggccccggaggtggacgagtgcaacaggctgcgtctgcttttgcaggaagccctgtggccagagggaaaactgcacaagtagcgggtgtggctgagaggaccgcgtttctgtaatgacccagatttaaaagacataaggtggataattctacatttgtgtgcaagtatatttatgtatatagactatgtatattctgtatataatttattttacatgaatatgtctttggtattcccagtaaatagatgactacttttgagtggaaacaaagaacattctagcatttacaaaacttccaggggaatgtagagccacgtccagggtgctcttttctgagagtatttcgagttatttttagaacagtttaaatattgtcacattactgctagattttaaacagcctaccatgaaaatgtatcttaatgaactattttcttatgcataaagtatgtgaacacatgtctaaattaaaaggaattactccaccg

SEQ ID NO: 86607 - DNA, 3491 bp, Homo sapiens
cttctgtcctgggttgagcccagcgccgcagaaggagcacagactccctctgtgtgcacagcatttggaagagaagaaccaaagatgatacctggaaagcagatgacctcagaaaacatctctgggccatacagtcaggtggttccaaggaagaaagaaagcacagagagaagaagctgcgtaaggagtctgagatggaccttcctgaacataaggagccgaggtgcagggatcccgaccaggatgccaggagcagagacagggtggccgaagtccacaccgctaaggagagtcctcgtggggagagggacagagacagacagagggagaggagaagagacgcaaaagaccgggagaaagaaaagctgaaggagaaacatcgagaggcagaaaagtctcacagcagaggaaaggacagggaaaaagaaaaagacagaagggcccggaaggaagagctccggcagaccgtggcccaccacaacctgctgggccaggagacacgcgaccggcagctcctggagcgggcggagaggaaaggccgctcagtaagtaaagtaagaagtgaagagaaagatgaagactctgaaagaggagatgaagatagagaaagaagataccgagaaagaaagctgcagtacggagacagcaaggacaaccctctcaagtactggctttataaagaagaaggcgagaggagacacaggaagcccagagagccagatcgagacaagaaacaccgagaaaaaagcagcacaagggaaaaaagagagaaatattccaaagagaaaagtaattcattctctgacaaaggggaagaaagacataaagaaaagcgacacaaagaaggttttcattttgatgatgagaggcaccgaagcaacgtggatagaaaagagaaatcggcaaaagatgagcccaggaaaagggaatcccagaatggtgaacacagaaatcgaggtgcaagctcaaaaagagatgggaccagcagccagcatgctgagaatttagtaaggaatcatggaaaagataaagattcaagacggaagcatggccacgaggaaggctcttctgtgtggtggaagctggaccagaggccgggaggcgaggaaaccgtggaaattgaaaaggaagaaactgatttagaaaatgctagagctgatgcatatacagccagttgtgaagatgattttgaagactatgaagatgactttgaggtttgtgatggtgatgatgatgaaagcagtaatgaacctgagtcaagagaaaaactggaagaacttcctctagctcaaaaaaaggaaatacaagaaattcaaagagctattaatgcagaaaatgaaaggattggcgagttatctttgaaactgtttcagaagcgaggtagaacagaatttgaaaaggagcccaggacagatacaaacagttccccttccagagcctctgtttgtggaatttttgtggattttgcctcagcttcacaccgtcaaaagagtcggactcaggcccttaagcaaaagatgcgaagtacaaaactgcttcggctcattgacttagatttttcatttactttctctctcttggatctaccaccagtaaatgaatatgacatgtatatcagaaactttgggaaaaaaaataccaagcaggcatatgttcagtgtaacgaagataatgttgaaagagacattcaaacggaggaaatagagaccagggaagtgtggacccagcacccgggagaaagtactgttgtatctggaggcagtgaacaaagagatacctctgatgctgtagttatgccaaagattgatactccaaggttatgtagctttctgcgggctgcttgtcaggtgatggccgttttgctggaagaggatcgcttggcagctgaacccagctggaatcttagggctcaagacagggccctgtattttagtgacagctcatctcagctgaacaccagtctaccattccttcaaagtcacgtgttgctgcttgagccctttgaaagcatttttactgtttgccggaacagcgcacggctcagttgtcgtctgggatttgagagaagactcaaggctgcattactctgtgacgctgagcgatggcttctggacgttccggaccgccacgttttccaccgatggaatccttacctcagtaaaccaccgaagccctcttcaagcagtagaacctatctcaacgtccgtccacaaaaagcagagctttgtgctttcacccttttctactcaagaagaaatgtcaggtttgtccttccacatcgcttccttggatgagagtggggttctcaatgtatgggtggttgttgaattaccaaaggcagacatcgcaggttcaataagtgatttaggtctgatgcctggagggagggtcaagctggtacatagtgctctgatccagttgggtgacagtctttcccataaaggtaatgaattttggggcactacacaaacactgaatgttaaatttctgccttcagatcctaatcactttattattggcacagacatgggtctcataagccatggcacaagacaagatttgagagtggctcccaaactattcaaacctcagcaacatggtataagaccagtgaaagttaatgtcattgatttttcaccatttggagaaccaatatttttggccggctgttcggacggaagcatcaggctgcaccagctgagctccgcgtttccgctcctgcagtgggacagcagcacggacagccatgcggtcaccggcctgcagtggtccccaaccaggcctgccgtgttcctggtgcaggacgacacatccaacatctacatctgggacctcctccagagcgatctgggtcctgtcgccaaacagcaggtctcccccaacaggctggtggccatggctgcggtgggtgagcctgagaaggctggtggcagcttcctggccctggtgctggccagggcgtctggctccatcgacatccagcacctgaagaggcggtgggcggccccggaggtggacgagtgcaacaggctgcgtctgcttttgcaggaagccctgtggccagagggaaaactgcacaagtagcgggtgtggctgagaggaccgcgtttctgtaatgacccagatttaaaagacataaggtggataattctacatttgtgtgcaagtatatttatgtatatagactatgtatattctgtatataatttattttacatgaatatgtctttggtattcccagtaaatagatgactacttttgagtggaaacaaagaacattctagcatttacaaaacttccaggggaatgtagagccacgtccagggtgctcttttctgagagtatttcgagttatttttagaacagtttaaatattgtcacattactgctagattttaaacagcctaccatgaaaatgtatcttaatgaactattttcttatgcataaagtatgtgaacacatgtctaaattaaaaggaattactccaccg

SEQ ID NO: 86608 - DNA, 3195 bp, Homo sapiens
ttcaagttctcagaaaactacatatggtttaatgcaatttttataaactcagaccgggagaaagaaaagctgaaggagaaacatcgagaggcagaaaagtctcacagcagaggaaaggacagggaaaaagaaaaagacagaagggcccggaaggaagagctccggcagaccgtggcccaccacaacctgctgggccaggagacacgcgaccggcagctcctggagcgggcggagaggaaaggccgctcagtaagtaaagtaagaagtgaagagaaagatgaagactctgaaagaggagatgaagatagagaaagaagataccgagaaagaaagctgcagtacggagacagcaaggacaaccctctcaagtactggctttataaagaagaaggcgagaggagacacaggaagcccagagagccagatcgagacaagaaacaccgagaaaaaagcagcacaagggaaaaaagagagaaatattccaaagagaaaagtaattcattctctgacaaaggggaagaaagacataaagaaaagcgacacaaagaaggttttcattttgatgatgagaggcaccgaagcaacgtggatagaaaagagaaatcggcaaaagatgagcccaggaaaagggaatcccagaatggtgaacacagaaatcgaggtgcaagctcaaaaagagatgggaccagcagccagcatgctgagaatttagtaaggaatcatggaaaagataaagattcaagacggaagcatggccacgaggaaggctcttctgtgtggtggaagctggaccagaggccgggaggcgaggaaaccgtggaaattgaaaaggaagaaactgatttagaaaatgctagagctgatgcatatacagccagttgtgaagatgattttgaagactatgaagatgactttgaggtttgtgatggtgatgatgatgaaagcagtaatgaacctgagtcaagagaaaaactggaagaacttcctctagctcaaaaaaaggaaatacaagaaattcaaagagctattaatgcagaaaatgaaaggattggcgagttatctttgaaactgtttcagaagcgaggtagaacagaatttgaaaaggagcccaggacagatacaaacagttccccttccagagcctctgtttgtggaatttttgtggattttgcctcagcttcacaccgtcaaaagagtcggactcaggcccttaagcaaaagatgcgaagtacaaaactgcttcggctcattgacttagatttttcatttactttctctctcttggatctaccaccagtaaatgaatatgacatgtatatcagaaactttgggaaaaaaaataccaagcaggcatatgttcagtgtaacgaagataatgttgaaagagacattcaaacggaggaaatagagaccagggaagtgtggacccagcacccgggagaaagtactgttgtatctggaggcagtgaacaaagagatacctctgatgctgtagttatgccaaagattgatactccaaggttatgtagctttctgcgggctgcttgtcaggtgatggccgttttgctggaagaggatcgcttggcagctgaacccagctggaatcttagggctcaagacagggccctgtattttagtgacagctcatctcagctgaacaccagtctaccattccttcaaagtcacgtgttgctgcttgagccctttgaaagcatttttactgtttgccggaacagcgcacggctcagttgtcgtctgggatttgagagaagactcaaggctgcattactctgtgacgctgagcgatggcttctggacgttccggaccgccacgttttccaccgatggaatccttacctcagtaaaccaccgaagccctcttcaagcagtagaacctatctcaacgtccgtccacaaaaagcagagctttgtgctttcacccttttctactcaagaagaaatgtcaggtttgtccttccacatcgcttccttggatgagagtggggttctcaatgtatgggtggttgttgaattaccaaaggcagacatcgcaggttcaataagtgatttaggtctgatgcctggagggagggtcaagctggtacatagtgctctgatccagttgggtgacagtctttcccataaaggtaatgaattttggggcactacacaaacactgaatgttaaatttctgccttcagatcctaatcactttattattggcacagacatgggtctcataagccatggcacaagacaagatttgagagtggctcccaaactattcaaacctcagcaacatggtataagaccagtgaaagttaatgtcattgatttttcaccatttggagaaccaatatttttggccggctgttcggacggaagcatcaggctgcaccagctgagctccgcgtttccgctcctgcagtgggacagcagcacggacagccatgcggtcaccggcctgcagtggtccccaaccaggcctgccgtgttcctggtgcaggacgacacatccaacatctacatctgggacctcctccagagcgatctgggtcctgtcgccaaacagcaggtctcccccaacaggctggtggccatggctgcggtgggtgagcctgagaaggctggtggcagcttcctggccctggtgctggccagggcgtctggctccatcgacatccagcacctgaagaggcggtgggcggccccggaggtggacgagtgcaacaggctgcgtctgcttttgcaggaagccctgtggccagagggaaaactgcacaagtagcgggtgtggctgagaggaccgcgtttctgtaatgacccagatttaaaagacataaggtggataattctacatttgtgtgcaagtatatttatgtatatagactatgtatattctgtatataatttattttacatgaatatgtctttggtattcccagtaaatagatgactacttttgagtggaaacaaagaacattctagcatttacaaaacttccaggggaatgtagagccacgtccagggtgctcttttctgagagtatttcgagttatttttagaacagtttaaatattgtcacattactgctagattttaaacagcctaccatgaaaatgtatcttaatgaactattttcttatgcataaagtatgtgaacacatgtctaaattaaaaggaattactccaccg

SEQ ID NO: 86609 - DNA, 1646 bp, Homo sapiens
gctgggcagtgcttctgggccctctgctgctcctgcttgtcggttgctaggcgctgggacgcgcctcccgaagggtgcggggcacaggtggcctcttcggggtggaccgcgcctggccggggccgaggacaccgcggccgcccgggcctgcgggaagcgatggagcccgggaagagaagaaccaaagatgatacctggaaagcagatgacctcagaaaacatctctgggccatacagtcaggtggttccaaggaagaaagaaagcacagagagaagaagctgcgtaaggagtctgagatggaccttcctgaacataaggagccgaggtgcagggatcccgaccaggatgccaggagcagagacagggtggccgaagtccacaccgctaaggagagtcctcgtggggagagggacagagacagacagagggagaggagaagagacgcaaaagaccgggagaaagaaaagctgaaggagaaacatcgagaggcagaaaagtctcacagcagaggaaaggacagggaaaaagaaaaagacagaagggcccggaaggaagagctccggcagaccgtggcccaccacaacctgctgggccaggagacacgcgaccggcagctcctggagcgggcggagaggaaaggccgctcagtaagtaaagtaagaagtgaagagaaagatgaagactctgaaagaggagatgaagatagagaaagaagataccgagaaagaaagctgcagtacggagacagcaaggacaaccctctcaagtactggctttataaagaagaaggcgagaggagacacaggaagcccagagagccagatcgagacaagaaacaccgagaaaaaagcagcacaagggaaaaaagagagaaatattccaaagagaaaagtaattcattctctgacaaaggggaagaaagacataaagaaaagcgacacaaagaaggttttcattttgatgatgagaggcaccgaagcaacgtggatagaaaagagaaatcggcaaaagatgagcccaggaaaagggaatcccagaatggtgaacacagaaatcgaggtgcaagctcaaaaagagatgggaccagcagccagcatgctgagaatttagtaaggaatcatggaaaagataaagattcaagacggaagcatggccacgaggaaggctcttctgtgtggtggaagctggaccagaggccgggaggcgaggaaaccgtggaaattgaaaaggaagaaactgatttagaaaatgctagagctgatgcatatacagccagttgtgaagatgattttgaagactatgaagatgactttgaggtttgtgatggtgatgatgatgaaagcagtaatgaacctgagtcaagagaaaaactggaagaacttcctctagctcaaaaaaaggaaatacaagaaattcaaagagctattaatgcagaaaatgaaaggattggcgagttatctttgaaactgtttcagaagcgaggtagaacagaatttgaaaaggagcccaggacagatacaaacagttccccttccagagcctctgtttgtggaatttttgtggattttgcctcagcttcacaccgtcaaaagagtcggactcaggcccttaagcaaaagtgtggactcaggtgactcagtggtgg

SEQ ID NO: 86610 - DNA, 997 bp, Homo sapiens
gctgggcagtgcttctgggccctctgctgctcctgcttgtcggttgctaggcgctgggacgcgcctcccgaagggtgcggggcacaggtggcctcttcggggtggaccgcgcctggccggggccgaggacaccgcggccgcccgggcctgcgggaagcgatggagcccgggaagagaagaaccaaagatgatacctggaaagcagatgacctcagaaaacatctctgggccatacagtcaggtggttccaaggaagaaagaaagcacagagagaagaagctgcgtaaggagtctgagatggaccttcctgaacataaggagccgaggtgcagggatcccgaccaggatgccaggagcagagacagggtggccgaagtccacaccgctaaggagagtcctcgtggggagagggacagagacagacagagggagaggagaagagacgcaaaagaccgggagaaagaaaagctgaaggagaaacatcgagaggcagaaaagtctcacagcagaggaaaggacagggaaaaagaaaaagacagaagggcccggaaggaagagctccggcagaccgtggcccaccacaacctgctgggccaggagacacgcgaccggcagctcctggagcgggcggagaggaaaggccgctcagtaagtaaagtaagaagtgaagagaaagatgaagactctgaaagaggagatgaagatagagaaagaagataccgagaaagaaagctgcagtacggagaccatctcttcctttctttccccttcttttacttagaatgtctttgtattcatttgctagggcttccatagcaaagcatcatagattgctgatttaaactgtaattgtattgccgtactgtgggctggaaatcccaaatctagattccagcagagttggttctttctgaggtctgcaaggaagggcctctgttccatgcctctctccttggcttgtagaaggcattcttgtccctatgactcttcacattgt

SEQ ID NO: 86611 - DNA, 893 bp, Homo sapiens
cttctgtcctgggttgagcccagcgccgcagaaggagcacagactccctctgtgtgcacagcatttggaaggtgagtctgttgtggctgtttttggaaaatacagtctgacacaagatattttaaacccacagaatatttgtccttcctctgttgttcaactgctgttataacttgttttcacttttattttataatatttaagttttgaagtagccaaaggaacacattttataataatgtgtcattttagactagtgaataatttttaaaaatctgtatttctgttaccttttattccaggaggtagagaagtattttctggcatgtcaagaattaactgccattgatttaaatggcataatgaaaaagcagctcactacaacactgaaaataaattattttaaactttaaacattctaactttatacttttctatttagagaagaaccaaagatgatacctggaaagcagatgacctcagaaaacatctctgggccatacagtcaggtggttccaaggaagaaagaaagcacagagagaagaagctgcgtaaggagtctgagatggaccttcctgaacataaggagccgaggtgcagggatcccgaccaggatgccaggagcagagacagggtggccgaagtccacaccgctaaggagagtcctcgtggggagagggacagagacagacagagggagaggagaagagacgcaaaaggtaaaaaggggctgcttaccggattttaaattggtgagatgtttactgggctggtcggtctgaggacctgaggtcgtacgtggatctttctcacgagcaaagaacaggaggacaggggattgatctcacaagggaagtcccctgatccgagtcgcggcaccaaatttcatgcac

SEQ ID NO: 86612 - DNA, 2158 bp, Homo sapiens
gatctcggctcactgcaaccttcatttcctggattcaagcgattcttctgcttcagcctcccgagtagctgggactacagatacaaacagttccccttccagagcctctgtttgtggaatttttgtggattttgcctcagcttcacaccgtcaaaagagtcggactcaggcccttaagcaaaagatgcgaagtacaaaactgcttcggctcattgacttagatttttcatttactttctctctcttggatctaccaccagtaaatgaatatgacatgtatatcagaaactttgggaaaaaaaataccaagcaggcatatgttcagtgtaacgaagataatgttgaaagagacattcaaacggaggaaatagagaccagggaagtgtggacccagcacccgggagaaagtactgttgtatctggaggcagtgaacaaagagatacctctgatgctgtagttatgccaaagattgatactccaaggttatgtagctttctgcgggctgcttgtcaggtgatggccgttttgctggaagaggatcgcttggcagctgaacccagctggaatcttagggctcaagacagggccctgtattttagtgacagctcatctcagctgaacaccagtctaccattccttcaaagtcacgtgttgctgcttgagccctttgaaagcatttttactgtttgccggaacagcgcacggctcagttgtcgtctgggatttgagagaagactcaaggctgcattactctgtgacgctgagcgatggcttctggacgttccggaccgccacgttttccaccgatggaatccttacctcagtaaaccaccgaagccctcttcaagcagtagaacctatctcaacgtccgtccacaaaaagcagagctttgtgctttcacccttttctactcaagaagaaatgtcaggtttgtccttccacatcgcttccttggatgagagtggggttctcaatgtatgggtggttgttgaattaccaaaggcagacatcgcaggttcaataagtgatttaggtctgatgcctggagggagggtcaagctggtacatagtgctctgatccagttgggtgacagtctttcccataaaggtaatgaattttggggcactacacaaacactgaatgttaaatttctgccttcagatcctaatcactttattattggcacagacatgggtctcataagccatggcacaagacaagatttgagagtggctcccaaactattcaaacctcagcaacatggtataagaccagtgaaagttaatgtcattgatttttcaccatttggagaaccaatatttttggccggctgttcggacggaagcatcaggctgcaccagctgagctccgcgtttccgctcctgcagtgggacagcagcacggacagccatgcggtcaccggcctgcagtggtccccaaccaggcctgccgtgttcctggtgcaggacgacacatccaacatctacatctgggacctcctccagagcgatctgggtcctgtcgccaaacagcaggtctcccccaacaggctggtggccatggctgcggtgggtgagcctgagaaggctggtggcagcttcctggccctggtgctggccagggcgtctggctccatcgacatccagcacctgaagaggcggtgggcggccccggaggtggacgagtgcaacaggctgcgtctgcttttgcaggaagccctgtggccagagggaaaactgcacaagtagcgggtgtggctgagaggaccgcgtttctgtaatgacccagatttaaaagacataaggtggataattctacatttgtgtgcaagtatatttatgtatatagactatgtatattctgtatataatttattttacatgaatatgtctttggtattcccagtaaatagatgactacttttgagtggaaacaaagaacattctagcatttacaaaacttccaggggaatgtagagccacgtccagggtgctcttttctgagagtatttcgagttatttttagaacagtttaaatattgtcacattactgctagattttaaacagcctaccatgaaaatgtatcttaatgaactattttcttatgcataaagtatgtgaacacatgtctaaattaaaaggaattactccaccg

SEQ ID NO: 86613 - DNA, 310 bp, Homo sapiens
taaacctgattcaagttctcagaaaactacatatggtttaatgcaatttttataaactcagaaataaagctacacagtatgttgtttagactcatataaatatgagataaaattatattttgaaaaacaagaaactgataaccacaaaattcagtctagtgattgttgtgggcagtgggggatcttggaatgtgtcagggaggagccactaagtagatgggggtcattggttgccttccctccctttccatttccctttcccttttcctttccctttccctttccgttccctttcctttcccttttcttt

SEQ ID NO: 86614 - DNA, 545 bp, Homo sapiens
  misc_feature (7)..(7): n is a, c, g, or t
  misc_feature (13)..(13): n is a, c, g, or t
  misc_feature (16)..(16): n is a, c, g, or t
  misc_feature (37)..(37): n is a, c, g, or t
  misc_feature (45)..(45): n is a, c, g, or t
gcgaccncccggnctngcgggaagcgatcggagcccnggaagatnggagtctcactctgtcaccaggctggaatgcaatggcacgaacttggcttactgcaacctccgactccagggttcaagagattctcctgcctcagtctcccgagccatacagtcaggtggttccaaggaagaaagaaagcacagagagaagaagctgcgtaaggagtctgagatggaccttcctgaacataaggagccgaggtgcagggatcccgaccaggatgccaggagcagagacagggtggccgaagtccacaccgctaaggagagtcctcgtggggagagggacagagacagacagagggagaggagaagagacgcaaaaggtaaaaaggggctgcttaccggattttaaattggtgagatgtttactgggctggtcggtctgaggacctgaggtcgtacgtggatctttctcacgagcaaagaacaggaggacaggggattgatctcacaagggaagtcccctgatccgagtcgcggcaccaaatttcatgcac

SEQ ID NO: 86615 - DNA, 3862 bp, Homo sapiens
cttctgtcctgggttgagcccagcgccgcagaaggagcacagactccctctgtgtgcacagcatttggaaggtgagtctgttgtggctgtttttggaaaatacagtctgacacaagatattttaaacccacagaatatttgtccttcctctgttgttcaactgctgttataacttgttttcacttttattttataatatttaagttttgaagtagccaaaggaacacattttataataatgtgtcattttagactagtgaataatttttaaaaatctgtatttctgttaccttttattccaggaggtagagaagtattttctggcatgtcaagaattaactgccattgatttaaatggcataatgaaaaagcagctcactacaacactgaaaataaattattttaaactttaaacattctaactttatacttttctatttagagaagaaccaaagatgatacctggaaagcagatgacctcagaaaacatctctgggccatacagtcaggtggttccaaggaagaaagaaagcacagagagaagaagctgcgtaaggagtctgagatggaccttcctgaacataaggagccgaggtgcagggatcccgaccaggatgccaggagcagagacagggtggccgaagtccacaccgctaaggagagtcctcgtggggagagggacagagacagacagagggagaggagaagagacgcaaaagaccgggagaaagaaaagctgaaggagaaacatcgagaggcagaaaagtctcacagcagaggaaaggacagggaaaaagaaaaagacagaagggcccggaaggaagagctccggcagaccgtggcccaccacaacctgctgggccaggagacacgcgaccggcagctcctggagcgggcggagaggaaaggccgctcagtaagtaaagtaagaagtgaagagaaagatgaagactctgaaagaggagatgaagatagagaaagaagataccgagaaagaaagctgcagtacggagacagcaaggacaaccctctcaagtactggctttataaagaagaaggcgagaggagacacaggaagcccagagagccagatcgagacaagaaacaccgagaaaaaagcagcacaagggaaaaaagagagaaatattccaaagagaaaagtaattcattctctgacaaaggggaagaaagacataaagaaaagcgacacaaagaaggttttcattttgatgatgagaggcaccgaagcaacgtggatagaaaagagaaatcggcaaaagatgagcccaggaaaagggaatcccagaatggtgaacacagaaatcgaggtgcaagctcaaaaagagatgggaccagcagccagcatgctgagaatttagtaaggaatcatggaaaagataaagattcaagacggaagcatggccacgaggaaggctcttctgtgtggtggaagctggaccagaggccgggaggcgaggaaaccgtggaaattgaaaaggaagaaactgatttagaaaatgctagagctgatgcatatacagccagttgtgaagatgattttgaagactatgaagatgactttgaggtttgtgatggtgatgatgatgaaagcagtaatgaacctgagtcaagagaaaaactggaagaacttcctctagctcaaaaaaaggaaatacaagaaattcaaagagctattaatgcagaaaatgaaaggattggcgagttatctttgaaactgtttcagaagcgaggtagaacagaatttgaaaaggagcccaggacagatacaaacagttccccttccagagcctctgtttgtggaatttttgtggattttgcctcagcttcacaccgtcaaaagagtcggactcaggcccttaagcaaaagatgcgaagtacaaaactgcttcggctcattgacttagatttttcatttactttctctctcttggatctaccaccagtaaatgaatatgacatgtatatcagaaactttgggaaaaaaaataccaagcaggcatatgttcagtgtaacgaagataatgttgaaagagacattcaaacggaggaaatagagaccagggaagtgtggacccagcacccgggagaaagtactgttgtatctggaggcagtgaacaaagagatacctctgatgctgtagttatgccaaagattgatactccaaggttatgtagctttctgcgggctgcttgtcaggtgatggccgttttgctggaagaggatcgcttggcagctgaacccagctggaatcttagggctcaagacagggccctgtattttagtgacagctcatctcagctgaacaccagtctaccattccttcaaagtcacgtgttgctgcttgagccctttgaaagcatttttactgtttgccggaacagcgcacggctcagttgtcgtctgggatttgagagaagactcaaggctgcattactctgtgacgctgagcgatggcttctggacgttccggaccgccacgttttccaccgatggaatccttacctcagtaaaccaccgaagccctcttcaagcagtagaacctatctcaacgtccgtccacaaaaagcagagctttgtgctttcacccttttctactcaagaagaaatgtcaggtttgtccttccacatcgcttccttggatgagagtggggttctcaatgtatgggtggttgttgaattaccaaaggcagacatcgcaggttcaataagtgatttaggtctgatgcctggagggagggtcaagctggtacatagtgctctgatccagttgggtgacagtctttcccataaaggtaatgaattttggggcactacacaaacactgaatgttaaatttctgccttcagatcctaatcactttattattggcacagacatgggtctcataagccatggcacaagacaagatttgagagtggctcccaaactattcaaacctcagcaacatggtataagaccagtgaaagttaatgtcattgatttttcaccatttggagaaccaatatttttggccggctgttcggacggaagcatcaggctgcaccagctgagctccgcgtttccgctcctgcagtgggacagcagcacggacagccatgcggtcaccggcctgcagtggtccccaaccaggcctgccgtgttcctggtgcaggacgacacatccaacatctacatctgggacctcctccagagcgatctgggtcctgtcgccaaacagcaggtctcccccaacaggctggtggccatggctgcggtgggtgagcctgagaaggctggtggcagcttcctggccctggtgctggccagggcgtctggctccatcgacatccagcacctgaagaggcggtgggcggccccggaggtggacgagtgcaacaggctgcgtctgcttttgcaggaagccctgtggccagagggaaaactgcacaagtagcgggtgtggctgagaggaccgcgtttctgtaatgacccagatttaaaagacataaggtggataattctacatttgtgtgcaagtatatttatgtatatagactatgtatattctgtatataatttattttacatgaatatgtctttggtattcccagtaaatagatgactacttttgagtggaaacaaagaacattctagcatttacaaaacttccaggggaatgtagagccacgtccagggtgctcttttctgagagtatttcgagttatttttagaacagtttaaatattgtcacattactgctagattttaaacagcctaccatgaaaatgtatcttaatgaactattttcttatgcataaagtatgtgaacacatgtctaaattaaaaggaattactccaccg

SEQ ID NO: 86616 - DNA, 3202 bp, Homo sapiens
ggaccccctcagataccaaaatccatgaatactcaagtcccccatataaaatggtgtagtgcctgcatataacctacgccctaccaccagaatgctttaaatcgtctctatattacttaaaatccctaatgcaatataaatgagatgcaaatagttgttattgtttagggtgtaatgacaaggaaaaagtctgtacatgtttactacagacacgattttcttcaaatgtttttgatctgtggttggttggatccgtcgttgcagaacccacagagagggagggctggctgcactcctatttgatgtgctcctgtgtttctcagcttgtcgtgttttacagctgcagtacggagacagcaaggacaaccctctcaagtactggctttataaagaagaaggcgagaggagacacaggaagcccagagagccagatcgagacaagaaacaccgagaaaaaagcagcacaagggaaaaaagagagaaatattccaaagagaaaagtaattcattctctgacaaaggggaagaaagacataaagaaaagcgacacaaagaaggttttcattttgatgatgagaggcaccgaagcaacgtggatagaaaagagaaatcggcaaaagatgagcccaggaaaagggaatcccagaatggtgaacacagaaatcgaggtgcaagctcaaaaagagatgggaccagcagccagcatgctgagaatttagtaaggaatcatggaaaagataaagattcaagacggaagcatggccacgaggaaggctcttctgtgtggtggaagctggaccagaggccgggaggcgaggaaaccgtggaaattgaaaaggaagaaactgatttagaaaatgctagagctgatgcatatacagccagttgtgaagatgattttgaagactatgaagatgactttgaggtttgtgatggtgatgatgatgaaagcagtaatgaacctgagtcaagagaaaaactggaagaacttcctctagctcaaaaaaaggaaatacaagaaattcaaagagctattaatgcagaaaatgaaaggattggcgagttatctttgaaactgtttcagaagcgaggtagaacagaatttgaaaaggagcccaggacagatacaaacagttccccttccagagcctctgtttgtggaatttttgtggattttgcctcagcttcacaccgtcaaaagagtcggactcaggcccttaagcaaaagatgcgaagtacaaaactgcttcggctcattgacttagatttttcatttactttctctctcttggatctaccaccagtaaatgaatatgacatgtatatcagaaactttgggaaaaaaaataccaagcaggcatatgttcagtgtaacgaagataatgttgaaagagacattcaaacggaggaaatagagaccagggaagtgtggacccagcacccgggagaaagtactgttgtatctggaggcagtgaacaaagagatacctctgatgctgtagttatgccaaagattgatactccaaggttatgtagctttctgcgggctgcttgtcaggtgatggccgttttgctggaagaggatcgcttggcagctgaacccagctggaatcttagggctcaagacagggccctgtattttagtgacagctcatctcagctgaacaccagtctaccattccttcaaagtcacgtgttgctgcttgagccctttgaaagcatttttactgtttgccggaacagcgcacggctcagttgtcgtctgggatttgagagaagactcaaggctgcattactctgtgacgctgagcgatggcttctggacgttccggaccgccacgttttccaccgatggaatccttacctcagtaaaccaccgaagccctcttcaagcagtagaacctatctcaacgtccgtccacaaaaagcagagctttgtgctttcacccttttctactcaagaagaaatgtcaggtttgtccttccacatcgcttccttggatgagagtggggttctcaatgtatgggtggttgttgaattaccaaaggcagacatcgcaggttcaataagtgatttaggtctgatgcctggagggagggtcaagctggtacatagtgctctgatccagttgggtgacagtctttcccataaaggtaatgaattttggggcactacacaaacactgaatgttaaatttctgccttcagatcctaatcactttattattggcacagacatgggtctcataagccatggcacaagacaagatttgagagtggctcccaaactattcaaacctcagcaacatggtataagaccagtgaaagttaatgtcattgatttttcaccatttggagaaccaatatttttggccggctgttcggacggaagcatcaggctgcaccagctgagctccgcgtttccgctcctgcagtgggacagcagcacggacagccatgcggtcaccggcctgcagtggtccccaaccaggcctgccgtgttcctggtgcaggacgacacatccaacatctacatctgggacctcctccagagcgatctgggtcctgtcgccaaacagcaggtctcccccaacaggctggtggccatggctgcggtgggtgagcctgagaaggctggtggcagcttcctggccctggtgctggccagggcgtctggctccatcgacatccagcacctgaagaggcggtgggcggccccggaggtggacgagtgcaacaggctgcgtctgcttttgcaggaagccctgtggccagagggaaaactgcacaagtagcgggtgtggctgagaggaccgcgtttctgtaatgacccagatttaaaagacataaggtggataattctacatttgtgtgcaagtatatttatgtatatagactatgtatattctgtatataatttattttacatgaatatgtctttggtattcccagtaaatagatgactacttttgagtggaaacaaagaacattctagcatttacaaaacttccaggggaatgtagagccacgtccagggtgctcttttctgagagtatttcgagttatttttagaacagtttaaatattgtcacattactgctagattttaaacagcctaccatgaaaatgtatcttaatgaactattttcttatgcataaagtatgtgaacacatgtctaaattaaaaggaattactccaccg

SEQ ID NO: 86617 - DNA, 1003 bp, Homo sapiens
gctgggcagtgcttctgggccctctgctgctcctgcttgtcggttgctaggcgctgggacgcgcctcccgaagggtgcggggcacaggtggcctcttcggggtggaccgcgcctggccggggccgaggacaccgcggccgcccgggcctgcgggaagcgatggagcccgggaagagaagaaccaaagatgatacctggaaagcagatgacctcagaaaacatctctgggccatacagtcaggtggttccaaggaagaaagaaagcacagagagaagaagctgcgtaaggagtctgagatggaccttcctgaacataaggagccgaggtgcagggatcccgaccaggatgccaggagcagagacagggtggccgaagtccacaccgctaaggagagtcctcgtggggagagggacagagacagacagagggagaggagaagagacgcaaaagaccgggagaaagaaaagctgaaggagaaacatcgagaggcagaaaagtctcacagcagaggaaaggacagggaaaaagaaaaagacagaagggcccggaaggaagagctccggcagaccgtggcccaccacaacctgctgggccaggagacacgcgaccggcagctcctggagcgggcggagaggaaaggccgctcagtaagtaaagtaagaagtgaagagaaagatgaagactctgaaagaggagatgaagatagagaaagaagataccgagaaagaaagagaagaaccaaagatgatacctggaaagcagatgacctcagaaaacatctctgggccatacagtcaggtggttccaaggaagaaagaaagcacagagagaagaagctgcgtaaggagtctgagatggaccttcctgaacataaggagccgaggtgcagggatcccgaccaggatgccaggagcagagacagggtggccgaagtccacaccgctaaggagagtcctcgtggggagagggacagagacagacagagggagaggagaagagacg

SEQ ID NO: 86618 - DNA, 518 bp, Homo sapiens
gctgggcagtgcttctgggccctctgctgctcctgcttgtcggttgctaggcgctgggacgcgcctcccgaagggtgcggggcacaggtggcctcttcggggtggaccgcgcctggccggggccgaggacaccgcggccgcccgggcctgcgggaagcgatggagcccgggaaggtcggtgcggcgctgggtctgggcgaggggtggtcgagcttcgcggactccttcgggcgccgctagcagcgccgccgccgccctccctttgcgcagcggttctctcggccgggccggggcttcccggaggagccgcggtgcctccgaggcaggaagggaaacggaggcgcggctggccgtcggcgcgagggatggcaggacgccgggctcccggcggtcgggagaggcggtctgtgcagcctcaggcctggggtcgccgccgcggcccgtctcctcgcgcccggcctggaggcggcctcggcccctgctgcggggccggggtggctgaggagacatatttaaaa

SEQ ID NO: 86619 - DNA, 440 bp, Homo sapiens
catgctgcttcccatcgttgtgaaaggacgcctcgcattctgggtatagatgagccatgcccttcaccctaagtggcagtcctaatgctccttgctgggtcctggatttcaaccctgtgtctcacatgtacatgcaaacgtgtgtgcagacagatgtgtgcacagtgtgtttcctgaggctgggcatgctgccagctgatgccaaaataggggtggggacagtaatctctaatccagagacgagaatgatctttgatatgagagctggttcttaaagctgcttctcttgttccaggcaaatagactaattgggattgcctccccgtcattttcccaccctactccaaacacgcactcacacacccaagagacacacatgcgaatatacagattcttaacagctaggcatggcttctttttgctgggagaaaaacagagac

SEQ ID NO: 86620 - DNA, 362 bp, Homo sapiens
taaacctcattaagaatatgtgatgtgtttaacacttcatgtatatgtcatctaacttaatccacttgacaaagccagacctcagctcagaggtgatgtgacagtctcctgggtcatagctgccctcccgctgacagcctctcttggcacctcttttcatgttttcatgagtaacagaggtgggacaaaccagataggtctgactccaaagcctatgctgaagagaatgccaaagagaccaccattttagagctataatgtattttttagaattacagcggggatgacatgcacagtccaaagttgttgcgcccccattatggcaaggcagcatgcctgcatctaaaaatctagaatactcc

SEQ ID NO: 86621 - DNA, 437 bp, Homo sapiens
ccaccagtctgttctacatcaggaaagtggcaatcaggaggttgctactgaaacagtggcaagaaaatgctactgtagctgtgatccaggtgatcagggcagccactgctgttaacattgtaactgctggaagtctggaatgtaggatctggccattgctgtgacagcttctccttgatgctcgtgaactggtgactagatgctgttatgatgaatctggtccctgctgcctttgccattgtctctaaaataattggaaaatgattaattatgtttttaatataatttaattgtaattttatgcggctgaattcttaatggtggctgtgtttgacaactgatttgtgaaattcatggaaatttgatagttggccttgcaagagagtacagccaactccattgcatcactgtaaaacctcctagctgacggttctact

SEQ ID NO: 86622 - DNA, 519 bp, Homo sapiens
ttcacacttggataaaatccacactccctcaccacaacctatatgactggactcttgcctaatcttctcacctcatcctctatcactttcttccctgttcattcctctccaggaactggccttctcactgttcctcagaaatatgaagcggactactgctttagggtcttgcatttgctgtttcctctgttttcaacccccagaccgtcacatggctttctctcttacctcactcaggtctctgctcaaatgttgcctcagagaggacttccctcatcaccacccctaatataaatgaagcaccgtagccgtagccgttccctaaccaattgccctactttattcaccttcacatctcttatcaaatatcctgtttacctgtttacttgattattgtttgctttacctctagaatgcatgttctatgagtgtagggacttggtcaatcttgttcaacaaggaacttccagtccaaaactgtacctgtcatagaaaaggcacccaataaatatgcaaatc

SEQ ID NO: 86623 - DNA, 8733 bp, Homo sapiens
gccatgttgatttctgatccttgagcttttctgtgcttctctgttcattcttcatggcatccttggaaggatgccaagctaaggaggccaggggggaataaaaggagtccaggctcccaactgtgcccttcccctctcccctgggagcaaccacttagggtcctcatggttcctccagtctggactctgctgcttctggtgggggctgcccttttcaggaaagagaagcctccggaccagaagctggttgttcgcagctctagggacaactatgtcctcacccagtgtgattttgaggatgacgccaaacccctctgtgactggtcccaagtgtccgcagacgatgaagactgggttcgagccagtgggccctctcccaccggctccaccggggcccccggggggtaccctaacggagagggcagctatctgcatatggaatcgaacagcttccaccgtgggggagtggcccgcctgctcagccccgacctatgggagcaaggccccctctgtgtgcactttgcccaccacatgttcgggctgtcttggggcgcccagctcaggctgctgctgctctcgggtgaagagggccgccgccccgatgtgctctggaaacactggaacacccagagaccctcctggatgctcaccaccgtcactgtgcccgcagggttcaccctgcccacccggctgatgtttgagggaacacggggtagcactgcctacctggacatcgccctggatgccctctctatccgccggggctcctgtaatcgcgtctgtatgatgcaaacatgcagctttgacattccaaatgacctctgtgactggacctggatcccaactgcctccggggccaagtggactcagaagaaagggtcatcaggaaagccaggcgtggggcctgatggcgacttctctagccctggtagtggctgctacatgctcctggaccccaagaatgcaagacctgggcagaaagctgtcctcctgagccccgtgagcctgtcctctggctgtctgagcttttccttccactacatcctccggggccagtctcctggtgcagccctccacatttatgcttcagtcttggggagtatccggaaacacactctcttctcaggacaacctgggcccaactggcaggctgtttctgtcaattacacagccgtgggacggatacagtttgccgtggtaggcgtttttggaaagaccccagagccagctgtggcagttgatgcaaccagcattgctccttgtggggagggttttcctcagtgtgactttgaagacaacgcccatcccttctgtgactgggtccagacttccggggatggtggacactgggccctcggacataaaaatggacccgtccatggcatgggccctgcgggaggtttccctaatgcagggggtcactatatctaccttgaggctgacgagttctcccaggcaggccagtcagtcagactggtgagccggcccttctgcgccccaggtgacatctgcgtggagttcgcataccacatgtatggccttggggagggtactatgctcgaactcctcctgggaagtcctgcggggagtcccccgattcctctctggaaacgcgtggggtctcagcgcccttactggcagaacacctccgtcaccgtcccctcaggacaccaacagcccatgcagcttattttcaagggcatccagggaagcaacacggcctctgtggttgctatgggtttcatcttgatcaatcctgggacttgtccagtaaaagtgctaccagagcttcctcccgtatctccagtttcttccactggcccttctgaaaccactggcctcacagaaaaccctacaatctccaccaagaaacctacagtttccatagaaaaacccagtgtcaccacagaaaagcccacagtccccaaagaaaagcccaccattcccacagaaaaacccaccatctccacagaaaaacccaccattccttcagaaaaacccaacatgccctcagaaaaacccaccattccctcagaaaaacccaccatcctcacagaaaaacccaccattccctcagaaaaacccaccattccctcagaaaaacccaccatttccacagaaaaacccaccgtccccacagaagagcccaccacccccactgaggagaccaccacctccatggaagagcctgtcatccctacagaaaaacccagcatccctacagaaaaacccagcatccccacggaaaaacccaccatctccatggaagagactatcatctccacagaaaaacccaccatctccccagaaaaacccaccatccccacagaaaaacccaccatccccacagaaaaatccaccatctccccagaaaaacccaccacccccacagaaaaacccaccatccccacagaaaaacccaccatctccccagaaaaacccaccacccccacagaaaaacccaccatctccccagaaaaactcaccatccccacagaaaaacccaccatccccacagaaaaacccaccattcccacagaaaaacccaccatctccacagaagagcccaccacccccactgaggagaccaccatctccacagaaaaacccagcatccccatggaaaaacccactctccccactgaagaaaccaccacctctgttgaagagactaccatctctacagaaaaactcaccatccccatggaaaaacccaccatctccacagaaaaacccaccatccccacagaaaaacccaccatctccccagaaaaactcaccatccccacggaaaaactcaccatccccacggaaaaacccaccatccccattgaagagactaccatctccacagaaaaactcaccatccccacagaaaaacccaccatctccccagaaaaacccaccatctccacggaaaaacccaccatccccacggaaaaacccaccatccccactgaagagactaccatctccacagaaaaactcaccatccccacagaaaaacccaccatctccccagaaaaactcaccatccccacagaaaaacccaccatctccacggaaaaacccaccatccccacggaaaaacttaccatccccacggaaaaacccaccatccccacagaaaaacccaccattcccacagagaagctcacagccctgaggccaccccatcccagccccacagccactgggctggcagccttggtgatgtctccacatgctccaagtacccctatgaccagtgtgattctgggcactaccacaacctccagatccagtacagagcgctgccctccaaatgcccgctacgaatcctgtgcttgtcctgcttcgtgcaagagccccaggcctagctgtgggcccctctgtcgggagggctgtgtctgcaaccctggctttttgtttagtgacaaccactgcatccaggcctcttcctgcaattgcttctacaacaacgactactatgagcctggggcagagtggttcagccccaactgcacagaacattgccgctgctggcccggcagtcgggtcgagtgccagatctctcagtgtgggacacacaccgtgtgccagcttaagaatggccagtatggatgccacccctacgcaggcactgccacctgcttggtctacggagaccctcattatgtcacctttgacgggaggcactttggcttcatgggcaagtgcacttacatcttggcccagccctgtggcaactcaacagacccattcttcagggtgacagccaagaatgaggagcagggacaggaaggcgtgtcctgcctgagcaaagtctacgtgaccctgcccgagagcaccgtcaccctgcttaagggcagacgcactctggttgggggtcagcaagttactctcccagccataccctctaaaggcgtcttcctgggtgcaagcgggcggtttgtggagctgcagacggagttcggtttgcgggtgagatgggatggtgaccagcagctgtatgttactgtgtccagcacatactctggcaaactctgtggtttgtgtgggaactatgacggcaacagtgacaatgaccacctgaagttggacggcagcccagcaggagacaaggaggagctggggaacagctggcagacggaccaggacgaggaccaggagtgtcagaagtaccaggtggtgaattccccgtcttgtgattcatctctgcagagcagcatgtcggggccagggttctgtggacggctggtcgacactcatggcccatttgagacatgcctgctgcacgtgaaggccgcttccttcttcgacagctgcatgcttgatatgtgcggattccaggggctgcagcacctgctgtgcacacacatgtccaccatgaccaccacctgccaggacgcaggccacgctgtgaagccctggagggaaccccacttctgcccaatggcctgcccgcccaacagcaagtactccctgtgtgcgaagccatgccctgacacctgccattcaggattctccggcatgttctgctcagaccggtgcgtggaggcctgtgaatgcaatccgggcttcgtcctcagtggcctcgagtgcatacctcgctcccagtgtgggtgcctccaccctgcaggcagctacttcaaggtaggggagcggtggtacaagccaggctgcaaagagttgtgcgtctgtgaaagcaacaacagaattcgctgccagccctggaggtgtagggcccaggagttctgtggccaacaggatggtatctatggctgccatgcccaaggtgccgccacctgcacagcctcgggtgacccccactacctgaccttcgatggcgccttgcaccacttcatgggcacctgcacctatgtcctgacccggccttgctggtccaggtcccaagacagctattttgttgtgagcgccaccaacgagaaccgcggggggatcctggaggtctcctacatcaaagccgtccacgtgacagtctttgacctcagcatctcactgctcagaggctgtaaggtcatgctgaatggccatcgggtggccctacctgtgtggcttgcacaaggccgggtgaccataaggctcagcagcaacctcgtcctcctctacacgaactttgggctccaagttcgctacgacgggagccacttggtggaagtgacagtcccctcctcctatggcggccagctctgtgggctgtgtgggaactacaacaacaacagcttggatgacaacctgcgccccgacagaaagcttgcaggcgattccatgcagctgggggccgcctggaagttacctgaatcctctgaacctggctgtttccttgtgggtggcaagccctccagctgccaggagaacagcatggcagacgcctggaacaagaactgtgcgatcttaataaaccctcagggacccttctctcaatgtcaccaggtggtgcctccccagtccagctttgccagttgcgtgcatggtcagtgtgggaccaagggcgacaccacagccctgtgccgctccctgcaggcctacgcgtccctgtgtgcccaggctggccaggcccctgcctggcggaacagaaccttctgccctatgaggtgcccacctggcagcagctacagcccctgcagcagcccctgcccagacacctgcagcagcataaacaacccgagggactgccccaaagcactgccctgtgctgagagctgtgaatgtcagaaaggccacatcttgagtggaacctcctgcgtgccccttggccagtgtggctgcactgacccagcgggctcctaccacccggtcggggagcgctggtacacagagaacacctgcaccaggctctgcacctgctccgtccacaacaacatcacctgcttccagagcacctgcaaacccaaccagatatgctgggccctggatgggctgctccgttgtcgggcctcaggtgtgggagtgtgtcagctcccaggggagtcccactacgtgagctttgatggtagtaaccattctatcccggacgcctgcactcttgtcctggtgaaagtgtgccaccccgccatggccttgcccttcttcaagatcagtgccaagcatgagaaggaggaaggtggaactgaggctttccgccttcatgaggtctacattgacatctacgatgcccaggtcaccctgcagaagggccaccgtgtgctaatcaacagcaaacaggtcaccctccccgccatctcccagatccctggggtcagtgtcaagtccagcagcatctacagcattgttaacatcaagatcggggtgcaagtcaagtttgacgggaatcatctcttagagattgaaatccccacaacctactatggaaaggtctgcggcatgtgtgggaacttcaatgatgaggaagaggacgaactaatgatgcccagcgatgaagtagcaaatagtgacagtgaatttgtgaacagttggaaagataaggacattgacccaagttgtcagagtctcctggtagatgagcagcagattccagcggaacagcaggagaacccgagtggaaactgcagggcggccgacctccgcagggcgcgggaaaagtgcgaggcagcgctccgggctcctgtgtgggcccagtgcgcctcccgcatagacctcacgcccttcctggtggactgtgcaaacaccctctgtgagttcggaggtctctaccaggccctctgccaggctctgcaagccttcggggccacctgccagagccaggggctcaagcccccactctggagaaacagcagcttctgccctctggaatgccctgcctacagcagctacaccaactgccttccctcctgctcaccctcctgctgggacctggatggccggtgtgagggcgccaaagtcccctctgcctgcgctgagggctgcatttgtcagcccggctatgtgctgagtgaagacaagtgtgtccccagaagtcagtgtggctgcaaggatgcccatggtggctccatccctctgggcaagagctgggtctccagcggttgcacggagaagtgtgtctgcacgggaggagccattcagtgcggggacttccgatgcccctctgggtcccactgccagctcacttccgacaacagcaacagcaattgtgtctcagacaagtctgaacaatgctcagtctatggcgacccccgttacctcacatttgacggcttcagctaccgcttgcaaggccgcatgacctatgttctgatcaagactgtggacgtactgcctgagggggtggagcccctcctcgtggaaggacgcaacaagatggatccgcccaggagctccatcttcttgcaggaagtgattaccaccgtctacggctataaagtgcagctccaagctggtctggagcttgtggtcaacaaccagaagatggccgtcccctacaggccaaatgaacacctgcgggtcaccctgtggggccaacggctctacctggtcaccgactttgagctggtcgtcagctttggtggaaggaaaaatgcagtgatctccctacccagcatgtacgaggggcttgtgagtggcctgtgcggaaactacgacaagaaccgcaagaatgacatgatgctgcccagtggcgccctgacccagaacctcaacacctttggcaacagctgggaggtgaagaccgaggacgcactcctgcgcttccccagggctataccagcggaggaggagggacaaggggcggagctgggcctccgcacgggcctccaagtgtccgaatgtagcccggagcagctggcgagcaacagcacccaggcctgtagggtgctggcagacccccagggcccctttgctgcctgtcaccagacggtggccccagagcccttccaagagcactgcgtgctggatctgtgctctgctcaggacccaagagagcaagaggagctgcgttgccaggtcctcagtgggtacgccatcctctgccaggaggcgggcgctgccctggctggctggcgggaccgcaccctctgcgccatggagtgtccagcaggtaccatatatcagagctgtatgacaccctgcccagcatcctgtgccaacctggcagaccccggggactgcgagggcccctgcgtggaaggctgcgccagcatcccaggctatgcctacagtggcacccagagcctcccctggctgactgtggctgcaccagcaatggcatctactaccagctgggcagcagctttctgactgaggactgctctcagcggtgcacctgtgccagctcacggatcctgctgtgtgagcccttcagctgcagagcgggggaggtctgcaccctggggaaccacacccaaggctgctttccagaaagcccgtgtctgcagaacccctgtcagaatgacgggcagtgtcgggagcagggagccaccttcacctgcgagtgtgaagttggttacgggggaggcctgtgtatggagcctcgagatgcgccacctcccagaaagccagcatctaacctggtggccgtcctactgggactgctggtgcctgtggtggtcgtactactggccgtgaccagagagtgcatttacagaacgaggaggaagagagagaaaacgcaggagggagacagactggccaggctggtggacacagatactgttctggactgtgcctgttaagttgctcagttttgagctgtcttcagacaagaagattaaataaatttatatatttatttatttg

SEQ ID NO: 86624 - DNA, 8668 bp, Homo sapiens
gccatgttgatttctgatccttgagcttttctgtgcttctctgttcattcttcatggcatccttggaaggatgccaagctaaggaggccaggggggaataaaaggagtccaggctcccaactgtgcccttcccctctcccctgggagcaaccacttagggtcctcatggttcctccagtctggactctgctgcttctggtgggggctgcccttttcaggaaagagaagcctccggaccagaagctggttgttcgcagctctagggacaactatgtcctcacccagtgtgattttgaggatgacgccaaacccctctgtgactggtcccaagtgtccgcagacgatgaagactgggttcgagccagtgggccctctcccaccggctccaccggggcccccggggggtaccctaacggagagggcagctatctgcatatggaatcgaacagcttccaccgtgggggagtggcccgcctgctcagccccgacctatgggagcaaggccccctctgtgtgcactttgcccaccacatgttcgggctgtcttggggcgcccagctcaggctgctgctgctctcgggtgaagagggccgccgccccgatgtgctctggaaacactggaacacccagagaccctcctggatgctcaccaccgtcactgtgcccgcagggttcaccctgcccacccggctgatgtttgagggaacacggggtagcactgcctacctggacatcgccctggatgccctctctatccgccggggctcctgtaatcgcgtctgtatgatgcaaacatgcagctttgacattccaaatgacctctgtgactggacctggatcccaactgcctccggggccaagtggactcagaagaaagggtcatcaggaaagccaggcgtggggcctgatggcgacttctctagccctggtagtggctgctacatgctcctggaccccaagaatgcaagacctgggcagaaagctgtcctcctgagccccgtgagcctgtcctctggctgtctgagcttttccttccactacatcctccggggccagtctcctggtgcagccctccacatttatgcttcagtcttggggagtatccggaaacacactctcttctcaggacaacctgggcccaactggcaggctgtttctgtcaattacacagccgtgggacggatacagtttgccgtggtaggcgtttttggaaagaccccagagccagctgtggcagttgatgcaaccagcattgctccttgtggggagggttttcctcagtgtgactttgaagacaacgcccatcccttctgtgactgggtccagacttccggggatggtggacactgggccctcggacataaaaatggacccgtccatggcatgggccctgcgggaggtttccctaatgcagggggtcactatatctaccttgaggctgacgagttctcccaggcaggccagtcagtcagactggtgagccggcccttctgcgccccaggtgacatctgcgtggagttcgcataccacatgtatggccttggggagggtactatgctcgaactcctcctgggaagtcctgcggggagtcccccgattcctctctggaaacgcgtggggtctcagcgcccttactggcagaacacctccgtcaccgtcccctcaggacaccaacagcccatgcagcttattttcaagggcatccagggaagcaacacggcctctgtggttgctatgggtttcatcttgatcaatcctgggacttgtccagtaaaagtgctaccagagcttcctcccgtatctccagtttcttccactggcccttctgaaaccactggcctcacagaaaaccctacaatctccaccaagaaacctacagtttccatagaaaaacccagtgtcaccacagaaaagcccacagtccccaaagaaaagcccaccattcccacagaaaaacccaccatctccacagaaaaacccaccattccttcagaaaaacccaacatgccctcagaaaaacccaccattccctcagaaaaacccaccatcctcacagaaaaacccaccattccctcagaaaaacccaccattccctcagaaaaacccaccatttccacagaaaaacccaccgtccccacagaagagcccaccacccccactgaggagaccaccacctccatggaagagcctgtcatccctacagaaaaacccagcatccctacagaaaaacccagcatccccacggaaaaacccaccatctccatggaagagactatcatctccacagaaaaacccaccatctccccagaaaaacccaccatccccacagaaaaacccaccatccccacagaaaaatccaccatctccccagaaaaacccaccacccccacagaaaaacccaccatccccacagaaaaacccaccatctccccagaaaaacccaccacccccacagaaaaacccaccatctccccagaaaaactcaccatccccacagaaaaacccaccatccccacagaaaaacccaccattcccacagaaaaacccaccatctccacagaagagcccaccacccccactgaggagaccaccatctccacagaaaaacccagcatccccatggaaaaacccactctccccactgaagaaaccaccacctctgttgaagagactaccatctctacagaaaaactcaccatccccatggaaaaacccaccatctccacagaaaaacccaccatccccacagaaaaacccaccatctccccagaaaaactcaccatccccacggaaaaactcaccatccccacggaaaaacccaccatccccattgaagagactaccatctccacagaaaaactcaccatccccacagaaaaacccaccatctccccagaaaaacccaccatctccacggaaaaacccaccatccccacggaaaaacccaccatccccactgaagagactaccatctccacagaaaaactcaccatccccacagaaaaacccaccatctccccagaaaaactcaccatccccacagaaaaacccaccatctccacggaaaaacccaccatccccacggaaaaacttaccatccccacggaaaaacccaccatccccacagaaaaacccaccattcccacagagaagctcacagccctgaggccaccccatcccagccccacagccactgggctggcagccttggtgatgtctccacatgctccaagtacccctatgaccagtgtgattctgggcactaccacaacctccagatccagtacagagcgctgccctccaaatgcccgctacgaatcctgtgcttgtcctgcttcgtgcaagagccccaggcctagctgtgggcccctctgtcgggagggctgtgtctgcaaccctggctttttgtttagtgacaaccactgcatccaggcctcttcctgcaattgcttctacaacaacgactactatgagcctggggcagagtggttcagccccaactgcacagaacattgccgctgctggcccggcagtcgggtcgagtgccagatctctcagtgtgggacacacaccgtgtgccagcttaagaatggccagtatggatgccacccctacgcaggcactgccacctgcttggtctacggagaccctcattatgtcacctttgacgggaggcactttggcttcatgggcaagtgcacttacatcttggcccagccctgtggcaactcaacagacccattcttcagggtgacagccaagaatgaggagcagggacaggaaggcgtgtcctgcctgagcaaagtctacgtgaccctgcccgagagcaccgtcaccctgcttaagggcagacgcactctggttgggggtcagcaagttactctcccagccataccctctaaaggcgtcttcctgggtgcaagcgggcggtttgtggagctgcagacggagttcggtttgcgggtgagatgggatggtgaccagcagctgtatgttactgtgtccagcacatactctggcaaactctgtggtttgtgtgggaactatgacggcaacagtgacaatgaccacctgaagttggacggcagcccagcaggagacaaggaggagctggggaacagctggcagacggaccaggacgaggaccaggagtgtcagaagtaccaggtggtgaattccccgtcttgtgattcatctctgcagagcagcatgtcggggccagggttctgtggacggctggtcgacactcatggcccatttgagacatgcctgctgcacgtgaaggccgcttccttcttcgacagctgcatgcttgatatgtgcggattccaggggctgcagcacctgctgtgcacacacatgtccaccatgaccaccacctgccaggacgcaggccacgctgtgaagccctggagggaaccccacttctgcccaatggcctgcccgcccaacagcaagtactccctgtgtgcgaagccatgccctgacacctgccattcaggattctccggcatgttctgctcagaccggtgcgtggaggcctgtgaatgcaatccgggcttcgtcctcagtggcctcgagtgcatacctcgctcccagtgtgggtgcctccaccctgcaggcagctacttcaaggtaggggagcggtggtacaagccaggctgcaaagagttgtgcgtctgtgaaagcaacaacagaattcgctgccagccctggaggtgtagggcccaggagttctgtggccaacaggatggtatctatggctgccatgcccaaggtgccgccacctgcacagcctcgggtgacccccactacctgaccttcgatggcgccttgcaccacttcatgggcacctgcacctatgtcctgacccggccttgctggtccaggtcccaagacagctattttgttgtgagcgccaccaacgagaaccgcggggggatcctggaggtctcctacatcaaagccgtccacgtgacagtctttgacctcagcatctcactgctcagaggctgtaaggtcatgctgaatggccatcgggtggccctacctgtgtggcttgcacaaggccgggtgaccataaggctcagcagcaacctcgtcctcctctacacgaactttgggctccaagttcgctacgacgggagccacttggtggaagtgacagtcccctcctcctatggcggccagctctgtgggctgtgtgggaactacaacaacaacagcttggatgacaacctgcgccccgacagaaagcttgcaggcgattccatgcagctgggggccgcctggaagttacctgaatcctctgaacctggctgtttccttgtgggtggcaagccctccagctgccaggagaacagcatggcagacgcctggaacaagaactgtgcgatcttaataaaccctcagggacccttctctcaatgtcaccaggtggtgcctccccagtccagctttgccagttgcgtgcatggtcagtgtgggaccaagggcgacaccacagccctgtgccgctccctgcaggcctacgcgtccctgtgtgcccaggctggccaggcccctgcctggcggaacagaaccttctgccctatgaggtgcccacctggcagcagctacagcccctgcagcagcccctgcccagacacctgcagcagcataaacaacccgagggactgccccaaagcactgccctgtgctgagagctgtgaatgtcagaaaggccacatcttgagtggaacctcctgcgtgccccttggccagtgtggctgcactgacccagcgggctcctaccacccggtcggggagcgctggtacacagagaacacctgcaccaggctctgcacctgctccgtccacaacaacatcacctgcttccagagcacctgcaaacccaaccagatatgctgggccctggatgggctgctccgttgtcgggcctcaggtgtgggagtgtgtcagctcccaggggagtcccactacgtgagctttgatggtagtaaccattctatcccggacgcctgcactcttgtcctggtgaaagtgtgccaccccgccatggccttgcccttcttcaagatcagtgccaagcatgagaaggaggaaggtggaactgaggctttccgccttcatgaggtctacattgacatctacgatgcccaggtcaccctgcagaagggccaccgtgtgctaatcaacagcaaacaggtcaccctccccgccatctcccagatccctggggtcagtgtcaagtccagcagcatctacagcattgttaacatcaagatcggggtgcaagtcaagtttgacgggaatcatctcttagagattgaaatccccacaacctactatggaaaggtctgcggcatgtgtgggaacttcaatgatgaggaagaggacgaactaatgatgcccagcgatgaagtagcaaatagtgacagtgaatttgtgaacagttggaaagataaggacattgacccaagttgtcagagtctcctggtagatgagcagcagattccagcggaacagcaggagaacccgagtggaaactgcagggcggccgacctccgcagggcgcgggaaaagtgcgaggcagcgctccgggctcctgtgtgggcccagtgcgcctcccgcatagacctcacgcccttcctggtggactgtgcaaacaccctctgtgagttcggaggtctctaccaggccctctgccaggctctgcaagccttcggggccacctgccagagccaggggctcaagcccccactctggagaaacagcagcttctgccctctggaatgccctgcctacagcagctacaccaactgccttccctcctgctcaccctcctgctgggacctggatggccggtgtgagggcgccaaagtcccctctgcctgcgctgagggctgcatttgtcagcccggctatgtgctgagtgaagacaagtgtgtccccagaagtcagtgtggctgcaaggatgcccatggtggctccatccctctgggcaagagctgggtctccagcggttgcacggagaagtgtgtctgcacgggaggagccattcagtgcggggacttccgatgcccctctgggtcccactgccagctcacttccgacaacagcaacagcaattgtgtctcagacaagtctgaacaatgctcagtctatggcgacccccgttacctcacatttgacggcttcagctaccgcttgcaaggccgcatgacctatgttctgatcaagactgtggacgtactgcctgagggggtggagcccctcctcgtggaaggacgcaacaagatggatccgcccaggagctccatcttcttgcaggaagtgattaccaccgtctacggctataaagtgcagctccaagctggtctggagcttgtggtcaacaaccagaagatggccgtcccctacaggccaaatgaacacctgcgggtcaccctgtggggccaacggctctacctggtcaccgactttgagctggtcgtcagctttggtggaaggaaaaatgcagtgatctccctacccagcatgtacgaggggcttgtgagtggcctgtgcggaaactacgacaagaaccgcaagaatgacatgatgctgcccagtggcgccctgacccagaacctcaacacctttggcaacagctgggaggtgaagaccgaggacgcactcctgcgcttccccagggctataccagcggaggaggagggacaaggggcggagctgggcctccgcacgggcctccaagtgtccgaatgtagcccggagcagctggcgagcaacagcacccaggcctgtagggtgctggcagacccccagggcccctttgctgcctgtcaccagacggtggccccagagcccttccaagagcactgcgtgctggatctgtgctctgctcaggacccaagagagcaagaggagctgcgttgccaggtcctcagtggccatggagtgtccagcaggtaccatatatcagagctgtatgacaccctgcccagcatcctgtgccaacctggcagaccccggggactgcgagggcccctgcgtggaaggctgcgccagcatcccaggctatgcctacagtggcacccagagcctcccctggctgactgtggctgcaccagcaatggcatctactaccagctgggcagcagctttctgactgaggactgctctcagcggtgcacctgtgccagctcacggatcctgctgtgtgagcccttcagctgcagagcgggggaggtctgcaccctggggaaccacacccaaggctgctttccagaaagcccgtgtctgcagaacccctgtcagaatgacgggcagtgtcgggagcagggagccaccttcacctgcgagtgtgaagttggttacgggggaggcctgtgtatggagcctcgagatgcgccacctcccagaaagccagcatctaacctggtggccgtcctactgggactgctggtgcctgtggtggtcgtactactggccgtgaccagagagtgcatttacagaacgaggaggaagagagagaaaacgcaggagggagacagactggccaggctggtggacacagatactgttctggactgtgcctgttaagttgctcagttttgagctgtcttcagacaagaagattaaataaatttatatatttatttatttg

SEQ ID NO: 86625 - DNA, 8469 bp, Homo sapiens
gccatgttgatttctgatccttgagcttttctgtgcttctctgttcattcttcatggcatccttggaaggatgccaagctaaggaggccaggggggaataaaaggagtccaggctcccaactgtgcccttcccctctcccctgggagcaaccacttagggtcctcatggttcctccagtctggactctgctgcttctggtgggggctgcccttttcaggaaagagaagcctccggaccagaagctggttgttcgcagctctagggacaactatgtcctcacccagtgtgattttgaggatgacgccaaacccctctgtgactggtcccaagtgtccgcagacgatgaagactgggttcgagccagtgggccctctcccaccggctccaccggggcccccggggggtaccctaacggagagggcagctatctgcatatggaatcgaacagcttccaccgtgggggagtggcccgcctgctcagccccgacctatgggagcaaggccccctctgtgtgcactttgcccaccacatgttcgggctgtcttggggcgcccagctcaggctgctgctgctctcgggtgaagagggccgccgccccgatgtgctctggaaacactggaacacccagagaccctcctggatgctcaccaccgtcactgtgcccgcagggttcaccctgcccacccggctgatgtttgagggaacacggggtagcactgcctacctggacatcgccctggatgccctctctatccgccggggctcctgtaatcgcgtctgtatgatgcaaacatgcagctttgacattccaaatgacctctgtgactggacctggatcccaactgcctccggggccaagtggactcagaagaaagggtcatcaggaaagccaggcgtggggcctgatggcgacttctctagccctggtagtggctgctacatgctcctggaccccaagaatgcaagacctgggcagaaagctgtcctcctgagccccgtgagcctgtcctctggctgtctgagcttttccttccactacatcctccggggccagtctcctggtgcagccctccacatttatgcttcagtcttggggagtatccggaaacacactctcttctcaggacaacctgggcccaactggcaggctgtttctgtcaattacacagccgtgggacggatacagtttgccgtggtaggcgtttttggaaagaccccagagccagctgtggcagttgatgcaaccagcattgctccttgtggggagggttttcctcagtgtgactttgaagacaacgcccatcccttctgtgactgggtccagacttccggggatggtggacactgggccctcggacataaaaatggacccgtccatggcatgggccctgcgggaggtttccctaatgcagggggtcactatatctaccttgaggctgacgagttctcccaggcaggccagtcagtcagactggtgagccggcccttctgcgccccaggtgacatctgcgtggagttcgcataccacatgtatggccttggggagggtactatgctcgaactcctcctgggaagtcctgcggggagtcccccgattcctctctggaaacgcgtggggtctcagcgcccttactggcagaacacctccgtcaccgtcccctcaggacaccaacagcccatgcagcttattttcaagggcatccagggaagcaacacggcctctgtggttgctatgggtttcatcttgatcaatcctgggacttgtccagtaaaagtgctaccagagcttcctcccgtatctccagtttcttccactggcccttctgaaaccactggcctcacagaaaaccctacaatctccaccaagaaacctacagtttccatagaaaaacccagtgtcaccacagaaaagcccacagtccccaaagaaaagcccaccattcccacagaaaaacccaccatctccacagaaaaacccaccattccttcagaaaaacccaacatgccctcagaaaaacccaccattccctcagaaaaacccaccatcctcacagaaaaacccaccattccctcagaaaaacccaccattccctcagaaaaacccaccatttccacagaaaaacccaccgtccccacagaagagcccaccacccccactgaggagaccaccacctccatggaagagcctgtcatccctacagaaaaacccagcatccctacagaaaaacccagcatccccacggaaaaacccaccatctccatggaagagactatcatctccacagaaaaacccaccatctccccagaaaaacccaccatccccacagaaaaacccaccatccccacagaaaaatccaccatctccccagaaaaacccaccacccccacagaaaaacccaccatccccacagaaaaacccaccatctccccagaaaaacccaccacccccacagaaaaacccaccatctccccagaaaaactcaccatccccacagaaaaacccaccatccccacagaaaaacccaccattcccacagaaaaacccaccatctccacagaagagcccaccacccccactgaggagaccaccatctccacagaaaaacccagcatccccatggaaaaacccactctccccactgaagaaaccaccacctctgttgaagagactaccatctctacagaaaaactcaccatccccatggaaaaacccaccatctccacagaaaaacccaccatccccacagaaaaacccaccatctccccagaaaaactcaccatccccacggaaaaactcaccatccccacggaaaaacccaccatccccattgaagagactaccatctccacagaaaaactcaccatccccacagaaaaacccaccatctccccagaaaaacccaccatctccacggaaaaacccaccatccccacggaaaaacccaccatccccactgaagagactaccatctccacagaaaaactcaccatccccacagaaaaacccaccatctccccagaaaaactcaccatccccacagaaaaacccaccatctccacggaaaaacccaccatccccacggaaaaacttaccatccccacggaaaaacccaccatccccacagaaaaacccaccattcccacagagaagctcacagccctgaggccaccccatcccagccccacagccactgggctggcagccttggtgatgtctccacatgctccaagtacccctatgaccagtgtgattctgggcactaccacaacctccagatccagtacagagcgctgccctccaaatgcccgctacgaatcctgtgcttgtcctgcttcgtgcaagagccccaggcctagctgtgggcccctctgtcgggagggctgtgtctgcaaccctggctttttgtttagtgacaaccactgcatccaggcctcttcctgcaattgcttctacaacaacgactactatgagcctggggcagagtggttcagccccaactgcacagaacattgccgctgctggcccggcagtcgggtcgagtgccagatctctcagtgtgggacacacaccgtgtgccagcttaagaatggccagtatggatgccacccctacgcaggcactgccacctgcttggtctacggagaccctcattatgtcacctttgacgggaggcactttggcttcatgggcaagtgcacttacatcttggcccagccctgtggcaactcaacagacccattcttcagggtgacagccaagaatgaggagcagggacaggaaggcgtgtcctgcctgagcaaagtctacgtgaccctgcccgagagcaccgtcaccctgcttaagggcagacgcactctggttgggggtcagcaagttactctcccagccataccctctaaaggcgtcttcctgggtgcaagcgggcggtttgtggagctgcagacggagttcggtttgcgggtgagatgggatggtgaccagcagctgtatgttactgtgtccagcacatactctggcaaactctgtggtttgtgtgggaactatgacggcaacagtgacaatgaccacctgaagttggacggcagcccagcaggagacaaggaggagctggggaacagctggcagacggaccaggacgaggaccaggagtgtcagaagtaccaggtggtgaattccccgtcttgtgattcatctctgcagagcagcatgtcggggccagggttctgtggacggctggtcgacactcatggcccatttgagacatgcctgctgcacgtgaaggccgcttccttcttcgacagctgcatgcttgatatgtgcggattccaggggctgcagcacctgctgtgcacacacatgtccaccatgaccaccacctgccaggacgcaggccacgctgtgaagccctggagggaaccccacttctgcccaatggcctgcccgcccaacagcaagtactccctgtgtgcgaagccatgccctgacacctgccattcaggattctccggcatgttctgctcagaccggtgcgtggaggcctgtgaatgcaatccgggcttcgtcctcagtggcctcgagtgcatacctcgctcccagtgtgggtgcctccaccctgcaggcagctacttcaaggtaggggagcggtggtacaagccaggctgcaaagagttgtgcgtctgtgaaagcaacaacagaattcgctgccagccctggaggtgtagggcccaggagttctgtggccaacaggatggtatctatggctgccatgcccaaggtgccgccacctgcacagcctcgggtgacccccactacctgaccttcgatggcgccttgcaccacttcatgggcacctgcacctatgtcctgacccggccttgctggtccaggtcccaagacagctattttgttgtgagcgccaccaacgagaaccgcggggggatcctggaggtctcctacatcaaagccgtccacgtgacagtctttgacctcagcatctcactgctcagaggctgtaaggtcatgctgaatggccatcgggtggccctacctgtgtggcttgcacaaggccgggtgaccataaggctcagcagcaacctcgtcctcctctacacgaactttgggctccaagttcgctacgacgggagccacttggtggaagtgacagtcccctcctcctatggcggccagctctgtgggctgtgtgggaactacaacaacaacagcttggatgacaacctgcgccccgacagaaagcttgcaggcgattccatgcagctgggggccgcctggaagttacctgaatcctctgaacctggctgtttccttgtgggtggcaagccctccagctgccaggagaacagcatggcagacgcctggaacaagaactgtgcgatcttaataaaccctcagggacccttctctcaatgtcaccaggtggtgcctccccagtccagctttgccagttgcgtgcatggtcagtgtgggaccaagggcgacaccacagccctgtgccgctccctgcaggcctacgcgtccctgtgtgcccaggctggccaggcccctgcctggcggaacagaaccttctgccctatgaggtgcccacctggcagcagctacagcccctgcagcagcccctgcccagacacctgcagcagcataaacaacccgagggactgccccaaagcactgccctgtgctgagagctgtgaatgtcagaaaggccacatcttgagtggaacctcctgcgtgccccttggccagtgtggctgcactgacccagcgggctcctaccacccggtcggggagcgctggtacacagagaacacctgcaccaggctctgcacctgctccgtccacaacaacatcacctgcttccagagcacctgcaaacccaaccagatatgctgggccctggatgggctgctccgttgtcgggcctcaggtgtgggagtgtgtcagctcccaggggagtcccactacgtgagctttgatggtagtaaccattctatcccggacgcctgcactcttgtcctggtgaaagtgtgccaccccgccatggccttgcccttcttcaagatcagtgccaagcatgagaaggaggaaggtggaactgaggctttccgccttcatgaggtctacattgacatctacgatgcccaggtcaccctgcagaagggccaccgtgtgctaatcaacagcaaacaggtcaccctccccgccatctcccagatccctggggtcagtgtcaagtccagcagcatctacagcattgttaacatcaagatcggggtgcaagtcaagtttgacgggaatcatctcttagagattgaaatccccacaacctactatggaaaggtctgcggcatgtgtgggaacttcaatgatgaggaagaggacgaactaatgatgcccagcgatgaagtagcaaatagtgacagtgaatttgtgaacagttggaaagataaggacattgacccaagttgtcagagtctcctggtagatgagcagcagattccagcggaacagcaggagaacccgagtggaaactgcagggcggccgacctccgcagggcgcgggaaaagtgcgaggcagcgctccgggctcctgtgtgggcccagtgcgcctcccgcatagacctcacgcccttcctggtggactgtgcaaacaccctctgtgagttcggaggtctctaccaggccctctgccaggctctgcaagccttcggggccacctgccagagccaggggctcaagcccccactctggagaaacagcagcttctgccctctggaatgccctgcctacagcagctacaccaactgccttccctcctgctcaccctcctgctgggacctggatggccggtgtgagggcgccaaagtcccctctgcctgcgctgagggctgcatttgtcagcccggctatgtgctgagtgaagacaagtgtgtccccagaagtcagtgtggctgcaaggatgcccatggtggctccatccctctgggcaagagctgggtctccagcggttgcacggagaagtgtgtctgcacgggaggagccattcagtgcggggacttccgatgcccctctgggtcccactgccagctcacttccgacaacagcaacagcaattgtgtctcagacaagtctgaacaatgctcagtctatggcgacccccgttacctcacatttgacggcttcagctaccgcttgcaaggccgcatgacctatgttctgatcaagactgtggacgtactgcctgagggggtggagcccctcctcgtggaaggacgcaacaagatggatccgcccaggagctccatcttcttgcaggaagtgattaccaccgtctacggctataaagtgcagctccaagctggtctggagcttgtggtcaacaaccagaagatggccgtcccctacaggccaaatgaacacctgcgggtcaccctgtggggccaacggctctacctggtcaccgactttgagctggtcgtcagctttggtggaaggaaaaatgcagtgatctccctacccagcatgtacgaggggcttgtgagtggcctgtgcggaaactacgacaagaaccgcaagaatgacatgatgctgcccagtggcgccctgacccagaacctcaacacctttggcaacagctgggaggtgaagaccgaggacgcactcctgcgcttccccagggctataccagcggaggaggagggacaaggggcggagctgggcctccgcacgggcctccaagtgtccgaatgtagcccggagcagctggcgagcaacagcacccaggcctgtagggtgctggcagacccccagggcccctttgctgcctgtcaccagacggtggccccagagcccttccaagagcactgcgtgctggatctgtgctctgctcaggacccaagagagcaagaggagctgcgttgccaggtcctcagtggctgggcagcagctttctgactgaggactgctctcagcggtgcacctgtgccagctcacggatcctgctgtgtgagcccttcagctgcagagcgggggaggtctgcaccctggggaaccacacccaaggctgctttccagaaagcccgtgtctgcagaacccctgtcagaatgacgggcagtgtcgggagcagggagccaccttcacctgcgagtgtgaagttggttacgggggaggcctgtgtatggagcctcgagatgcgccacctcccagaaagccagcatctaacctggtggccgtcctactgggactgctggtgcctgtggtggtcgtactactggccgtgaccagagagtgcatttacagaacgaggaggaagagagagaaaacgcaggagggagacagactggccaggctggtggacacagatactgttctggactgtgcctgttaagttgctcagttttgagctgtcttcagacaagaagattaaataaatttatatatttatttatttg

SEQ ID NO: 86626 - DNA, 8834 bp, Homo sapiens
gccatgttgatttctgatccttgagcttttctgtgcttctctgttcattcttcatggcatccttggaaggatgccaagctaaggaggccaggggggaataaaaggagtccaggctcccaactgtgcccttcccctctcccctgggagcaaccacttagggtcctcatggttcctccagtctggactctgctgcttctggtgggggctgcccttttcaggaaagagaagcctccggaccagaagctggttgttcgcagctctagggacaactatgtcctcacccagtgtgattttgaggatgacgccaaacccctctgtgactggtcccaagtgtccgcagacgatgaagactgggttcgagccagtgggccctctcccaccggctccaccggggcccccggggggtaccctaacggagagggcagctatctgcatatggaatcgaacagcttccaccgtgggggagtggcccgcctgctcagccccgacctatgggagcaaggccccctctgtgtgcactttgcccaccacatgttcgggctgtcttggggcgcccagctcaggctgctgctgctctcgggtgaagagggccgccgccccgatgtgctctggaaacactggaacacccagagaccctcctggatgctcaccaccgtcactgtgcccgcagggttcaccctgcccacccggctgatgtttgagggaacacggggtagcactgcctacctggacatcgccctggatgccctctctatccgccggggctcctgtaatcgcgtctgtatgatgcaaacatgcagctttgacattccaaatgacctctgtgactggacctggatcccaactgcctccggggccaagtggactcagaagaaagggtcatcaggaaagccaggcgtggggcctgatggcgacttctctagccctggtagtggctgctacatgctcctggaccccaagaatgcaagacctgggcagaaagctgtcctcctgagccccgtgagcctgtcctctggctgtctgagcttttccttccactacatcctccggggccagtctcctggtgcagccctccacatttatgcttcagtcttggggagtatccggaaacacactctcttctcaggacaacctgggcccaactggcaggctgtttctgtcaattacacagccgtgggacggatacagtttgccgtggtaggcgtttttggaaagaccccagagccagctgtggcagttgatgcaaccagcattgctccttgtggggagggttttcctcagtgtgactttgaagacaacgcccatcccttctgtgactgggtccagacttccggggatggtggacactgggccctcggacataaaaatggacccgtccatggcatgggccctgcgggaggtttccctaatgcagggggtcactatatctaccttgaggctgacgagttctcccaggcaggccagtcagtcagactggtgagccggcccttctgcgccccaggtgacatctgcgtggagttcgcataccacatgtatggccttggggagggtactatgctcgaactcctcctgggaagtcctgcggggagtcccccgattcctctctggaaacgcgtggggtctcagcgcccttactggcagaacacctccgtcaccgtcccctcaggacaccaacagcccatgcagcttattttcaagggcatccagggaagcaacacggcctctgtggttgctatgggtttcatcttgatcaatcctgggacttgtccagtaaaagtgctaccagagcttcctcccgtatctccagtttcttccactggcccttctgaaaccactggcctcacagaaaaccctacaatctccaccaagaaacctacagtttccatagaaaaacccagtgtcaccacagaaaagcccacagtccccaaagaaaagcccaccattcccacagaaaaacccaccatctccacagaaaaacccaccattccttcagaaaaacccaacatgccctcagaaaaacccaccattccctcagaaaaacccaccatcctcacagaaaaacccaccattccctcagaaaaacccaccattccctcagaaaaacccaccatttccacagaaaaacccaccgtccccacagaagagcccaccacccccactgaggagaccaccacctccatggaagagcctgtcatccctacagaaaaacccagcatccctacagaaaaacccagcatccccacggaaaaacccaccatctccatggaagagactatcatctccacagaaaaacccaccatctccccagaaaaacccaccatccccacagaaaaacccaccatccccacagaaaaatccaccatctccccagaaaaacccaccacccccacagaaaaacccaccatccccacagaaaaacccaccatctccccagaaaaacccaccacccccacagaaaaacccaccatctccccagaaaaactcaccatccccacagaaaaacccaccatccccacagaaaaacccaccattcccacagaaaaacccaccatctccacagaagagcccaccacccccactgaggagaccaccatctccacagaaaaacccagcatccccatggaaaaacccactctccccactgaagaaaccaccacctctgttgaagagactaccatctctacagaaaaactcaccatccccatggaaaaacccaccatctccacagaaaaacccaccatccccacagaaaaacccaccatctccccagaaaaactcaccatccccacggaaaaactcaccatccccacggaaaaacccaccatccccattgaagagactaccatctccacagaaaaactcaccatccccacagaaaaacccaccatctccccagaaaaacccaccatctccacggaaaaacccaccatccccacggaaaaacccaccatccccactgaagagactaccatctccacagaaaaactcaccatccccacagaaaaacccaccatctccccagaaaaactcaccatccccacagaaaaacccaccatctccacggaaaaacccaccatccccacggaaaaacttaccatccccacggaaaaacccaccatccccacagaaaaacccaccattcccacagagaagctcacagccctgaggccaccccatcccagccccacagccactgggctggcagccttggtgatgtctccacatgctccaagtacccctatgaccagtgtgattctgggcactaccacaacctccagatccagtacagagcgctgccctccaaatgcccgctacgaatcctgtgcttgtcctgcttcgtgcaagagccccaggcctagctgtgggcccctctgtcgggagggctgtgtctgcaaccctggctttttgtttagtgacaaccactgcatccaggcctcttcctgcaattgcttctacaacaacgactactatgagcctggggcagagtggttcagccccaactgcacagaacattgccgctgctggcccggcagtcgggtcgagtgccagatctctcagtgtgggacacacaccgtgtgccagcttaagaatggccagtatggatgccacccctacgcaggcactgccacctgcttggtctacggagaccctcattatgtcacctttgacgggaggcactttggcttcatgggcaagtgcacttacatcttggcccagccctgtggcaactcaacagacccattcttcagggtgacagccaagaatgaggagcagggacaggaaggcgtgtcctgcctgagcaaagtctacgtgaccctgcccgagagcaccgtcaccctgcttaagggcagacgcactctggttgggggtcagcaagttactctcccagccataccctctaaaggcgtcttcctgggtgcaagcgggcggtttgtggagctgcagacggagttcggtttgcgggtgagatgggatggtgaccagcagctgtatgttactgtgtccagcacatactctggcaaactctgtggtttgtgtgggaactatgacggcaacagtgacaatgaccacctgaagttggacggcagcccagcaggagacaaggaggagctggggaacagctggcagacggaccaggacgaggaccaggagtgtcagaagtaccaggtggtgaattccccgtcttgtgattcatctctgcagagcagcatgtcggggccagggttctgtggacggctggtcgacactcatggcccatttgagacatgcctgctgcacgtgaaggccgcttccttcttcgacagctgcatgcttgatatgtgcggattccaggggctgcagcacctgctgtgcacacacatgtccaccatgaccaccacctgccaggacgcaggccacgctgtgaagccctggagggaaccccacttctgcccaatggcctgcccgcccaacagcaagtactccctgtgtgcgaagccatgccctgacacctgccattcaggattctccggcatgttctgctcagaccggtgcgtggaggcctgtgaatgcaatccgggcttcgtcctcagtggcctcgagtgcatacctcgctcccagtgtgggtgcctccaccctgcaggcagctacttcaaggtaggggagcggtggtacaagccaggctgcaaagagttgtgcgtctgtgaaagcaacaacagaattcgctgccagccctggaggtgtagggcccaggagttctgtggccaacaggatggtatctatggctgccatgcccaaggtgccgccacctgcacagcctcgggtgacccccactacctgaccttcgatggcgccttgcaccacttcatgggcacctgcacctatgtcctgacccggccttgctggtccaggtcccaagacagctattttgttgtgagcgccaccaacgagaaccgcggggggatcctggaggtctcctacatcaaagccgtccacgtgacagtctttgacctcagcatctcactgctcagaggctgtaaggtcatgctgaatggccatcgggtggccctacctgtgtggcttgcacaaggccgggtgaccataaggctcagcagcaacctcgtcctcctctacacgaactttgggctccaagttcgctacgacgggagccacttggtggaagtgacagtcccctcctcctatggcggccagctctgtgggctgtgtgggaactacaacaacaacagcttggatgacaacctgcgccccgacagaaagcttgcaggcgattccatgcagctgggggccgcctggaagttacctgaatcctctgaacctggctgtttccttgtgggtggcaagccctccagctgccaggagaacagcatggcagacgcctggaacaagaactgtgcgatcttaataaaccctcagggacccttctctcaatgtcaccaggtggtgcctccccagtccagctttgccagttgcgtgcatggtcagtgtgggaccaagggcgacaccacagccctgtgccgctccctgcaggcctacgcgtccctgtgtgcccaggctggccaggcccctgcctggcggaacagaaccttctgccctatgaggtgcccacctggcagcagctacagcccctgcagcagcccctgcccagacacctgcagcagcataaacaacccgagggactgccccaaagcactgccctgtgctgagagctgtgaatgtcagaaaggccacatcttgagtggaacctcctgcgtgccccttggccagtgtggctgcactgacccagcgggctcctaccacccggtcggggagcgctggtacacagagaacacctgcaccaggctctgcacctgctccgtccacaacaacatcacctgcttccagagcacctgcaaacccaaccagatatgctgggccctggatgggctgctccgttgtcgggcctcaggtgtgggagtgtgtcagctcccaggggagtcccactacgtgagctttgatggtagtaaccattctatcccggacgcctgcactcttgtcctggtgaaagtgtgccaccccgccatggccttgcccttcttcaagatcagtgccaagcatgagaaggaggaaggtggaactgaggctttccgccttcatgaggtctacattgacatctacgatgcccaggtcaccctgcagaagggccaccgtgtgctaatcaacagcaaacaggtcaccctccccgccatctcccagatccctggggtcagtgtcaagtccagcagcatctacagcattgttaacatcaagatcggggtgcaagtcaagtttgacgggaatcatctcttagagattgaaatccccacaacctactatggaaaggtctgcggcatgtgtgggaacttcaatgatgaggaagaggacgaactaatgatgcccagcgatgaagtagcaaatagtgacagtgaatttgtgaacagttggaaagataaggacattgacccaagttgtcagagtctcctggtagatgagcagcagattccagcggaacagcaggagaacccgagtggaaactgcagggcggccgacctccgcagggcgcgggaaaagtgcgaggcagcgctccgggctcctgtgtgggcccagtgcgcctcccgcatagacctcacgcccttcctggtggactgtgcaaacaccctctgtgagttcggaggtctctaccaggccctctgccaggctctgcaagccttcggggccacctgccagagccaggggctcaagcccccactctggagaaacagcagcttctgccctctggaatgccctgcctacagcagctacaccaactgccttccctcctgctcaccctcctgctgggacctggatggccggtgtgagggcgccaaagtcccctctgcctgcgctgagggctgcatttgtcagcccggctatgtgctgagtgaagacaagtgtgtccccagaagtcagtgtggctgcaaggatgcccatggtggctccatccctctgggcaagagctgggtctccagcggttgcacggagaagtgtgtctgcacgggaggagccattcagtgcggggacttccgatgcccctctgggtcccactgccagctcacttccgacaacagcaacagcaattgtgtctcagacaagtctgaacaatgctcagtctatggcgacccccgttacctcacatttgacggcttcagctaccgcttgcaaggccgcatgacctatgttctgatcaagactgtggacgtactgcctgagggggtggagcccctcctcgtggaaggacgcaacaagatggatccgcccaggagctccatcttcttgcaggaagtgattaccaccgtctacggctataaagtgcagctccaagctggtctggagcttgtggtcaacaaccagaagatggccgtcccctacaggccaaatgaacacctgcgggtcaccctgtggggccaacggctctacctggtcaccgactttgagctggtcgtcagctttggtggaaggaaaaatgcagtgatctccctacccagcatgtacgaggggcttgtgagtggcctgtgcggaaactacgacaagaaccgcaagaatgacatgatgctgcccagtggcgccctgacccagaacctcaacacctttggcaacagctgggaggtgaagaccgaggacgcactcctgcgcttccccagggctataccagcggaggaggagggacaaggggcggagctgggcctccgcacgggcctccaagtgtccgaatgtagcccggagcagctggcgagcaacagcacccaggcctgtagggtgctggcagacccccagggcccctttgctgcctgtcaccagacggtggccccagagcccttccaagagcactgcgtgctggatctgtgctctgctcaggacccaagagagcaagaggagctgcgttgccaggtcctcagtgggtacgccatcctctgccaggaggcgggcgctgccctggctggctggcgggaccgcaccctctgcgccatggagtgtccagcaggtaccatatatcagagctgtatgacaccctgcccagcatcctgtgccaacctggcagaccccggggactgcgagggcccctgcgtggaaggctgcgccagcatcccaggctatgcctacagtggcacccagagcctcccctggctgactgtggctgcaccagcaatggcatctactaccaggtccgagctggcagcaggaggccctggggagcagaggcgccaaggagagccagaccagggatggaactggaacgtctcctcctggcccttcccctttctagctgggcagcagctttctgactgaggactgctctcagcggtgcacctgtgccagctcacggatcctgctgtgtgagcccttcagctgcagagcgggggaggtctgcaccctggggaaccacacccaaggctgctttccagaaagcccgtgtctgcagaacccctgtcagaatgacgggcagtgtcgggagcagggagccaccttcacctgcgagtgtgaagttggttacgggggaggcctgtgtatggagcctcgagatgcgccacctcccagaaagccagcatctaacctggtggccgtcctactgggactgctggtgcctgtggtggtcgtactactggccgtgaccagagagtgcatttacagaacgaggaggaagagagagaaaacgcaggagggagacagactggccaggctggtggacacagatactgttctggactgtgcctgttaagttgctcagttttgagctgtcttcagacaagaagattaaataaatttatatatttatttatttg

SEQ ID NO: 86627 - DNA, 8534 bp, Homo sapiens
gccatgttgatttctgatccttgagcttttctgtgcttctctgttcattcttcatggcatccttggaaggatgccaagctaaggaggccaggggggaataaaaggagtccaggctcccaactgtgcccttcccctctcccctgggagcaaccacttagggtcctcatggttcctccagtctggactctgctgcttctggtgggggctgcccttttcaggaaagagaagcctccggaccagaagctggttgttcgcagctctagggacaactatgtcctcacccagtgtgattttgaggatgacgccaaacccctctgtgactggtcccaagtgtccgcagacgatgaagactgggttcgagccagtgggccctctcccaccggctccaccggggcccccggggggtaccctaacggagagggcagctatctgcatatggaatcgaacagcttccaccgtgggggagtggcccgcctgctcagccccgacctatgggagcaaggccccctctgtgtgcactttgcccaccacatgttcgggctgtcttggggcgcccagctcaggctgctgctgctctcgggtgaagagggccgccgccccgatgtgctctggaaacactggaacacccagagaccctcctggatgctcaccaccgtcactgtgcccgcagggttcaccctgcccacccggctgatgtttgagggaacacggggtagcactgcctacctggacatcgccctggatgccctctctatccgccggggctcctgtaatcgcgtctgtatgatgcaaacatgcagctttgacattccaaatgacctctgtgactggacctggatcccaactgcctccggggccaagtggactcagaagaaagggtcatcaggaaagccaggcgtggggcctgatggcgacttctctagccctggtagtggctgctacatgctcctggaccccaagaatgcaagacctgggcagaaagctgtcctcctgagccccgtgagcctgtcctctggctgtctgagcttttccttccactacatcctccggggccagtctcctggtgcagccctccacatttatgcttcagtcttggggagtatccggaaacacactctcttctcaggacaacctgggcccaactggcaggctgtttctgtcaattacacagccgtgggacggatacagtttgccgtggtaggcgtttttggaaagaccccagagccagctgtggcagttgatgcaaccagcattgctccttgtggggagggttttcctcagtgtgactttgaagacaacgcccatcccttctgtgactgggtccagacttccggggatggtggacactgggccctcggacataaaaatggacccgtccatggcatgggccctgcgggaggtttccctaatgcagggggtcactatatctaccttgaggctgacgagttctcccaggcaggccagtcagtcagactggtgagccggcccttctgcgccccaggtgacatctgcgtggagttcgcataccacatgtatggccttggggagggtactatgctcgaactcctcctgggaagtcctgcggggagtcccccgattcctctctggaaacgcgtggggtctcagcgcccttactggcagaacacctccgtcaccgtcccctcaggacaccaacagcccatgcagcttattttcaagggcatccagggaagcaacacggcctctgtggttgctatgggtttcatcttgatcaatcctgggacttgtccagtaaaagtgctaccagagcttcctcccgtatctccagtttcttccactggcccttctgaaaccactggcctcacagaaaaccctacaatctccaccaagaaacctacagtttccatagaaaaacccagtgtcaccacagaaaagcccacagtccccaaagaaaagcccaccattcccacagaaaaacccaccatctccacagaaaaacccaccattccttcagaaaaacccaacatgccctcagaaaaacccaccattccctcagaaaaacccaccatcctcacagaaaaacccaccattccctcagaaaaacccaccattccctcagaaaaacccaccatttccacagaaaaacccaccgtccccacagaagagcccaccacccccactgaggagaccaccacctccatggaagagcctgtcatccctacagaaaaacccagcatccctacagaaaaacccagcatccccacggaaaaacccaccatctccatggaagagactatcatctccacagaaaaacccaccatctccccagaaaaacccaccatccccacagaaaaacccaccatccccacagaaaaatccaccatctccccagaaaaacccaccacccccacagaaaaacccaccatccccacagaaaaacccaccatctccccagaaaaacccaccacccccacagaaaaacccaccatctccccagaaaaactcaccatccccacagaaaaacccaccatccccacagaaaaacccaccattcccacagaaaaacccaccatctccacagaagagcccaccacccccactgaggagaccaccatctccacagaaaaacccagcatccccatggaaaaacccactctccccactgaagaaaccaccacctctgttgaagagactaccatctctacagaaaaactcaccatccccatggaaaaacccaccatctccacagaaaaacccaccatccccacagaaaaacccaccatctccccagaaaaactcaccatccccacggaaaaactcaccatccccacggaaaaacccaccatccccattgaagagactaccatctccacagaaaaactcaccatccccacagaaaaacccaccatctccccagaaaaacccaccatctccacggaaaaacccaccatccccacggaaaaacccaccatccccactgaagagactaccatctccacagaaaaactcaccatccccacagaaaaacccaccatctccccagaaaaactcaccatccccacagaaaaacccaccatctccacggaaaaacccaccatccccacggaaaaacttaccatccccacggaaaaacccaccatccccacagaaaaacccaccattcccacagagaagctcacagccctgaggccaccccatcccagccccacagccactgggctggcagccttggtgatgtctccacatgctccaagtacccctatgaccagtgtgattctgggcactaccacaacctccagatccagtacagagcgctgccctccaaatgcccgctacgaatcctgtgcttgtcctgcttcgtgcaagagccccaggcctagctgtgggcccctctgtcgggagggctgtgtctgcaaccctggctttttgtttagtgacaaccactgcatccaggcctcttcctgcaattgcttctacaacaacgactactatgagcctggggcagagtggttcagccccaactgcacagaacattgccgctgctggcccggcagtcgggtcgagtgccagatctctcagtgtgggacacacaccgtgtgccagcttaagaatggccagtatggatgccacccctacgcaggcactgccacctgcttggtctacggagaccctcattatgtcacctttgacgggaggcactttggcttcatgggcaagtgcacttacatcttggcccagccctgtggcaactcaacagacccattcttcagggtgacagccaagaatgaggagcagggacaggaaggcgtgtcctgcctgagcaaagtctacgtgaccctgcccgagagcaccgtcaccctgcttaagggcagacgcactctggttgggggtcagcaagttactctcccagccataccctctaaaggcgtcttcctgggtgcaagcgggcggtttgtggagctgcagacggagttcggtttgcgggtgagatgggatggtgaccagcagctgtatgttactgtgtccagcacatactctggcaaactctgtggtttgtgtgggaactatgacggcaacagtgacaatgaccacctgaagttggacggcagcccagcaggagacaaggaggagctggggaacagctggcagacggaccaggacgaggaccaggagtgtcagaagtaccaggtggtgaattccccgtcttgtgattcatctctgcagagcagcatgtcggggccagggttctgtggacggctggtcgacactcatggcccatttgagacatgcctgctgcacgtgaaggccgcttccttcttcgacagctgcatgcttgatatgtgcggattccaggggctgcagcacctgctgtgcacacacatgtccaccatgaccaccacctgccaggacgcaggccacgctgtgaagccctggagggaaccccacttctgcccaatggcctgcccgcccaacagcaagtactccctgtgtgcgaagccatgccctgacacctgccattcaggattctccggcatgttctgctcagaccggtgcgtggaggcctgtgaatgcaatccgggcttcgtcctcagtggcctcgagtgcatacctcgctcccagtgtgggtgcctccaccctgcaggcagctacttcaaggtaggggagcggtggtacaagccaggctgcaaagagttgtgcgtctgtgaaagcaacaacagaattcgctgccagccctggaggtgtagggcccaggagttctgtggccaacaggatggtatctatggctgccatgcccaaggtgccgccacctgcacagcctcgggtgacccccactacctgaccttcgatggcgccttgcaccacttcatgggcacctgcacctatgtcctgacccggccttgctggtccaggtcccaagacagctattttgttgtgagcgccaccaacgagaaccgcggggggatcctggaggtctcctacatcaaagccgtccacgtgacagtctttgacctcagcatctcactgctcagaggctgtaaggtcatgctgaatggccatcgggtggccctacctgtgtggcttgcacaaggccgggtgaccataaggctcagcagcaacctcgtcctcctctacacgaactttgggctccaagttcgctacgacgggagccacttggtggaagtgacagtcccctcctcctatggcggccagctctgtgggctgtgtgggaactacaacaacaacagcttggatgacaacctgcgccccgacagaaagcttgcaggcgattccatgcagctgggggccgcctggaagttacctgaatcctctgaacctggctgtttccttgtgggtggcaagccctccagctgccaggagaacagcatggcagacgcctggaacaagaactgtgcgatcttaataaaccctcagggacccttctctcaatgtcaccaggtggtgcctccccagtccagctttgccagttgcgtgcatggtcagtgtgggaccaagggcgacaccacagccctgtgccgctccctgcaggcctacgcgtccctgtgtgcccaggctggccaggcccctgcctggcggaacagaaccttctgccctatgaggtgcccacctggcagcagctacagcccctgcagcagcccctgcccagacacctgcagcagcataaacaacccgagggactgccccaaagcactgccctgtgctgagagctgtgaatgtcagaaaggccacatcttgagtggaacctcctgcgtgccccttggccagtgtggctgcactgacccagcgggctcctaccacccggtcggggagcgctggtacacagagaacacctgcaccaggctctgcacctgctccgtccacaacaacatcacctgcttccagagcacctgcaaacccaaccagatatgctgggccctggatgggctgctccgttgtcgggcctcaggtgtgggagtgtgtcagctcccaggggagtcccactacgtgagctttgatggtagtaaccattctatcccggacgcctgcactcttgtcctggtgaaagtgtgccaccccgccatggccttgcccttcttcaagatcagtgccaagcatgagaaggaggaaggtggaactgaggctttccgccttcatgaggtctacattgacatctacgatgcccaggtcaccctgcagaagggccaccgtgtgctaatcaacagcaaacaggtcaccctccccgccatctcccagatccctggggtcagtgtcaagtccagcagcatctacagcattgttaacatcaagatcggggtgcaagtcaagtttgacgggaatcatctcttagagattgaaatccccacaacctactatggaaaggtctgcggcatgtgtgggaacttcaatgatgaggaagaggacgaactaatgatgcccagcgatgaagtagcaaatagtgacagtgaatttgtgaacagttggaaagataaggacattgacccaagttgtcagagtctcctggtagatgagcagcagattccagcggaacagcaggagaacccgagtggaaactgcagggcggccgacctccgcagggcgcgggaaaagtgcgaggcagcgctccgggctcctgtgtgggcccagtgcgcctcccgcatagacctcacgcccttcctggtggactgtgcaaacaccctctgtgagttcggaggtctctaccaggccctctgccaggctctgcaagccttcggggccacctgccagagccaggggctcaagcccccactctggagaaacagcagcttctgccctctggaatgccctgcctacagcagctacaccaactgccttccctcctgctcaccctcctgctgggacctggatggccggtgtgagggcgccaaagtcccctctgcctgcgctgagggctgcatttgtcagcccggctatgtgctgagtgaagacaagtgtgtccccagaagtcagtgtggctgcaaggatgcccatggtggctccatccctctgggcaagagctgggtctccagcggttgcacggagaagtgtgtctgcacgggaggagccattcagtgcggggacttccgatgcccctctgggtcccactgccagctcacttccgacaacagcaacagcaattgtgtctcagacaagtctgaacaatgctcagtctatggcgacccccgttacctcacatttgacggcttcagctaccgcttgcaaggccgcatgacctatgttctgatcaagactgtggacgtactgcctgagggggtggagcccctcctcgtggaaggacgcaacaagatggatccgcccaggagctccatcttcttgcaggaagtgattaccaccgtctacggctataaagtgcagctccaagctggtctggagcttgtggtcaacaaccagaagatggccgtcccctacaggccaaatgaacacctgcgggtcaccctgtggggccaacggctctacctggtcaccgactttgagctggtcgtcagctttggtggaaggaaaaatgcagtgatctccctacccagcatgtacgaggggcttgtgagtggcctgtgcggaaactacgacaagaaccgcaagaatgacatgatgctgcccagtggcgccctgacccagaacctcaacacctttggcaacagctgggaggtgaagaccgaggacgcactcctgcgcttccccagggctataccagcggaggaggagggacaaggggcggagctgggcctccgcacgggcctccaagtgtccgaatgtagcccggagcagctggcgagcaacagcacccaggcctgtagggtgctggcagacccccagggcccctttgctgcctgtcaccagacggtggccccagagcccttccaagagcactgcgtgctggatctgtgctctgctcaggacccaagagagcaagaggagctgcgttgccaggtcctcagtgggtacgccatcctctgccaggaggcgggcgctgccctggctggctggcgggaccgcaccctctgcgctgggcagcagctttctgactgaggactgctctcagcggtgcacctgtgccagctcacggatcctgctgtgtgagcccttcagctgcagagcgggggaggtctgcaccctggggaaccacacccaaggctgctttccagaaagcccgtgtctgcagaacccctgtcagaatgacgggcagtgtcgggagcagggagccaccttcacctgcgagtgtgaagttggttacgggggaggcctgtgtatggagcctcgagatgcgccacctcccagaaagccagcatctaacctggtggccgtcctactgggactgctggtgcctgtggtggtcgtactactggccgtgaccagagagtgcatttacagaacgaggaggaagagagagaaaacgcaggagggagacagactggccaggctggtggacacagatactgttctggactgtgcctgttaagttgctcagttttgagctgtcttcagacaagaagattaaataaatttatatatttatttatttg

SEQ ID NO: 86628 - DNA, 8395 bp, Homo sapiens
gccatgttgatttctgatccttgagcttttctgtgcttctctgttcattcttcatggcatccttggaaggatgccaagctaaggaggccaggggggaataaaaggagtccaggctcccaactgtgcccttcccctctcccctgggagcaaccacttagggtcctcatggttcctccagtctggactctgctgcttctggtgggggctgcccttttcaggaaagagaagcctccggaccagaagctggttgttcgcagctctagggacaactatgtcctcacccagtgtgattttgaggatgacgccaaacccctctgtgactggtcccaagtgtccgcagacgatgaagactgggttcgagccagtgggccctctcccaccggctccaccggggcccccggggggtaccctaacggagagggcagctatctgcatatggaatcgaacagcttccaccgtgggggagtggcccgcctgctcagccccgacctatgggagcaaggccccctctgtgtgcactttgcccaccacatgttcgggctgtcttggggcgcccagctcaggctgctgctgctctcgggtgaagagggccgccgccccgatgtgctctggaaacactggaacacccagagaccctcctggatgctcaccaccgtcactgtgcccgcagggttcaccctgcccacccggctgatgtttgagggaacacggggtagcactgcctacctggacatcgccctggatgccctctctatccgccggggctcctgtaatcgcgtctgtatgatgcaaacatgcagctttgacattccaaatgacctctgtgactggacctggatcccaactgcctccggggccaagtggactcagaagaaagggtcatcaggaaagccaggcgtggggcctgatggcgacttctctagccctggtagtggctgctacatgctcctggaccccaagaatgcaagacctgggcagaaagctgtcctcctgagccccgtgagcctgtcctctggctgtctgagcttttccttccactacatcctccggggccagtctcctggtgcagccctccacatttatgcttcagtcttggggagtatccggaaacacactctcttctcaggacaacctgggcccaactggcaggctgtttctgtcaattacacagccgtgggacggatacagtttgccgtggtaggcgtttttggaaagaccccagagccagctgtggcagttgatgcaaccagcattgctccttgtggggagggttttcctcagtgtgactttgaagacaacgcccatcccttctgtgactgggtccagacttccggggatggtggacactgggccctcggacataaaaatggacccgtccatggcatgggccctgcgggaggtttccctaatgcagggggtcactatatctaccttgaggctgacgagttctcccaggcaggccagtcagtcagactggtgagccggcccttctgcgccccaggtgacatctgcgtggagttcgcataccacatgtatggccttggggagggtactatgctcgaactcctcctgggaagtcctgcggggagtcccccgattcctctctggaaacgcgtggggtctcagcgcccttactggcagaacacctccgtcaccgtcccctcaggacaccaacagcccatgcagcttattttcaagggcatccagggaagcaacacggcctctgtggttgctatgggtttcatcttgatcaatcctgggacttgtccagtaaaagtgctaccagagcttcctcccgtatctccagtttcttccactggcccttctgaaaccactggcctcacagaaaaccctacaatctccaccaagaaacctacagtttccatagaaaaacccagtgtcaccacagaaaagcccacagtccccaaagaaaagcccaccattcccacagaaaaacccaccatctccacagaaaaacccaccattccttcagaaaaacccaacatgccctcagaaaaacccaccattccctcagaaaaacccaccatcctcacagaaaaacccaccattccctcagaaaaacccaccattccctcagaaaaacccaccatttccacagaaaaacccaccgtccccacagaagagcccaccacccccactgaggagaccaccacctccatggaagagcctgtcatccctacagaaaaacccagcatccctacagaaaaacccagcatccccacggaaaaacccaccatctccatggaagagactatcatctccacagaaaaacccaccatctccccagaaaaacccaccatccccacagaaaaacccaccatccccacagaaaaatccaccatctccccagaaaaacccaccacccccacagaaaaacccaccatccccacagaaaaacccaccatctccccagaaaaacccaccacccccacagaaaaacccaccatctccccagaaaaactcaccatccccacagaaaaacccaccatccccacagaaaaacccaccattcccacagaaaaacccaccatctccacagaagagcccaccacccccactgaggagaccaccatctccacagaaaaacccagcatccccatggaaaaacccactctccccactgaagaaaccaccacctctgttgaagagactaccatctctacagaaaaactcaccatccccatggaaaaacccaccatctccacagaaaaacccaccatccccacagaaaaacccaccatctccccagaaaaactcaccatccccacggaaaaactcaccatccccacggaaaaacccaccatccccattgaagagactaccatctccacagaaaaactcaccatccccacagaaaaacccaccatctccccagaaaaacccaccatctccacggaaaaacccaccatccccacggaaaaacccaccatccccactgaagagactaccatctccacagaaaaactcaccatccccacagaaaaacccaccatctccccagaaaaactcaccatccccacagaaaaacccaccatctccacggaaaaacccaccatccccacggaaaaacttaccatccccacggaaaaacccaccatccccacagaaaaacccaccattcccacagagaagctcacagccctgaggccaccccatcccagccccacagccactgggctggcagccttggtgatgtctccacatgctccaagtacccctatgaccagtgtgattctgggcactaccacaacctccagatccagtacagagcgctgccctccaaatgcccgctacgaatcctgtgcttgtcctgcttcgtgcaagagccccaggcctagctgtgggcccctctgtcgggagggctgtgtctgcaaccctggctttttgtttagtgacaaccactgcatccaggcctcttcctgcaattgcttctacaacaacgactactatgagcctggggcagagtggttcagccccaactgcacagaacattgccgctgctggcccggcagtcgggtcgagtgccagatctctcagtgtgggacacacaccgtgtgccagcttaagaatggccagtatggatgccacccctacgcaggcactgccacctgcttggtctacggagaccctcattatgtcacctttgacgggaggcactttggcttcatgggcaagtgcacttacatcttggcccagccctgtggcaactcaacagacccattcttcagggtgacagccaagaatgaggagcagggacaggaaggcgtgtcctgcctgagcaaagtctacgtgaccctgcccgagagcaccgtcaccctgcttaagggcagacgcactctggttgggggtcagcaagttactctcccagccataccctctaaaggcgtcttcctgggtgcaagcgggcggtttgtggagctgcagacggagttcggtttgcgggtgagatgggatggtgaccagcagctgtatgttactgtgtccagcacatactctggcaaactctgtggtttgtgtgggaactatgacggcaacagtgacaatgaccacctgaagttggacggcagcccagcaggagacaaggaggagctggggaacagctggcagacggaccaggacgaggaccaggagtgtcagaagtaccaggtggtgaattccccgtcttgtgattcatctctgcagagcagcatgtcggggccagggttctgtggacggctggtcgacactcatggcccatttgagacatgcctgctgcacgtgaaggccgcttccttcttcgacagctgcatgcttgatatgtgcggattccaggggctgcagcacctgctgtgcacacacatgtccaccatgaccaccacctgccaggacgcaggccacgctgtgaagccctggagggaaccccacttctgcccaatggcctgcccgcccaacagcaagtactccctgtgtgcgaagccatgccctgacacctgccattcaggattctccggcatgttctgctcagaccggtgcgtggaggcctgtgaatgcaatccgggcttcgtcctcagtggcctcgagtgcatacctcgctcccagtgtgggtgcctccaccctgcaggcagctacttcaaggtaggggagcggtggtacaagccaggctgcaaagagttgtgcgtctgtgaaagcaacaacagaattcgctgccagccctggaggtgtagggcccaggagttctgtggccaacaggatggtatctatggctgccatgcccaaggtgccgccacctgcacagcctcgggtgacccccactacctgaccttcgatggcgccttgcaccacttcatgggcacctgcacctatgtcctgacccggccttgctggtccaggtcccaagacagctattttgttgtgagcgccaccaacgagaaccgcggggggatcctggaggtctcctacatcaaagccgtccacgtgacagtctttgacctcagcatctcactgctcagaggctgtaaggtcatgctgaatggccatcgggtggccctacctgtgtggcttgcacaaggccgggtgaccataaggctcagcagcaacctcgtcctcctctacacgaactttgggctccaagttcgctacgacgggagccacttggtggaagtgacagtcccctcctcctatggcggccagctctgtgggctgtgtgggaactacaacaacaacagcttggatgacaacctgcgccccgacagaaagcttgcaggcgattccatgcagctgggggccgcctggaagttacctgaatcctctgaacctggctgtttccttgtgggtggcaagccctccagctgccaggagaacagcatggcagacgcctggaacaagaactgtgcgatcttaataaaccctcagggacccttctctcaatgtcaccaggtggtgcctccccagtccagctttgccagttgcgtgcatggtcagtgtgggaccaagggcgacaccacagccctgtgccgctccctgcaggcctacgcgtccctgtgtgcccaggctggccaggcccctgcctggcggaacagaaccttctgccctatgaggtgcccacctggcagcagctacagcccctgcagcagcccctgcccagacacctgcagcagcataaacaacccgagggactgccccaaagcactgccctgtgctgagagctgtgaatgtcagaaaggccacatcttgagtggaacctcctgcgtgccccttggccagtgtggctgcactgacccagcgggctcctaccacccggtcggggagcgctggtacacagagaacacctgcaccaggctctgcacctgctccgtccacaacaacatcacctgcttccagagcacctgcaaacccaaccagatatgctgggccctggatgggctgctccgttgtcgggcctcaggtgtgggagtgtgtcagctcccaggggagtcccactacgtgagctttgatggtagtaaccattctatcccggacgcctgcactcttgtcctggtgaaagtgtgccaccccgccatggccttgcccttcttcaagatcagtgccaagcatgagaaggaggaaggtggaactgaggctttccgccttcatgaggtctacattgacatctacgatgcccaggtcaccctgcagaagggccaccgtgtgctaatcaacagcaaacaggtcaccctccccgccatctcccagatccctggggtcagtgtcaagtccagcagcatctacagcattgttaacatcaagatcggggtgcaagtcaagtttgacgggaatcatctcttagagattgaaatccccacaacctactatggaaaggtctgcggcatgtgtgggaacttcaatgatgaggaagaggacgaactaatgatgcccagcgatgaagtagcaaatagtgacagtgaatttgtgaacagttggaaagataaggacattgacccaagttgtcagagtctcctggtagatgagcagcagattccagcggaacagcaggagaacccgagtggaaactgcagggcggccgacctccgcagggcgcgggaaaagtgcgaggcagcgctccgggctcctgtgtgggcccagtgcgcctcccgcatagacctcacgcccttcctggtggactgtgcaaacaccctctgtgagttcggaggtctctaccaggccctctgccaggctctgcaagccttcggggccacctgccagagccaggggctcaagcccccactctggagaaacagcagcttctgccctctggaatgccctgcctacagcagctacaccaactgccttccctcctgctcaccctcctgctgggacctggatggccggtgtgagggcgccaaagtcccctctgcctgcgctgagggctgcatttgtcagcccggctatgtgctgagtgaagacaagtgtgtccccagaagtcagtgtggctgcaaggatgcccatggtggctccatccctctgggcaagagctgggtctccagcggttgcacggagaagtgtgtctgcacgggaggagccattcagtgcggggacttccgatgcccctctgggtcccactgccagctcacttccgacaacagcaacagcaattgtgtctcagacaagtctgaacaatgctcagtctatggcgacccccgttacctcacatttgacggcttcagctaccgcttgcaaggccgcatgacctatgttctgatcaagactgtggacgtactgcctgagggggtggagcccctcctcgtggaaggacgcaacaagatggatccgcccaggagctccatcttcttgcaggaagtgattaccaccgtctacggctataaagtgcagctccaagctggtctggagcttgtggtcaacaaccagaagatggccgtcccctacaggccaaatgaacacctgcgggtcaccctgtggggccaacggctctacctggtcaccgactttgagctggtcgtcagctttggtggaaggaaaaatgcagtgatctccctacccagcatgtacgaggggcttgtgagtggcctgtgcggaaactacgacaagaaccgcaagaatgacatgatgctgcccagtggcgccctgacccagaacctcaacacctttggcaacagctgggaggtgaagaccgaggacgcactcctgcgcttccccagggctataccagcggaggaggagggacaaggggcggagctgggcctccgcacgggcctccaagtgtccgaatgtagcccggagcagctggcgagcaacagcacccaggcctgtagggtgctggcagacccccagggcccctttgctgcctgtcaccagacggtggccccagagcccttccaagagcactgcgtgctggatctgtgctctgctcaggacccaagagagcaagaggagctgcgttgccaggtcctcagtgggtacgccatcctctgccaggaggcgggcgctgccctggctggctggcgggaccgcaccctctgcgaaagcccgtgtctgcagaacccctgtcagaatgacgggcagtgtcgggagcagggagccaccttcacctgcgagtgtgaagttggttacgggggaggcctgtgtatggagcctcgagatgcgccacctcccagaaagccagcatctaacctggtggccgtcctactgggactgctggtgcctgtggtggtcgtactactggccgtgaccagagagtgcatttacagaacgaggaggaagagagagaaaacgcaggagggagacagactggccaggctggtggacacagatactgttctggactgtgcctgttaagttgctcagttttgagctgtcttcagacaagaagattaaataaatttatatatttatttatttg

SEQ ID NO: 86629 - DNA, 7352 bp, Homo sapiens
ttcatctgggcctctgattcatctttattccctccatcatctagacttgattttatttgtaccaaggagatgcgtgtctaatgtttttctttcttctatttctaggagggctgttggcctgctgctgtgctgctgaacagtatgcagtcctttcgggagcaaagcagttaccacggaaaccagcaaagctacccacaggaggtacacggctcatcccggctagaagagttcagccctcgtcaggcccagatgttccagaattttggaggtacaggtggcagtagtggcagcagtggcagtggcagtggtggtggacgacgaggagcagcagctgctgcggcagcgatggctagcgagacctctggccatcaaggttaccagggtttcaggaaagaggctggagatttttactacatggcaggcaacaaagaccccgtgactacaggaaccccacagcctcctcagcgaaggccttctgggcctgtgcagagctatggacccccccaggggagcagctttggcaatcagtatgggagtgagggtcatgtgggccagtttcaagcacagcactctggccttggcggtgtgtcacattatcagcaggattacactgggcctttctctccagggagtgctcagtaccaacagcaggcttccagccagcagcagcagcagcaagtccagcagttgagacaacagctttaccagtcccatcagcccctgccacaggccactggccaaccagcatccagctcatcccatctacagccaatgcagcggccctcaactctgccatcctctgctgctggttaccagttaagagtgggtcagtttggccaacactatcagtcttctgcttcctcctcctcctcctcctccttcccttcaccacagcgttttagccagtctggacagagctatgatggcagttacaatgtgaatgctggatctcagtatgaaggacacaatgtgggttctaatgcacaggcttatggaacacaatccaattacagctatcagcctcaatctatgaagaattttgaacaggcaaagattccacaagggacccaacaggggcagcagcagcagcaaccgcagcaacaacaacacccttctcagcatgtgatgcagtatactaacgctgccaccaagctgcccctgcaaagccaagtggggcagtacaaccagcctgaggttcctgtgaggtcccccatgcagtttcaccagaacttcagccccatttctaacccttctccagctgcctctgtggttcagtctccaagctgtagttctaccccatctcctctcatgcagactggggagaatctccagtgtgggcaaggcagtgtgcctatgggttccagaaacagaattttacagttaatgcctcaactcagtccaaccccatcaatgatgcccagtcctaattctcatgctgcaggcttcaaagggtttggactagaaggggtaccagaaaagcgactgacagatcctgggttgagtagtttgagtgctctgagtactcaagtggccaatcttcctaacactgtccagcacatgttactttctgatgccctgactcctcagaagaagacctccaagaggccctcatcttccaagaaagcagatagctgcacaaattctgaaggctcctcacaacctgaagaacagctgaagtcccctatggcagagtcattagatggaggctgctccagcagttcagaggatcaaggcgagagagtgcggcaactaagtggccagagcaccagctctgacaccacctacaagggtggagcctctgagaaagctggctcctcaccggcacaaggtgctcagaatgaaccccccagactcaatgctagtcctgccgcaagagaagaggccacctcaccaggcgctaaggacatgccattgtcatccgacgggaacccaaaggttaatgagaagactgttggggtgattgtctcccgggaagccatgacaggtcgggtagaaaagcctggtggacaagataaaggctcccaagaggatgatcctgcagccactcaaaggccacctagcaatggtggggcaaaggaaaccagtcatgcatcacttccccagccagagcctccaggaggaggagggagcaaaggaaacaagaatggcgataacaactccaaccataatggagaaggaaatggccagagtggccactctgcagcgggccctggttttacgagcagaactgagcctagcaaatctcctggaagtctgcgctatagttacaaagatagtttcgggtcagccgtgccacgaaatgtcagtggctttcctcagtatcctacagggcaagaaaagggagatttcactggccatggggaacgaaagggtagaaatgaaaaattcccaagcctcctgcaggaagtgcttcagggttaccaccaccaccctgacaggagatattctaggagtactcaagagcatcaggggatggctggtagcctagaaggaaccacaaggcccaatgtcttggttagtcaaaccaatgaattagctagcaggggccttctgaacaaaagcattgggtctctattagaaaatccccactggggcccctgggaaaggaaatcaagcagcacagctcctgaaatgaaacagatcaatttgactgactatccaattcccagaaagtttgaaatagagcctcagtcatcagcacatgagcctgggggttccctctctgaaagaagatcagtgatctgtgatatttctccactaagacagattgtcagggacccaggggctcactcactgggacacatgagtgccgacaccagaattgggaggaatgaccgtctcaatccaactttaagtcagtcggtcattcttcctggtggtttggtgtccatggaaaccaagctgaaatcccagagcgggcagataaaagaggaagactttgaacagtctaaatctcaagctagtttcaacaacaagaaatctggagaccactgccatcctcctagcatcaagcatgagtcttaccgcggcaatgccagccctggagcagcaacccatgattccctttcagactatggcccgcaagacagcagacccacgccaatgcggcgggtccctggcagagttggtggtcgggagggcatgaggggtcggtccccttctcaatatcatgactttgcagaaaaattgaaaatgtctcctgggcggagcagaggcccagggggagaccctcatcacatgaatccacacatgaccttttcagagagggctaaccggagttctttacacactcccttttctcccaactcagaaaccctggcctctgcttatcatgcaaatactcgggctcatgcttatggggaccctaacgcaggtttgaattctcagctgcattataagagacagatgtaccaacagcaaccagaggagtataaagactggagcagcggttctgctcagggagtaattgctgcagcacagcacaggcaggaggggccacggaagagtccaaggcagcagcagtttcttgacagagtacggagccctctgaaaaatgacaaagatggtatgatgtatggcccaccagtggggacttaccatgaccccagtgcccaggaggctgggcgctgcctaatgtctagtgatggtctgcctaacaagggcatggaattaaagcatggctcccagaagttacaagaatcctgttgggatctttctcggcaaacttctccagccaaaagcagcggtcctccaggaatgtccagtcaaaaaaggtatgggccgccccatgagactgatggacatggactagctgaggctacacagtcatccaaacctggtagtgttatgctgagacttccaggccaggaggatcattcttctcaaaaccccttaatcatgaggaggcgtgttcgttcttttatctctcccattcccagtaagagacagtcacaagatgtaaagaacagtagcactgaagataaaggtcgcctccttcactcatcaaaagaaggcgctgataaagcattcaattcctatgcccatctttctcacagtcaggatatcaagtctatccctaagagagattcctccaaggaccttccaagtccagatagtagaaactgccctgctgttaccctcacaagccctgctaagaccaaaatactgcccccacggaaaggacggggattgaaattggaagctatagttcagaagattacatccccaaatattaggaggagcgcatcttcgaacagtgcggaggctgggggagacacggttacgcttgatgatatactgtctttgaagagtggtcctcctgaaggtgggagtgttgctgttcaggatgctgacatagagaagagaaaaggtgaggtggcttcggacctagtcagtccagcaaaccaggagttgcacgtagagaaacctcttccaaggtcttcagaagagtggcgtggcagcgtggatgacaaagtgaagacagagacacatgcagaaacagttactgccggaaaggaaccccctggtgccatgacatccacaacctcacagaagcctggtagtaaccaagggagaccagatggttccctgggtggaacagcacctttaatctttccagactcaaagaatgtacctccagtgggcatattggcccctgaggcaaaccccaaggctgaagagaaggagaacgatacagtgacgatttcaccgaagcaagagggtttccctccaaagggatatttcccatcaggaaagaagaaggggagacccattggtagtgtgaataagcaaaagaaacagcagcagccaccgcctccaccccctcagcccccacagataccagaaggttctgcagatggagagccaaagccaaaaaaacagaggcaaaggagggagagaaggaagcctggggcccagccgaggaagcgaaaaaccaaacaagcagttcccattgtggaaccccaagaacctgagatcaaactaaaatatgccacccagccactggataaaactgatgccaagaacaagtctttttacccttacatccatgtagtaaataagtgtgaacttggagccgtttgtacaatcatcaatgctgaggaagaagaacagaccaaattagtgaggggcaggaagggtcagaggtcactgacccctccacctagcagcactgaaagcaaggcgctcccggcctcgtcctttatgctgcagggacctgttgtgacagagtcttcggttatggggcacctggtttgctgtctgtgtggcaagtgggccagttaccggaacatgggtgacctctttggacctttttatccccaagattatgcagccactctcccgaagaatccacctcctaagagggccacagaaatgcagagcaaagttaaggtacggcacaaaagtgcttctaatggctccaagacggacactgaggaggaggaagagcagcagcagcagcagaaggagcagagaagcctggccgcacaccccaggtttaagcggcgccaccgctcggaagactgtggtggaggccctcggtccctgtccagggggctcccttgtaaaaaagcagccactgagggcagcagtgaaaagactgttttggactcgaagccctccgtgcccaccacttcagaaggtggccctgagctggagttacaaatccctgaactacctcttgacagcaatgaattttgggtccatgagggttgtattctctgggccaatggaatctacctggtttgtggcaggctctatggcctgcaggaagcgctggaaatagccagagagatgaaatgttcccactgccaggaggcaggcgccaccttgggctgctacaacaaaggctgctccttccgataccattacccgtgtgccattgatgcagattgtttgctacatgaggagaacttctcggtgaggtgccctaagcacaagcctccccttccgtgccctctcccccccttgcagaacaagaccgcgaaaggcagcctcagcacagagcagtcggagcgggggtgaggggggcagtgtgctcgtgggaatggaaaggacagcaagcacaggtgagactgtggagatgagaaggtggtggacactcgtgatggaatggaaatcgtcctaccgtgcagccacaccctgccctgccccgccccgccccgcccgcgtgcctgcccatgccagcacttccttaagttctcacatcacactcaaaccagtgacaccacaggaaagaaagacccaagacgttggaatggctgtttccatggacacaatctccatagtgacaatgtggggggaggggggaggggtgggatgatggggaaagggtggggggaattaaaagggagggataaatatatatatataaatctatttttagtctggaaagactttgtttaaatgaaaggtgcgctatcccttttgattctgttttaaaattatctcgttaaagatctccaaatttgttccgatgacaagtgaaatttaaatgtgagattgaactgaacaaaccctcatctcatgaaggacggggtgtgtgtgtggcgttgatctttagcctgtctcacaccagttcagaaaacactagacccaggattgaaaaagcaaaccacagcagaaccatccttttgtcattaatttgtctcaaagtgggaaggttttgggggagggggaaatacagggatggtccatgttttcaagagtaggggaatgatgtttaaacacaaaaataaattttttttcatttccagaaacactatttatttatggttttttttttttaattttttctttttgggggtgaaattggcagatgcctgaggtcatagctgtgtcctgggtcactgtggctggtgaggacctcaaggaccccatcaagtgtacacagcagcagcaaaatcaagggatgaccctcctctggggccccctgtcctcagcacattccaggcagctgtgccctgacccacagggacccgtggggatgggaggaggtccaggcctgtgttgccagagctggcagtgtgagctgtaggcagggacggggagggactgtcgctgtgatcagagtgggttaagctgaccaggaacacccatttaacccctttttctttttgctttcatttttataaaggaaaagaggacctgtcagataggcagccccatgctacgtgattctttatgttgtgttgttttgttttgtaaattgtataatttttaaatatctgagttttaaaaaaagaaaaaagtacaaaaaaatcttgttatggccttaagaaggggttagtgcatctttcaggggtcactctgccatggggataaaatagctgtttcacaaacagttttattta

SEQ ID NO: 86630 - DNA, 7224 bp, Homo sapiens
ttcatctgggcctctgattcatctttattccctccatcatctagacttgattttatttgtaccaaggagatgcgtgtctaatgtttttctttcttctatttctaggagggctgttggcctgctgctgtgctgctgaacagtatgcagtcctttcgggagcaaagcagttaccacggaaaccagcaaagctacccacaggaggtacacggctcatcccggctagaagagttcagccctcgtcaggcccagatgttccagaattttggaggtacaggtggcagtagtggcagcagtggcagtggcagtggtggtggacgacgaggagcagcagctgctgcggcagcgatggctagcgagacctctggccatcaaggttaccagggtttcaggaaagaggctggagatttttactacatggcaggcaacaaagaccccgtgactacaggaaccccacagcctcctcagcgaaggccttctgggcctgtgcagagctatggacccccccaggggagcagctttggcaatcagtatgggagtgagggtcatgtgggccagtttcaagcacagcactctggccttggcggtgtgtcacattatcagcaggattacactgggcctttctctccagggagtgctcagtaccaacagcaggcttccagccagcagcagcagcagcaagtccagcagttgagacaacagctttaccagtcccatcagcccctgccacaggccactggccaaccagcatccagctcatcccatctacagccaatgcagcggccctcaactctgccatcctctgctgctggttaccagttaagagtgggtcagtttggccaacactatcagtcttctgcttcctcctcctcctcctcctccttcccttcaccacagcgttttagccagtctggacagagctatgatggcagttacaatgtgaatgctggatctcagtatgaaggacacaatgtgggttctaatgcacaggcttatggaacacaatccaattacagctatcagcctcaatctatgaagaattttgaacaggcaaagattccacaagggacccaacaggggcagcagcagcagcaaccgcagcaacaacaacacccttctcagcatgtgatgcagtatactaacgctgccaccaagctgcccctgcaaagccaagtggggcagtacaaccagcctgaggttcctgtgaggtcccccatgcagtttcaccagaacttcagccccatttctaacccttctccagctgcctctgtggttcagtctccaagctgtagttctaccccatctcctctcatgcagactggggagaatctccagtgtgggcaaggcagtgtgcctatgggttccagaaacagaattttacagttaatgcctcaactcagtccaaccccatcaatgatgcccagtcctaattctcatgctgcaggcttcaaagggtttggactagaaggggtaccagaaaagcgactgacagatcctgggttgagtagtttgagtgctctgagtactcaagtggccaatcttcctaacactgtccagcacatgttactttctgatgccctgactcctcagaagaagacctccaagaggccctcatcttccaagaaagcagatagctgcacaaattctgaaggctcctcacaacctgaagaacagctgaagtcccctatggcagagtcattagatggaggctgctccagcagttcagaggatcaaggcgagagagtgcggcaactaagtggccagagcaccagctctgacaccacctacaagggtggagcctctgagaaagctggctcctcaccggcacaaggtgctcagaatgaaccccccagactcaatgctagtcctgccgcaagagaagaggccacctcaccaggcgctaaggacatgccattgtcatccgacgggaacccaaaggttaatgagaagactgttggggtgattgtctcccgggaagccatgacaggtcgggtagaaaagcctggtggacaagataaaggctcccaagaggatgatcctgcagccactcaaaggccacctagcaatggtggggcaaaggaaaccagtcatgcatcacttccccagccagagcctccaggaggaggagggagcaaaggaaacaagaatggcgataacaactccaaccataatggagaaggaaatggccagagtggccactctgcagcgggccctggttttacgagcagaactgagcctagcaaatctcctggaagtctgcgctatagttacaaagatagtttcgggtcagccgtgccacgaaatgtcagtggctttcctcagtatcctacagggcaagaaaagggagatttcactggccatggggaacgaaagggtagaaatgaaaaattcccaagcctcctgcaggaagtgcttcagggttaccaccaccaccctgacaggagatattctaggagtactcaagagcatcaggggatggctggtagcctagaaggaaccacaaggcccaatgtcttggttagtcaaaccaatgaattagctagcaggggccttctgaacaaaagcattgggtctctattagaaaatccccactggggcccctgggaaaggaaatcaagcagcacagctcctgaaatgaaacagatcaatttgactgactatccaattcccagaaagtttgaaatagagcctcagtcatcagcacatgagcctgggggttccctctctgaaagaagatcagtgatctgtgatatttctccactaagacagattgtcagggacccaggggctcactcactgggacacatgagtgccgacaccagaattgggaggaatgaccgtctcaatccaactttaagtcagtcggtcattcttcctggtggtttggtgtccatggaaaccaagctgaaatcccagagcgggcagataaaagaggaagactttgaacagtctaaatctcaagctagtttcaacaacaagaaatctggagaccactgccatcctcctagcatcaagcatgagtcttaccgcggcaatgccagccctggagcagcaacccatgattccctttcagactatggcccgcaagacagcagacccacgccaatgcggcgggtccctggcagagttggtggtcgggagggcatgaggggtcggtccccttctcaatatcatgactttgcagaaaaattgaaaatgtctcctgggcggagcagaggcccagggggagaccctcatcacatgaatccacacatgaccttttcagagagggctaaccggagttctttacacactcccttttctcccaactcagaaaccctggcctctgcttatcatgcaaatactcgggctcatgcttatggggaccctaacgcaggtttgaattctcagctgcattataagagacagatgtaccaacagcaaccagaggagtataaagactggagcagcggttctgctcagggagtaattgctgcagcacagcacaggcaggaggggccacggaagagtccaaggcagcagcagtttcttgacagagtacggagccctctgaaaaatgacaaagatggtatgatgtatggcccaccagtggggacttaccatgaccccagtgcccaggaggctgggcgctgcctaatgtctagtgatggtctgcctaacaagggcatggaattaaagcatggctcccagaagttacaagaatcctgttgggatctttctcggcaaacttctccagccaaaagcagcggtcctccaggaatgtccagtcaaaaaaggtatgggccgccccatgagactgatggacatggactagctgaggctacacagtcatccaaacctggtagtgttatgctgagacttccaggccaggaggatcattcttctcaaaaccccttaatcatgaggaggcgtgttcgttcttttatctctcccattcccagtaagagacagtcacaagatgtaaagaacagtagcactgaagataaaggtcgcctccttcactcatcaaaagaaggcgctgataaagcattcaattcctatgcccatctttctcacagtcaggatatcaagtctatccctaagagagattcctccaaggaccttccaagtccagatagtagaaactgccctgctgttaccctcacaagccctgctaagaccaaaatactgcccccacggaaaggacggggattgaaattggaagctatagttcagaagattacatccccaaatattaggaggagcgcatcttcgaacagtgcggaggctgggggagacacggttacgcttgatgatatactgtctttgaagagtggtcctcctgaaggtgggagtgttgctgttcaggatgctgacatagagaagagaaaaggtgaggtggcttcggacctagtcagtccagcaaaccaggagttgcacgtagagaaacctcttccaaggtcttcagaagagtggcgtggcagcgtggatgacaaagtgaagacagagacacatgcagaaacagttactgccggaaaggaaccccctggtgccatgacatccacaacctcacagaagcctggtagtaaccaagggagaccagatggttccctgggtggaacagcacctttaatctttccagactcaaagaatgtacctccagtgggcatattggcccctgaggcaaaccccaaggctgaagagaaggagaacgatacagtgacgatttcaccgaagcaagagggtttccctccaaagggatatttcccatcaggaaagaagaaggggagacccattggtagtgtgaataagcaaaagaaacagcagcagccaccgcctccaccccctcagcccccacagataccagaaggttctgcagatggagagccaaagccaaaaaaacagaggcaaaggagggagagaaggaagcctggggcccagccgaggaagcgaaaaaccaaacaagcagttcccattgtggaaccccaagaacctgagatcaaactaaaatatgccacccagccactggataaaactgatgccaagaacaagtctttttacccttacatccatgtagtaaataagtgtgaacttggagccgtttgtacaatcatcaatgctgaggaagaagaacagaccaaattagtgaggggcaggaagggtcagaggtcactgacccctccacctagcagcactgaaagcaaggcgctcccggcctcgtcctttatgctgcagggacctgttgtgacagagtcttcggttatggggcacctggtttgctgtctgtgtggcaagtgggccagttaccggaacatgggtgacctctttggacctttttatccccaagattatgcagccactctcccgaagaatccacctcctaagagggccacagaaatgcagagcaaagttaaggtacggcacaaaagtgcttctaatggctccaagacggacactgaggaggaggaagagcagcagcagcagcagaaggagcagagaagcctggccgcacaccccaggtttaagcggcgccaccgctcggaagactgtggtggaggccctcggtccctgtccagggggctcccttgtaaaaaagcagccactgagggcagcagtgaaaagactgttttggactcgaagccctccgtgcccaccacttcagaaggtggccctgagctggagttacaaatccctgaactacctcttgacagcaatgaattttgggtccatgagggttgtattctctgggccaatggaatctacctggtttgtggcaggctctatggcctgcaggaagcgctggaaatagccagagagatgaaatgttcccactgccaggaggcaggcgccaccttgggctgctacaacaaaggctgctccttccgataccattacccgtgtgccattgatgcagattgtttgctacatgaggagaacttctcggtgaggtgccctaagcacaaggtgagactgtggagatgagaaggtggtggacactcgtgatggaatggaaatcgtcctaccgtgcagccacaccctgccctgccccgccccgccccgcccgcgtgcctgcccatgccagcacttccttaagttctcacatcacactcaaaccagtgacaccacaggaaagaaagacccaagacgttggaatggctgtttccatggacacaatctccatagtgacaatgtggggggaggggggaggggtgggatgatggggaaagggtggggggaattaaaagggagggataaatatatatatataaatctatttttagtctggaaagactttgtttaaatgaaaggtgcgctatcccttttgattctgttttaaaattatctcgttaaagatctccaaatttgttccgatgacaagtgaaatttaaatgtgagattgaactgaacaaaccctcatctcatgaaggacggggtgtgtgtgtggcgttgatctttagcctgtctcacaccagttcagaaaacactagacccaggattgaaaaagcaaaccacagcagaaccatccttttgtcattaatttgtctcaaagtgggaaggttttgggggagggggaaatacagggatggtccatgttttcaagagtaggggaatgatgtttaaacacaaaaataaattttttttcatttccagaaacactatttatttatggttttttttttttaattttttctttttgggggtgaaattggcagatgcctgaggtcatagctgtgtcctgggtcactgtggctggtgaggacctcaaggaccccatcaagtgtacacagcagcagcaaaatcaagggatgaccctcctctggggccccctgtcctcagcacattccaggcagctgtgccctgacccacagggacccgtggggatgggaggaggtccaggcctgtgttgccagagctggcagtgtgagctgtaggcagggacggggagggactgtcgctgtgatcagagtgggttaagctgaccaggaacacccatttaacccctttttctttttgctttcatttttataaaggaaaagaggacctgtcagataggcagccccatgctacgtgattctttatgttgtgttgttttgttttgtaaattgtataatttttaaatatctgagttttaaaaaaagaaaaaagtacaaaaaaatcttgttatggccttaagaaggggttagtgcatctttcaggggtcactctgccatggggataaaatagctgtttcacaaacagttttattta

SEQ ID NO: 86631 - DNA, 7319 bp, Homo sapiens
ttcatctgggcctctgattcatctttattccctccatcatctagacttgattttatttgtaccaaggagatgcgtgtctaatgtttttctttcttctatttctaggagggctgttggcctgctgctgtgctgctgaacagtatgcagtcctttcgggagcaaagcagttaccacggaaaccagcaaagctacccacaggaggtacacggctcatcccggctagaagagttcagccctcgtcaggcccagatgttccagaattttggaggtacaggtggcagtagtggcagcagtggcagtggcagtggtggtggacgacgaggagcagcagctgctgcggcagcgatggctagcgagacctctggccatcaaggttaccagggtttcaggaaagaggctggagatttttactacatggcaggcaacaaagaccccgtgactacaggaaccccacagcctcctcagcgaaggccttctgggcctgtgcagagctatggacccccccaggggagcagctttggcaatcagtatgggagtgagggtcatgtgggccagtttcaagcacagcactctggccttggcggtgtgtcacattatcagcaggattacactgggcctttctctccagggagtgctcagtaccaacagcaggcttccagccagcagcagcagcagcaagtccagcagttgagacaacagctttaccagtcccatcagcccctgccacaggccactggccaaccagcatccagctcatcccatctacagccaatgcagcggccctcaactctgccatcctctgctgctggttaccagttaagagtgggtcagtttggccaacactatcagtcttctgcttcctcctcctcctcctcctccttcccttcaccacagcgttttagccagtctggacagagctatgatggcagttacaatgtgaatgctggatctcagtatgaaggacacaatgtgggttctaatgcacaggcttatggaacacaatccaattacagctatcagcctcaatctatgaagaattttgaacaggcaaagattccacaagggacccaacaggggcagcagcagcagcaaccgcagcaacaacaacacccttctcagcatgtgatgcagtatactaacgctgccaccaagctgcccctgcaaagccaagtggggcagtacaaccagcctgaggttcctgtgaggtcccccatgcagtttcaccagaacttcagccccatttctaacccttctccagctgcctctgtggttcagtctccaagctgtagttctaccccatctcctctcatgcagactggggagaatctccagtgtgggcaaggcagtgtgcctatgggttccagaaacagaattttacagttaatgcctcaactcagtccaaccccatcaatgatgcccagtcctaattctcatgctgcaggcttcaaagggtttggactagaaggggtaccagaaaagcgactgacagatcctgggttgagtagtttgagtgctctgagtactcaagtggccaatcttcctaacactgtccagcacatgttactttctgatgccctgactcctcagaagaagacctccaagaggccctcatcttccaagaaagcagatagctgcacaaattctgaaggctcctcacaacctgaagaacagctgaagtcccctatggcagagtcattagatggaggctgctccagcagttcagaggatcaaggcgagagagtgcggcaactaagtggccagagcaccagctctgacaccacctacaagggtggagcctctgagaaagctggctcctcaccggcacaaggtgctcagaatgaaccccccagactcaatgctagtcctgccgcaagagaagaggccacctcaccaggcgctaaggacatgccattgtcatccgacgggaacccaaaggttaatgagaagactgttggggtgattgtctcccgggaagccatgacaggtcgggtagaaaagcctggtggacaagataaaggctcccaagaggatgatcctgcagccactcaaaggccacctagcaatggtggggcaaaggaaaccagtcatgcatcacttccccagccagagcctccaggaggaggagggagcaaaggaaacaagaatggcgataacaactccaaccataatggagaaggaaatggccagagtggccactctgcagcgggccctggttttacgagcagaactgagcctagcaaatctcctggaagtctgcgctatagttacaaagatagtttcgggtcagccgtgccacgaaatgtcagtggctttcctcagtatcctacagggcaagaaaagggagatttcactggccatggggaacgaaagggtagaaatgaaaaattcccaagcctcctgcaggaagtgcttcagggttaccaccaccaccctgacaggagatattctaggagtactcaagagcatcaggggatggctggtagcctagaaggaaccacaaggcccaatgtcttggttagtcaaaccaatgaattagctagcaggggccttctgaacaaaagcattgggtctctattagaaaatccccactggggcccctgggaaaggaaatcaagcagcacagctcctgaaatgaaacagatcaatttgactgactatccaattcccagaaagtttgaaatagagcctcagtcatcagcacatgagcctgggggttccctctctgaaagaagatcagtgatctgtgatatttctccactaagacagattgtcagggacccaggggctcactcactgggacacatgagtgccgacaccagaattgggaggaatgaccgtctcaatccaactttaagtcagtcggtcattcttcctggtggtttggtgtccatggaaaccaagctgaaatcccagagcgggcagataaaagaggaagactttgaacagtctaaatctcaagctagtttcaacaacaagaaatctggagaccactgccatcctcctagcatcaagcatgagtcttaccgcggcaatgccagccctggagcagcaacccatgattccctttcagactatggcccgcaagacagcagacccacgccaatgcggcgggtccctggcagagttggtggtcgggagggcatgaggggtcggtccccttctcaatatcatgactttgcagaaaaattgaaaatgtctcctgggcggagcagaggcccagggggagaccctcatcacatgaatccacacatgaccttttcagagagggctaaccggagttctttacacactcccttttctcccaactcagaaaccctggcctctgcttatcatgcaaatactcgggctcatgcttatggggaccctaacgcaggtttgaattctcagctgcattataagagacagatgtaccaacagcaaccagaggagtataaagactggagcagcggttctgctcagggagtaattgctgcagcacagcacaggcaggaggggccacggaagagtccaaggcagcagcagtttcttgacagagtacggagccctctgaaaaatgacaaagatggtatgatgtatggcccaccagtggggacttaccatgaccccagtgcccaggaggctgggcgctgcctaatgtctagtgatggtctgcctaacaagggcatggaattaaagcatggctcccagaagttacaagaatcctgttgggatctttctcggcaaacttctccagccaaaagcagcggtcctccaggaatgtccagtcaaaaaaggtatgggccgccccatgagactgatggacatggactagctgaggctacacagtcatccaaacctggtagtgttatgctgagacttccaggccaggaggatcattcttctcaaaaccccttaatcatgaggaggcgtgttcgttcttttatctctcccattcccagtaagagacagtcacaagatgtaaagaacagtagcactgaagataaaggtcgcctccttcactcatcaaaagaaggcgctgataaagcattcaattcctatgcccatctttctcacagtcaggatatcaagtctatccctaagagagattcctccaaggaccttccaagtccagatagtagaaactgccctgctgttaccctcacaagccctgctaagaccaaaatactgcccccacggaaaggacggggattgaaattggaagctatagttcagaagattacatccccaaatattaggaggagcgcatcttcgaacagtgcggaggctgggggagacacggttacgcttgatgatatactgtctttgaagagtggtcctcctgaaggtgggagtgttgctgttcaggatgctgacatagagaagagaaaaggtgaggtggcttcggacctagtcagtccagcaaaccaggagttgcacgtagagaaacctcttccaaggtcttcagaagagtggcgtggcagcgtggatgacaaagtgaagacagagacacatgcagaaacagttactgccggaaaggaaccccctggtgccatgacatccacaacctcacagaagcctggtagtaaccaagggagaccagatggttccctgggtggaacagcacctttaatctttccagactcaaagaatgtacctccagtgggcatattggcccctgaggcaaaccccaaggctgaagagaaggagaacgatacagtgacgatttcaccgaagcaagagggtttccctccaaagggatatttcccatcaggaaagaagaaggggagacccattggtagtgtgaataagcaaaagaaacagcagcagccaccgcctccaccccctcagcccccacagataccagaaggttctgcagatggagagccaaagccaaaaaaacagaggcaaaggagggagagaaggaagcctggggcccagccgaggaagcgaaaaaccaaacaagcagttcccattgtggaaccccaagaacctgagatcaaactaaaatatgccacccagccactggataaaactgatgccaagaacaagtctttttacccttacatccatgtagtaaataagtgtgaacttggagccgtttgtacaatcatcaatgctgaggaagaagaacagaccaaattagtgaggggcaggaagggtcagaggtcactgacccctccacctagcagcactgaaagcaaggcgctcccggcctcgtcctttatgctgcagggacctgttgtgacagagtcttcggttatggggcacctggtttgctgtctgtgtggcaagtgggccagttaccggaacatgggtgacctctttggacctttttatccccaagattatgcagccactctcccgaagaatccacctcctaagagggccacagaaatgcagagcaaagttaaggtacggcacaaaagtgcttctaatggctccaagacggacactgaggaggaggaagagcagcagcagcagcagaaggagcagagaagcctggccgcacaccccaggtttaagcggcgccaccgctcggaagactgtggtggaggccctcggtccctgtccagggggctcccttgtaaaaaagcagccactgagggcagcagtgaaaagactgttttggactcgaagccctccgtgcccaccacttcagaaggtggccctgagctggagttacaaatccctgaactacctcttgacagcaatgaattttgggtccatgagggttgtattctctgggccaatggaatctacctggtttgtggcaggctctatggcctgcaggaagcgctggaaatagccagagagatgaaatgttcccactgccaggaggcaggcgccaccttgggctgctacaacaaaggctgctccttccgataccattacccgtgtgccattgatgcagattgtttgctacatgaggagaacttctcggtgaggtgccctaagcacaagaacaagaccgcgaaaggcagcctcagcacagagcagtcggagcgggggtgaggggggcagtgtgctcgtgggaatggaaaggacagcaagcacaggtgagactgtggagatgagaaggtggtggacactcgtgatggaatggaaatcgtcctaccgtgcagccacaccctgccctgccccgccccgccccgcccgcgtgcctgcccatgccagcacttccttaagttctcacatcacactcaaaccagtgacaccacaggaaagaaagacccaagacgttggaatggctgtttccatggacacaatctccatagtgacaatgtggggggaggggggaggggtgggatgatggggaaagggtggggggaattaaaagggagggataaatatatatatataaatctatttttagtctggaaagactttgtttaaatgaaaggtgcgctatcccttttgattctgttttaaaattatctcgttaaagatctccaaatttgttccgatgacaagtgaaatttaaatgtgagattgaactgaacaaaccctcatctcatgaaggacggggtgtgtgtgtggcgttgatctttagcctgtctcacaccagttcagaaaacactagacccaggattgaaaaagcaaaccacagcagaaccatccttttgtcattaatttgtctcaaagtgggaaggttttgggggagggggaaatacagggatggtccatgttttcaagagtaggggaatgatgtttaaacacaaaaataaattttttttcatttccagaaacactatttatttatggttttttttttttaattttttctttttgggggtgaaattggcagatgcctgaggtcatagctgtgtcctgggtcactgtggctggtgaggacctcaaggaccccatcaagtgtacacagcagcagcaaaatcaagggatgaccctcctctggggccccctgtcctcagcacattccaggcagctgtgccctgacccacagggacccgtggggatgggaggaggtccaggcctgtgttgccagagctggcagtgtgagctgtaggcagggacggggagggactgtcgctgtgatcagagtgggttaagctgaccaggaacacccatttaacccctttttctttttgctttcatttttataaaggaaaagaggacctgtcagataggcagccccatgctacgtgattctttatgttgtgttgttttgttttgtaaattgtataatttttaaatatctgagttttaaaaaaagaaaaaagtacaaaaaaatcttgttatggccttaagaaggggttagtgcatctttcaggggtcactctgccatggggataaaatagctgtttcacaaacagttttattta

SEQ ID NO: 86632 - DNA, 3040 bp, Homo sapiens
gaaagatacagagacaaagtacagaggaagaaaaatgggcccaggggaccggcgttcagcatacggaggacccatgccggcactggcctctgagttcccttagtatttattgatcattatcgggcattcccggagagtggcgtggcagcgtggatgacaaagtgaagacagagacacatgcagaaacagttactgccggaaaggaaccccctggtgccatgacatccacaacctcacagaagcctggtagtaaccaagggagaccagatggttccctgggtggaacagcacctttaatctttccagactcaaagaatgtacctccagtgggcatattggcccctgaggcaaaccccaaggctgaagagaaggagaacgatacagtgacgatttcaccgaagcaagagggtttccctccaaagggatatttcccatcaggaaagaagaaggggagacccattggtagtgtgaataagcaaaagaaacagcagcagccaccgcctccaccccctcagcccccacagataccagaaggttctgcagatggagagccaaagccaaaaaaacagaggcaaaggagggagagaaggaagcctggggcccagccgaggaagcgaaaaaccaaacaagcagttcccattgtggaaccccaagaacctgagatcaaactaaaatatgccacccagccactggataaaactgatgccaagaacaagtctttttacccttacatccatgtagtaaataagtgtgaacttggagccgtttgtacaatcatcaatgctgaggaagaagaacagaccaaattagtgaggggcaggaagggtcagaggtcactgacccctccacctagcagcactgaaagcaaggcgctcccggcctcgtcctttatgctgcagggacctgttgtgacagagtcttcggttatggggcacctggtttgctgtctgtgtggcaagtgggccagttaccggaacatgggtgacctctttggacctttttatccccaagattatgcagccactctcccgaagaatccacctcctaagagggccacagaaatgcagagcaaagttaaggtacggcacaaaagtgcttctaatggctccaagacggacactgaggaggaggaagagcagcagcagcagcagaaggagcagagaagcctggccgcacaccccaggtttaagcggcgccaccgctcggaagactgtggtggaggccctcggtccctgtccagggggctcccttgtaaaaaagcagccactgagggcagcagtgaaaagactgttttggactcgaagccctccgtgcccaccacttcagaaggtggccctgagctggagttacaaatccctgaactacctcttgacagcaatgaattttgggtccatgagggttgtattctctgggccaatggaatctacctggtttgtggcaggctctatggcctgcaggaagcgctggaaatagccagagagatgaaatgttcccactgccaggaggcaggcgccaccttgggctgctacaacaaaggctgctccttccgataccattacccgtgtgccattgatgcagattgtttgctacatgaggagaacttctcggtgaggtgccctaagcacaagcctccccttccgtgccctctcccccccttgcagaacaagaccgcgaaaggcagcctcagcacagagcagtcggagcgggggtgaggggggcagtgtgctcgtgggaatggaaaggacagcaagcacaggtgagactgtggagatgagaaggtggtggacactcgtgatggaatggaaatcgtcctaccgtgcagccacaccctgccctgccccgccccgccccgcccgcgtgcctgcccatgccagcacttccttaagttctcacatcacactcaaaccagtgacaccacaggaaagaaagacccaagacgttggaatggctgtttccatggacacaatctccatagtgacaatgtggggggaggggggaggggtgggatgatggggaaagggtggggggaattaaaagggagggataaatatatatatataaatctatttttagtctggaaagactttgtttaaatgaaaggtgcgctatcccttttgattctgttttaaaattatctcgttaaagatctccaaatttgttccgatgacaagtgaaatttaaatgtgagattgaactgaacaaaccctcatctcatgaaggacggggtgtgtgtgtggcgttgatctttagcctgtctcacaccagttcagaaaacactagacccaggattgaaaaagcaaaccacagcagaaccatccttttgtcattaatttgtctcaaagtgggaaggttttgggggagggggaaatacagggatggtccatgttttcaagagtaggggaatgatgtttaaacacaaaaataaattttttttcatttccagaaacactatttatttatggttttttttttttaattttttctttttgggggtgaaattggcagatgcctgaggtcatagctgtgtcctgggtcactgtggctggtgaggacctcaaggaccccatcaagtgtacacagcagcagcaaaatcaagggatgaccctcctctggggccccctgtcctcagcacattccaggcagctgtgccctgacccacagggacccgtggggatgggaggaggtccaggcctgtgttgccagagctggcagtgtgagctgtaggcagggacggggagggactgtcgctgtgatcagagtgggttaagctgaccaggaacacccatttaacccctttttctttttgctttcatttttataaaggaaaagaggacctgtcagataggcagccccatgctacgtgattctttatgttgtgttgttttgttttgtaaattgtataatttttaaatatctgagttttaaaaaaagaaaaaagtacaaaaaaatcttgttatggccttaagaaggggttagtgcatctttcaggggtcactctgccatggggataaaatagctgtttcacaaacagttttattta

SEQ ID NO: 86633 - DNA, 6750 bp, Homo sapiens
ttcatctgggcctctgattcatctttattccctccatcatctagacttgattttatttgtaccaaggagatgcgtgtctaatgtttttctttcttctatttctaggagggctgttggcctgctgctgtgctgctgaacagtatgcagtcctttcgggagcaaagcagttaccacggaaaccagcaaagctacccacaggaggtacacggctcatcccggctagaagagttcagccctcgtcaggcccagatgttccagaattttggaggtacaggtggcagtagtggcagcagtggcagtggcagtggtggtggacgacgaggagcagcagctgctgcggcagcgatggctagcgagacctctggccatcaaggttaccagggtttcaggaaagaggctggagatttttactacatggcaggcaacaaagaccccgtgactacaggaaccccacagcctcctcagcgaaggccttctgggcctgtgcagagctatggacccccccaggggagcagctttggcaatcagtatgggagtgagggtcatgtgggccagtttcaagcacagcactctggccttggcggtgtgtcacattatcagcaggattacactgggcctttctctccagggagtgctcagtaccaacagcaggcttccagccagcagcagcagcagcaagtccagcagttgagacaacagctttaccagtcccatcagcccctgccacaggccactggccaaccagcatccagctcatcccatctacagccaatgcagcggccctcaactctgccatcctctgctgctggttaccagttaagagtgggtcagtttggccaacactatcagtcttctgcttcctcctcctcctcctcctccttcccttcaccacagcgttttagccagtctggacagagctatgatggcagttacaatgtgaatgctggatctcagtatgaaggacacaatgtgggttctaatgcacaggcttatggaacacaatccaattacagctatcagcctcaatctatgaagaattttgaacaggcaaagattccacaagggacccaacaggggcagcagcagcagcaaccgcagcaacaacaacacccttctcagcatgtgatgcagtatactaacgctgccaccaagctgcccctgcaaagccaagtggggcagtacaaccagcctgaggttcctgtgaggtcccccatgcagtttcaccagaacttcagccccatttctaacccttctccagctgcctctgtggttcagtctccaagctgtagttctaccccatctcctctcatgcagactggggagaatctccagtgtgggcaaggcagtgtgcctatgggttccagaaacagaattttacagttaatgcctcaactcagtccaaccccatcaatgatgcccagtcctaattctcatgctgcaggcttcaaagggtttggactagaaggggtaccagaaaagcgactgacagatcctgggttgagtagtttgagtgctctgagtactcaagtggccaatcttcctaacactgtccagcacatgttactttctgatgccctgactcctcagaagaagacctccaagaggccctcatcttccaagaaagcagatagctgcacaaattctgaaggctcctcacaacctgaagaacagctgaagtcccctatggcagagtcattagatggaggctgctccagcagttcagaggatcaaggcgagagagtgcggcaactaagtggccagagcaccagctctgacaccacctacaagggtggagcctctgagaaagctggctcctcaccggcacaaggtgctcagaatgaaccccccagactcaatgctagtcctgccgcaagagaagaggccacctcaccaggcgctaaggacatgccattgtcatccgacgggaacccaaaggttaatgagaagactgttggggtgattgtctcccgggaagccatgacaggtcgggtagaaaagcctggtggacaagataaaggctcccaagaggatgatcctgcagccactcaaaggccacctagcaatggtggggcaaaggaaaccagtcatgcatcacttccccagccagagcctccaggaggaggagggagcaaaggaaacaagaatggcgataacaactccaaccataatggagaaggaaatggccagagtggccactctgcagcgggccctggttttacgagcagaactgagcctagcaaatctcctggaagtctgcgctatagttacaaagatagtttcgggtcagccgtgccacgaaatgtcagtggctttcctcagtatcctacagggcaagaaaagggagatttcactggccatggggaacgaaagggtagaaatgaaaaattcccaagcctcctgcaggaagtgcttcagggttaccaccaccaccctgacaggagatattctaggagtactcaagagcatcaggggatggctggtagcctagaaggaaccacaaggcccaatgtcttggttagtcaaaccaatgaattagctagcaggggccttctgaacaaaagcattgggtctctattagaaaatccccactggggcccctgggaaaggaaatcaagcagcacagctcctgaaatgaaacagatcaatttgactgactatccaattcccagaaagtttgaaatagagcctcagtcatcagcacatgagcctgggggttccctctctgaaagaagatcagtgatctgtgatatttctccactaagacagattgtcagggacccaggggctcactcactgggacacatgagtgccgacaccagaattgggaggaatgaccgtctcaatccaactttaagtcagtcggtcattcttcctggtggtttggtgtccatggaaaccaagctgaaatcccagagcgggcagataaaagaggaagactttgaacagtctaaatctcaagctagtttcaacaacaagaaatctggagaccactgccatcctcctagcatcaagcatgagtcttaccgcggcaatgccagccctggagcagcaacccatgattccctttcagactatggcccgcaagacagcagacccacgccaatgcggcgggtccctggcagagttggtggtcgggagggcatgaggggtcggtccccttctcaatatcatgactttgcagaaaaattgaaaatgtctcctgggcggagcagaggcccagggggagaccctcatcacatgaatccacacatgaccttttcagagagggctaaccggagttctttacacactcccttttctcccaactcagaaaccctggcctctgcttatcatgcaaatactcgggctcatgcttatggggaccctaacgcaggtttgaattctcagctgcattataagagacagatgtaccaacagcaaccagaggagtataaagactggagcagcggttctgctcagggagtaattgctgcagcacagcacaggcaggaggggccacggaagagtccaaggcagcagcagtttcttgacagagtacggagccctctgaaaaatgacaaagatggtatgatgtatggcccaccagtggggacttaccatgaccccagtgcccaggaggctgggcgctgcctaatgtctagtgatggtctgcctaacaagggcatggaattaaagcatggctcccagaagttacaagaatcctgttgggatctttctcggcaaacttctccagccaaaagcagcggtcctccaggaatgtccagtcaaaaaaggtatgggccgccccatgagactgatggacatggactagctgaggctacacagtcatccaaacctggtagtgttatgctgagacttccaggccaggaggatcattcttctcaaaaccccttaatcatgaggaggcgtgttcgttcttttatctctcccattcccagtaagagacagtcacaagatgtaaagaacagtagcactgaagataaaggtcgcctccttcactcatcaaaagaaggcgctgataaagcattcaattcctatgcccatctttctcacagtcaggatatcaagtctatccctaagagagattcctccaaggaccttccaagtccagatagtagaaactgccctgctgttaccctcacaagccctgctaagaccaaaatactgcccccacggaaaggacggggattgaaattggaagctatagttcagaagattacatccccaaatattaggaggagcgcatcttcgaacagtgcggaggctgggggagacacggttacgcttgatgatatactgtctttgaagagtggtcctcctgaaggtgggagtgttgctgttcaggatgctgacatagagaagagaaaaggtgaggtggcttcggacctagtcagtccagcaaaccaggagttgcacgtagagaaacctcttccaaggtcttcagaagagtggcgtggcagcgtggatgacaaagtgaagacagagacacatgcagaaacagttactgccggaaaggaaccccctggtgccatgacatccacaacctcacagaagcctggtagtaaccaagggagaccagatggttccctgggtggaacagcacctttaatctttccagactcaaagaatgtacctccagtgggcatattggcccctgaggcaaaccccaaggctgaagagaaggagaacgatacagtgacgatttcaccgaagcaagagggtttccctccaaagggatatttcccatcaggaaagaagaaggggagacccattggtagtgtgaataagcaaaagaaacagcagcagccaccgcctccaccccctcagcccccacagataccagaaggttctgcagatggagagccaaagccaaaaaaacagaggcaaaggagggagagaaggaagcctggggcccagccgaggaagcgaaaaaccaaacaagcagttcccattgtggaaccccaagaacctgagatcaaactaaaatatgccacccagccactggataaaactgatgccaagaacaagtctttttacccttacatccatgtagtaaataagtgtgaacttggagccgtttgtacaatcatcaatgctgaggaagaagaacagaccaaattagtgaggggcaggaagggtcagaggtcactgacccctccacctagcagcactgaaagcaaggcgctcccggcctcgtcctttatgctgcagggacctgttgtgacagagtcttcggttatggggcacctggtttgctgtctgtgtggcaagtgggccagttaccggaacatgggtgacctctttggacctttttatccccaagattatgcagccactctcccgaagaatccacctcctaagagggccacagaaatgcagagcaaagttaaggtacggcacaaaagtgcttctaatggctccaagacggacactgaggaggaggaagagcagcagcagcagcagaaggagcagagaagcctggccgcacaccccaggtttaagcggcgccaccgctcggaagactgtggtggaggccctcggtccctgtccagggggctcccttgtaaaaaagcagccactgagggcagcagtgaaaagactgttttggactcgaagccctccgtgcccaccacttcagaaggtggccctgagctggagttacaaatccctgaactacctcttgacagcaatgaattttgggtccatgagggttgtattctctgggccaatggaatctacctggtttgtggcaggctctatggcctgcaggaagcgctggaaatagccagagagatgaaatgttcccactgccaggaggcaggcgccaccttgggctgctacaacaaaggctgctccttccgataccattacccgtgtgccattgatgcagattgtttgctacatgaggagaacttctcggtgaggtgccctaagcacaaggtgagtcagaggccccaagagctaccagcagggatgggatcgagggtggctcctcctgaaagacctgaagaccaggtgttggtgggcctcacccacacctgtccccacctgtgcctccggctgttagtcccctcctggccctgggagggtggaggggcatgatgctgaagggagacccgtggcatgggggccagcactcggagtattatgaggatcccaggagaaatgtgttttgggagagggggtgtttgtctgttcattaagagaggtgagaatatctaactcgatcaagccactgatttccacttgaggtgaatagaaccccaattcacaggttggcgtttggtaagtctggttctaggccttgaggcctgtgcaaaggcatcttcccagactagaagtcgagctgaccacaaggctctggggaagctcagtctcttccaggttgtgcttctgcagaagcagcctgatgcacagtggatgggctgtctcgggctccacttcccagtttatttaggaggtggtctcgtggtcgcttcctttagaaagggtgggaggtaaggggtgaatggtctgtttgtggataccacatatgtgtgtggggagggtgtatatggagaaggagccccaagaaaggatcagaacggagaccactgccacctgatgtttcctgcaggggctgcactgtgtctctggctgaggtcacactgacacctggtggtagacttcaagaacaagtatgaggatgaaatcaaacaagcgtaccactgctgagaatgagtttgtgatgctgaagaagatgtagatgcg

SEQ ID NO: 86634 - DNA, 1728 bp, Homo sapiens
tttgtttttttaaataaaactgtttgtgaaacagctattttatccccatggcagagtgacccctgaaagatgcactaaccccttcttaaggccataacaagatttttttgtacttttttctttttttaaaactcagatatttaaaaattatacaatttacaaaacaaaacaacacaacataaagaatcacgtagcaggcgccaccttgggctgctacaacaaaggctgctccttccgataccattacccgtgtgccattgatgcagattgtttgctacatgaggagaacttctcggtgaggtgccctaagcacaagcctccccttccgtgccctctcccccccttgcagaacaagaccgcgaaaggcagcctcagcacagagcagtcggagcgggggtgaggggggcagtgtgctcgtgggaatggaaaggacagcaagcacaggtgagactgtggagatgagaaggtggtggacactcgtgatggaatggaaatcgtcctaccgtgcagccacaccctgccctgccccgccccgccccgcccgcgtgcctgcccatgccagcacttccttaagttctcacatcacactcaaaccagtgacaccacaggaaagaaagacccaagacgttggaatggctgtttccatggacacaatctccatagtgacaatgtggggggaggggggaggggtgggatgatggggaaagggtggggggaattaaaagggagggataaatatatatatataaatctatttttagtctggaaagactttgtttaaatgaaaggtgcgctatcccttttgattctgttttaaaattatctcgttaaagatctccaaatttgttccgatgacaagtgaaatttaaatgtgagattgaactgaacaaaccctcatctcatgaaggacggggtgtgtgtgtggcgttgatctttagcctgtctcacaccagttcagaaaacactagacccaggattgaaaaagcaaaccacagcagaaccatccttttgtcattaatttgtctcaaagtgggaaggttttgggggagggggaaatacagggatggtccatgttttcaagagtaggggaatgatgtttaaacacaaaaataaattttttttcatttccagaaacactatttatttatggttttttttttttaattttttctttttgggggtgaaattggcagatgcctgaggtcatagctgtgtcctgggtcactgtggctggtgaggacctcaaggaccccatcaagtgtacacagcagcagcaaaatcaagggatgaccctcctctggggccccctgtcctcagcacattccaggcagctgtgccctgacccacagggacccgtggggatgggaggaggtccaggcctgtgttgccagagctggcagtgtgagctgtaggcagggacggggagggactgtcgctgtgatcagagtgggttaagctgaccaggaacacccatttaacccctttttctttttgctttcatttttataaaggaaaagaggacctgtcagataggcagccccatgctacgtgattctttatgttgtgttgttttgttttgtaaattgtataatttttaaatatctgagttttaaaaaaagaaaaaagtacaaaaaaatcttgttatggccttaagaaggggttagtgcatctttcaggggtcactctgccatggggataaaatagctgtttcacaaacagttttattta

SEQ ID NO: 86635 - DNA, 1556 bp, Homo sapiens
tgaatgtctcctgtttgtcggtcaggactgactctgccttttctttccttttccatgtgccactcctgtcctccctttgccctccctgatttctgcactgtcctctcccacctgtctgtctcctcttggttttgcccgtgtcagcctccccttccgtgccctctcccccccttgcagaacaagaccgcgaaaggcagcctcagcacagagcagtcggagcgggggtgaggggggcagtgtgctcgtgggaatggaaaggacagcaagcacaggtgagactgtggagatgagaaggtggtggacactcgtgatggaatggaaatcgtcctaccgtgcagccacaccctgccctgccccgccccgccccgcccgcgtgcctgcccatgccagcacttccttaagttctcacatcacactcaaaccagtgacaccacaggaaagaaagacccaagacgttggaatggctgtttccatggacacaatctccatagtgacaatgtggggggaggggggaggggtgggatgatggggaaagggtggggggaattaaaagggagggataaatatatatatataaatctatttttagtctggaaagactttgtttaaatgaaaggtgcgctatcccttttgattctgttttaaaattatctcgttaaagatctccaaatttgttccgatgacaagtgaaatttaaatgtgagattgaactgaacaaaccctcatctcatgaaggacggggtgtgtgtgtggcgttgatctttagcctgtctcacaccagttcagaaaacactagacccaggattgaaaaagcaaaccacagcagaaccatccttttgtcattaatttgtctcaaagtgggaaggttttgggggagggggaaatacagggatggtccatgttttcaagagtaggggaatgatgtttaaacacaaaaataaattttttttcatttccagaaacactatttatttatggttttttttttttaattttttctttttgggggtgaaattggcagatgcctgaggtcatagctgtgtcctgggtcactgtggctggtgaggacctcaaggaccccatcaagtgtacacagcagcagcaaaatcaagggatgaccctcctctggggccccctgtcctcagcacattccaggcagctgtgccctgacccacagggacccgtggggatgggaggaggtccaggcctgtgttgccagagctggcagtgtgagctgtaggcagggacggggagggactgtcgctgtgatcagagtgggttaagctgaccaggaacacccatttaacccctttttctttttgctttcatttttataaaggaaaagaggacctgtcagataggcagccccatgctacgtgattctttatgttgtgttgttttgttttgtaaattgtataatttttaaatatctgagttttaaaaaaagaaaaaagtacaaaaaaatcttgttatggccttaagaaggggttagtgcatctttcaggggtcactctgccatggggataaaatagctgtttcacaaacagttttattta

SEQ ID NO: 86636 - DNA, 5642 bp, Homo sapiens
ttcatctgggcctctgattcatctttattccctccatcatctagacttgattttatttgtaccaaggagatgcgtgtctaatgtttttctttcttctatttctaggagggctgttggcctgctgctgtgctgctgaacagtatgcagtcctttcgggagcaaagcagttaccacggaaaccagcaaagctacccacaggaggtacacggctcatcccggctagaagagttcagccctcgtcaggcccagatgttccagaattttggaggtacaggtggcagtagtggcagcagtggcagtggcagtggtggtggacgacgaggagcagcagctgctgcggcagcgatggctagcgagacctctggccatcaaggttaccagggtttcaggaaagaggctggagatttttactacatggcaggcaacaaagaccccgtgactacaggaaccccacagcctcctcagcgaaggccttctgggcctgtgcagagctatggacccccccaggggagcagctttggcaatcagtatgggagtgagggtcatgtgggccagtttcaagcacagcactctggccttggcggtgtgtcacattatcagcaggattacactgggcctttctctccagggagtgctcagtaccaacagcaggcttccagccagcagcagcagcagcaagtccagcagttgagacaacagctttaccagtcccatcagcccctgccacaggccactggccaaccagcatccagctcatcccatctacagccaatgcagcggccctcaactctgccatcctctgctgctggttaccagttaagagtgggtcagtttggccaacactatcagtcttctgcttcctcctcctcctcctcctccttcccttcaccacagcgttttagccagtctggacagagctatgatggcagttacaatgtgaatgctggatctcagtatgaaggacacaatgtgggttctaatgcacaggcttatggaacacaatccaattacagctatcagcctcaatctatgaagaattttgaacaggcaaagattccacaagggacccaacaggggcagcagcagcagcaaccgcagcaacaacaacacccttctcagcatgtgatgcagtatactaacgctgccaccaagctgcccctgcaaagccaagtggggcagtacaaccagcctgaggttcctgtgaggtcccccatgcagtttcaccagaacttcagccccatttctaacccttctccagctgcctctgtggttcagtctccaagctgtagttctaccccatctcctctcatgcagactggggagaatctccagtgtgggcaaggcagtgtgcctatgggttccagaaacagaattttacagttaatgcctcaactcagtccaaccccatcaatgatgcccagtcctaattctcatgctgcaggcttcaaagggtttggactagaaggggtaccagaaaagcgactgacagatcctgggttgagtagtttgagtgctctgagtactcaagtggccaatcttcctaacactgtccagcacatgttactttctgatgccctgactcctcagaagaagacctccaagaggccctcatcttccaagaaagcagatagctgcacaaattctgaaggctcctcacaacctgaagaacagctgaagtcccctatggcagagtcattagatggaggctgctccagcagttcagaggatcaaggcgagagagtgcggcaactaagtggccagagcaccagctctgacaccacctacaagggtggagcctctgagaaagctggctcctcaccggcacaaggtgctcagaatgaaccccccagactcaatgctagtcctgccgcaagagaagaggccacctcaccaggcgctaaggacatgccattgtcatccgacgggaacccaaaggttaatgagaagactgttggggtgattgtctcccgggaagccatgacaggtcgggtagaaaagcctggtggacaagataaaggctcccaagaggatgatcctgcagccactcaaaggccacctagcaatggtggggcaaaggaaaccagtcatgcatcacttccccagccagagcctccaggaggaggagggagcaaaggaaacaagaatggcgataacaactccaaccataatggagaaggaaatggccagagtggccactctgcagcgggccctggttttacgagcagaactgagcctagcaaatctcctggaagtctgcgctatagttacaaagatagtttcgggtcagccgtgccacgaaatgtcagtggctttcctcagtatcctacagggcaagaaaagggagatttcactggccatggggaacgaaagggtagaaatgaaaaattcccaagcctcctgcaggaagtgcttcagggttaccaccaccaccctgacaggagatattctaggagtactcaagagcatcaggggatggctggtagcctagaaggaaccacaaggcccaatgtcttggttagtcaaaccaatgaattagctagcaggggccttctgaacaaaagcattgggtctctattagaaaatccccactggggcccctgggaaaggaaatcaagcagcacagctcctgaaatgaaacagatcaatttgactgactatccaattcccagaaagtttgaaatagagcctcagtcatcagcacatgagcctgggggttccctctctgaaagaagatcagtgatctgtgatatttctccactaagacagattgtcagggacccaggggctcactcactgggacacatgagtgccgacaccagaattgggaggaatgaccgtctcaatccaactttaagtcagtcggtcattcttcctggtggtttggtgtccatggaaaccaagctgaaatcccagagcgggcagataaaagaggaagactttgaacagtctaaatctcaagctagtttcaacaacaagaaatctggagaccactgccatcctcctagcatcaagcatgagtcttaccgcggcaatgccagccctggagcagcaacccatgattccctttcagactatggcccgcaagacagcagacccacgccaatgcggcgggtccctggcagagttggtggtcgggagggcatgaggggtcggtccccttctcaatatcatgactttgcagaaaaattgaaaatgtctcctgggcggagcagaggcccagggggagaccctcatcacatgaatccacacatgaccttttcagagagggctaaccggagttctttacacactcccttttctcccaactcagaaaccctggcctctgcttatcatgcaaatactcgggctcatgcttatggggaccctaacgcaggtttgaattctcagctgcattataagagacagatgtaccaacagcaaccagaggagtataaagactggagcagcggttctgctcagggagtaattgctgcagcacagcacaggcaggaggggccacggaagagtccaaggcagcagcagtttcttgacagagtacggagccctctgaaaaatgacaaagatggtatgatgtatggcccaccagtggggacttaccatgaccccagtgcccaggaggctgggcgctgcctaatgtctagtgatggtctgcctaacaagggcatggaattaaagcatggctcccagaagttacaagaatcctgttgggatctttctcggcaaacttctccagccaaaagcagcggtcctccaggaatgtccagtcaaaaaaggtatgggccgccccatgagactgatggacatggactagctgaggctacacagtcatccaaacctggtagtgttatgctgagacttccaggccaggaggatcattcttctcaaaaccccttaatcatgaggaggcgtgttcgttcttttatctctcccattcccagtaagagacagtcacaagatgtaaagaacagtagcactgaagataaaggtcgcctccttcactcatcaaaagaaggcgctgataaagcattcaattcctatgcccatctttctcacagtcaggatatcaagtctatccctaagagagattcctccaaggaccttccaagtccagatagtagaaactgccctgctgttaccctcacaagccctgctaagaccaaaatactgcccccacggaaaggacggggattgaaattggaagctatagttcagaagattacatccccaaatattaggaggagcgcatcttcgaacagtgcggaggctgggggagacacggttacgcttgatgatatactgtctttgaagagtggtcctcctgaaggtgggagtgttgctgttcaggatgctgacatagagaagagaaaaggtgaggtggcttcggacctagtcagtccagcaaaccaggagttgcacgtagagaaacctcttccaaggtcttcagaagagtggcgtggcagcgtggatgacaaagtgaagacagagacacatgcagaaacagttactgccggaaaggaaccccctggtgccatgacatccacaacctcacagaagcctggtagtaaccaagggagaccagatggttccctgggtggaacagcacctttaatctttccagactcaaagaatgtacctccagtgggcatattggcccctgaggcaaaccccaaggctgaagagaaggagaacgatacagtgacgatttcaccgaagcaagagggtttccctccaaagggatatttcccatcaggaaagaagaaggggagacccattggtagtgtgaataagcaaaagaaacagcagcagccaccgcctccaccccctcagcccccacagataccagaaggttctgcagatggagagccaaagccaaaaaaacagaggcaaaggagggagagaaggaagcctggggcccagccgaggaagcgaaaaaccaaacaagcagttcccattgtggaaccccaagaacctgagatcaaactaaaatatgccacccagccactggataaaactgatgccaagaacaagtctttttacccttacatccatgtagtaaataagtgtgaacttggagccgtttgtacaatcatcaatgctgaggaagaagaacagaccaaattagtgaggggcaggaagggtcagaggtcactgacccctccacctagcagcactgaaagcaaggcgctcccggcctcgtcctttatgctgcagggacctgttgtgacagagtcttcggttatggggcacctggtttgctgtctgtgtggcaagtgggccagttaccggaacatgggtgacctctttggacctttttatccccaagattatgcagccactctcccgaagaatccacctcctaagagggccacagaaatgcagaacacccatttaacccctttttctttttgctttcatttttataaaggaaaagaggacctgtcagataggcagccccatgctacgtgattctttatgttgtgttgttttgttttgtaaattgtataatttttaaatatctgagttttaaaaaaagaaaaaagtacaaaaaaatcttgttatggccttaagaaggggttagtgcatctttcaggggtcactctgccatggggataaaatagctgtttcacaaacagttttattta

SEQ ID NO: 86637 - DNA, 545 bp, Homo sapiens
  misc_feature (41)..(42): n is a, c, g, or t
  misc_feature (459)..(459): n is a, c, g, or t
  misc_feature (492)..(492): n is a, c, g, or t
aggtagatctagaggatcccaagtacccacctgcactgtcnnaggggctcccttgtaaaaaagcagccactgagggcagcagtgaaaagactgttttggactcgaagccctccgtgcccaccacttcagaaggtggccctgagctggagttacaaatccctgaactacctcttgacagcaatgaattttgggtccatgagggttgtattctctgggccaatggaatctacctggtttgtggcaggctctatggcctgcaggaagcgctggaaatagccagagagatgaaatgttcccactgccaggaggcaggcgccaccttgggctgctacaacaaaggctgctccttccgataccattacccgtgtgccattgatgcaggacctttctacgagaaaataaaccttgtataaagtataccggacactacttcataaccactttactctactccttctnccggggatgtgggggggtggatcgattctgtgngggacacactggcactgcagtagggaagctgttgacgcttgcaggtgggtact

SEQ ID NO: 86638 - DNA, 5400 bp, Homo sapiens
cgtataatgaacgcccgcgatactctatgctcttcccgtgcgcgcgagactaggctagctctacctcgaggcgctcatgacgtgcctctgtcatcctactcgaacctccacgttaatgaaactactgtcgtggtaattgtctcccgggcatcctttaccggtcttgtgtcttagaacccctctcgcgataaaggctcccaagaggatgatcctgcagccactcaaaggccacctagcaatggtggggcaaaggaaaccagtcatgcatcacttccccagccagagcctccaggaggaggagggagcaaaggaaacaagaatggcgataacaactccaaccataatggagaaggaaatggccagagtggccactctgcagcgggccctggttttacgagcagaactgagcctagcaaatctcctggaagtctgcgctatagttacaaagatagtttcgggtcagccgtgccacgaaatgtcagtggctttcctcagtatcctacagggcaagaaaagggagatttcactggccatggggaacgaaagggtagaaatgaaaaattcccaagcctcctgcaggaagtgcttcagggttaccaccaccaccctgacaggagatattctaggagtactcaagagcatcaggggatggctggtagcctagaaggaaccacaaggcccaatgtcttggttagtcaaaccaatgaattagctagcaggggccttctgaacaaaagcattgggtctctattagaaaatccccactggggcccctgggaaaggaaatcaagcagcacagctcctgaaatgaaacagatcaatttgactgactatccaattcccagaaagtttgaaatagagcctcagtcatcagcacatgagcctgggggttccctctctgaaagaagatcagtgatctgtgatatttctccactaagacagattgtcagggacccaggggctcactcactgggacacatgagtgccgacaccagaattgggaggaatgaccgtctcaatccaactttaagtcagtcggtcattcttcctggtggtttggtgtccatggaaaccaagctgaaatcccagagcgggcagataaaagaggaagactttgaacagtctaaatctcaagctagtttcaacaacaagaaatctggagaccactgccatcctcctagcatcaagcatgagtcttaccgcggcaatgccagccctggagcagcaacccatgattccctttcagactatggcccgcaagacagcagacccacgccaatgcggcgggtccctggcagagttggtggtcgggagggcatgaggggtcggtccccttctcaatatcatgactttgcagaaaaattgaaaatgtctcctgggcggagcagaggcccagggggagaccctcatcacatgaatccacacatgaccttttcagagagggctaaccggagttctttacacactcccttttctcccaactcagaaaccctggcctctgcttatcatgcaaatactcgggctcatgcttatggggaccctaacgcaggtttgaattctcagctgcattataagagacagatgtaccaacagcaaccagaggagtataaagactggagcagcggttctgctcagggagtaattgctgcagcacagcacaggcaggaggggccacggaagagtccaaggcagcagcagtttcttgacagagtacggagccctctgaaaaatgacaaagatggtatgatgtatggcccaccagtggggacttaccatgaccccagtgcccaggaggctgggcgctgcctaatgtctagtgatggtctgcctaacaagggcatggaattaaagcatggctcccagaagttacaagaatcctgttgggatctttctcggcaaacttctccagccaaaagcagcggtcctccaggaatgtccagtcaaaaaaggtatgggccgccccatgagactgatggacatggactagctgaggctacacagtcatccaaacctggtagtgttatgctgagacttccaggccaggaggatcattcttctcaaaaccccttaatcatgaggaggcgtgttcgttcttttatctctcccattcccagtaagagacagtcacaagatgtaaagaacagtagcactgaagataaaggtcgcctccttcactcatcaaaagaaggcgctgataaagcattcaattcctatgcccatctttctcacagtcaggatatcaagtctatccctaagagagattcctccaaggaccttccaagtccagatagtagaaactgccctgctgttaccctcacaagccctgctaagaccaaaatactgcccccacggaaaggacggggattgaaattggaagctatagttcagaagattacatccccaaatattaggaggagcgcatcttcgaacagtgcggaggctgggggagacacggttacgcttgatgatatactgtctttgaagagtggtcctcctgaaggtgggagtgttgctgttcaggatgctgacatagagaagagaaaaggtgaggtggcttcggacctagtcagtccagcaaaccaggagttgcacgtagagaaacctcttccaaggtcttcagaagagtggcgtggcagcgtggatgacaaagtgaagacagagacacatgcagaaacagttactgccggaaaggaaccccctggtgccatgacatccacaacctcacagaagcctggtagtaaccaagggagaccagatggttccctgggtggaacagcacctttaatctttccagactcaaagaatgtacctccagtgggcatattggcccctgaggcaaaccccaaggctgaagagaaggagaacgatacagtgacgatttcaccgaagcaagagggtttccctccaaagggatatttcccatcaggaaagaagaaggggagacccattggtagtgtgaataagcaaaagaaacagcagcagccaccgcctccaccccctcagcccccacagataccagaaggttctgcagatggagagccaaagccaaaaaaacagaggcaaaggagggagagaaggaagcctggggcccagccgaggaagcgaaaaaccaaacaagcagttcccattgtggaaccccaagaacctgagatcaaactaaaatatgccacccagccactggataaaactgatgccaagaacaagtctttttacccttacatccatgtagtaaataagtgtgaacttggagccgtttgtacaatcatcaatgctgaggaagaagaacagaccaaattagtgaggggcaggaagggtcagaggtcactgacccctccacctagcagcactgaaagcaaggcgctcccggcctcgtcctttatgctgcagggacctgttgtgacagagtcttcggttatggggcacctggtttgctgtctgtgtggcaagtgggccagttaccggaacatgggtgacctctttggacctttttatccccaagattatgcagccactctcccgaagaatccacctcctaagagggccacagaaatgcagagcaaagttaaggtacggcacaaaagtgcttctaatggctccaagacggacactgaggaggaggaagagcagcagcagcagcagaaggagcagagaagcctggccgcacaccccaggtttaagcggcgccaccgctcggaagactgtggtggaggccctcggtccctgtccagggggctcccttgtaaaaaagcagccactgagggcagcagtgaaaagactgttttggactcgaagccctccgtgcccaccacttcagaaggtggccctgagctggagttacaaatccctgaactacctcttgacagcaatgaattttgggtccatgagggttgtattctctgggccaatggaatctacctggtttgtggcaggctctatggcctgcaggaagcgctggaaatagccagagagatgaaatgttcccactgccaggaggcaggcgccaccttgggctgctacaacaaaggctgctccttccgataccattacccgtgtgccattgatgcagattgtttgctacatgaggagaacttctcggtgaggtgccctaagcacaaggtgagactgtggagatgagaaggtggtggacactcgtgatggaatggaaatcgtcctaccgtgcagccacaccctgccctgccccgccccgccccgcccgcgtgcctgcccatgccagcacttccttaagttctcacatcacactcaaaccagtgacaccacaggaaagaaagacccaagacgttggaatggctgtttccatggacacaatctccatagtgacaatgtggggggaggggggaggggtgggatgatggggaaagggtggggggaattaaaagggagggataaatatatatatataaatctatttttagtctggaaagactttgtttaaatgaaaggtgcgctatcccttttgattctgttttaaaattatctcgttaaagatctccaaatttgttccgatgacaagtgaaatttaaatgtgagattgaactgaacaaaccctcatctcatgaaggacggggtgtgtgtgtggcgttgatctttagcctgtctcacaccagttcagaaaacactagacccaggattgaaaaagcaaaccacagcagaaccatccttttgtcattaatttgtctcaaagtgggaaggttttgggggagggggaaatacagggatggtccatgttttcaagagtaggggaatgatgtttaaacacaaaaataaattttttttcatttccagaaacactatttatttatggttttttttttttaattttttctttttgggggtgaaattggcagatgcctgaggtcatagctgtgtcctgggtcactgtggctggtgaggacctcaaggaccccatcaagtgtacacagcagcagcaaaatcaagggatgaccctcctctggggccccctgtcctcagcacattccaggcagctgtgccctgacccacagggacccgtggggatgggaggaggtccaggcctgtgttgccagagctggcagtgtgagctgtaggcagggacggggagggactgtcgctgtgatcagagtgggttaagctgaccaggaacacccatttaacccctttttctttttgctttcatttttataaaggaaaagaggacctgtcagataggcagccccatgctacgtgattctttatgttgtgttgttttgttttgtaaattgtataatttttaaatatctgagttttaaaaaaagaaaaaagtacaaaaaaatcttgttatggccttaagaaggggttagtgcatctttcaggggtcactctgccatggggataaaatagctgtttcacaaacagttttattta

SEQ ID NO: 86639 - DNA, 7286 bp, Homo sapiens
ttcatctgggcctctgattcatctttattccctccatcatctagacttgattttatttgtaccaaggagatgcgtgtctaatgtttttctttcttctatttctaggagggctgttggcctgctgctgtgctgctgaacagtatgcagtcctttcgggagcaaagcagttaccacggaaaccagcaaagctacccacaggaggtacacggctcatcccggctagaagagttcagccctcgtcaggcccagatgttccagaattttggaggtacaggtggcagtagtggcagcagtggcagtggcagtggtggtggacgacgaggagcagcagctgctgcggcagcgatggctagcgagacctctggccatcaaggttaccagggtttcaggaaagaggctggagatttttactacatggcaggcaacaaagaccccgtgactacaggaaccccacagcctcctcagcgaaggccttctgggcctgtgcagagctatggacccccccaggggagcagctttggcaatcagtatgggagtgagggtcatgtgggccagtttcaagcacagcactctggccttggcggtgtgtcacattatcagcaggattacactgggcctttctctccagggagtgctcagtaccaacagcaggcttccagccagcagcagcagcagcaagtccagcagttgagacaacagctttaccagtcccatcagcccctgccacaggccactggccaaccagcatccagctcatcccatctacagccaatgcagcggccctcaactctgccatcctctgctgctggttaccagttaagagtgggtcagtttggccaacactatcagtcttctgcttcctcctcctcctcctcctccttcccttcaccacagcgttttagccagtctggacagagctatgatggcagttacaatgtgaatgctggatctcagtatgaaggacacaatgtgggttctaatgcacaggcttatggaacacaatccaattacagctatcagcctcaatctatgaagaattttgaacaggcaaagattccacaagggacccaacaggggcagcagcagcagcaaccgcagcaacaacaacacccttctcagcatgtgatgcagtatactaacgctgccaccaagctgcccctgcaaagccaagtggggcagtacaaccagcctgaggttcctgtgaggtcccccatgcagtttcaccagaacttcagccccatttctaacccttctccagctgcctctgtggttcagtctccaagctgtagttctaccccatctcctctcatgcagactggggagaatctccagtgtgggcaaggcagtgtgcctatgggttccagaaacagaattttacagttaatgcctcaactcagtccaaccccatcaatgatgcccagtcctaattctcatgctgcaggcttcaaagggtttggactagaaggggtaccagaaaagcgactgacagatcctgggttgagtagtttgagtgctctgagtactcaagtggccaatcttcctaacactgtccagcacatgttactttctgatgccctgactcctcagaagaagacctccaagaggccctcatcttccaagaaagcagatagctgcacaaattctgaaggctcctcacaacctgaagaacagctgaagtcccctatggcagagtcattagatggaggctgctccagcagttcagaggatcaaggcgagagagtgcggcaactaagtggccagagcaccagctctgacaccacctacaagggtggagcctctgagaaagctggctcctcaccggcacaaggtgctcagaatgaaccccccagactcaatgctagtcctgccgcaagagaagaggccacctcaccaggcgctaaggacatgccattgtcatccgacgggaacccaaaggttaatgagaagactgttggggtgattgtctcccgggaagccatgacaggtcgggtagaaaagcctggtggacaagataaaggctcccaagaggatgatcctgcagccactcaaaggccacctagcaatggtggggcaaaggaaaccagtcatgcatcacttccccagccagagcctccaggaggaggagggagcaaaggaaacaagaatggcgataacaactccaaccataatggagaaggaaatggccagagtggccactctgcagcgggccctggttttacgagcagaactgagcctagcaaatctcctggaagtctgcgctatagttacaaagatagtttcgggtcagccgtgccacgaaatgtcagtggctttcctcagtatcctacagggcaagaaaagggagatttcactggccatggggaacgaaagggtagaaatgaaaaattcccaagcctcctgcaggaagtgcttcagggttaccaccaccaccctgacaggagatattctaggagtactcaagagcatcaggggatggctggtagcctagaaggaaccacaaggcccaatgtcttggttagtcaaaccaatgaattagctagcaggggccttctgaacaaaagcattgggtctctattagaaaatccccactggggcccctgggaaaggaaatcaagcagcacagctcctgaaatgaaacagatcaatttgactgactatccaattcccagaaagtttgaaatagagcctcagtcatcagcacatgagcctgggggttccctctctgaaagaagatcagtgatctgtgatatttctccactaagacagattgtcagggacccaggggctcactcactgggacacatgagtgccgacaccagaattgggaggaatgaccgtctcaatccaactttaagtcagtcggtcattcttcctggtggtttggtgtccatggaaaccaagctgaaatcccagagcgggcagataaaagaggaagactttgaacagtctaaatctcaagctagtttcaacaacaagaaatctggagaccactgccatcctcctagcatcaagcatgagtcttaccgcggcaatgccagccctggagcagcaacccatgattccctttcagactatggcccgcaagacagcagacccacgccaatgcggcgggtccctggcagagttggtggtcgggagggcatgaggggtcggtccccttctcaatatcatgactttgcagaaaaattgaaaatgtctcctgggcggagcagaggcccagggggagaccctcatcacatgaatccacacatgaccttttcagagagggctaaccggagttctttacacactcccttttctcccaactcagaaaccctggcctctgcttatcatgcaaatactcgggctcatgcttatggggaccctaacgcaggtttgaattctcagctgcattataagagacagatgtaccaacagcaaccagaggagtataaagactggagcagcggttctgctcagggagtaattgctgcagcacagcacaggcaggaggggccacggaagagtccaaggcagcagcagtttcttgacagagtacggagccctctgaaaaatgacaaagatggtatgatgtatggcccaccagtggggacttaccatgaccccagtgcccaggaggctgggcgctgcctaatgtctagtgatggtctgcctaacaagggcatggaattaaagcatggctcccagaagttacaagaatcctgttgggatctttctcggcaaacttctccagccaaaagcagcggtcctccaggaatgtccagtcaaaaaaggtatgggccgccccatgagactgatggacatggactagctgaggctacacagtcatccaaacctggtagtgttatgctgagacttccaggccaggaggatcattcttctcaaaaccccttaatcatgaggaggcgtgttcgttcttttatctctcccattcccagtaagagacagtcacaagatgtaaagaacagtagcactgaagataaaggtcgcctccttcactcatcaaaagaaggcgctgataaagcattcaattcctatgcccatctttctcacagtcaggatatcaagtctatccctaagagagattcctccaaggaccttccaagtccagatagtagaaactgccctgctgttaccctcacaagccctgctaagaccaaaatactgcccccacggaaaggacggggattgaaattggaagctatagttcagaagattacatccccaaatattaggaggagcgcatcttcgaacagtgcggaggctgggggagacacggttacgcttgatgatatactgtctttgaagagtggtcctcctgaaggtgggagtgttgctgttcaggatgctgacatagagaagagaaaaggtgaggtggcttcggacctagtcagtccagcaaaccaggagttgcacgtagagaaacctcttccaaggtcttcagaagagtggcgtggcagcgtggatgacaaagtgaagacagagacacatgcagaaacagttactgccggaaaggaaccccctggtgccatgacatccacaacctcacagaagcctggtagtaaccaagggagaccagatggttccctgggtggaacagcacctttaatctttccagactcaaagaatgtacctccagtgggcatattggcccctgaggcaaaccccaaggctgaagagaaggagaacgatacagtgacgatttcaccgaagcaagagggtttccctccaaagggatatttcccatcaggaaagaagaaggggagacccattggtagtgtgaataagcaaaagaaacagcagcagccaccgcctccaccccctcagcccccacagataccagaaggttctgcagatggagagccaaagccaaaaaaacagaggcaaaggagggagagaaggaagcctggggcccagccgaggaagcgaaaaaccaaacaagcagttcccattgtggaaccccaagaacctgagatcaaactaaaatatgccacccagccactggataaaactgatgccaagaacaagtctttttacccttacatccatgtagtaaataagtgtgaacttggagccgtttgtacaatcatcaatgctgaggaagaagaacagaccaaattagtgaggggcaggaagggtcagaggtcactgacccctccacctagcagcactgaaagcaaggcgctcccggcctcgtcctttatgctgcagggacctgttgtgacagagtcttcggttatggggcacctggtttgctgtctgtgtggcaagtgggccagttaccggaacatgggtgacctctttggacctttttatccccaagattatgcagccactctcccgaagaatccacctcctaagagggccacagaaatgcagagcaaagttaaggtacggcacaaaagtgcttctaatggctccaagacggacactgaggaggaggaagagcagcagcagcagcagaaggagcagagaagcctggccgcacaccccaggtttaagcggcgccaccgctcggaagactgtggtggaggccctcggtccctgtccagggggctcccttgtaaaaaagcagccactgagggcagcagtgaaaagactgttttggactcgaagccctccgtgcccaccacttcagaaggtggccctgagctggagttacaaatccctgaactacctcttgacagcaatgaattttgggtccatgagggttgtattctctgggccaatggaatctacctggtttgtggcaggctctatggcctgcaggaagcgctggaaatagccagagagatgaaatgttcccactgccaggaggcaggcgccaccttgggctgctacaacaaaggctgctccttccgataccattacccgtgtgccattgatgcagattgtttgctacatgaggagaacttctcggtgaggtgccctaagcacaaggtgagactgtggagatgagaaggtggtggacactcgtgatggaatggaaatcgtcctaccgtgcagccacaccctgccctgccccgccccgccccgcccgcgtgcctgcccatgccagcacttccttaagttctcacatcacactcaaaccagtgacaccacaggaaagaaagacccaagacgttggaatggctgtttccatggacacaatctccatagtgacaatgtggggggaggggggaggggtgggatgatggggaaagggtggggggaattaaaagggagggataaatatatatatataaatctatttttagtctggaaagactttgtttaaatgaaaggtgcgctatcccttttgattctgttttaaaattatctcgttaaagatctccaaatttgttccgatgacaagtgaaatttaaatgtgagattgaactgaacaaaccctcatctcatgaaggacggggtgtgtgtgtggcgttgatctttagcctgtctcacaccagttcagaaaacactagacccaggattgaaaaagcaaaccacagcagaaccatccttttgtcattaatttgtctcaaagtgggaaggttttgggggagggggaaatacagggatggtccatgttttcaagagtaggggaatgatgtttaaacacaaaaataaattttttttcatttccagaaacactatttatttatggttttttttttttaattttttctttttgggggtgaaattggcagatgcctgaggtcatagctgtgtcctgggtcactgtggctggtgaggacctcaaggaccccatcaagtgtacacagcagcagcaaaatcaagggatgaccctcctctggggccccctgtcctcagcacattccaggcagctgtgccctgacccacagggacccgtggggatgggaggaggtccaggcctgtgttgccagagctggcagtgtgagctgtaggcagggacggggagggactgtcgctgtgatcagagtgggttaagctgaccaggaacacccatttaacccctttttctttttgctttcatttttataaaggaaaagaggacctgtcagataggcagccccatgctacgtgattctttatgttgtgttgttttgttttgtaaattgtataatttttaaatatctgagttttaaaaaaagaaaaaagtacaaaaaaatcttgttatggccttaagaaggggttagtgcatctttcaggggtcactctgccatggggataaaatagctgtttcacaaacagttttatttaaaaaaacaaaaaacaaaaaaaatcaaaaaatcaaaaaaataataaacttcattttaaccttg

SEQ ID NO: 86640 - DNA, 6805 bp, Homo sapiens
ttcatctgggcctctgattcatctttattccctccatcatctagacttgattttatttgtaccaaggagatgcgtgtctaatgtttttctttcttctatttctaggagggctgttggcctgctgctgtgctgctgaacagtatgcagtcctttcgggagcaaagcagttaccacggaaaccagcaaagctacccacaggaggtacacggctcatcccggctagaagagttcagccctcgtcaggcccagatgttccagaattttggaggtacaggtggcagtagtggcagcagtggcagtggcagtggtggtggacgacgaggagcagcagctgctgcggcagcgatggctagcgagacctctggccatcaaggttaccagggtttcaggaaagaggctggagatttttactacatggcaggcaacaaagaccccgtgactacaggaaccccacagcctcctcagcgaaggccttctgggcctgtgcagagctatggacccccccaggggagcagctttggcaatcagtatgggagtgagggtcatgtgggccagtttcaagcacagcactctggccttggcggtgtgtcacattatcagcaggattacactgggcctttctctccagggagtgctcagtaccaacagcaggcttccagccagcagcagcagcagcaagtccagcagttgagacaacagctttaccagtcccatcagcccctgccacaggccactggccaaccagcatccagctcatcccatctacagccaatgcagcggccctcaactctgccatcctctgctgctggttaccagttaagagtgggtcagtttggccaacactatcagtcttctgcttcctcctcctcctcctcctccttcccttcaccacagcgttttagccagtctggacagagctatgatggcagttacaatgtgaatgctggatctcagtatgaaggacacaatgtgggttctaatgcacaggcttatggaacacaatccaattacagctatcagcctcaatctatgaagaattttgaacaggcaaagattccacaagggacccaacaggggcagcagcagcagcaaccgcagcaacaacaacacccttctcagcatgtgatgcagtatactaacgctgccaccaagctgcccctgcaaagccaagtggggcagtacaaccagcctgaggttcctgtgaggtcccccatgcagtttcaccagaacttcagccccatttctaacccttctccagctgcctctgtggttcagtctccaagctgtagttctaccccatctcctctcatgcagactggggagaatctccagtgtgggcaaggcagtgtgcctatgggttccagaaacagaattttacagttaatgcctcaactcagtccaaccccatcaatgatgcccagtcctaattctcatgctgcaggcttcaaagggtttggactagaaggggtaccagaaaagcgactgacagatcctgggttgagtagtttgagtgctctgagtactcaagtggccaatcttcctaacactgtccagcacatgttactttctgatgccctgactcctcagaagaagacctccaagaggccctcatcttccaagaaagcagatagctgcacaaattctgaaggctcctcacaacctgaagaacagctgaagtcccctatggcagagtcattagatggaggctgctccagcagttcagaggatcaaggcgagagagtgcggcaactaagtggccagagcaccagctctgacaccacctacaagggtggagcctctgagaaagctggctcctcaccggcacaaggtgctcagaatgaaccccccagactcaatgctagtcctgccgcaagagaagaggccacctcaccaggcgctaaggacatgccattgtcatccgacgggaacccaaaggttaatgagaagactgttggggtgattgtctcccgggaagccatgacaggtcgggtagaaaagcctggtggacaagataaaggctcccaagaggatgatcctgcagccactcaaaggccacctagcaatggtggggcaaaggaaaccagtcatgcatcacttccccagccagagcctccaggaggaggagggagcaaaggaaacaagaatggcgataacaactccaaccataatggagaaggaaatggccagagtggccactctgcagcgggccctggttttacgagcagaactgagcctagcaaatctcctggaagtctgcgctatagttacaaagatagtttcgggtcagccgtgccacgaaatgtcagtggctttcctcagtatcctacagggcaagaaaagggagatttcactggccatggggaacgaaagggtagaaatgaaaaattcccaagcctcctgcaggaagtgcttcagggttaccaccaccaccctgacaggagatattctaggagtactcaagagcatcaggggatggctggtagcctagaaggaaccacaaggcccaatgtcttggttagtcaaaccaatgaattagctagcaggggccttctgaacaaaagcattgggtctctattagaaaatccccactggggcccctgggaaaggaaatcaagcagcacagctcctgaaatgaaacagatcaatttgactgactatccaattcccagaaagtttgaaatagagcctcagtcatcagcacatgagcctgggggttccctctctgaaagaagatcagtgatctgtgatatttctccactaagacagattgtcagggacccaggggctcactcactgggacacatgagtgccgacaccagaattgggaggaatgaccgtctcaatccaactttaagtcagtcggtcattcttcctggtggtttggtgtccatggaaaccaagctgaaatcccagagcgggcagataaaagaggaagactttgaacagtctaaatctcaagctagtttcaacaacaagaaatctggagaccactgccatcctcctagcatcaagcatgagtcttaccgcggcaatgccagccctggagcagcaacccatgattccctttcagactatggcccgcaagacagcagacccacgccaatgcggcgggtccctggcagagttggtggtcgggagggcatgaggggtcggtccccttctcaatatcatgactttgcagaaaaattgaaaatgtctcctgggcggagcagaggcccagggggagaccctcatcacatgaatccacacatgaccttttcagagagggctaaccggagttctttacacactcccttttctcccaactcagaaaccctggcctctgcttatcatgcaaatactcgggctcatgcttatggggaccctaacgcaggtttgaattctcagctgcattataagagacagatgtaccaacagcaaccagaggagtataaagactggagcagcggttctgctcagggagtaattgctgcagcacagcacaggcaggaggggccacggaagagtccaaggcagcagcagtttcttgacagagtacggagccctctgaaaaatgacaaagatggtatgatgtatggcccaccagtggggacttaccatgaccccagtgcccaggaggctgggcgctgcctaatgtctagtgatggtctgcctaacaagggcatggaattaaagcatggctcccagaagttacaagaatcctgttgggatctttctcggcaaacttctccagccaaaagcagcggtcctccaggaatgtccagtcaaaaaaggtatgggccgccccatgagactgatggacatggactagctgaggctacacagtcatccaaacctggtagtgttatgctgagacttccaggccaggaggatcattcttctcaaaaccccttaatcatgaggaggcgtgttcgttcttttatctctcccattcccagtaagagacagtcacaagatgtaaagaacagtagcactgaagataaaggtcgcctccttcactcatcaaaagaaggcgctgataaagcattcaattcctatgcccatctttctcacagtcaggatatcaagtctatccctaagagagattcctccaaggaccttccaagtccagatagtagaaactgccctgctgttaccctcacaagccctgctaagaccaaaatactgcccccacggaaaggacggggattgaaattggaagctatagttcagaagattacatccccaaatattaggaggagcgcatcttcgaacagtgcggaggctgggggagacacggttacgcttgatgatatactgtctttgaagagtggtcctcctgaaggtgggagtgttgctgttcaggatgctgacatagagaagagaaaaggtgaggtggcttcggacctagtcagtccagcaaaccaggagttgcacgtagagaaacctcttccaaggtcttcagaagagtggcgtggcagcgtggatgacaaagtgaagacagagacacatgcagaaacagttactgccggaaaggaaccccctggtgccatgacatccacaacctcacagaagcctggtagtaaccaagggagaccagatggttccctgggtggaacagcacctttaatctttccagactcaaagaatgtacctccagtgggcatattggcccctgaggcaaaccccaaggctgaagagaaggagaacgatacagtgacgatttcaccgaagcaagagggtttccctccaaagggatatttcccatcaggaaagaagaaggggagacccattggtagtgtgaataagcaaaagaaacagcagcagccaccgcctccaccccctcagcccccacagataccagaaggttctgcagatggagagccaaagccaaaaaaacagaggcaaaggagggagagaaggaagcctggggcccagccgaggaagcgaaaaaccaaacaagcagttcccattgtggaaccccaagaacctgagatcaaactaaaatatgccacccagccactggataaaactgatgccaagaacaagtctttttacccttacatccatgtagtaaataagtgtgaacttggagccgtttgtacaatcatcaatgctgaggaagaagaacagaccaaattagtgaggggcaggaagggtcagaggtcactgacccctccacctagcagcactgaaagcaaggcgctcccggcctcgtcctttatgctgcagggacctgttgtgacagagtcttcggttatggggcacctggtttgctgtctgtgtggcaagtgggccagttaccggaacatgggtgacctctttggacctttttatccccaagattatgcagccactctcccgaagaatccacctcctaagagggccacagaaatgcagagcaaagttaaggtacggcacaaaagtgcttctaatggctccaagacggacactgaggaggaggaagagcagcagcagcagcagaaggagcagagaagcctggccgcacaccccaggtttaagcggcgccaccgctcggaagactgtggtggaggccctcggtccctgtccagggggctcccttgtaaaaaagcagccactgagggcagcagtgaaaagactgttttggactcgaagccctccgtgcccaccacttcagaaggtggccctgagctggagttacaaatccctgaactacctcttgacagcaatgaattttgggtccatgagggttgtattctctgggccaatggaatctacctggtttgtggcaggctctatggcctgcaggaagcgctggaaatagccagagagatgaaatgttcccactgccaggaggcaggcgccaccttgggctgctacaacaaaggctgctccttccgataccattacccgtgtgccattgatgcagattgtttgctacatgaggagaacttctcggtgaggtgccctaagcacaaggtgagtcagaggccccaagagctaccagcagggatgggatcgagggtggctcctcctgaaagacctgaagaccaggtgttggtgggcctcacccacacctgtccccacctgtgcctccggctgttagtcccctcctggccctgggagggtggaggggcatgatgctgaagggagacccgtggcatgggggccagcactcggagtattatgaggatcccaggagaaatgtgttttgggagagggggtgtttgtctgttcattaagagaggtgagaatatctaactcgatcaagccactgatttccacttgaggtgaatagaaccccaattcacaggttggcgtttggtaagtctggttctaggccttgaggcctgtgcaaaggcatcttcccagactagaagtcgagctgaccacaaggctctggggaagctcagtctcttccaggttgtgcttctgcagaagcagcctgatgcacagtggatgggctgtctcgggctccacttcccagtttatttaggaggtggtctcgtggtcgcttcctttagaaagggtgggaggtaaggggtgaatggtctgtttgtggataccacatatgtgtgtggggagggtgtatatggagaaggagccccaagaaaggatcagaacggagaccactgccacctgatgtttcctgcaggggctgcactgtgtctctggctgaggtcacactgacacctggtggtcactggtcactcgcagtcttaaatctagtagggccgaaagtactagaaggaggttgtccagagaggtctgccctcaaaatgctcctgaaagatgcttgcttatgcttttctttaaaaattatttctggggaagggcggggagt

SEQ ID NO: 86641 - DNA, 1760 bp, Homo sapiens
tacaagttgaaaaaaaaaaaattatcagcactataaaatagtgattacaatccagggcaaaattcccaaaccccatggcttccctcacactgtcttttctaccattttcattatagaatgcttccaatcttttgtgaaattttttattataaaaaatctatttgtatctatcctaaccagttcggggaaatagccagagagatgaaatgttcccactgccaggaggcaggcgccaccttgggctgctacaacaaaggctgctccttccgataccattacccgtgtgccattgatgcagattgtttgctacatgaggagaacttctcggtgaggtgccctaagcacaagcctccccttccgtgccctctcccccccttgcagaacaagaccgcgaaaggcagcctcagcacagagcagtcggagcgggggtgaggggggcagtgtgctcgtgggaatggaaaggacagcaagcacaggtgagactgtggagatgagaaggtggtggacactcgtgatggaatggaaatcgtcctaccgtgcagccacaccctgccctgccccgccccgccccgcccgcgtgcctgcccatgccagcacttccttaagttctcacatcacactcaaaccagtgacaccacaggaaagaaagacccaagacgttggaatggctgtttccatggacacaatctccatagtgacaatgtggggggaggggggaggggtgggatgatggggaaagggtggggggaattaaaagggagggataaatatatatatataaatctatttttagtctggaaagactttgtttaaatgaaaggtgcgctatcccttttgattctgttttaaaattatctcgttaaagatctccaaatttgttccgatgacaagtgaaatttaaatgtgagattgaactgaacaaaccctcatctcatgaaggacggggtgtgtgtgtggcgttgatctttagcctgtctcacaccagttcagaaaacactagacccaggattgaaaaagcaaaccacagcagaaccatccttttgtcattaatttgtctcaaagtgggaaggttttgggggagggggaaatacagggatggtccatgttttcaagagtaggggaatgatgtttaaacacaaaaataaattttttttcatttccagaaacactatttatttatggttttttttttttaattttttctttttgggggtgaaattggcagatgcctgaggtcatagctgtgtcctgggtcactgtggctggtgaggacctcaaggaccccatcaagtgtacacagcagcagcaaaatcaagggatgaccctcctctggggccccctgtcctcagcacattccaggcagctgtgccctgacccacagggacccgtggggatgggaggaggtccaggcctgtgttgccagagctggcagtgtgagctgtaggcagggacggggagggactgtcgctgtgatcagagtgggttaagctgaccaggaacacccatttaacccctttttctttttgctttcatttttataaaggaaaagaggacctgtcagataggcagccccatgctacgtgattctttatgttgtgttgttttgttttgtaaattgtataatttttaaatatctgagttttaaaaaaagaaaaaagtacaaaaaaatcttgttatggccttaagaaggggttagtgcatctttcaggggtcactctgccatggggataaaatagctgtttcacaaacagttttattta

SEQ ID NO: 86642 - DNA, 1772 bp, Homo sapiens
  misc_feature (5)..(7): n is a, c, g, or t
ggacnnngcccttaactgcttgggaaatgtgacctttgctctggggggcctggccctgcaggccccaaccttccctcatctctggcggccctcttgggcctctgacccagcccctccccgggccaggctcacagaagctggcttctgggactgtcctgggcccaagtgggcacctgcgccagccccacctgtgcctgggctgtggccccttcctacagggcgctcaccatggccccgccgctcctgctgctgctgctggccagtggagcggccgcctgcccgctgccctgcgtctgccagaacctgtccgagtcgctcagcaccctctgtgcccaccgaggcctgctgtttgtgccgcccaacgtggaccggcgcacagtggagctgcggctggctgacaacttcatccaggccctggggccccctgacttccgcaacatgacgggactggtggacctgacactgtctcgcaatgccatcacccgcattggggcccgcgcctttggggacctcgagagcctgcgttccctccaccttgacggcaacaggctggtggagctgggcaccgggagcctccggggccccgtcaatctgcagcacctcatcctcagcggcaaccagctgggccgcatcgcgccgggagccttcgacgacttcctagagagcctggaggacctggacctgtcctacaacaacctccggcaggtgccctgggccggcatcggcgccatgcctgccctgcacaccctcaacctggaccataaccttattgacgcactgcccccaggcgccttcgcccagctcggtcagctctcccgcctggacctcacctccaaccgcctggccacgctggctccggacccgcttttctctcgtgggcgtgatgcagaggcctctcccgcccccctggtgctgagctttagcgggaaccccctgcactgcaactgtgagctgctgtggctgcggcggctggcgcggccggacgacctggaaacgtgcgcctccccgcccggcctggccggccgctacttctgggcagtgcccgagggcgagttctcctgtgagccgcccctcattgcccgccacacgcagcgcctctgggtgctggaaggccagcgggccacgctgcggtgccgggccctgggtgaccccgcgcctaccatgcactgggtcggtcctgacgaccggttggttggcaactcctcccgagcccgggctttccccaacgggaccttagagattggggtgaccggcgctggggacgctgggggctacacctgcatcgccaccaaccctgctggtgaggccacagcccgagtagaactgcgggtgctggccttgccccatggtgggaacagcagtgccgaggggggccgccccgggccctcggacatcgccgcctccgctcgcactgctgccgagggtgaggggacgctggagtctgagccagccgtgcaggtgacggaggtgaccgccacctcagggctggtgagctggggtcccgggcggccagccgacccagtgtggatgttccaaatccaagggcccggggccgccgcctggcctgggagtccctccctggtttttattctcagtacctcaggctcccctgtgtacttggaggggcagggagccctttcctcggttctggcctccagaccagggtaagggcaggcccctccaacaggtgctcacagccaccgaggcaggggctgcagccacccactgggagtcttgtttttatttataataaaattgttggggacacctca

SEQ ID NO: 86643 - DNA, 2416 bp, Homo sapiens
  misc_feature (5)..(7): n is a, c, g, or t
ggacnnngcccttaactgcttgggaaatgtgacctttgctctggggggcctggccctgcaggccccaaccttccctcatctctggcggccctcttgggcctctgacccagcccctccccgggccaggctcacagaagctggcttctgggactgtcctgggcccaagtgggcacctgcgccagccccacctgtgcctgggctgtggccccttcctacagggcgctcaccatggccccgccgctcctgctgctgctgctggccagtggagcggccgcctgcccgctgccctgcgtctgccagaacctgtccgagtcgctcagcaccctctgtgcccaccgaggcctgctgtttgtgccgcccaacgtggaccggcgcacagtggagctgcggctggctgacaacttcatccaggccctggggccccctgacttccgcaacatgacgggactggtggacctgacactgtctcgcaatgccatcacccgcattggggcccgcgcctttggggacctcgagagcctgcgttccctccaccttgacggcaacaggctggtggagctgggcaccgggagcctccggggccccgtcaatctgcagcacctcatcctcagcggcaaccagctgggccgcatcgcgccgggagccttcgacgacttcctagagagcctggaggacctggacctgtcctacaacaacctccggcaggtgccctgggccggcatcggcgccatgcctgccctgcacaccctcaacctggaccataaccttattgacgcactgcccccaggcgccttcgcccagctcggtcagctctcccgcctggacctcacctccaaccgcctggccacgctggctccggacccgcttttctctcgtgggcgtgatgcagaggcctctcccgcccccctggtgctgagctttagcgggaaccccctgcactgcaactgtgagctgctgtggctgcggcggctggcgcggccggacgacctggaaacgtgcgcctccccgcccggcctggccggccgctacttctgggcagtgcccgagggcgagttctcctgtgagccgcccctcattgcccgccacacgcagcgcctctgggtgctggaaggccagcgggccacgctgcggtgccgggccctgggtgaccccgcgcctaccatgcactgggtcggtcctgacgaccggttggttggcaactcctcccgagcccgggctttccccaacgggaccttagagattggggtgaccggcgctggggacgctgggggctacacctgcatcgccaccaaccctgctggtgaggccacagcccgagtagaactgcgggtgctggccttgccccatggtgggaacagcagtgccgaggggggccgccccgggccctcggacatcgccgcctccgctcgcactgctgccgagggtgaggggacgctggagtctgagccagccgtgcaggtgacggaggtgaccgccacctcagggctggtgagctggggtcccgggcggccagccgacccagtgtggatgttccaaatccagtacaacagcagcgaagatgagaccctcatctaccggattgtcccagcctccagccaccacttcctgctgaagcacctcgtccccggcgctgactatgacctctgcctgctggccttgtcaccggccgctgggccctctgacctcacggccaccaggctgctgggctgtgcccatttctccacgctgccggcctcgcccctgtgccacgccctgcaggcccacgtgctgggcgggaccctgaccgtggccgtggggggtgtgctggtggctgccttactggtcttcactgtggccttgctggttcggggccggggggccggaaatggccgcctccccctcaagctcagccacgtccagtcccagaccaatggaggccccagccccacacccaaggcccacccgccgcggagccccccgccccggccgcagcgcagctgctctctggacctgggagatgccgggtgctacggttatgccaggcgcctgggaggagcttgggcccgacggagccactctgtgcatggggggctgctcggggcagggtgccggggggtaggaggcagcgccgagcggctggaagagagtgtggtgtgatggacgggcagcttcctgtgtgctccaagggatgagcctcgtggggcagagggcccggggccgccgcctggcctgggagtccctccctggtttttattctcagtacctcaggctcccctgtgtacttggaggggcagggagccctttcctcggttctggcctccagaccagggtaagggcaggcccctccaacaggtgctcacagccaccgaggcaggggctgcagccacccactgggagtcttgtttttatttataataaaattgttggggacacctca

SEQ ID NO: 86644 - DNA, 1208 bp, Homo sapiens
ggctggagctcaaggggcggcagaaggaccccaccccgagatgtcccaggtgtcactgagctgtgcaggcctccccggcagcaggtggcggttgggtctgtctgaagcacatggcccgcgcccgcgtgttatttctgcctctgctggtgccatccccccaccccattcccctcgcttgcctgcgtcctgtgccagtgcacacacccatctcctggccacactctccagcctgttcaccttcctgagtgaacccaagagcccgagtggccccagggggaggggtgtttggagctgggagcacgggagtggggaggtgaggatggggctagaccccagccccgggctctgaccacctgcccttgcctgcaggattgtcccagcctccagccaccacttcctgctgaagcacctcgtccccggcgctgactatgacctctgcctgctggccttgtcaccggccgctgggccctctgacctcacggccaccaggctgctgggctgtgcccatttctccacgctgccggcctcgcccctgtgccacgccctgcaggcccacgtgctgggcgggaccctgaccgtggccgtggggggtgtgctggtggctgccttactggtcttcactgtggccttgctggttcggggccggggggccggaaatggccgcctccccctcaagctcagccacgtccagtcccagaccaatggaggccccagccccacacccaaggcccacccgccgcggagccccccgccccggccgcagcgcagctgctctctggacctgggagatgccgggtgctacggttatgccaggcgcctgggaggagcttgggcccgacggagccactctgtgcatggggggctgctcggggcagggtgccggggggtaggaggcagcgccgagcggctggaagagagtgtggtgtgatggacgggcagcttcctgtgtgctccaagggatgagcctcgtggggcagagggcccggggccgccgcctggcctgggagtccctccctggtttttattctcagtacctcaggctcccctgtgtacttggaggggcagggagccctttcctcggttctggcctccagaccagggtaagggcaggcccctccaacaggtgctcacagccaccgaggcaggggctgcagccacccactgggagtcttgtttttatttataataaaattgttggggacacctca

SEQ ID NO: 86645 - DNA, 849 bp, Homo sapiens
  misc_feature (5)..(7): n is a, c, g, or t
ggacnnngcccttaactgcttgggaaatgtgacctttgctctggggggcctggccctgcaggccccaaccttccctcatctctggcggccctcttgggcctctgacccagcccctccccgggccaggctcacagaagctggcttctgggactgtcctgggcccaagtgggcacctgcgccagccccacctgtgcctgggctgtggccccttcctacagggcgctcaccatggccccgccgctcctgctgctgctgctggccagtggagcggccgcctgcccgctgccctgcgtctgccagaacctgtccgagtcgctcagcaccctctgtgcccaccgaggcctgctgtttgtgccgcccaacgtggaccggcgcacagtggagctgcggctggctgacaacttcatccaggccctggggccccctgacttccgcaacatgacgggactggtggacctgacactgtctcgcaatgccatcacccgcattggggcccgcgcctttggggacctcgagagcctgcgttccctccaccttgacggcaacaggctggtggagctgggcaccgggagcctccggggccccgtcaatctgcagcacctcatcctcagcggcaaccagctgggccgcatcgcgccgggagccttcgacgacttcctagagagcctggaggacctggacctgtcctacaacaacctccggcaggtgccctgggcgatcgggcagctgcctgaacctaaccggacatactattgagcatgcccaggctcgcaatggcagtccggggatcactcacggtgcgcggggtcgacgtttctcgggggatggaggtcccgccggggagtggac

SEQ ID NO: 86646 - DNA, 1638 bp, Homo sapiens
ccacaaatgtgggagggcgataaccactcgtagaaagcgtgagaagttactacaagcggtcctcccggccaccgtactgttccgctcccagaagccccgggcggcggaagtcgtcactcttaagaagggacggggccccacgctgcgcacccgcgggtttgctatggcgatgagcagcggcggcagtggtggcggcgtcccggagcaggaggattccgtgctgttccggcgcggcacaggccagagcgatgattctgacatttgggatgatacagcactgataaaagcatatgataaagctgtggcttcatttaagcatgctctaaagaatggtgacatttgtgaaacttcgggtaaaccaaaaaccacacctaaaagaaaacctgctaagaagaataaaagccaaaagaagaatactgcagcttccttacaacagtggaaagttggggacaaatgttctgccatttggtcagaagacggttgcatttacccagctaccattgcttcaattgattttaagagagaaacctgtgttgtggtttacactggatatggaaatagagaggagcaaaatctgtccgatctactttccccaatctgtgaagtagctaataatatagaacagaatgctcaagagaatgaaaatgaaagccaagtttcaacagatgaaagtgagaactccaggtctcctggaaataaatcagataacatcaagcccaaatctgctccatggaactcttttctccctccaccaccccccatgccagggccaagactgggaccaggaaagccaggtctaaaattcaatggcccaccaccgccaccgccaccaccaccaccccacttactatcatgctggctgcctccatttccttctggaccaccaataattcccccaccacctcccatatgtccagattctcttgatgatgctgatgctttgggaagtatgttaatttcatggtacatgagtggctatcatactggctattatatgggttttagacaaaatcaaaaagaaggaaggtgctcacattccttaaattaaggagaaatgctggcatagagcagcactaaatgacaccactaaagaaacgatcagacagatctggaatgtgaagcgttatagaagataactggcctcatttcttcaaaatatcaagtgttgggaaagaaaaaaggaagtggaatgggtaactcttcttgattaaaagttatgtaataaccaaatgcaatgtgaaatattttactggactctattttgaaaaaccatctgtaaaagactgaggtgggggtgggaggccagcacggtggtgaggcagttgagaaaatttgaatgtggattagattttgaatgatattggataattattggtaattttatgagctgtgagaagggtgttgtagtttataaaagactgtcttaatttgcatacttaagcatttaggaatgaagtgttagagtgtcttaaaatgtttcaaatggtttaacaaaatgtatgtgaggcgtatgtggcaaaatgttacagaatctaactggtggacatggctgttcattgtactgtttttttctatcttctatatgtttaaaagtatataataaaaatatttaatttttttttaaataaacaaaatctg

SEQ ID NO: 86647 - DNA, 1542 bp, Homo sapiens
ccacaaatgtgggagggcgataaccactcgtagaaagcgtgagaagttactacaagcggtcctcccggccaccgtactgttccgctcccagaagccccgggcggcggaagtcgtcactcttaagaagggacggggccccacgctgcgcacccgcgggtttgctatggcgatgagcagcggcggcagtggtggcggcgtcccggagcaggaggattccgtgctgttccggcgcggcacaggccagagcgatgattctgacatttgggatgatacagcactgataaaagcatatgataaagctgtggcttcatttaagcatgctctaaagaatggtgacatttgtgaaacttcgggtaaaccaaaaaccacacctaaaagaaaacctgctaagaagaataaaagccaaaagaagaatactgcagcttccttacaacagtggaaagttggggacaaatgttctgccatttggtcagaagacggttgcatttacccagctaccattgcttcaattgattttaagagagaaacctgtgttgtggtttacactggatatggaaatagagaggagcaaaatctgtccgatctactttccccaatctgtgaagtagctaataatatagaacagaatgctcaagagaatgaaaatgaaagccaagtttcaacagatgaaagtgagaactccaggtctcctggaaataaatcagataacatcaagcccaaatctgctccatggaactcttttctccctccaccaccccccatgccagggccaagactgggaccaggaaagataattcccccaccacctcccatatgtccagattctcttgatgatgctgatgctttgggaagtatgttaatttcatggtacatgagtggctatcatactggctattatatgggttttagacaaaatcaaaaagaaggaaggtgctcacattccttaaattaaggagaaatgctggcatagagcagcactaaatgacaccactaaagaaacgatcagacagatctggaatgtgaagcgttatagaagataactggcctcatttcttcaaaatatcaagtgttgggaaagaaaaaaggaagtggaatgggtaactcttcttgattaaaagttatgtaataaccaaatgcaatgtgaaatattttactggactctattttgaaaaaccatctgtaaaagactgaggtgggggtgggaggccagcacggtggtgaggcagttgagaaaatttgaatgtggattagattttgaatgatattggataattattggtaattttatgagctgtgagaagggtgttgtagtttataaaagactgtcttaatttgcatacttaagcatttaggaatgaagtgttagagtgtcttaaaatgtttcaaatggtttaacaaaatgtatgtgaggcgtatgtggcaaaatgttacagaatctaactggtggacatggctgttcattgtactgtttttttctatcttctatatgtttaaaagtatataataaaaatatttaatttttttttaaataaacaaaatctg

SEQ ID NO: 86648 - DNA, 2082 bp, Homo sapiens
ccacaaatgtgggagggcgataaccactcgtagaaagcgtgagaagttactacaagcggtcctcccggccaccgtactgttccgctcccagaagccccgggcggcggaagtcgtcactcttaagaagggacggggccccacgctgcgcacccgcgggtttgctatggcgatgagcagcggcggcagtggtggcggcgtcccggagcaggaggattccgtgctgttccggcgcggcacaggccagagcgatgattctgacatttgggatgatacagcactgataaaagcatatgataaagctgtggcttcatttaagcatgctctaaagaatggtgacatttgtgaaacttcgggtaaaccaaaaaccacacctaaaagaaaacctgctaagaagaataaaagccaaaagaagaatactgcagcttccttacaacagtggaaagttggggacaaatgttctgccatttggtcagaagacggttgcatttacccagctaccattgcttcaattgattttaagagagaaacctgtgttgtggtttacactggatatggaaatagagaggagcaaaatctgtccgatctactttccccaatctgtgaagtagctaataatatagaacagaatgctcaagagaatgaaaatgaaagccaagtttcaacagatgaaagtgagaactccaggtctcctggaaataaatcagataacatcaagcccaaatctgctccatggaactcttttctccctccaccaccccccatgccagggccaagactgggaccaggaaagccaggtctaaaattcaatggcccaccaccgccaccgccaccaccaccaccccacttactatcatgctggctgcctccatttccttctggaccaccaataattcccccaccacctcccatatgtccagattctcttgatgatgctgatgctttgggaagtatgttaatttcatggtacatgagtggctatcatactggctattatatgggttttagacaaaatcaaaaagaaggaaggtgctcacattccttaaattaaggagtaagtctgccagcattatgaaagtgaatcttacttttgtaaaactttatggtttgtggaaaacaaatgtttttgaacatttaaaaagttcagatgttagaaagttgaaaggttaatgtaaaacaatcaatattaaagaattttgatgccaaaactattagataaaaggttaatctacatccctactagaattctcatacttaactggttggttgtgtggaagaaacatactttcacaataaagagctttaggatatgatgccattttatatcactagtaggcagaccagcagacttttttttattgtgatatgggataacctaggcatactgcactgtacactctgacatatgaagtgctctagtcaagtttaactggtgtccacagaggacatggtttaactggaattcgtcaagcctctggttctaatttctcatttgcaggaaatgctggcatagagcagcactaaatgacaccactaaagaaacgatcagacagatctggaatgtgaagcgttatagaagataactggcctcatttcttcaaaatatcaagtgttgggaaagaaaaaaggaagtggaatgggtaactcttcttgattaaaagttatgtaataaccaaatgcaatgtgaaatattttactggactctattttgaaaaaccatctgtaaaagactgaggtgggggtgggaggccagcacggtggtgaggcagttgagaaaatttgaatgtggattagattttgaatgatattggataattattggtaattttatgagctgtgagaagggtgttgtagtttataaaagactgtcttaatttgcatacttaagcatttaggaatgaagtgttagagtgtcttaaaatgtttcaaatggtttaacaaaatgtatgtgaggcgtatgtggcaaaatgttacagaatctaactggtggacatggctgttcattgtactgtttttttctatcttctatatgtttaaaagtatataataaaaatatttaatttttttttaaataaacaaaatctg

SEQ ID NO: 86649 - DNA, 1496 bp, Homo sapiens
  misc_feature (1482)..(1482): n is a, c, g, or t
ccacaaatgtgggagggcgataaccactcgtagaaagcgtgagaagttactacaagcggtcctcccggccaccgtactgttccgctcccagaagccccgggcggcggaagtcgtcactcttaagaagggacggggccccacgctgcgcacccgcgggtttgctatggcgatgagcagcggcggcagtggtggcggcgtcccggagcaggaggattccgtgctgttccggcgcggcacaggccagagcgatgattctgacatttgggatgatacagcactgataaaagcatatgataaagctgtggcttcatttaagcatgctctaaagaatggtgacatttgtgaaacttcgggtaaaccaaaaaccacacctaaaagaaaacctgctaagaagaataaaagccaaaagaagaatactgcagcttccttacaacagtggaaagttggggacaaatgttctgccatttggtcagaagacggttgcatttacccagctaccattgcttcaattgattttaagagagaaacctgtgttgtggtttacactggatatggaaatagagaggagcaaaatctgtccgatctactttccccaatctgtgaagtagctaataatatagaacagaatgctcaagagaatgaaaatgaaagccaagtttcaacagatgaaagtgagaactccaggtctcctggaaataaatcagataacatcaagcccaaatctgctccatggaactcttttctccctccaccaccccccatgccagggccaagactgggaccaggaaagccaggtctaaaattcaatggcccaccaccgccaccgccaccaccaccaccccacttactatcatgctggctgcctccatttccttctggaccaccaataattcccccaccacctcccatatgtccagattctcttgatgatgctgatgctttgggaagtatgttaatttcatggtacatgagtggctatcatactggctattatatgggttttagacaaaatcaaaaagaaggaaggtgctcacattccttaaattaaggagaaatgctggcatagagcagcactaaatgacaccactaaagaaacgatcagacagatctggaatgtgaagcgttatagaagataactggcctcatttcttcaaaatatcaagtgttgggaaagaaaaaaggaagtggaatgggtaactcttcttgattaaaagttatgtaataaccaaatgcaatgtgaaatattttactggactctattttgaaaaaccatctgtaaaagactgaggtgggggtgggaggccagcacggtggtgaggcagttgagaaaatttgaatgtggattagattttgaatgatattggataattattggtaattttatgagctgtgagaagggtgttgtagtttataaaagacactctaacacttcattcctaaatgcttaggtatgcaaattaagacgtcttttataaactacancacccttctcacgg

SEQ ID NO: 86650 - DNA, 1628 bp, Homo sapiens
cccaagtgctgggattataggcgtgagccactgtgcccggcctagtcttgtatttttagtagagtcgggatttctccatgttggtcaggctgttctcgaactcctgagctcaggtgatccaactgtctcggcctcccaaagtgctgggattacaggcgtgagccactgtgcctagcatgagccaccacgccggcctaatttttaaattttttgtagagacagggtctcattatgttgcccagggtggtgtcaagctccaggtctcaagtgatccccctacctccgcctcccaaagttgtgggattgtaggcatgagccactgcaagaaaaccttaactgcagcctaataattgttttctttgggataacttttaaagtacattaaaagactatcaacttaatttctgatcatattttgttgaataaaataagtaaaatgtcttgtgaaacaaaatgctttttaacatccatataaagctatctatatatagctatctatatctatatagctattttttttaacttcctttattttccttacagggttttagacaaaatcaaaaagaaggaaggtgctcacattccttaaattaaggagtaagtctgccagcattatgaaagtgaatcttacttttgtaaaactttatggtttgtggaaaacaaatgtttttgaacatttaaaaagttcagatgttagaaagttgaaaggttaatgtaaaacaatcaatattaaagaattttgatgccaaaactattagataaaaggttaatctacatccctactagaattctcatacttaactggttggttgtgtggaagaaacatactttcacaataaagagctttaggatatgatgccattttatatcactagtaggcagaccagcagacttttttttattgtgatatgggataacctaggcatactgcactgtacactctgacatatgaagtgctctagtcaagtttaactggtgtccacagaggacatggtttaactggaattcgtcaagcctctggttctaatttctcatttgcaggaaatgctggcatagagcagcactaaatgacaccactaaagaaacgatcagacagatctggaatgtgaagcgttatagaagataactggcctcatttcttcaaaatatcaagtgttgggaaagaaaaaaggaagtggaatgggtaactcttcttgattaaaagttatgtaataaccaaatgcaatgtgaaatattttactggactctattttgaaaaaccatctgtaaaagactgaggtgggggtgggaggccagcacggtggtgaggcagttgagaaaatttgaatgtggattagattttgaatgatattggataattattggtaattttatgagctgtgagaagggtgttgtagtttataaaagactgtcttaatttgcatacttaagcatttaggaatgaagtgttagagtgtcttaaaatgtttcaaatggtttaacaaaatgtatgtgaggcgtatgtggcaaaatgttacagaatctaactggtggacatggctgttcattgtactgtttttttctatcttctatatgtttaaaagtatataataaaaatatttaatttttttttaaataaacaaaatctg

SEQ ID NO: 86651 - DNA, 1894 bp, Homo sapiens
aggattacaggcgcctagcctaggcagtcattttcaaaaaacaagcatgactcaccaaaagttttaagattttctgtgataatgttcttattgaggcttacattatattacagtttcttgaatctaaaatgatgtaccctcttaggatatatacatcatgcttcattggtctcagggggctgatttttataaggagagatttgctagttttcacaatatgtcctctaagttggcatgtatagctaaacaggctttcataaaaatatacaatttagttaatgaaatttgggatatagtcttttatgattgaaataattttgctaaatagactgtctctgatttattaggtaatcaccactcttattttgttttacttccttaatgtctacatagaaaggaaatgagaaaaatccagaggttgtcatttgacttatgagtctgtttgacttcaggatttggtacatgaaatttcacttaatctttttgatatgtataaaacaaatattctgggtaattatttttatccttttggttttgagtcctttttattcctatcatattgaaattggtaagttaattttcctttgaaatattccttatagccaggtctaaaattcaatggcccaccaccgccaccgccaccaccaccaccccacttactatcatgctggctgcctccatttccttctggaccaccaataattcccccaccacctcccatatgtccagattctcttgatgatgctgatgctttgggaagtatgttaatttcatggtacatgagtggctatcatactggctattatatgggttttagacaaaatcaaaaagaaggaaggtgctcacattccttaaattaaggagtaagtctgccagcattatgaaagtgaatcttacttttgtaaaactttatggtttgtggaaaacaaatgtttttgaacatttaaaaagttcagatgttagaaagttgaaaggttaatgtaaaacaatcaatattaaagaattttgatgccaaaactattagataaaaggttaatctacatccctactagaattctcatacttaactggttggttgtgtggaagaaacatactttcacaataaagagctttaggatatgatgccattttatatcactagtaggcagaccagcagacttttttttattgtgatatgggataacctaggcatactgcactgtacactctgacatatgaagtgctctagtcaagtttaactggtgtccacagaggacatggtttaactggaattcgtcaagcctctggttctaatttctcatttgcaggaaatgctggcatagagcagcactaaatgacaccactaaagaaacgatcagacagatctggaatgtgaagcgttatagaagataactggcctcatttcttcaaaatatcaagtgttgggaaagaaaaaaggaagtggaatgggtaactcttcttgattaaaagttatgtaataaccaaatgcaatgtgaaatattttactggactctattttgaaaaaccatctgtaaaagactgaggtgggggtgggaggccagcacggtggtgaggcagttgagaaaatttgaatgtggattagattttgaatgatattggataattattggtaattttatgagctgtgagaagggtgttgtagtttataaaagactgtcttaatttgcatacttaagcatttaggaatgaagtgttagagtgtcttaaaatgtttcaaatggtttaacaaaatgtatgtgaggcgtatgtggcaaaatgttacagaatctaactggtggacatggctgttcattgtactgtttttttctatcttctatatgtttaaaagtatataataaaaatatttaatttttttttaaataaacaaaatctg

SEQ ID NO: 86652 - DNA, 1237 bp, Homo sapiens
ccacaaatgtgggagggcgataaccactcgtagaaagcgtgagaagttactacaagcggtcctcccggccaccgtactgttccgctcccagaagccccgggcggcggaagtcgtcactcttaagaagggacggggccccacgctgcgcacccgcgggtttgctatggcgatgagcagcggcggcagtggtggcggcgtcccggagcaggaggattccgtgctgttccggcgcggcacaggccagagcgatgattctgacatttgggatgatacagcactgataaaagcatatgataaagctgtggcttcatttaagcatgctctaaagaatggtgacatttgtgaaacttcgggtaaaccaaaaaccacacctaaaagaaaacctgctaagaagaataaaagccaaaagaagaatactgcagcttccttacaacagtggaaagttggggacaaatgttctgcctccatttccttgtggaccaccaataattcccccaccacctcccatatgtccagattctcttgatgatgctgatgctttgggaagtatgttaatttcatggtacatgagtggctatcatactggctattatatgggttttagacaaaatcaaaaagaaggaaggtgctcacattccttaaattaaggagaaatgctggcatagagcagcactaaatgacaccactaaagaaacgatcagacagatctggaatgtgaagcgttatagaagataactggcctcatttcttcaaaatatcaagtgttgggaaagaaaaaaggaagtggaatgggtaactcttcttgattaaaagttatgtaataaccaaatgcaatgtgaaatattttactggactctattttgaaaaaccatctgtaaaagactgaggtgggggtgggaggccagcacggtggtgaggcagttgagaaaatttgaatgtggattagattttgaatgatattggataattattggtaattttatgagctgtgagaagggtgttgtagtttataaaagactgtcttaatttgcatacttaagcatttaggaatgaagtgttagagtgtcttaaaatgtttcaaatggtttaacaaaatgtatgtgaggcgtatgtggcaaaatgttacagaatctaactggtggacatggctgttcattgtactgtttttttctatcttctatatgtttaaaagtatataataaaaatatttaatttttttttaaataaacaaaatctg

SEQ ID NO: 86653 - DNA, 1120 bp, Homo sapiens
ccacaaatgtgggagggcgataaccactcgtagaaagcgtgagaagttactacaagcggtcctcccggccaccgtactgttccgctcccagaagccccgggcggcggaagtcgtcactcttaagaagggacggggccccacgctgcgcacccgcgggtttgctatggcgatgagcagcggcggcagtggtggcggcgtcccggagcaggaggattccgtgctgttccggcgcggcacaggccagagcgatgattctgacatttgggatgatacagcactgataaaagcatatgataaagctgtggcttcatttaagcatgctctaaagaatggtgacatttgtgaaacttcgggtaaaccaaaaaccacacctaaaagaaaacctgctaagaagaataaaagccaaaagaagaatactgcagcttccttacaacagtggaaagttggggacaaatgttctgccatttggtcagaagacggttgcatttacccagctaccattgcttcaattgattttaagagagaaacctgtgttgtggtttacactggatatggaaatagagaggagcaaaatctgtccgatctactttccccaatctgtgaagtagctaataatatagaacagaatgctcaagagaatgaaaatgaaagccaagtttcaacagatgaaagtgagaactccaggtctcctggaaataaatcagataacatcaagcccaaatctgctccatggaactcttttctccctccaccaccccccatgccagggccaagactgggaccaggaaagccaggtctaaaattcaatggcccaccaccgccaccgccaccaccaccaccccacttactatcatgctggctgcctccatttccttctggaccaccaataattcccccaccacctcccatatgtccagattctcttgatgatgctgatgctttgggaagtatgttaatttcatggtacatgagtggctatcatactggctattatatggtaagtaatcactcagcatcttttcctgacaatttttttgtagttatgtgactttgttttgtaaatttataaaatactacttgcttctctctttatattactaaaaaataaaaataaaaaaat

SEQ ID NO: 86654 - DNA, 1584 bp, Homo sapiens
ccacaaatgtgggagggcgataaccactcgtagaaagcgtgagaagttactacaagcggtcctcccggccaccgtactgttccgctcccagaagccccgggcggcggaagtcgtcactcttaagaagggacggggccccacgctgcgcacccgcgggtttgctatggcgatgagcagcggcggcagtggtggcggcgtcccggagcaggaggattccgtgctgttccggcgcggcacaggccagagcgatgattctgacatttgggatgatacagcactgataaaagcatatgataaagctgtggcttcatttaagcatgctctaaagaatggtgacatttgtgaaacttcgggtaaaccaaaaaccacacctaaaagaaaacctgctaagaagaataaaagccaaaagaagaatactgcagcttccttacaacagtggaaagttggggacaaatgttctgccatttggtcagaagacggttgcatttacccagctaccattgcttcaattgattttaagagagaaacctgtgttgtggtttacactggatatggaaatagagaggagcaaaatctgtccgatctactttccccaatctgtgaagtagctaataatatagaacagaatgctcaagagaatgaaaatgaaagccaagtttcaacagatgaaagtgagaactccaggtctcctggaaataaatcagataacatcaagcccaaatctgctccatggaactcttttctccctccaccaccccccatgccagggccaagactgggaccaggaaagccaggtctaaaattcaatggcccaccaccgccaccgccaccaccaccaccccacttactatcatgctggctgcctccatttccttctggaccaccaataattcccccaccacctcccatatgtccagattctcttgatgatgctgatgctttgggaagtatgttaatttcatggtacatgagtggctatcatactggctattatatggaaatgctggcatagagcagcactaaatgacaccactaaagaaacgatcagacagatctggaatgtgaagcgttatagaagataactggcctcatttcttcaaaatatcaagtgttgggaaagaaaaaaggaagtggaatgggtaactcttcttgattaaaagttatgtaataaccaaatgcaatgtgaaatattttactggactctattttgaaaaaccatctgtaaaagactgaggtgggggtgggaggccagcacggtggtgaggcagttgagaaaatttgaatgtggattagattttgaatgatattggataattattggtaattttatgagctgtgagaagggtgttgtagtttataaaagactgtcttaatttgcatacttaagcatttaggaatgaagtgttagagtgtcttaaaatgtttcaaatggtttaacaaaatgtatgtgaggcgtatgtggcaaaatgttacagaatctaactggtggacatggctgttcattgtactgtttttttctatcttctatatgtttaaaagtatataataaaaatatttaatttttttttaaataaacaaaatctg

SEQ ID NO: 86655 - DNA, 1488 bp, Homo sapiens
ccacaaatgtgggagggcgataaccactcgtagaaagcgtgagaagttactacaagcggtcctcccggccaccgtactgttccgctcccagaagccccgggcggcggaagtcgtcactcttaagaagggacggggccccacgctgcgcacccgcgggtttgctatggcgatgagcagcggcggcagtggtggcggcgtcccggagcaggaggattccgtgctgttccggcgcggcacaggccagagcgatgattctgacatttgggatgatacagcactgataaaagcatatgataaagctgtggcttcatttaagcatgctctaaagaatggtgacatttgtgaaacttcgggtaaaccaaaaaccacacctaaaagaaaacctgctaagaagaataaaagccaaaagaagaatactgcagcttccttacaacagtggaaagttggggacaaatgttctgccatttggtcagaagacggttgcatttacccagctaccattgcttcaattgattttaagagagaaacctgtgttgtggtttacactggatatggaaatagagaggagcaaaatctgtccgatctactttccccaatctgtgaagtagctaataatatagaacagaatgctcaagagaatgaaaatgaaagccaagtttcaacagatgaaagtgagaactccaggtctcctggaaataaatcagataacatcaagcccaaatctgctccatggaactcttttctccctccaccaccccccatgccagggccaagactgggaccaggaaagataattcccccaccacctcccatatgtccagattctcttgatgatgctgatgctttgggaagtatgttaatttcatggtacatgagtggctatcatactggctattatatggaaatgctggcatagagcagcactaaatgacaccactaaagaaacgatcagacagatctggaatgtgaagcgttatagaagataactggcctcatttcttcaaaatatcaagtgttgggaaagaaaaaaggaagtggaatgggtaactcttcttgattaaaagttatgtaataaccaaatgcaatgtgaaatattttactggactctattttgaaaaaccatctgtaaaagactgaggtgggggtgggaggccagcacggtggtgaggcagttgagaaaatttgaatgtggattagattttgaatgatattggataattattggtaattttatgagctgtgagaagggtgttgtagtttataaaagactgtcttaatttgcatacttaagcatttaggaatgaagtgttagagtgtcttaaaatgtttcaaatggtttaacaaaatgtatgtgaggcgtatgtggcaaaatgttacagaatctaactggtggacatggctgttcattgtactgtttttttctatcttctatatgtttaaaagtatataataaaaatatttaatttttttttaaataaacaaaatctg

SEQ ID NO: 86656 - DNA, 2199 bp, Homo sapiens
ccacaaatgtgggagggcgataaccactcgtagaaagcgtgagaagttactacaagcggtcctcccggccaccgtactgttccgctcccagaagccccgggcggcggaagtcgtcactcttaagaagggacggggccccacgctgcgcacccgcgggtttgctatggcgatgagcagcggcggcagtggtggcggcgtcccggagcaggaggattccgtgctgttccggcgcggcacaggccagagcgatgattctgacatttgggatgatacagcactgataaaagcatatgataaagctgtggcttcatttaagcatgctctaaagaatggtgacatttgtgaaacttcgggtaaaccaaaaaccacacctaaaagaaaacctgctaagaagaataaaagccaaaagaagaatactgcagcttccttacaacagtggaaagttggggacaaatgttctgccatttggtcagaagacggttgcatttacccagctaccattgcttcaattgattttaagagagaaacctgtgttgtggtttacactggatatggaaatagagaggagcaaaatctgtccgatctactttccccaatctgtgaagtagctaataatatagaacagaatgctcaagagaatgaaaatgaaagccaagtttcaacagatgaaagtgagaactccaggtctcctggaaataaatcagataacatcaagcccaaatctgctccatggaactcttttctccctccaccaccccccatgccagggccaagactgggaccaggaaagaaaggaaatgagaaaaatccagaggttgtcatttgacttatgagtctgtttgacttcaggatttggtacatgaaatttcacttaatctttttgatatgtataaaacaaatattctggccaggtctaaaattcaatggcccaccaccgccaccgccaccaccaccaccccacttactatcatgctggctgcctccatttccttctggaccaccaataattcccccaccacctcccatatgtccagattctcttgatgatgctgatgctttgggaagtatgttaatttcatggtacatgagtggctatcatactggctattatatgggttttagacaaaatcaaaaagaaggaaggtgctcacattccttaaattaaggagtaagtctgccagcattatgaaagtgaatcttacttttgtaaaactttatggtttgtggaaaacaaatgtttttgaacatttaaaaagttcagatgttagaaagttgaaaggttaatgtaaaacaatcaatattaaagaattttgatgccaaaactattagataaaaggttaatctacatccctactagaattctcatacttaactggttggttgtgtggaagaaacatactttcacaataaagagctttaggatatgatgccattttatatcactagtaggcagaccagcagacttttttttattgtgatatgggataacctaggcatactgcactgtacactctgacatatgaagtgctctagtcaagtttaactggtgtccacagaggacatggtttaactggaattcgtcaagcctctggttctaatttctcatttgcaggaaatgctggcatagagcagcactaaatgacaccactaaagaaacgatcagacagatctggaatgtgaagcgttatagaagataactggcctcatttcttcaaaatatcaagtgttgggaaagaaaaaaggaagtggaatgggtaactcttcttgattaaaagttatgtaataaccaaatgcaatgtgaaatattttactggactctattttgaaaaaccatctgtaaaagactgaggtgggggtgggaggccagcacggtggtgaggcagttgagaaaatttgaatgtggattagattttgaatgatattggataattattggtaattttatgagctgtgagaagggtgttgtagtttataaaagactgtcttaatttgcatacttaagcatttaggaatgaagtgttagagtgtcttaaaatgtttcaaatggtttaacaaaatgtatgtgaggcgtatgtggcaaaatgttacagaatctaactggtggacatggctgttcattgtactgtttttttctatcttctatatgtttaaaagtatataataaaaatatttaatttttttttaaataaacaaaatctg

SEQ ID NO: 86657 - DNA, 1202 bp, Homo sapiens
ccacaaatgtgggagggcgataaccactcgtagaaagcgtgagaagttactacaagcggtcctcccggccaccgtactgttccgctcccagaagccccgggcggcggaagtcgtcactcttaagaagggacggggccccacgctgcgcacccgcgggtttgctatggcgatgagcagcggcggcagtggtggcggcgtcccggagcaggaggattccgtgctgttccggcgcggcacaggccagagcgatgattctgacatttgggatgatacagcactgataaaagcatatgataaagctgtggcttcatttaagcatgctctaaagaatggtgacatttgtgaaacttcgggtaaaccaaaaaccacacctaaaagaaaacctgctaagaagaataaaagccaaaagaagaatactgcagcttccttacaacagtggaaagttggggacaaatgttctgccatttggtcagaagacggttgcatttacccagctaccattgcttcaattgattttaagagagaaacctgtgttgtggtttacactggatatggaaatagagaggagcaaaatctgtccgatctactttccccaatctgtgaagtagctaataatatagaacagaatgctcaagagaatgaaaatgaaagccaagtttcaacagatgaaagtgagaactccaggtctcctggaaataaatcagataacatcaagcccaaatctgctccatggaactcttttctccctccaccaccccccatgccagggccaagactgggaccaggaaagccaggtctaaaattcaatggcccaccaccgccaccgccaccaccaccaccccacttactatcatgctggctgcctccatttccttctggaccaccaataattcccccaccacctcccatatgtccagattctcttgatgatgctgatgctttgggaagtatgttaatttcatggtacatgagtggctatcatactggctattatatgggttttagacaaaatcaaaaagaaggaaggtgctcacattccttaaattaaggagaaatgctggcatagagcagcactaaatgacaccactaaagaaacgatcagacagatctggaatgtgaagcgttatagaagataactggcctcatttcttcaaaatatcaagtgttgggcgataacatcacgggatcctgctagagtcggc

SEQ ID NO: 86658 - DNA, 1024 bp, Homo sapiens
ccacaaatgtgggagggcgataaccactcgtagaaagcgtgagaagttactacaagcggtcctcccggccaccgtactgttccgctcccagaagccccgggcggcggaagtcgtcactcttaagaagggacggggccccacgctgcgcacccgcgggtttgctatggcgatgagcagcggcggcagtggtggcggcgtcccggagcaggaggattccgtgctgttccggcgcggcacaggccagagcgatgattctgacatttgggatgatacagcactgataaaagcatatgataaagctgtggcttcatttaagcatgctctaaagaatggtgacatttgtgaaacttcgggtaaaccaaaaaccacacctaaaagaaaacctgctaagaagaataaaagccaaaagaagaatactgcagcttccttacaacagtggaaagttggggacaaatgttctgccatttggtcagaagacggttgcatttacccagctaccattgcttcaattgattttaagagagaaacctgtgttgtggtttacactggatatggaaatagagaggagcaaaatctgtccgatctactttccccaatctgtgaagtagctaataatatagaacagaatgctcaagagaatgaaaatgaaagccaagtttcaacagatgaaagtgagaactccaggtctcctggaaataaatcagataacatcaagcccaaatctgctccatggaactcttttctccctccaccaccccccatgccagggccaagactgggaccaggaaagataattcccccaccacctcccatatgtccagattctcttgatgatgctgatgctttgggaagtatgttaatttcatggtacatgagtggctatcatactggctattatatggtaagtaatcactcagcatcttttcctgacaatttttttgtagttatgtgactttgttttgtaaatttataaaatactacttgcttctctctttatattactaaaaaataaaaataaaaaaat

SEQ ID NO: 86659 - DNA, 599 bp, Homo sapiens
gggtaatttgcgggcccctcagccaatgggagggcgtcgccccggccagctcccttttctggagctccagccgcctcccggggactgcagttgccacctcgagccctgctgtgcgtctcgggccagcaattccgcctgcgcgcgggacccattcctcctccagccgccgcggcccacggcccacggagcgggtgaatcccggcgccgcgccccggacccgcagctccctgcactcctccctcccagccgctttaacacccacaccccacagtctctcccacgcccgcgccttggcggccccactgaatccctacgcggggcccagcggtaccgggagaccgggctagcctatgggagcgcccagataacgcgggttgggggcgcccgcgcccccatccccgccagcatgactcgatcgccgcccctcagagagctgcccccgagttacacacccccagctcgaaccgcagcaccccaggtgagtagagggggagctggaagaaggaagagagcggagccaggtctgtcactcgggcctctgcaaggtttgtgatgtcttgaagtgccgagtgtcattagatgtctgaaggcaagtgaga

SEQ ID NO: 86660 - DNA, 711 bp, Homo sapiens
caggtgtagggaatcgttctggtgctgttcgtctgtgctctgctgctcctcaacccctggacggctggcctcatagtgctggtcctggcgatgatgacagtggaactctttggtatcatgggtttcctgggcatcaagctgagtgccatccccgtggtgatccttgtggcctctgtaggcattggcgttgagttcacagtccacgtggctctgggcttcctgaccacccagggcagccggaacctgcgggccgcccatgcccttgagcacacatttgcccccgtgaccgatggggccatctccacattgctgggtctgctcatgcttgctggttcccactttgacttcattgtaaggtacttctttgcggcgctgacagtgctcacgctcctgggcctcctccatggactcgtgctgctgcctgtgctgctgtccatcctgggcccgccgccagaggtgatacagatgtacaaggaaagcccagagatcctgagtccaccagctccacagggaggcgggcttaggtggggggcatcctcctccctgccccagagctttgccagagtgactacctccatgaccgtggccatccacccaccccccctgcctggtgcctacatccatccagcccctgatgagcccccttggtcccctgctgccactagctctggcaacctcagttccaggggaccaggtccagccactgggtga

SEQ ID NO: 86661 - DNA, 4018 bp, Homo sapiens
gggtaatttgcgggcccctcagccaatgggagggcgtcgccccggccagctcccttttctggagctccagccgcctcccggggactgcagttgccacctcgagccctgctgtgcgtctcgggccagcaattccgcctgcgcgcgggacccattcctcctccagccgccgcggcccacggcccacggagcgggtgaatcccggcgccgcgccccggacccgcagctccctgcactcctccctcccagccgctttaacacccacaccccacagtctctcccacgcccgcgccttggcggccccactgaatccctacgcggggcccagcggtaccgggagaccgggctagcctatgggagcgcccagataacgcgggttgggggcgcccgcgcccccatccccgccagcatgactcgatcgccgcccctcagagagctgcccccgagttacacacccccagctcgaaccgcagcaccccagatcctagctgggagcctgaaggctccactctggcttcgtgcttacttccagggcctgctcttctctctgggatgcgggatccagagacattgtggcaaagtgctctttctgggactgttggcctttggggccctggcattaggtctccgcatggccattattgagacaaacttggaacagctctgggtagaagtgggcagccgggtgagccaggagctgcattacaccaaggagaagctgggggaggaggctgcatacacctctcagatgctgatacagaccgcacgccaggagggagagaacatcctcacacccgaagcacttggcctccacctccaggcagccctcactgccagtaaagtccaagtatcactctatgggaagtcctgggatttgaacaaaatctgctacaagtcaggagttccccttattgaaaatggaatgattgagcggatgattgagaagctgtttccgtgcgtgatcctcacccccctcgactgcttctgggagggagccaaactccaagggggctccgcctacctgcccggccgcccggatatccagtggaccaacctggatccagagcagctgctggaggagctgggtccctttgcctcccttgagggcttccgggagctgctagacaaggcacaggtgggccaggcctacgtggggcggccctgtctgcaccctgatgacctccactgcccacctagtgcccccaaccatcacagcaggcaggctcccaatgtggctcacgagctgagtgggggctgccatggcttctcccacaaattcatgcactggcaggaggaattgctgctgggaggcatggccagagacccccaaggagagctgctgagggcagaggccctgcagagcaccttcttgctgatgagtccccgccagctgtacgagcatttccggggtgactatcagacacatgacattggctggagtgaggagcaggccagcacagtgctacaagcctggcagcggcgctttgtgcagctggcccaggaggccctgcctgagaacgcttcccagcagatccatgccttctcctccaccaccctggatgacatcctgcatgcgttctctgaagtcagtgctgcccgtgtggtgggaggctatctgctcatgctggcctatgcctgtgtgaccatgctgcggtgggactgcgcccagtcccagggttccgtgggccttgccggggtactgctggtggccctggcggtggcctcaggccttgggctctgtgccctgctcggcatcaccttcaatgctgccactacccaggtgctgcccttcttggctctgggaatcggcgtggatgacgtattcctgctggcgcatgccttcacagaggctctgcctggcacccctctccaggagcgcatgggcgagtgtctgcagcgcacgggcaccagtgtcgtactcacatccatcaacaacatggccgccttcctcatggctgccctcgttcccatccctgcgctgcgagccttctccctacaggcggccatagtggttggctgcacctttgtagccgtgatgcttgtcttcccagccatcctcagcctggacctacggcggcgccactgccagcgccttgatgtgctctgctgcttctccagtccctgctctgctcaggtgattcagatcctgccccaggagctgggggacgggacagtaccagtgggcattgcccacctcactgccacagttcaagcctttacccactgtgaagccagcagccagcatgtggtcaccatcctgcctccccaagcccacctggtgcccccaccttctgacccactgggctctgagctcttcagccctggagggtccacacgggaccttctaggccaggaggaggagacaaggcagaaggcagcctgcaagtccctgccctgtgcccgctggaatcttgcccatttcgcccgctatcagtttgccccgttgctgctccagtcacatgccaaggccatcgtgctggtgctctttggtgctcttctgggcctgagcctctacggagccaccttggtgcaagacggcctggccctgacggatgtggtgcctcggggcaccaaggagcatgccttcctgagcgcccagctcaggtacttctccctgtacgaggtggccctggtgacccagggtggctttgactacgcccactcccaacgcgccctctttgatctgcaccagcgcttcagttccctcaaggcggtgctgcccccaccggccacccaggcaccccgcacctggctgcactattaccgcaactggctacagggaatccaggctgcctttgaccaggactgggcttctgggcgcatcacccgccactcgtaccgcaatggctctgaggatggggccctggcctacaagctgctcatccagactggagacgcccaggagcctctggatttcagccagctgaccacaaggaagctggtggacagagagggactgattccacccgagctcttctacatggggctgaccgtgtgggtgagcagtgaccccctgggtctggcagcctcacaggccaacttctaccccccacctcctgaatggctgcacgacaaatacgacaccacgggggagaaccttcgcatcccgccagctcagcccttggagtttgcccagttccccttcctgctgcgtggcctccagaagactgcagactttgtggaggccatcgagggggcccgggcagcatgcgcagaggccggccaggctggggtgcacgcctaccccagcggctcccccttcctcttctgggaacagtatctgggcctgcggcgctgcttcctgctggccgtctgcatcctgctggtgtgcactttcctcgtctgtgctctgctgctcctcaacccctggacggctggcctcatagtgctggtcctggcgatgatgacagtggaactctttggtatcatgggtttcctgggcatcaagctgagtgccatccccgtggtgatccttgtggcctctgtaggcattggcgttgagttcacagtccacgtggctctgggcttcctgaccacccagggcagccggaacctgcgggccgcccatgcccttgagcacacatttgcccccgtgaccgatggggccatctccacattgctgggtctgctcatgcttgctggttcccactttgacttcattgtaaggtacttctttgcggcgctgacagtgctcacgctcctgggcctcctccatggactcgtgctgctgcctgtgctgctgtccatcctgggcccgccgccagaggtgatacagatgtacaaggaaagcccagagatcctgagtccaccagctccacagggaggcgggcttaggtggggggcatcctcctccctgccccagagctttgccagagtgactacctccatgaccgtggccatccacccaccccccctgcctggtgcctacatccatccagcccctgatgagcccccttggtcccctgctgccactagctctggcaacctcagttccaggggaccaggtccagccactgggtga

SEQ ID NO: 86662 - DNA, 353 bp, Homo sapiens
cagttgcaaacctcttctgaatggagaattctttctagaagctccctgggctctccaggatgtatgagaatcagtcctaccttgctgcttccacagttcccaaacacgtccaggcatgtctgcatccactgggtagagacatcttaggccagccttcctgcatgaaggtatgcataggttttatctagaacctgttaaattcagctctaaaatataaagtgtctcatttctataaggccttcctaatactcacaataatctgctatatataaactgggatcacaaattcattcaaatctttttttttaaagatatcttcaggtttcactgtggaacaaaacaggcctactttg

SEQ ID NO: 86663 - DNA, 566 bp, Homo sapiens
caggtagtctggaaagaaatctttttcagatatttggcttctgggtatgattgaatgacagatgacattttccctcccacctgatacagccaagaaaacggacaaaaatatgaaagagctgttttgaattcagaacacaaacataaggtaacaagggacagtgatttctgaaagatgagaaacaaaattatctctctgtaactgcccttagtttttattattttgagtgtttgtaggctgcagcacaggattggggagatacatcctgagctgagataagcacatggaaatcagagaatctgggaaaaccaaggcagctagagttcataatatagacaccaaagaggtggcacaaagagagaacttcagagagctgtagagggtctctcttgaatattaaactgagacatggaagatattagaaaaagactgaaattaaacttctagaggtgaaaactatgatgtctgagatgaaaaacatactgtatggaactaacaacagattagacattgcagaagagaagattaatgaacttgaaaaacagaaattatccaaaatggaacac

SEQ ID NO: 86664 - DNA, 435 bp, Homo sapiens
atgtgacacacctgcacgtgtacgccttgagccgaaaatgaacacgtaacacacctgcacgtgtacgccttgaaccgaaaatgaacacgtaacacacctgcacgtgtacgccttgagccgaaaatgaacacgtaacacacctgcacgtgtacgccttgaaccgaaaataaacatgtggcacacctgcacgtgtacgccttgagccgaaaatgaacacgtaacacacctgcacgtgtacgccttgaaccgaaaatgaacatgtggcacacctgcacgtgtaagccttgagccgaaaatgaacacgtaacacacctgcacgtgtacgccttgagccgaaaatgaacatgtgacacatctgcacgtgtacgccttgagtcgaaaatgaacacgtaacacacctgcacgtgtacgccttgagctgaaaatgaacatgtg

SEQ ID NO: 86665 - DNA, 403 bp, Homo sapiens
accctgggtccaggacccctcatggaacccccagcaaagggctaacatcaggccagaaattactttttggtggacatcccagccaccaaaagccaattccacaaaaatcaattctacgaaaagcaagcccatttgccaaaactgttctctcagtgactcatctgcctgctttgaaaaccaaacaaacaaacaaacatcttgtgattttcctaagggtttcccaagaccctcaccctcagccatttctcctctcattatgggattccttggccttggccagtagaatgccaatggtgctaagctcttctgccaagctgcacatgttcagaaatgcagtttagcattttctctattttggagaactatgctttcttccttcccccacctctgcccttgcccctgt

SEQ ID NO: 86666 - DNA, 296 bp, Homo sapiens
ttacacacttaccttatggaaacctcagaacaatcacgtcttttatagatgagaaaactgaggctttggatgcctctgggggaaccttgggcaagcaatagacagaggagctcctgaacttaagcagtatctgtcacctccctacctttgggtgtcttctggtggccaatgtgctgctgtcaggtccctcgctggctcccaaattggactggggaggctccaaagcagtggagttggtgctagtgccacctccacctcaggattctcagatctgcaggacggcttcacccaccaca

SEQ ID NO: 86667 - DNA, 1986 bp, Homo sapiens
gaggacgcgccaacatccccgctgctgtgctgggcccggggcgtgcccgccgctgctcccacctctgggccgggctggggccgcccgggggccctgttcctcggcattgcgggcctggtgggcagaaccgcggagagggcttcttttccccaagggcagcgtcttggggcccggccactggctgacccgcagcggctccggccatgcctggctggccctgggggctgctgctgacggcaggcacgctcttcgccgccctgagtcctgggccgccggcgcccgccgacccctgccacgatgaggggggtgcgccccgcggctgcgtgccaggactggtgaacgccgccctgggccgcgaggtgctggcttccagcacgtgcgggcggccggccactcgggcctgcgacgcctccgacccgcgacgggcacactcccccgccctccttacttccccagggggcacggccagccctctgtgctggcgctcggagtccctgcctcgggcgcccctcaacgtgactctcacggtgcccctgggcaaggcttttgagctggtcttcgtgagcctgcgcttctgctcagctcccccagcctccgtggccctgctcaagtctcaggaccatggccgcagctgggccccgctgggcttcttctcctcccactgtgacctggactatggccgtctgcctgcccctgccaatggcccagctggcccagggcctgaggccctgtgcttccccgcacccctggcccagcctgatggcagcggccttctggccttcagcatgcaggacagcagccccccaggcctggacctggacagcagcccagtgctccaagactgggtgaccgccaccgacgtccgtgtagtgctcacaaggcctagcacggcaggtgaccccagggacatggaggccgtcgtcccttactcctacgcagccaccgacctccaggtgggcgggcgctgcaagtgcaatggacatgcctcacggtgcctgctggacacacagggccacctgatctgcgactgtcggcatggcaccgagggccctgactgcggccgctgcaagcccttctactgcgacaggccatggcagcgggccactgcccgggaatcccacgcctgcctcgcttgctcctgcaacggccatgcccgccgctgccgcttcaacatggagctgtaccgactgtccggccgccgcagcgggggtgtctgtctcaactgccggcacaacaccgccggccgccactgccactactgccgggagggcttctatcgagaccctggccgtgccctgagtgaccgtcgggcttgcagggcctgcgactgtcacccggttggtgctgctggcaagacctgcaaccagaccacaggccagtgtccctgcaaggatggcgtcactggcctcacctgcaaccgctgcgcgcctggcttccagcaaagccgctccccagtggcgccctgtgttaagacccctatccctggacccactgaggacagcagccctgtgcagccccaggactgtgactcgcactgcaaacctgcccgtggcagctaccgcatcagcctaaagaagttctgcaagaaggactatgcggtgcaggtggcggtgggtgcgcgcggcgaggcgcgcggcgcgtggacacgcttcccggtggcggtgctcgccgtgttccggagcggagaggagcgcgcgcggcgcgggagtagcgcgctgtgggtgcccgccggggatgcggcctgcggctgcccgcgcctgctccccggccgccgctacctcctgctggggggcgggcctggagccgcggctgggggcgcggggggccgggggcccgggctcatcgccgcccgcggaagcctcgtgctaccctggagggacgcgtggacgcggcgcctgcggaggctgcagcgacgcgaacggcgggggcgctgcagcgccgcctgagcccgccggctgggcagggcggccgctgctcccacatcta

SEQ ID NO: 86668 - DNA, 481 bp, Homo sapiens
attttattaaacctatgcaaagaaaggaatcaaggttgactcctagatttttagcttcaatagctggttagacagttgtgctctttactgagatggggaagatgagagaggattaaaaaatcctgtctttgagaattattgtgttattcagccttcaagaattattcctgttataaacctaaccgccatctttatttcttaatgagaatgttaataaaaactcatttgactttcagcattttggaatttgttcatgttttgatgttgaataaacctcataactatgagttagttgaattataaagcagatataatcttcagagaggatatgttaccctttacttctttttttttttattatactttaagttctgggatacatgtgcagaacatacaggtttgttacataggtatacacgtgccatggtggtttgctgcacccatcaacccttcatctacattaggtatttctcctaatgct

SEQ ID NO: 86669 - DNA, 664 bp, Homo sapiens
  misc_feature (609)..(609): n is a, c, g, or t
  misc_feature (624)..(624): n is a, c, g, or t
agttgacactgctcacctgtgatcctctggcataaccaccttgcaaagataacccaagagaaatggaagcctcagggatataccaccagatgaactgacggcaaggtggaggttttcgcattcccatggcaggtttccttatcagcccccatctcccaccacatcagaaaaggagtaaatagatctttcctgatttcaggcccagaactaggctcaagaagaaagaagtgtactctcacgactggctaagacttgctggactgacacctatggctggaagatgacttgttttgctccatgtctcctcattcctacacctattttctgctgcaggatgaggctagggttagcattctagacacccagttgagctcaggcgtagagaagaggaggatgggataagaactggggccatccccatgtcatggtgggtgagagctggggccatccccgtggtcatggagggtgagagctgggggttatccccatggtcatggagggtgagggctggtcgggggaggcatccccaagtcatggtgggtgagagctcggagcatccccatgtcatggtgggtgagatctgggggtatccctgtgtcatggtgggcngtcgcgcagcgggtncggctcgaatcgtatctgtcctgtgtcgggcgtggcaaaa

SEQ ID NO: 86670 - DNA, 2278 bp, Homo sapiens
  misc_feature (1778)..(1779): n is a, c, g, or t
  misc_feature (1783)..(1783): n is a, c, g, or t
  misc_feature (2223)..(2223): n is a, c, g, or t
  misc_feature (2238)..(2238): n is a, c, g, or t
gaattccgcccgcccacggcggcggggaaatacctaggcatggaagtggcatgacagggctcgtgtccctgtcatattttccactctccacgaggtcctgcgcgcttcaatcctgcaggcagcccggtttggggatgtggtccttgctgctctgcgggttgtccatcgcccttccactgtctgtcacagcagatggatgcaaggacatttttatgaaaaatgagatactttcagcaagccagccttttgcttttaattgtacattccctcccataacatctggggaagtcagtgtaacatggtataaaaattctagcaaaatcccagtgtccaaaatcatacagtctagaattcaccaggacgagacttggattttgtttctccccatggaatggggggactcaggagtctaccaatgtgttataaagggtagagacagctgtcatagaatacatgtaaacctaactgtttttgaaaaacattggtgtgacacttccataggtggtttaccaaatttatcagatgagtacaagcaaatattacatcttggaaaagatgatagtctcacatgtcatctgcacttcccgaagagttgtgttttgggtccaataaagtggtataaggactgtaacgagattaaaggggagcggttcactgttttggaaaccaggcttttggtgagcaatgtctcggcagaggacagagggaactacgcgtgtcaagccatactgacacactcagggaagcagtacgaggttttaaatggcatcactgtgagcattacagaaagagctggatatggaggaagtgtccctaaaatcatttatccaaaaaatcattcaattgaagtacagcttggtaccactctgattgtggactgcaatgtaacagacaccaaggataatacaaatctacgatgctggagagtcaataacactttggtggatgattactatgatgaatccaaacgaatcagagaaggggtggaaacccatgtctcttttcgggaacataatttgtacacagtaaacatcaccttcttggaagtgaaaatggaagattatggccttcctttcatgtgccacgctggagtgtccacagcatacattatattacagctcccagctccggattttcgagcttacttgataggagggcttatcgccttggtggctgtggctgtgtctgttgtgtacatatacaacatttttaagatcgacattgttctttggtatcgaagtgccttccattctacagagaccatagtagatgggaagctgtatgacgcctatgtcttataccccaagccccacaaggaaagccagaggcatgccgtggatgccctggtgttgaatatcctgcccgaggtgttggagagacaatgtggatataagttgtttatattcggcagagatgaattccctggacaagccgtggccaatgtcatcgatgaaaacgttaagctgtgcaggaggctgattgtcattgtggtccccgaatcgctgggctttggcctgttgaagaacctgtcagaagaacaaatcgcggtctacagtgccctgatccaggacgggatgaaggttattctcattgagctggagaaaatcgaggactacacagtcatgccagagtcaattcagtacatcaaacagaagcatggtgccatccggtggcatggggacttcacggagcagtcacagtgtatgaagaccaagttttggaagacagtgagataccacatgccgcccagaaggtgtcggccgtttcctccggtccanntgcngcagcacacacctctgctaccgcaccgcaggcccagaactaggctcaagaagaaagaagtgtactctcacgactggctaagacttgctggactgacacctatggctggaagatgacttgttttgctccatgtctcctcattcctacacctattttctgctgcaggatgaggctagggttagcattctagacacccagttgagctcaggcgtagagaagaggaggatgggataagaactggggccatccccatgtcatggtgggtgagagctggggccatccccgtggtcatggagggtgagagctgggggttatccccatggtcatggagggtgagggctggtcgggggaggcatccccaagtcatggtgggtgagagctcggagcatccccatgtcatggtgggtgagatctgggggtatccctgtgtcatggtgggcngtcgcgcagcgggtncggctcgaatcgtatctgtcctgtgtcgggcgtggcaaaa

SEQ ID NO: 86671 - DNA, 836 bp, Homo sapiens
ctcctgcccaccacttaggctcataattactctgcaatgtactcatgaaacaggctagggtgtaaacattctttctgagactgtgcctctcgcacaggcacccagcctggaaatcaatggcacagaaaggatgaggtgagagtttggctcttggcctgtcttgtggagccagccatgctggcttccagaggggacaactgttggctctttaaggatgatgggagtccagctgttcaactttgaatggctgggaaagcagttacaatatgattgtaatcaagaaagggcagcagaaccagctggagaaggtgccccatgaacatactcaggcgccacctctggacagtctcatgttgactcagcagaacctggacgtgtgtgttttgaaagcagttctcgtccagttgggtccatgctgcgtctaccaccggaaactagggctctgcagacttttactcgtataagttcccaggagctgacttgtttcctaacaatcatggtgcagatcagattattctgctcccataccacttttttgactttaaagaaatgtttaagcagtgccctcattgacatccaaaacctttccatttggcattcataatgtgatctgtattagtaaagtatataatggactctttgtttcattattataattataattattattatttttttgctgtcatttgtagctccggattttcgagcttacttgataggagggcttatcgccttggtggctgtggctgtgtctgttgtgtacatatacaacatttttaagatcgacattgttctttggtatcgaagtgccttccattctacagagaccatagtag

SEQ ID NO: 86672 - DNA, 579 bp, Homo sapiens
gaagcttcatctttttaagggctaccttcagagaaggtgaccccattctcagctcagcccatcatgggaaacctaatcctgttgctggtgatttgttcagtagtggacatgacacatgtgggaggttggtgaggctggggtccaggtgcctctagaaaaattctccttgatcttaagaaagagatgcagagagaaagatccttggatattgttgtgtctgggtgtgacctccggggctgtggcagccatcttgcaaccaggaggcaatctggtttgaggacacgactgacagatgcagagaatggcagaaccaaagatggaaaggataggagtccctgatgatgtctttaaggtgtgaaactaaccagccctggagctgccctaacttgggacttctcattagagggagtatacatttccttattacataagccaagtgagttggggttttctgttactcacagcctagatcatcctaatgactactctatgccatagagagaccatatggtctgtgactgtttggagaatacagcagggacatgggctcagctctgccgttgaagagcctgggacatc

SEQ ID NO: 86673 - DNA, 645 bp, Homo sapiens
aagacggaattttgctcttgttacccaggctggagtgcaacggcacaatctcggctcactgcaacctctgcctcccgggttcaagcgattctcctgcctcagcctcctgagtagctgggattacaggcatgcgccacagcacctggctgattatttcatgtttcttatatataaatcagctttaggatggtagagtgaagaaaacaggagttagagtcagaagacttgcttgctagccctgtggcctaacttaggtcacttggccttgttgggacttggtttcctcaagtgtgggatggtagatacgctgcctaccaccactaaactgttgtgtgcatgaggcatagtgcatgtggttaccacacaagctgtggcagtaatgatgccatacttttgatgatctcctaaagaacatgtcaggcttattcctgtatcatcatatggcacacagtagatgctcaatttgtaataaatgaaaaccattattttaaatccactatttccctgaatgaacttctattctgatatctgactgccctttgatcattattgttagcaactacaacacgatcaccttttctaaatgccaagtcagtttctaataatatagttgctttcaacagctcctaatttttcttttttaat

SEQ ID NO: 86674 - DNA, 469 bp, Homo sapiens
gggccggcatctacgttcttgacagccttccgggtgaccctcacatatgctgatggttgaacacactggagtggtatgcttttgagaagaaaagtaacattttacatacttgctgttttcctgatgggcaagttttatcagtgcttgttctataatgttttaactactatgtgaattattaatggcaacaaaattttatttattttatttttaagagggaatctcactctatcacccaggctggagttgcagtgagccgacatagcaccattgcactccagcctgggaaacagagagagactttgtctcaggaaaaaaaaaaaaaaaaagccaggcatgcacttgtagtccaagctactcaggaggctgaggccagaggatcacttgaacctaggaggtttgaggttgcagtgaactatgatcacggcacttgcactctagcctgggcaacagagcaagaccctgtctg

SEQ ID NO: 86675 - DNA, 489 bp, Homo sapiens
cctttagtctcttccaaatgtttaatactgcagagaaaaatacaaccaaaggagatagaacaaaataaacatatatactaatttttatccatttcagttttaatacattccaaaatacgtcaatgtttatgcattccaataatcatcacatttcagatcaatgataatgtactgggttggaataggtgctagaaacaattctagctttggaaaagcttattctttatttcaaaaaagaagaaacagaagaggagaaaagtaccccctttaatttgtcctttagttgaatgttcagttcagaaaaacaaaaaaaatggtatttaaaaaaaacttgctgggcacggtggctctcgcctgtaatcccagccagcactttgggaggccgaggcacaagaatcacttgaacctgggagacggaggttgcagcgtgccgagatcgcaccattgcactccagcctgggcaacaagagtgaaactccgctccatctc

SEQ ID NO: 86676 - DNA, 637 bp, Homo sapiens
attgaagtatgtttatgtcatgatagtaataaaatgtaatatatagtaatataatgatcacatgtagccatgatggcatgggatcataaaatagagtttcaactcttgtaattaaggcccaagaagttattttaatttttttactataatattactatattatgttttcaatatgtaaaatagagaaaagaagaaaaagagatattttgttatcctaattatctctaactcctttttccctgtgcgtctttattctacctctttataattgctatgtagttagcaaaactgttccttttaataattgctatgtagttagcaaaactgttgttacgtagctttttaatttttatttcatctttttgctgtgattttgtgtctacatcatattttattcaattgatgtacatacatttcttggtcatttcagtataatattttctagattgctttactttttaaaattatactgttatactatttaaatcaaactatgatgaatgttttcataaacataatatttttttttgtactattctctaggctatcttcccagaggaagttgttttaaataaagagattttaattttaaatgatactgcattattttataatataatgtaatatattaacaata

SEQ ID NO: 86677 - DNA, 346 bp, Homo sapiens
gctaattttattctcctttctatttagaatttaggtttatctgtttgccttgaatgaagtatgtcttttctcttttgttcttgtttcttttcctatgtatgtgtaactggtcacttcattccaataattgctttgattgtttatttatattttactttaatggcttatcagaaatgaatgactatttaaattacaaaaaagtcaaaatatgttatacatgaaaatcaagccataatagctggttaatagctcaggagcacaagttaataattatcagcgaatgttggcactttgattggaggcttgtacttttccttcataagtcatcataattgtaattacatat

SEQ ID NO: 86678 - DNA, 692 bp, Homo sapiens
ggcctgtggtgtagacctggtgccagctgccctggagactctgtgctgtcctgtggggtctttggcagtagaggaatggcccattttacggagactgccctgtgattttgcttgggaagagaccttgggtctcagttgtgccttgcgggcagcaccgtctcaggggtttccagccgcagggctgtgggagttcacgtttgcctgaggctggatgtaccggctcaggcccccagcacacaacccacatcactcactggctcttgggggatgtgcctcagcacctgacacacaacacctggttctgagtgggctgggtccaggcaccttcgctaagcttcctccaccagcgggacctggttctgggtgggctgggtctgggcaccttcgctaagcttcctccagcaccggggctggcaaggagcgaggcaaaggtgtgtgtggtgccatcctgtaggagccaggctccttggggatggtgtccttcattttgaaaatgtttccttcccatggggagggggcagccagaatgcccactctttaatgcacctgtgccagtggcccacagggacacggtgtcccctccccgcgaccacccctgtgccgcagctgcccttcccagacgcatccgtcgtgagtggctctcgccgtgctgtggctggttgagctgagtgcccagcgctgggcaccctctg

SEQ ID NO: 86679 - DNA, 484 bp, Homo sapiens
caaggagacctggcatctggaacaggactgtgttgagatcagagagacccagtctgtagtctgattgatctctactgactttgaggttatggaagttgtaggaaggttgttgttatggtttatacagcatgtagtatattttcattcattccacattccactcaatatttgagtacctactagacatagttcaaggatttctgtacatgaaatgtgccaaaatgcttctccataaaagcagtgaatcacctttgcatgaattgagttagatgttggttactgggctcccttgagttgtgggttaggagttaactgtggcctgacctggatccctgtgactaggtgatgctctcgagtttgccagcaacagaaccgtctctgcgtccaacatctcctaagcgggacagtagcgtgggctgtggcatgctaggaagatcactctggccagttgtgtacaagataaattgcaggggaaggaagtggg

SEQ ID NO: 86680 - DNA, 361 bp, Homo sapiens
tacctctccaaaatcccaccttttcaaaacatacccctgcacatagcaccaaatcctcacagttactgctgcagccaggcattgagatgaggaagaggagatgaaaacacgcaagacacagactccggttttaaggagctcacagccctccatgtctttgctcctgtccagcatttatagcctctcagaagtttctggaatgttcctcaagattctttccaccttttaaattctagtctttcaaaagtgactcaaattatgtcttctttatgaaggcttttctgaggcagacataattagtctttctcttctgtcagctcccagattatttacgatagggtggccattctgttttatataa

SEQ ID NO: 86681 - DNA, 367 bp, Homo sapiens
gctgggattacaggcacctgccaccatgcccggctaatttttgtatttttagttgagagagggtttcatcttgttggtcaggcggacttgaactcctgacctcaggtgatcagcccacctcggcctcccaaagtgctgggattacaggtgtgagccactgcgccttcatctctcttctgtgtatgtgtacgctgttttttctttagaatgggggacgttatcaggctctacatggtgtgtagtcggctagcatgttgtaagcctttccctgtgtcacaagtgctcatctggaacaggattctaatgactgcctgtggctatgttgggattcctttaactcagctccttctgcccagcatctatcttt

SEQ ID NO: 86682 - DNA, 252 bp, Homo sapiens
tttcctgtggaaaattgaagctttgaagtgtctagctccggctttcgcagacgggcagcaccgccagcgcgagctctcgaaaacaagcgccccggccccacccccttcaaggacagaactgcgggttcaaacctacccaagtcaggccttcaaaacagtggggcatgaagagacgatgatagaacctgctggaaacgacgccctaaactaacaaccccctccagaactgccccccgccagctccatcctgcc

SEQ ID NO: 86683 - DNA, 381 bp, Homo sapiens
tacctgagttcacagctggagggatggtcagtgaaggcacaaatgacctgagaagtagaagcctatcactttccttgctccagagtgcaaagttcaccattttccttatagttaaggtcagttacccacatcaacataagagtaatactctatggattactcagcaacagcaacctaaccacttcaccctggaaacttttaggacacgtttgcataactaattatgtgttatttggattatcagaagagcctgtattccctgagctcacattatttagaacaggcagtccacaggtagctgagaagagaggggatttttttgtttgtttgtttgtgtgtttgtttgttttttgagagagtctcgctctgtcacccaggctg

SEQ ID NO: 86684 - DNA, 1292 bp, Homo sapiens
tttatttttgcagtaattttttaatctcaaaagtgtcttttttgtcttatttcatcttcacagtttcctgttcttattatataaatatatctccctaatctgagtctatggattggagttttatccaatccattcattccaatgattggaatgattggagtcattcacatttctcaatccatttattttccgtttctttgcctggtctttcttttatgtgatgcagctctccttgaatgtctgatacattttcatcctttaaaatgaagccgatgggtgacaggaagacgtgcttccatgaaaggcagtgtttcactccggaacctcagctcccgcacgctggatccagatccacagcatccccaggacctcttctcccctctgggtcctgcccccatctcactggctcccatctcagattccctgtgaggctccacgcttggcttcacatgcaaagtctaggggtgaggggcccctcccagcctctcagctggcagtcctgggcctgtgctgggaaacatgccctccccgcccgcagccggaggagccgcatggctgtcttgagtggaggtcacacatcccctcccagggccaggggagggaacggtcacagatgttcctcatgagccaaaaataagcaaggtctggctgcggtgctgtccactgccggctccagcaccaggggttgcccaagaacccccttgactccttggggtaagcagctcactgctggctgtcctgtgtgtgatggggaagggggactcaacccgagtgtgcagacctatgatgacccccgctcccacctccacgtcccatggccacggcccctcccttccaagctccttctgcctgatgggcagcaccccctcccgtctggagtctgccggggcccttcctgctctccttcttaatttattttctgtcttggagggaagctgggtgcacctgctcaggtggccccctagggccagaagacctgtcagtcactttcaaatacatgttctttccagctcttccttgccaaaggttctaaaaacactgttgtccgtctcacccaaaaagctaagcttctgtccaatccttaacggtagctataaatgagaagcataagcttggtttccttctaacatccggcaagttagaagatagaacgtatttcttcacttattcatcacatatttgcagggcacccctacacgggacagcagaggtcccaggccggtgctgcacccggagccaggctcggagctggccgcgcgccctcagctgaaactcaccggaggcgcggccgc

SEQ ID NO: 86685 - DNA, 1123 bp, Homo sapiens
ataaaggactagtgttcttttctaaaaagggaagatggatattttttctataacctttataattccattataataaaatgaatgataggttataataaaatgaattttttgcatatgattttcaaaaggaaactaatttatttttctataaaatatcgcaaaggaatcgaatacatttttattctatgtaaataataatataattttcacatttaggaggcaatagcaaatctgggaagcagttattctaagttggaagagcattatcccaatgcattgaaaacatttgatgactattttttatgtcttctttattttgatgattataataatgttctaactgggtggccttcgtttttcactctagtcagtccatcttgtttactatgtcaattgttctccaaaaagtagaaatgtcattgttttggggccatagaacatttcagaagctttccagtatctatgcagtaacagtccaaacccctcaacataacacatttacacctgcaagtatggccccaaatcttcaagtggcttctgtcactactccatagtacataccctttgttacagctgtttcacaaatacaggttgaatatcccttatctaaaatgtttgggactaaaagtttcagatttcagatatgtttggattttggaatatttgtacatgtataatgagatactcttagagttgggacccaagtctaaacaaaattcatttatgtttcatatataccttatacacataacctgaaggtaatttatttttcccttgggaacactgaatagactatatgttgtgcacctacattttgactgtgacctatcacatgaagtcaggtgtggaattttccatttgtggcatcatgtcagtactcaaaaagttttggattttggattttgaattttcagattagagatgctcagcctaatagcaaatgttcccatgttatacacctcaacctcccattcccattggctggaacatctctgcttatattaaatgtcttttatgtgaaatctgtgttctcatagccttttgtatagttctctaccatctcatggctcacattgtattgtacttatttgattaaatatctggatcatctactgtgaaaaat

SEQ ID NO: 86686 - DNA, 1227 bp, Homo sapiens
ataaaggactagtgttcttttctaaaaagggaagatggatattttttctataacctttataattccattataataaaatgaatgataggttataataaaatgaattttttgcatatgattttcaaaaggaaactaatttatttttctataaaatatcgcaaaggaatcgaatacatttttattctatgtaaataataatataattttcacatttaggaggcaatagcaaatctgggaagcagttattctaagttggaagagcattatcccaatgcattgaaaacatttgatgactattttttatgtcttctttattttgatgattataataatgttctaactgggtggccttcgtttttcactctagtcagtccatcttgtttactatgtcaattgttctccaaaaagtagaaatgtcattgttttggggccatagaacatttcagaagctttccagtatctatgcagtaacagtccaaacccctcaacataacacatttacacctgcaagtatggccccaaatcttcaagtggcttctgtcactactccatagtacataccctttgttacagctgtttcacaaatacaggttgaatatcccttatctaaaatgtttgggactaaaagtttcagatttcagatatgtttggattttggaatatttgtacatgtataatgagatactcttagagttgggacccaagtctaaacaaaattcatttatgtttcatatataccttatacacataacctgaaggtaatttatttttcccttgggaacactgaatagactatatgttgtgcacctacattttgactgtgacctatcacatgaagtcaggtgtggaattttccatttgtggcatcatgtcagtactcaaaaagttttggattttggattttgaattttcagattagagatgctcagcctaatagcaaatgttcccatgttatacacctcaacctcccattcccattggctggaacatctctgcttatattaaatgtcttttatgccaaaaaaaaaaaaaaaacaaaaaaaatttttcggggctcggcctcagagaaatttttaaaccccttcggttggggcgccgccccccagttatgaaactggccacgggtcccaagaacccggcccaccagggtggttccccaaaaaaacccggcgccccgcttttagacaccaagggtcgggccccggtccacaggccagagcctaacgt

SEQ ID NO: 86687 - DNA, 476 bp, Homo sapiens
catgtcaccataacatgacatgacctgcagtatcacagaattccatgtgagctgtgtcgaaaaagatcagtcctttctagtggtcagttgcctacagaggcctctgttgcactttttactccacgattgaaacttttttagaatttactgatcccatgtagcatcttggatattagactctgtttaagccaaatagagaatacttacagaaagcatgaagctgtgattttgaaccactgctcatggttgggcctgaagttagaggaatggttatgagcgcacttattcagagcggtacctcagcaccagcactcttacaggtgcaccatgatacttttaatcagtgggcaatatttgtcaaggtcccactgtgccatagccttgcttaggtgctgtaggtgaggtgaccatatgatttatcaccagagtcactttgagaaggagagggagctgttaataactatactgaatcataa

SEQ ID NO: 86688 - DNA, 585 bp, Homo sapiens
  misc_feature (582)..(582): n is a, c, g, or t
tccactttgttacttttttcacttaaaggctaatctgattagctttaaaacatttgttcatcttttaattcagtatttgtatgatgcctatggaagacatatggatttaaatagaacttggctaaccatctgccaataagagaaagtgagatgctaaatcagagaggcaggaaagtctatttcagtaaaagctattttgatctgaaatactgtaggcagtcttacagagtattttaattgggaggatattgatgcatgctagtaaaagaagtgtatttgctgatatggttgaagttatgtaatcattaaatttctatataagtttagagatgtggaactatgtgaaattttgatcctgttaattataattttttttcctaaaaaagccatttgtggaaaaaaattttctgatatattttttagagcagtggcacgttttatatctcatgccagaaactagagcataaaatatcaacttttcaaataaattaactagaaataaagaacaatttattcagtgctaatttgttgatacttttttatagtaaactatgttttaaaaatttaactttgggaaaaaanaaa

SEQ ID NO: 86689 - DNA, 226 bp, Homo sapiens
ccgggcagctagtcgtgctcggggcttcactcccgcgcgtgaggcgagcgggcaagttggctgagggcgtgcggcagaggctgcttccctcggcgacgcgacccctcagcaactcaagctatgaactgaagctccctagggacggagaccggagcggagcacggaggcagcagcagcagcagcagcagcagcagcagcagcagccgccgccgccgccgccttagcg

SEQ ID NO: 86690 - DNA, 289 bp, Homo sapiens
ggttcaagagattctcctgcctcagcctcccaagtagctgggattacaggcgtgtgccaccatcccccactaatttttgtctttttagtagagacggggtttcaccatgtcaggctggtcttgaactcctgacctcgggtgatctgcccgcctcagcctcccaaaatgctgggataacaggcgtgaagcaccatgcctggtcttctcttttgttcttaaccctgtctagttgcactcattcattcattaaaacactagtcactgagtgatagttatgtgtcagccatgg

SEQ ID NO: 86691 - DNA, 446 bp, Homo sapiens
acatttctcagcccattgaggcctatagtgatgaacaaaatatcccataatagaagctagaaaaaagctatttccaaaaatgctttgcaatgtgtggatttatcttacagaattaaacctttattttgatttgacagtctgcaaacacttttttttgtagaaagtacagagggacatttctgagaccatcaagaactatagtaaaaaaatcaaacaacctgccttaatatttagaaacaagctatctgttaaaatgctttagaatattttcattcatgtcacagatttcaacctttttttttgattcaacaagataaaaacactcttttagttgaatctacaaaaagatatttcaaagtccgttgaggcctatagtgaaaaactgaatatcccgtgataaaaactagaagtgagccctgtgtgaaaatgctttgtgatgtgtggat

SEQ ID NO: 86692 - DNA, 614 bp, Homo sapiens
actacactgattaaaaagtccagaactgagaagtttggtacaacaaatgcatcttactgacaaattttttcataggtcaaggttttaaaaatttttaacagatggtcaccagaggaaaaaggcataattaaatctactaaaatgcatttttaatcaaaatgtttaggcaagtgaggcacactcatgactatacttcttcttactgatattttctcagatatttgaaaacaactggtatatcttgtctacgcctgctcttctgtatgatatttgccatcaccccagccattcctcaaatgctgtgatgtaacaaaccttcagagctacctccactctttctccaaaagtgatataggatgtgtgatcctacccaaatctcgtattgaaatgtaatctccaatgttaggggaggggcctggtgggagatgattggagaataggggctgatttctcataagtggtttagcaccatcccccttggaactgtcctcatgacagtgagttctcatgaggtcattttaaagtatgtagcaccttcccactctctcttgctcctgtttatgcagtgtggcatgcctgctcctccttaaccttctgccatgattggaagcttc

SEQ ID NO: 86693 - DNA, 376 bp, Homo sapiens
tctcggctcactgcaacctctgcctccctgattcaagtgattcttttgccacagcctccccagtagctgggattactggcactcaccaccacgcccggctacattttgtattttcagtagagatgggttttcaacctgcgggccaggctgctctcgaattcctgacctcgtgtgatccgcccgcctcagcctcccaaagtgttggaatcacaggcatgagccaccgcgcccggccaggaattaaccttcaccaggatagtttgtggaattttatcaagaggcttcgctcccatctcctgctttcttaacagagtttggaagcagcggaccggataggaaaactgcttagggttccaccctcatgccaagtggcaga

SEQ ID NO: 86694 - DNA, 456 bp, Homo sapiens
ccctaagggaaattattccaaccttattgttctacatggtccatgtcattctggatttccttagcttttgacatattatcaatgataagtaggaaattgttactgttagaagtgtgagaaatgtttgtaagtctcctgcttttctatttgatgaaatagtttaccaggtactaatcataaatttttagaggaaattttgcatttgcaaaaactaaattcaaatgttgagctggccagcatttatttttcacatttattttgtatttcataggcttgataccaagcttcttggtattctttatgtgctttgtaagggcggggttcactctgaaattgctcagttcactgtttctaagacattggcaggatttggaaaaggacatgaattcagctgctgggtcagaaatgtcaccatcatgaagttagaagatggaataatgcaacagtgtgctgtac

SEQ ID NO: 86695 - DNA, 1346 bp, Homo sapiens
cattgtcacctcttggttcatggtatgtgattaagagatggtaccattgccctctgattgccttgcttctggtgctccctctcctgaagtggccctttttagtcagatccttaaagctatttcaacatttctccacccgtatccccccaccaccctccaccaaatacacatgctttgcactattacagatgttaacttgtcaaagtccagaagctcctgagaagtcagcaggaagacatggtggattgaggcatagccatgacctgaaggaaataattaaaatgcaggagggttgctgtgagggacacactaacttagtacatctttctctgatgaaatctgtcaggctcttagtttaccaaatgtgggaacttttgtgcttgttttgctcttaggcacaggataggtcccaggagagattccattcattcctcaaagagaaacagaagaaaaagaatgaagtctcactaatagcttgttagaagaattgtgtttactctgagatctgactcaagaaatggacatggaatctcagcaaatccaagctacagatgatatctgttttgcagctgggccatgcagagctcagccatggcttctcctgaccaagggatgttaaagttatctagaacattaagagtgttaatgagtatatacagagagactaattgtgagcaaaatcattaattagggtcatgtttacatttttattgtggctaatctttcatctgtttggactaaggttcttactgtgttccaaaggtgataataatataactaaattcctctgatactaaagtagtcacacttttatttcttaatttacctgagttgattcctggccaccctccccctccttatcacactagagataattttcagtaatgttttctttatgctgttaagtgattcccttcccagtggaacgagaaggtgaatgtacttaatgaaatgattgatctgcattttggcattcgtccaaattgataaaatatagagggacttttccattcattattttgttcatcatttatagaaaatgcggaaacttttgggtaggtttggctttctgccaattaatgttgtcactgttttcctctgatgcatattcacatgagtcaacagaaaccttttcgactaagcagagttagatttagcgagactgcgtacatcacggtatttattggatgtggaaacctaaaataggaggggcgtggtaaaacctcagacagaagtactgacaaagagtttccccaaacaatagaaccgccatagcccgcacacattcccaggacacattctacagaatggacaaagaaatactcatctgtgtcatcacttgctca

SEQ ID NO: 86696 - DNA, 372 bp, Homo sapiens
tagtataccctcttttctcagctccccatcagcccagagccattgataaattatcacatcactggttttcagaattatttttttgaagtatagaatcacttatttcaaacaaaattgagtatacaaaacagataaatatgggtgggttttctaattaaagttggagtgggaggctagtgacctgcctgctctaaacccctttacctcctactcaggtccctgaaacacaaggaaaatgccaaaattaaagaaatgcttttttcaaatgaaatatcgggcaatagaaaatgagagacaaaatgcctaacttaggtcttttgtcttgtgaatcccagagaaatttcattttatttattatgaaagtaattgagg

SEQ ID NO: 86697 - DNA, 274 bp, Homo sapiens
ggtgggtgagtgaacgtggaggcctaaagcattagtgtatgtcctgcacacttagtatacaacactcaacactcaggctacactcatttttaaacactttcttcagtaataaattaacctaagcttactgtaacttgatgtttaaactttttgctttttttaattacactcagtttaaaacacaaatacattgtacagctgtacaaaaatattttctttagaacctcattctacaagcttttatttatttattttttgacatggagtctcgctc

SEQ ID NO: 86698 - DNA, 130 bp, Homo sapiens
atggtttgaagacttttaaaaacactaaagaaaactccagaaactatacaaaaagtagaaaccaaagcagtcacacccttgatggtgaatgagaggacaataggctcacaaatcaatactgaccagcctt

SEQ ID NO: 86699 - DNA, 444 bp, Homo sapiens
actgatgaactaactgtgagagaaagagatgacactggggtagctttatgaaatctgtcctctgttacaaaatgacttatctgaaacatattgaccagagagttagaactcttggaaaaagggtcattacttggggaaaactaaaccctggacattttagtgagtcattgaaaaaggaactctgagtttagacaaataagaagtggtaacggtgtttctgagttctccaggtttctgcatgccaagaacaggacctattttctccattggtagttcctgacccaaggaacaggggaaatttaaaagatgttggctaggccaggcacctggtggcttgtgccaaagcctagccaaaaatcccagcactttgggaggccaagactggaggactgcttgagttcaggagtttgagaccagcctgggcaacgcagtgagaccttgtct

SEQ ID NO: 86700 - DNA, 394 bp, Homo sapiens
cagtaagtctacacctaggtacatgcccaaaagaactgaaaacaggcactcaagcagatacttgtacatgtcaatattagcatagctaaaatttgaactataattaaaataaacattgtcatattactgcatcctaaatatgctaaccaacaaaaaaaaattaaaatcaaattaagaaccaaaaacaagcagattttatgaagattataagtattgatatttttattacagactggctaataaattttaaagcactgattaaataattatacaacagccatatcagttaagctttttaaaaaatataagaaacatacagcttataagctgccatatttgcagtaaacttttgcaaactttgtaaaggaattttgtgacactcccaaagtaatat

SEQ ID NO: 86701 - DNA, 262 bp, Homo sapiens
ttaaccctcaatctatacatcaccaaattgttttaaaatgtaataaaggccaggtttggtggctcacgcttgtaattccagcaccttgagaggccgaggtcagctgatcacaaggtcaggaggtcgagaccagcctggccaacatggtgaaacgctgtctctactaaaaattttttaaaaaattagctgggcgtggtggcacgcacctgtaatcccagctcctcgggaggctgaggcaggagaatcacttaagccctggagg

SEQ ID NO: 86702 - DNA, 563 bp, Homo sapiens
ttttaagctacccaggctgtggcaattggttatagttgccaccagaaactaatatactagattaccttttgttaaatttaattaattccaggctgggcaacatggcaaaaccttatctctacaaaaaatacaaaaacttagccaggcaaggtggcatgcccccgtagttccagctgcttgggaagctgaggtgggaggatctcctgaacccaggagatcgaggctgcagtgagccctgatcactgcattgatgacagagtgagatcctgtctcaaaaaacaaatcaaacaaaaattcatttattcattcatttgaataggtaatacatgcatatagttcaaaacgttaccagtgtaaaggatatatgctgaagaagagatctctctcctttccatggccaggagccacctagttttccaccccggaagtatccaaccattacttgttcaaggtgactaatcttttgcgtgtgactacagaattttgcagagtatctcaaaataatctggaaggtagaatgtggtcatggggtaattaatggaaagacaccttgtccttgcaga

SEQ ID NO: 86703 - DNA, 676 bp, Homo sapiens
ggacatctagatatgagctccatatggtattggcacagaagtatgtaaaaacactgcaattcatataaaaccaagggtgagacagtttggatatttgtccccacccaaatctcatgttgaattgtaatccccaatgctggtaggtgtttggatcatgggggtgggtccttcatggcttggtgatgtctatgtgatagtgaatgagttctcgagatctggtcatttaaaagtctgtggcatctcatcccctactctccccctttctctctctcctctctacttcctctgtctcatactgtcttgctcctacttttgccatgtgacgtacctgctctcccttttgccttctgccatgattgtaagcttcctgaggcctccccagaagctgatgccacgatgcttcctgtacagcctgcagaacctgagccaattaaacctcttttcttataaattacccagtctcaggtatttccttatagcaatgcaagaacagcctaacagaaggagctgccccaaatttgacaacaatcttaaaatattacagacactaccaataaaacgagttgtcaatctcaaacttttctaaactatcaataataaacacaatttgatcagtcatggtagagaaaaaagtacactgttgacatatgaagaagtggtcaaaaagtatacagtc

SEQ ID NO: 86704 - DNA, 259 bp, Homo sapiens
tgcaccagccaagaaatgggtgaaggagctagagaggcaggccagccccaacattgtcactgtacttgtgggtaacaaggcagacctggccagcaagaaagccccagaattccacgaagcacaggactatgcagacgacgacagttgactatggagacatcagtaaagactgcaatgaacgtgaatgaagtttacacggcgagagctaagaagattcctaataagccccagagtgcacctggtgctccaggccaaaact

SEQ ID NO: 86705 - DNA, 402 bp, Homo sapiens
tttgtcttatgtagaattgcctatagtaagaaaacccagtagagaaagtggttttgagaccattcggcagctgctttggacacctggagccatttcttttacagatgaagatgcattgtgtcattgtctcaggatcctcgtcctgttgcttctctggccacaaattgttctttaccaaagatgattttatttcactgtctttgaaaatcattctttataggtagaatatgaagattctctgaaatgattccaaaatgccaaactcaaacactattgtccgatttctttacttgcaacaagagagtagaagggacagtatttgttttgtgatgttggggcgttcatcagggagagaatttgagataagtagaatagcaaatagaaatagtgaaataactagat

SEQ ID NO: 86706 - DNA, 361 bp, Homo sapiens
agaggccgtcagacaaaaggggaagggaccatgccagatacacatgagcagaggcccaaaggcaggaatagcacagcacactcaggggctatagagagctccaaatgctggaatatgcagtataggagaagtaaagaaatgcagtgatggaagggtcagcaggggcccaacccagagagaccctgggtgcccactaaggggacagcactgctgggcagacaagatgcacaaggaatgcagttatgaaactctaggacagggcaattcctaagtatataccctagagaatccaaaacatacatccacataaatgcttgtacatgcatgtttactgcaacattactcacaccacaaagtggaa

SEQ ID NO: 86707 - DNA, 183 bp, Homo sapiens
tccattatcagctcttgctaatggctctctgagaaacaggtggttaatgttaactgctacttcaaaagcatctgttacatgtgaaacaaactccctcagctctccttaaaactgtggtgagcctcttctagccgtgtttattacctgaacttctctcattgcaggtattggctatgtaccttt

SEQ ID NO: 86708 - DNA, 511 bp, Homo sapiens
gtcagtatgaatcctgagtttcctgcttactaactgtgtgatcttgggcaagtcactttactctctgagcctgggttttcttcttggggctaagtataccctgttgatggagtagttgtgaggattaaatgagacaccttatgggaaagtgccgaccatgtacaaggttcttataaggattgtttttccttcccttctgagccccccttccaagctctgctggactggaggcactggagtagagtggaatggaagaaacacacaaactttggattcagaccctggctccacagctaccagctgcatgactttccacaagtcacttaactgcatgaccaggggcaggttatgtatcctctccaactttgttttcttaatggtaaaaagggactacccaactcataacattgttgtgaggattagaaatgatgtaaggcacctactaaggtattgggcttatggtaggtaagccctggaattagactaatttcaaatcctatttccctcctta

SEQ ID NO: 86709 - DNA, 448 bp, Homo sapiens
acaagtctgacataatcaaagctaaggttgtgctgatccttcctgtttgaatgagctgaaggggtttggagcaggaaagctttttggctagacgaatgaaaaacaaggatattatcagacacaggcaccactccccccttaaaaacaactcacttttcacattttattttcctttgttataataaatagatgaagtacatatttttcagaagcattccttgttattttggggttttttaacaactcataggttgtgtttttaattatcactgtcaggagtgaatctcggagagctttttggtatttattctgtctcttgttagccttgtttttatagttcagcattagttgactgtcttgaaacagaagtcaaggcaggtcattttctcttaagagaaaggagcaatcttggagctttctgttcccagtgtgggcatcctcctgctgg

SEQ ID NO: 86710 - DNA, 844 bp, Homo sapiens
cgcgatgggaaggagcccacccaggactgtggatgtttaaccaaagccttcctgtaggaaagcaggaaagactgggtggcctgagggcaagacgacagtactgctgctcagaaaaggtgaccaaagtggccaacattgcaacctggacctgggactcaaacccaaatctgtctgattcctaaactgcaatcttcccaccagattctgcggcctcccactacctgaaaaatggtttttctctgtctcctcacctaggaatggaaatatcactgaaactaaagaaaacgaccctccagtccagtgggtgcaaactggggacttcagctggattcacccctcaggtggcttctgtttggccaccaccttgtttggtaaagctgacagcagccaagtcatagtccctgaaacatgcagcagatgaagacagcggccctcgttggacaaaaaccacatctgcttccctttaaaagaaatgacaaacagaatagctgctcaccattcacagcaacagagtctagaacttaagatgctccaagcatcttaacaccttctcaactcaacgcaccaacggaagggtcaccatgtataaagaaaaatgtgttcttccatttaatgttttccctttcagtaggaccccatcacccttttttaagtaacagctttattaagatataatctacaccatgctaggcatgtttgtggctattatctcatttaatccatatcatcattccattgcactaatttgaaaaccaaagctcagagaagtaaacgttctcagagccacacagttgctccatggtagaggcaggatttgaacctggatcgccccaagtccaatccc

SEQ ID NO: 86711 - DNA, 440 bp, Homo sapiens
tgactgatctgctctagcaaagttttggaactgatagattcctggctgagcttcctcctgaagatcatctaataaaaaggaacccggggcttttgcaaaaaggccatctgataagtatttctttccttggctagtagtttgccaatgtgtataagagaaaaagaaaactataacagaaaagagaaccactgaatgtccaccaaattgacatctagactgacatgttacagtgattatgaccagccagctctgatctgagaagccatcagcatctctaaaacaaatcacaagatagctatcacaacaataaggagaccgagacataggtcatgcttttgatgtggtctctgaaggccaggaagaaagtggtgcacacagttagagaagcagcctgcaatgtcaacataaaggatgagagagagcatgagtagagaacgtca

SEQ ID NO: 86712 - DNA, 823 bp, Homo sapiens
ccaggcgctcattaaaacagcaggttgctccacactgcctcgtgttgtctgttggcacactctcaagagtttgaacggatacaagaatctttcatctggtgccgaaacccgggaggggctccggtcttcgtcccccgtggacctacccctccgccccagaaagcaggccacagcagccggacaaaggaagctcctcagcctccagttgcttctctgtgcatgcacatcagtcactgatctcacctactggcccagtcccaaggcgcaaggccacttgtgccagcagtgtgagtcagcaagatagcagaagcaggaagagagccggccagaagacacctactctgactgggagacacgtacccctgaagattgagaaagaggccatccagggagtgaagatggaatgagaagaacagagaaacaatgacagagtccttacaaacaccatgatacaagaaggcaatggggatatgttatcctaaaggaatcctaaaagaagtgatcaaaaaggtgaacagaaaaccaagtgggagtactgtcactgaggatgagtttccagagagaattaatgctgaagaagctattgcagacactgctgagtatgaagaactaattggagaaggaagccgttgtatagcagatgcagagcagcagcaaaaatggtaatgaaaatagaagataaattagaaaatttggaaaaacccaaacagatcagccatattgaagggaaaaagaaaaacaaaacaaagtgggagggcagaaatgtagaacggtatacactcttttaaccccaaggatgaatgtagccaagaacacagtgggg

SEQ ID NO: 86713 - DNA, 357 bp, Homo sapiens
atctatccagttaaatttttgatctgtatgaaatttatcctagaacaattgtgatatgaatcaaattttagtttttgtatctgttccaatacaattcatgttttgacatattttctttgtcataaaataagatacatgtatatttgagtttgttattgacattctcttttgtaccgttaatttattgtttattaattagcatctatatgctgctgtattattgctagctatttaagaatatcaaatgtataatatgcattttagtatttgcagtgttccatgccactcttacctagtgatcttcctttgtggatttttttcttatgaatatcttccttgtttgttcttccatgtgaa

SEQ ID NO: 86714 - DNA, 437 bp, Homo sapiens
tattatactttaagttttagggtacatgtgcacaacatgcaggtttgttacatatatacatctctttcttatcatcatgatcctgactatgctccaaaactcttgaaaaacaaaaaaatagaaagcaaaacaaaaactgtgttgtcatttattcttgaaaacaaagaaatgaacaaaaaggatgaaccaatctctaactttaagaaaagattataatattcatgcagagttcgggcacataaaatgctgtatagactaagcaaccctaatccaaaagtccaaaatctgaaatgctcaaaaatccaaaactttcagcaccaacatgatgtcacaagtgaaagatgatgaggacactgttaaaactgcaaagtgcctatagatgacatggtgaaaatatgtgatgggtttactgaaggactctaagagcattcattcat

SEQ ID NO: 86715 - DNA, 282 bp, Homo sapiens
gagagagagagagagagagagagagagagagagagagaggagagagagagagagagagagagagagagagagagagagaggagagagagagagagagagggggtttatctggctcttctgcatcccatgtggggaaaagggaagcagaagtgcctctaaagacaaattggagaattgagatgctcatccagctaactcaagccaagtattattttggcctggaatcttagagttctggtggagatggtgttttgtatcaacttccagatatctgtcatatat

SEQ ID NO: 86716 - DNA, 571 bp, Homo sapiens
gatctctagagtccattaaaagcaagctagattgagagctcttggagggcagggactgggcctagctcatggtttacagctcttgagggtgactgcacagtggactcagtcagtcatggctgagttgagttggctttattatctctagaatgtagttctccattcaaatgcaaaacagccttattctctcaactgtagtaaaagaggattctaactagagatgaaaaaggttcttggcacctactgggccacaagactgcttttgcttcccactgtggaagggggcactgttatctaggaaaaacatccagatggcacacctactcagaagtggttccacaaagaaattgagcaagcattcagatgagcagcctcagctcactatctagctgttaataaattttaagtccgttttgttcctttgcaccaaagaaattgaacaatgtcaataaaattccaaacgtgaactgttttatgtaacaccacatcctaaggaagaatgcctgaaacaaacctttgatgtcctcataaaaatgatagccattttggagaaattatggaaaacagacca

SEQ ID NO: 86717 - DNA, 566 bp, Homo sapiens
ccttgggaagtgagaggaaactggagcatccagagaatatccatgcagacatggggagaatacataagctctacacagacagtgaaccccaacgggaatctattggttttttctcatcaacattataatgaaatgacatggaatgaaacgtcgttattcgaagaccggtggtactcagttctaaacatttcagaattaagagatctacacacatcctcctctatataagggagggggtctcttaaaatttccgggcaacatactcttagccggcctagaaaacactttagaatagaacggcattataatacattttcatattctatttatatcttcatatttctccctctacttatgaaggtataatctggtatatgtagtccttcagttccttaacaaggtgaacatatgatctcatgatgtgtgttttaatttcttaagtgtgttgagatgtgggaatgtgaggaggatggaaaggaaagaaaggaactcagcagctacaaaataaatctgacctttaattttttttattgaatttgtttcttgttttatttttccttcctttg

SEQ ID NO: 86718 - DNA, 654 bp, Homo sapiens
  misc_feature (1)..(1): n is a, c, g, or t
nctgcaaggcaactgttaaaataatttctcacaggagtagagttttctttctttcctaaaaatccaaagtgtttcctcagacatgatcacaccagcctccacaatatatttctagttgtttgggggatgttatcctgctttatatatgaggccaggaaagggtaaaatcctctattcacttacctggttttatacccaggtttccctgtatgtactgtaatggggtgatggaaaagtgaactaacattttttcttgttcctattgttaggtgagagagagagatttgtggggagatggagtggggaggattaattcctttaaaataaattcagtttgatgtacctgcgtgacactcagatggggatatcctattgtcatttgaatgattgatctggtgctcagaggagatgaacaggctgcaaataaggatttgagagccattggaggatggatgataatggagcacatggaagcagatgtggcccttcagagagaaggtgcagagtcagagtgaagggttgcaaaagaaatgtaagggactatgggcagctggggagagaagcacagaattgaaacaatgtatacccttccagacacttttactattcatatacttatatattctttacataaaattggatcatactattgaa

SEQ ID NO: 86719 - DNA, 330 bp, Homo sapiens
atttgcacagtctcaaagtatcttcctgtaagatagttattaattacagaaggtaaaacagtaacttctcagtggaaaaacctagcagacaccacttttaatcaagggatcgaagttaatgagatttatcttatcttcatcatgtgcctcctgataacatactggagaggggataacatcacttctgtgccaaaaatgctttagctgaattcaatcatgtggacgtaccaaacaaacccaaatttagaggtgacttcaaaagtactgaggtcatcaaagacaaagaaagaatgaggacctcctctcaggaggagactaacgagatataat

SEQ ID NO: 86720 - DNA, 391 bp, Homo sapiens
aaaaaaaacaattcagacacttcctacacttgaaagcgtcctattattgcatttaatacttctcttttcttatttttttgttttgttttgttttgtttttttttgagacagagtctcattctgttgcccaggccggagtgcagtagtgcaatctcagctcactgcaacatccacctcccgggttcaagcaattctcgtgccctcagcctctggagtagctgggattacaggcatgtgccaccacacctggccagttggtattggttttggttttttttaaaagctagtttcacttaaaagtgttcttggttaggcagtacaagttatttttatggtatttggactttgggcaacacatctttttagtaatctcatatgatataatgggaag

SEQ ID NO: 86721 - DNA, 177 bp, Homo sapiens
ctgagctttctcaccgggctcagtgaccagccttgattttctcttctatagatgtgaattcactgctcgcataaagccaccagcggtgttgagcagacaaaggggttttacattccagaaagaaccaggcaaacaccaagtagggggtattttgcagcaaagcactcagcttcaccc

SEQ ID NO: 86722 - DNA, 202 bp, Homo sapiens
ttttaatcccaacattttacaacacattgtattaatggaacacttttcaatatatatcatctgtaagagccagcagactcactcctcaggtatgtcctacctggtgccttttgcagatcactagagccacaaaagttctagtcctaaaatagtcaattaacacttgttggaatggctggatttgagcactctgcctcagact

SEQ ID NO: 86723 - DNA, 306 bp, Homo sapiens
ttaactgggtaggggtgtgagtgccatgggggcccatgaggatggggacaccagggtggtttatacagtagaagagacaagggattttaacagatggaaagggggaagagaggagggacccggatctgtccggaatcccagacatgtactttggttggccctttgagcatgtctgccctaattcggcatgtttgttttcttctcagcatcctccctttccctctgcctctaagttaaagtcctgaacttctgcccagctgcccttgagctggaaggcccatagttgtcttagctcttccctgtccc

SEQ ID NO: 86724 - DNA, 435 bp, Homo sapiens
gatcactttttagttagtttgaaacctgcttttagtttatatgtagtatttctacatattgttacttaaattgaactaacaatttactttttaatttttcttcttccttttaaaaaaagagtatataatctgacaatgttagtacatcttttagaaggtcactataaagttgctttccctatttatttggaaaggattatttccttattattttaaaaaatcttttaatttttgtcttttcaagtaattttatcattgtcccaagcctaaggatgagtggcaatttaaaagacacaaggtgtgcatcttctatctgcaaatactccaaacagaaattattccagtttgttgatactttgagtggaccagggaaaaatgtgtatgtttttagtgtaactgaattgtcattacaaaaagatgagtaaagttgctgtt

SEQ ID NO: 86725 - DNA, 143 bp, Homo sapiens
ggggagagcgcgagaggctccaggcccggccgcagccccgccccccgcgcctccccgcagcgggccttgcaccccaaattcctgagcctcattgggggggtcctccccccacgggccgggcatgctgccccccggaaggaacc

SEQ ID NO: 86726 - DNA, 755 bp, Homo sapiens
cattgaatttcataaaatgttatatctgttgatcactgagagatgaggaggcaacccacctatacacttgtctgacgtctgcatgagctgaataacacaccggcactgaccagccaatcaccactagtcttcgaaagcagtgatgtcctaatcatgatgcccatctgttatttatgtcatttttttggactaaagagccagcagcaaggtttgcaccttatacaattcgttaaaattccatggcaaatgaagtttgaaccatgctggtggggaggactggagttattaaactaaaatgtggtaagccaaatatgtccatatggggactgggcaaagcaaagactgcccacatacagcaccttagcctttgtatgagttaggaaacaatggactgtttttccttctacattcacactcaacatagaatgcttctgatcaccaaaatgtgtgggtgatcaaacccacacaccaaacaattctctagtggacactaacagggtgtcttataatttaattcaattctgacaccatctacctggagttacagtcagaacccacaggttaagggctcagtcctgcaagactgtgcacacctcagaagccagtcgcaagccgcaggctgtgacctgtgcctctgtccaatgagctataaataggggttcccacaaccccatcctggagtttgataatttctaggccagctcacagaactcagggaaactttacttacgtttacccatttattctaaagacta

SEQ ID NO: 86727 - DNA, 382 bp, Homo sapiens
aaaaagtgctatgaaaataaaagggtatcatgtattaagattttaattgagaacactgggaaacctttaacttatattactaaaagttcttagtcctaagttcaacttttttgcactgacattttcatattattttacacattatgggaaattcaacaacaatcacttagatctgtgatgtgctggcactagctagtactacctcctaagacccaggtgtacatatctccttccaattatgaggatttggtaacttgaaattacccatggtacaagtatgtacaccatggaaactggaaaatggtataaataatataggttattagcctaagtagatatgggcacattgtcaactattttgcagagagatagatatctaatt

SEQ ID NO: 86728 - DNA, 547 bp, Homo sapiens
ttcaaatcccagccaggcatgtgaccacaggcaggcaacttaacttcttagtagcttggttttcccctccgtacaatgggtgtgacactacctccctcgagactgatgggaggatgaactgagttattatgtacaaaatactcagagcttgggcacacagcacgtgctgcctccctgagtctttattgactgggacatcaaagtgtggcattgggctaacacgctgtctcctcaaagttgcttccttctgctaattccacactggaagaaacgacctttgttgtgtctgtatttgtgtgagatcccttcattctcattcctatctcgaagggctttttacctggaggtgtggtttgcaaactgctggatctcactgtttgcacacaaaaaaagtgctgatattcttaaaaatctcccttgtgaggagcgaaaagagataatgcttttttttttttttttctggaagcaaggtcgacaatttatcaccagctgccaaaaccttcctctaaggcatcacttctcaaacttttaaagcattctccctgtc

SEQ ID NO: 86729 - DNA, 702 bp, Homo sapiens
gctatgccctgctgtagtcacaggaggtgtagagaggaccccgggacatctgaaagccaggaaatggaggagtgggctttgctggatatttcccagaggaaactctacaaggaagtgatgctggaaactttcaggaacctgacctctgtaggaaaaagttggaaagaccagaacattgaatatgagtaccaaaaccccaggagaaacttcaggagtctcatagaaaagaaagtcaatgaaattaaagatgacagtcattgtggagaaacttttacccaggttccagatgacaggctgaacttccaggagaagaaagcttctcctgaaataaaatcatgtgacagctttgtgtgtggagaagttggcctaggtaactcatcttttaatatgaacatcagaggtgacattggacacaaggcctatgagtatcaggaatatggaccgaagccataaaaaaatctcactctgtcacccaggctggagtgcagtggcgtgatctcgggtcgctgcaacctctgcctccagggttcgagcaactctcctgcttcagcctcctgagtagctgggactacaggcatgcaccagcacgccaggctaattttaggtataaattggtggagacggggtttcaccatgatggccaggctggtcttgaactccagaactcatgattcgcctgcctcggactcccaagatgctggg

SEQ ID NO: 86730 - DNA, 259 bp, Homo sapiens
agtaagaaagaaaatacaatctagatttgtttttaatgagatgggtgcagtttttacttcttccctagtagaatatcagagggagacagaactgagagccacgaaatgaggcctcaagcccggaataacaataattgtgttatgttgtctactccggactcactgcctcccattccaggatccatactgctattttcataacactctaaatgatttcacatctgtaagtaattagttgcaaaataatctgtcttgggac

SEQ ID NO: 86731 - DNA, 339 bp, Homo sapiens
tcgactctagcaggatctgaaaacaccgcaatcttattttaaaaaagaactattctttgaacatccttgcatggtttttcaaacttaactatatgaccaagcaccacagtcacagtatcacagtttcttcatctgcaaaatgacagtgttatagagcatgcttagaaagataattctgaagtttaaatgatacataatacagagcatatccaactgcctggcacatattaagtactcaataaatattagctatatcaccattattatcactgttattctactactactactattacatcttcttaggataatttcctagaagtgagattgcggtgtttg

SEQ ID NO: 86732 - DNA, 461 bp, Homo sapiens
gaatctcccatttcgcttcttaaactcccagcagtattccactccacccctttcattagtcataaaagtgaggtgtctgcattcaggcatcccaggatcctttgcaactccagctcagctaagcaagagaggggaacttcccaggcaggggcacagcagagagggaggtgacagcagaggttaggtggcctcactacactgaacatcacccaagaggaggcaggggatctgctcacagccagatggtatggagaagcaggcggggcttgaagatgcctgagtgtgggtctctaggtctttctctggtggagaccgtgaagtaaggtcagcttctcaggccacatcccagggataatggtccttgcatgagccaccttctgtccccactgataaagcagtatatttaggtaccagaggagacttggcataaacctaggagcagtccccatgcatccgtattt

SEQ ID NO: 86733 - DNA, 133 bp, Homo sapiens
tcctacattaacgtcctgactttgtcggtatattcacctgttccagtgaacatactccagcttacgctttcaacccctgtcactgggactgttttgggactacattaggacctccagtctattgactcctgta

SEQ ID NO: 86734 - DNA, 385 bp, Homo sapiens
agtccctctgtcacccaggctggagtgcagtggcacgatctcagctcactgcaacctccacctccagggttcaagctattctcctgcctcagcctccccagtagctgggattacaggcacctgccaccatgcccagctaatttttgtatttttcgtagagacgaggtttcaccatgttggccaggctggtctcgaactcctgacctcaggtgatccacctgccttggcctcccccaaagtgttgggattacaggcgtgagccactgcacctagccaaagctaatatcttaaacaatgtataacaggcatattaaagcagatctgtgtcatggagctacaagtcctccctgtaagtctaaattcatgccgaatgaagagatgctat

SEQ ID NO: 86735 - DNA, 673 bp, Homo sapiens
agatccccggaaggtttcttaaactgcagcagaaatggagctatgaagacaaagatcaaaggcctctgaatggcttcaaggaccagctgtgctcactggtattcatggctctaacagaccccagcacccagcttcagcttgttggcatccgtacactgacagtcttgggtgcccagccagatctcctatcttatgaggacttggagctggcagtgggtcacctgtacagactgagcttcctgaaggaggattcccagagttgcagggtggcagcactggaagcatcaggaaccctggctgctctctaccctgtggccttcagcagccacctcgtacccaagctcgctgaggagctgcgtgtaggggagtcaaatttgactaacggagatgagcccacccaatgctcccggcatctgtgctgtctgcaagccttgtcagctgtatcaacacatcccagcatcgtcaaggagacactgcctctgctgctgcagcatctctggcaagtgaacagagggaatatggttgcacaatccagtgacgttattgctgtctgtcagagcctcagacagatggcagaaaaatgtcccccgtacccgtagcgttgtgcatagcgacggccagccccgcttcaccgtctcgccggtccctgtcgagaagcccgtaagtcgcccag

SEQ ID NO: 86736 - DNA, 341 bp, Homo sapiens
tggtattggtgactaaagccactgccccctcacttgcctcttctacttattatcttaaggataagttccttgagagcctaataactcagcttgagaaatcttccaaggtgcaagtaactgggtaccatagtgatcccctctttgccagcttgggccaatatacccctgctctagcaagaagcacacctgggggaacctggcagccaccttagccagtcggacctgttctgtgcatcctgggctggtcatttctcccagcttactccagtgttctcatcaccacccctgaagcagttttatatttttggatggtggaattttacacagtgcttactttttca

SEQ ID NO: 86737 - DNA, 837 bp, Homo sapiens
tattcctccaggaactgtactaagtgctgatgtgccagcgctatgatttatttctgggaagcccagcgggggaacctcacagagcgagtgaagacgcttttcctggctgagaacagcgtgaagctcaagaacttgactggctacacggcctacatggtcagcgtggccgccttcaacgccgctggggatgggcctcggagcacccccacccaaggccagacccagcaagcagcccccagcgctcccagctcggtcaagttcagtgagctgaccacaacctcagtgaatgtgtcctgggaagccccgcagttccccaatggcatcctggagggctacaggctggtgtacgagccctgcagccccgtggatggagtcagcaagatcgtgaccgtggacgtgaaggggaacagccccctgtggctgaaggtgaaggacctggcggagggggtgacctacaggttccgcatcagagccaagaccttcacctacgggccggagatcgaagccaacgtcaccacgggccccggagaaggtgccccaggaccgcctggcgtgcccatcatcgtgcggtacagctctgccatcgccattcactggtccagcggagacccgggcaaagggcccatcacccgctacgtcatcgaggccagaccttcagacgagggactatgggacatcctcatcaaagacatccccaaggaggtgagctcctacacgttcagcatggacatcctgaagccgggcgtgagctatgacttccgggtcatcgcggtcaacgactatggtttcggcacccccagcagcccctcccagtctgtgccaggtaccggcctgggg

SEQ ID NO: 86738 - DNA, 425 bp, Homo sapiens
tgtaggcacacagatcacactctcgatttcaaaatatatatgccttactgccgttaaaagcaatgaggtaagacagctttctaaaatctgcccttgagttgaatattttttatgaactatttttgaattggactccatttaaaagcaaacattggtggagcatggtagctcacacctataattccagcactttgagaggctaagatgggaggatcacttgaggccaggagttcaagaatagcctgggcaacatagcaagaccctgtttctacaaaaaataaaaaattacttagacatagtggtgtgtgcctgtaatcttaactactcgggagggtgaggtggaaggactgcttgagtccagaagttggagactgcagtcagctatgatcacaccagtgtactccagcttgggcagcagagcaaga

SEQ ID NO: 86739 - DNA, 847 bp, Homo sapiens
agggtcttaaggataaaatgcagacaggacctagtgcttgagccttttcagatccagccactacgtaattttctggtctcttctcttgacatcagcccctgttaaagtcataaacttactttcaattctcagaaagcaccttactcttctgttccctcttcttccatccatgtgcctagatctatccattatgtgcttaaatgtaggctcctccaagaagtctcccatgatctgattctgagttcctactgtcatcttggagaaacccagtcacagcttttgttgtatggcattgcctgtggactttgctgtcccctcttcacctcccccccaccgccccactgcaccaagactgtaatatcttggagaacaaagacaattttgttcaactgctacatcctgagaagcctagcatcgtgccccaaaatgtggtgggacttcccataaatatgtgttgaatggttgagatcttaatttctgttagaacggtctcctgagaatgacctcctacccgttgcctcagtaacctcttacgcatggagagcagagctgcaggaaagcaggacacacgtgagtccagccaactcagagcttcaaggaggcgtccaggagaaacctccctcagccccgtttgcggtgcctcctggtcggtaattttccagaagcaatttcttgtttcctccaaatggcctgtagaggtcagaaaagggccttgttttccaatcaccgactgtcctgtctacattagcattcaccccgggtgtctataattaagcaagcctaagctgggcacataggaacggaaatgcattgactttaataaaacagagtgtaaaacaactttaga

SEQ ID NO: 86740 - DNA, 419 bp, Homo sapiens
atgtctgtcctcttcatttctctgtaattacatttgaactttgaaacgcaaaatcatttagattgaggcaatataatttgattgaatgaattatcttgtatttttacattagtaattatatttcattgaatcatggaatgttagggtcaaaagagacttttagagaatagattttccaacctctctaatttagtagatgagggaaatggcagccagatgttgacactgagtcacagggcagtgagagcctgttagggactagagtcaaggtctcctgatgaaaccagggtaattttcactatactataccatctctcttgaccctgtcctgatgtgttacatgaatataaactaaaaaaaaagctcaagagacatgctaaataagtgtagtctgccagatacgaatttactcattgaca

SEQ ID NO: 86741 - DNA, 557 bp, Homo sapiens
agccccatttgtcttagaaagcatgagccatcccaatcctcacacaatcaccccacagcacaccccacagtccccaaccaacagccaaaggcaagatacaaaaaggagctcccttactatcagtcagccctttctgaccaggactcttagaatcagagctgccattgtgacaacgagaacaagtgagcatgaatgcccagggcctaagtcccatcactgaggcaaactctgtgtcttgccccataagagcaatgagcccaggcatcctgatagccttctcaggaggtccatttttttctgcagcaatgaatatagtgtgtcaccttcttcctgaaattcctgccctcccttgtcctcttctcccagggttctctcctggcttttccagttttctgaaggttgcttctctttcttcttcactgatgcacactctacacgtaagtgcttctccagatgttgtccttgtctcattcttccactaatttattcctcttttctagaagcatatgaaccccggacctgggccaagtgttgggcaggcattggccatctatttc

SEQ ID NO: 86742 - DNA, 348 bp, Homo sapiens
tacaattcaccctgcatactgctgccaagatgagtcatccttacatactgcttttgttatatcattatccttcttgagaaccagcggtggattttcagtgtctatcagatgaaatccaaatgctttagcctggcatctaaggcccaggacagtctgtccccacattaccttttcaactcagttctaaccaaactgttctactaacagttccttgaatctgtattcattagttcatttaaaaatactcattcactgattctcctttatgcctaatgctggagataccaacatagaataaggtacccatgatttgtactttactgtagcctctaagtgcaagagacagaa

SEQ ID NO: 86743 - DNA, 557 bp, Homo sapiens
tctacagaataaaagaggaggaggagaaagaaagataggaattcatttaatagtctcctatcttcaagcaagctgcaattgtctttgatattatttaacagtttcagttgaagccaatatgctgtcaatcacatatcattgtaactagcaatatttatttgtcactatgagcaagggtaagctgcaaaaacacataagccccaaatttcaatgacttaatataaaaagtttattttttactccagcaggggctgtgctcctcccggctggtggagattccatcttaatacatgcttctctgaccacctgagcaggggaatacagcctaacagtcatatgctagctcttaaaatttctcaccaaaagcaatactcatcacttctgctcacatttcgttggccaaagtgtgtcttatggccacatcaaatctcaaagggggcacagaatgataatcctaccacataccgagaaggcggagagccagaactatttggtgaactgcactactgaccaccttcatagataaacatccactgataaacaccctcagtcaaaac

SEQ ID NO: 86744 - DNA, 599 bp, Homo sapiens
aaagaacttaaggcatcctctgaaaaactggcccaggttagtgtttattatgaatctttttaacctttctatacttgtttctcctacatctcctacatgctctaactagacatgacagaagagatttaactaatgtagtataaattatatgaaattctatttttgtaagtcaaaaataatcaaatatcagaaatttaataatgttcaaactatatactgtgtggggttaccgagacaatgtggacattgttcacatctcatagggctgaaagtcaatgggcaagtcctggaaactcattgtcttactgcggtcttgtcctcagtttcataggttcacccatcatgccctcagctttccttaattagccatgtctgcttacctcttcctcccatttctctctatttttccccaactatgttgtcatcatttccagaaatctctaaagcttgcacagatccttagcactatgagatccactgaaagagataatatttttctctttgagatagggcctgcctctgtcacccaggctgtagctcagtggtgcgatcgaggctcactgcaacctctgcctcccacactcaagcaatcctccctc

SEQ ID NO: 86745 - DNA, 470 bp, Homo sapiens
cggccgatgtatgaacgtcactgggcaggcggtgcctctaatactggctgatgctagaggtgatgtttttggtacacaggcggggtaagatttgccgagttccttttactttttttaacctttccttatgagcatgcctgtgttgggttgacagtgagggtaataatgacttgttggttgattgtagatattgggcgggatgaggaacgtcaatccgcacacacattctcactcgactcatgtggctctgtcagttaaggcagaattttatgctgtttgcatttttcacacatagtacatataatcttggggaagatggcgcagcttgatcatgtgactctttccctaaaccctgccaaaatcctgcttctagttaggtgaagaaacgaggcagtactgactgcccttccagagcgctctcccctgtatagcactgagtaagggaacatttgtgtcctcatgacatttat

SEQ ID NO: 86746 - DNA, 403 bp, Homo sapiens
gcagggacagagccacctgacatgcctccagaggcagtgtacagggaaggacagagcatttctgcaggattcccaccaaaaatgcatggcctgcctgtagtcacaaggacacgtcagacaaacccagcactgaaagtgccaaggccacaaaagacaaagccagactatgcagtcgcccagattaaggagggcaagcaggccaggcttgatgtgtggtctgatctgatctggacgtctgaggagcacatggaatctggatggtcccgagaggtgatggtcctgtgttggtgattactaccccctgctgcccattgtcccatggctggacaagatgctgacattggcagaatctgggtgaagggtgttgaggaattgtttgtggctttttttttttttttttttt

SEQ ID NO: 86747 - DNA, 283 bp, Homo sapiens
aattctctcacaaaggcctaatttgcacccaagtttatattttctgcaaatgggtccaggctatgctctaagtttaacccacttaaaatacttggttccttggtgacttttctaaaatagcataataagtccttggtacaatgaaaaatatactttagctgggtatggtggtgtgtgcctgtaatcccagctccttggaaggcagattggaatcctcggaaggaggatgcttgaacccaggagtctgagaccagcttgggcaagatagtgagacctcaattct

SEQ ID NO: 86748 - DNA, 452 bp, Homo sapiens
ttgtagagacggggtcccactatattgcccaggctggtctccaactcctagcctcaagtgatcctcccacgtcagcctttatattccattaacagtattttcttatgattttcagaaattaaattattcacatttacattttcaagaaaaacaaatttcagtggtcctaaacagagccattctttattctaatagaaaagactagaagcttggcaaaccactctttgaactctcattctaatggaaaagactagaagatggcaaactgctaacagcacataactcaaaccaatactcatagttctcctgccagatccattcaaatcaccccatttgacacaggaacatggcaggattaacagcataaaaacagaaaaaaaagggtaacagattttcattcaggtgtccattatactaaccaaaagacattggtttccagacttagggtttgg

SEQ ID NO: 86749 - DNA, 1955 bp, Homo sapiens
cccccaccgaagctggcggggacgctgtccgagccgggggcaccgcccccttgtccgcccagcagcagcatgaatgtggcgacgcggactgtcgggagtcccccgaaaacccctgcgactgtcacagggagccgccccccgaaaccccagacatcaaccagctgccgccgtccatcctgctcaaggtgggtctgggcgagaggcgcagggatgctcgctttcccccacccccggcccccgcctccgaggctttctctctcctccccctaagcgcggaggaggggggttccctggcagcctagggacgtcccaaggggagactgggaagccagtggggcctctgcctatggcctattttttgaagtaggagcacttggagtctactgaatgtcttttaatagcttgactctataacccaccattcagggttcagctattattagaatcccaacccagtggtttagaaacttcgcaggtattctgtggaaaaaaaaattttttaatcgaggaatttatacttagtgggtaaaggctttgcatgttggtgtttgaaagtctttaaacattactttcatgtttgatggctggtagttaatgtcaaacggttaacttactgagcatttaccataatcaggcactgcgccagactttatatatataatatcccatttatctagttaacgcttcgagataaatactgttaatatctttattttatacaggaagaaactgatttctccgtgctgtgggccacggtttatagtagtgagtcaggcagaagtggtctttgctcctgtggagctgacagtctagtggggcttgaagtggttgaatgacttgtgcaaggtcacatacagaaagtaaagggtagatctaggtcttgaatgagggaatttaagaccacctgacttaaaaacctctttgtttatgctatgttgtaatgcccttctacattttaacccttgcataaaagcatacagattaccagaggtaagcacagatgtattttttgttgggagatgggtgtcctgcatgaagtttgtgtcattttcaactaccaagaatattttgcagttttgtcaatgctagtgacaaactttagttacataatagagtttttattaagttattattaactttttccctccttttctctcttctcccaccctaccctatttggagcttaataaatataaaccattttcattgtggatgatactagagactagccataaataaccttgataagaatttggctacttttaccgttactgaagtaactgtcattaattacaattgttattgtcaccaatatagtttctttgactagactttttgcatatttacagtactgtgtgtttgggtctgttttacagtgatattattgttcttgtgagtgatacagcaagagggtgggaaaacttacatttccttgtgtcaaaatgtaatgatctaattcttatggaggtctacttgttggaagagtaattgcctactctttgtgtgcagaggtgcattttaggacaaagggaactttcttgagtcctttaaatcactgggtgatatggataaataaaatatcaacaaatatttggtatagaaacttgattgctgtcttcttatttggcaaataagactgtttcaaaatgaaccaaaacaaagccaggtaccttctacttacaaattatttcatgaggtaaaaaacattttaatgccgagaaaaaaaagggacatgatctcataataaagagaaactctaatagaataaaataaacttatcctataccgcgttgttctctttcatattttttcctgaggattgttgaaaactttgtctaaaggacatatgggaattaccatgggcttgccctattgtgtgtatttggacatgttatgtagatttccattccttgtattagaaaattctaataaagattctctgtctgagtctgatg

SEQ ID NO: 86750 - DNA, 445 bp, Homo sapiens
acaggcatgagccaccgcgcccagcccccatcaacattttcttttgggaacactgtgtaatggattttagtcaattctacaggaagtaaaacatcaatatttggaagtgaaaaaaattaactgcatacttttattgagttaaagctttcctttaactcagctttttcatccaggaggcacgttattaaaatcttgagtgcactcattgattatttttcttttatcaggaagtccataatgttatataataatatattatatgaacatatagtacaaattatatctattgagtaataagtaccatcaacatcaaagactatgttatttttcacctttaattttgttctttttttctctttaatatatttacaagttctgcaaacactttctgttgctttgtcatgttattatcaatttgtttgcaagtgtcatgtttggtattcct

SEQ ID NO: 86751 - DNA, 547 bp, Homo sapiens
gtcctacgtgaaaatcaaaccatccaatggtacacaatttcattcatttgggcttgattagcctgaccagtattactcacgataaccagcacaatggaacccaagtataatccctgaaccccacttaaccttattcagtgcatccaagcttgttttcctccagtattttcatccaactctcttcttccaccccttcaatccttagcatctatatgtatttgaagagtaatttgccatatgttatttgtgattttacaataatctgattttgatgattcagttaactttttgcattttcgtttctcaaagtgtttccagatattccagagggtttttttttccatgtgagcaaacttggggaaaaaaatgcagcagataaaaatttctgaacatcaccccggtttttaatttttataaatggagctaagtgaaactaggttaatgaagaaatgtagtgaacacatgtgtttgtgctaaagattattgtttccagaagaatagttttgttttttgttttttggttttttttttgagacagagtatctat

SEQ ID NO: 86752 - DNA, 481 bp, Homo sapiens
gtgctaggattacaggcgtgagccactgcatccagccaagttgtgttctttatatatactgcatataagtcccttattaaatatatgatttgcaaatattttttctaatttctatggcttttaattttattggtggtatcattttcagtacaaaagcttttcatgttgatgtagtccaatttcttcttcttctccgccttcttattcttatcagtgaagcagggttcttgctttgttgcccaacctggagtgcagtggtgtgattgtagctcactgtagccttaaactcctggtctcaagtgatctttttgcctcaacatccccagtaggtacaactgcaagttgtaccaccacacccagctaatttttttggtattttttgtagagttggggtcttactatgttacccaggctgaccttgaacctttagcctcaagcagtcctgcttcagcttcccagagtactgggattacaggtgtga

SEQ ID NO: 86753 - DNA, 126 bp, Homo sapiens
ttgagctgaacattctttattaggcagaagccatacccttgaagtaggcattgtgttcccaagttcagaaaatagaatctagggaaatagggtcttcttatggttatcaggaaacagtccaggatc

SEQ ID NO: 86754 - DNA, 340 bp, Homo sapiens
  misc_feature (246)..(246): n is a, c, g, or t
aataaatatggtgcatcaattcaactagaactattattggaaaacaactgagtactgggctgatgattaagttattgcctctcagcttcaaccttgctttattgtgttttagctttgtgagactgtggctgacactctggaaatacacttctgttttaccagctgctcccttttcggttctgccaagagggggagctagatagtgccagcaagttggaggaaaaaggaggaagggatctctttctnctggtctgtttcctgttactgactgaccccaaagcccagtgacaattgtttacctcgctggaaaaaacagatgtttcagtagcagcggttgctt

SEQ ID NO: 86755 - DNA, 200 bp, Homo sapiens
tgttactcttctatctcaccaattgtaagaaccattaaaacataggaaaggatttagaatcttaactactccctcaaagatggctagtgcgagcctgaatgtcctgttcaggagacagagaacaattaacctgagtgctgagttaagggaagaggtttttactttctgctttatacacttctgcattgttgtaatttttt

SEQ ID NO: 86756 - DNA, 395 bp, Homo sapiens
gaaatttttcatcagctcttgtttcctctcattctttttgaccttgtagatttatccttttttcttaatttattctcacttaatgggatttcaggagcatattgactaagttttcatttttacatgtatactggggagtatgacatagacatctctgtacttagatattactgatgtaagtctactttgaatcaaatgaacagatgtttaaaaagtattgttcccaattgttttaatgatttcttcctgtgagttggggtggtgctgcccatcaccaactcaggacggtatttgaaaatacctggaaaaattgtaacaatgtctggaaaacactgcagatatttaattggcagaggtcagggatgattaacattgcgaaatgtgagggacggtcc

SEQ ID NO: 86757 - DNA, 390 bp, Homo sapiens
tctgatcaggtacttaccaggttggataacatttatggaatacttatatagggacagatgaccacctacagaccttatgccttaaaaactgagtcttctctccagcagaaatgatcattagcccttccctgcaaaatgtgtaatccagcatcctaggctattcctggcacatgaataagcagcgtaatatgtatcagtctccctgtctttgagactagagacaagaaaacctaacaactaggctttttaactgttctgtaagaccttgaccttgtgcttataccctaacacacatacctcattttgattttttgagttttgtatatagttctaaccttatctagaaaacacaagattatggttaatataagcatgaaataaggatagaat

SEQ ID NO: 86758 - DNA, 451 bp, Homo sapiens
tgccttgatggcggcttcgggatgaggccccatgaaggcacttgggagggtaggtcccagggccacccagctctccaggagggcaagtgcatggcagggagggactgcagggacagatggcagatttgtggtgacctgaaggagaggaatctaaactgttagagacaggcctcagccggacttgctttaaagttaactctttcttaataactaagttgaatgttttaaaaatgccagtattcccaaatcatggacaagttgatgctccaaagaatattaggaacatctaattcactgtctctgttttccatatgaggaaattgaggcccagataaacagatgcgatagacacaccaggctgccccttcctgcagagagagaatgtgtagccacaacctttgtttccttgggaaagggctccctccgtagcaggattatggccagtttcctt

SEQ ID NO: 86759 - DNA, 673 bp, Homo sapiens
  misc_feature (389)..(389): n is a, c, g, or t
gtcttagcattactaaagtaaatgcctattatgatattctacttaggggtaggataagtatgtataccaaatatggtttgtttcgatttgatttttgagacagggtctcactgtcactgctgagtgcagtggtgtgatcatggcttgctgcagccttgacctcccgggttcaagctatcctcccgcctcagcctcctgagtggctgggactataggagtgtgccatcacatccagcactttgggaggccaaggtgggcggatcacgaggtcaggagatcgagaccatcctggctaacatggtgaaaccccgtctgtactaaaaatacaaaaaattagccgggcttcgtggcgggtgcctgtagacccagctactcaggaggctgaggcnggagaatggcgtaaacccgggaggcagagcttgcagtgggccgggatcgcgccactgcactccagcctgggcaaaagagactccatctcaaaaaaaaaaaaaaaaaaaaaaaaaaaggaaaaaaacaaaactaacatggtcatttgcagaaggggcagaaaaagggtctctgcctagacctggggaggtcagggaaagtactatggattggtaacaaccggctgggcttcctacaagagaaaaagactatactcacagagccagaccccatctcaaaaaaaaaa

SEQ ID NO: 86760 - DNA, 224 bp, Homo sapiens
aaacaaacaaaatccagggtttgagtttggaactcgagaggcctgatttaatatctttggggacccaaagttttagttacaggtctcccacagacttgctattggtttggggcaagttgccattcttccttctaaggttccggcatttcctggtctgatcaaaaaagggataagaatcgaaccaaactcttcattcaaaaaattattttgttgagtacctatgt

SEQ ID NO: 86761 - DNA, 376 bp, Homo sapiens
gcaacaatcaaaacagtctgtaagtgcaagagtttacatacacatatatactatatagcttgcatttctcaatttacatatcttgcaatatatataatatataagagtaatatgggatataaaaaatagaaaaaagtaaagcagggtgaagagaatcaggaattctaggcatggcagttttcatcttttggtgtttttgttttgagacaaggtctcactctgtcgcccaggctggagttcagtggtgtgatttcccgggctcaaaaaatcctcccacctcagcctctcaagtagctgggactacaggcatgtaccaccatgcctagcaaatttttgtatttttaggggagatggagttttgccatgttgcccaggc

SEQ ID NO: 86762 - DNA, 111 bp, Homo sapiens
atagtattgagctatatgggatggaacagagggagaaaaagagaccaatggctggaatgtgttgtggtttgacgatttctagccctggctcaacttaagaatggaattact

SEQ ID NO: 86763 - DNA, 433 bp, Homo sapiens
ttacccaggttgatgttgaatttgtggcctcaaactgtcctcccacctcagcatcccaaagcatgggtgactcaattttgatttttagttaatgttttttctaaagttatggaataggatttaaggtttaaagatgaaagaaagagagggcttggcacacttgcttatgcctgtaatcacagcactttggaagactaaggtggttggatcacttgaggtcaggagtttgagaccagcgtggccaacatgatgaaacccggtctccactaaaaatacaaaaattagccaggcatggtgatgtgtgcctgtaatcccagctacttgggaggctgaggcaggagagtcacttgaacccaggaaatggaggttgcagtgagccaaaatcccacaactgcactcctgggtgacagagcaaaactccatctcaaaaaat

SEQ ID NO: 86764 - DNA, 953 bp, Homo sapiens
tatttctatactactatgttaaacctactactttaatgatctggctaccgtctgccaaatgtcacttttcaagtgagaacagaagaatgagattgtgaagattctgtggacaatgtctatataatcatttaagtgttaaatataaactaaatgacaatagcagcttgtaaattaatgctaattctggctgggagcagtggctcaggtggctcatgcctgtaatcccagcactttgagaggccgaggcaggtgaatcagctgaggtcaggagttcgagaccagcctggctaacatgatgaaacctctctactaaaaatacaaaaaattagccgggagtggtggcacatgcctgtagtctcagctactctggaggctgaggcgggagaaccgcttgaacctgggagatggaggttgcactgagctgatatcgtgccactgtactccagcctgggagaccgactccgtctcaaaaaaaaaaaaaattaatgttaattttgaacaaacttaatatcacttacatttatatgcacacaattggttgaatttagcattaagaagtttaaatcttacttaagttgttctcttattcaggagaaccaaatcactgaagtcaattagtagtgtcaaaattgctcattctttccatcaaaatctaccacagatcactaagggacagaaagccattataatttctcattatccatctcaattgctgaccaaaaaagagcccatatagccaagacaatcctaagcaaaaagaacagagctggaggcatcacgctacctgacttcaaactatactacaaggctatagtaatgaaaacagcatggtacgggtaccaaaacagggatatagaccaatggaacagaacagaggcctcagaagtaacaccatacatctacaaccatatgatctttgacaaacctggccataaaacaactaagagtgtcgc

SEQ ID NO: 86765 - DNA, 308 bp, Homo sapiens
gggacagaaagccattataatttctcattatccatctcaattgctgaccaaaaaagatagtatgaagattacaattaaatacttggctctgaactgaacatatcaatgtactaatcattattgtattaagtgaaaacacaggaatgtctagggccaagggatgaccaaaatttaaaagattatttcatatcagagtcagggatattaataattttatgtgagaaaatttgcagtttgttttctcctatttgaggaaggaacagttaattatacagcttaaaaagcccctacttacttaaaaagttaac

SEQ ID NO: 86766 - DNA, 533 bp, Homo sapiens
ctacgagaaggccaagagtggtacttgctttgatcactgtttttaaatagaagacacattggtagaaatctttcatataatatgttgctgcttttgggggggtgttggggagtaccagagaggtctgcatgcatctgcagtgtacactggcaaacaaaaggtttgtcattcccgttgtcctgttgtgcttcctttccacctctccctggctgttcccccacccccttgttccttttgtaaaggatgcaggtgtagtcttgtgccagtctgtgacataacacctgaacaatttctatggtatcctacccatttgctcagattcaaaccaggccttaatcgataacaagcaaagagaaaaaaaggtgggatttgtaaataacaattacagcaaaaaaaaaaaaaaaaaaaaaaaacactgagaactctgctattctgcttaaaatagatatattgccataaggagaggtttttagaatgtgtgttttataaagtcctaaaaaaattgtgatggtcattataataggcaaagatga

SEQ ID NO: 86767 - DNA, 711 bp, Homo sapiens
tatatttgtatatttaatattaagtatagatcacatgtggctgcttgacttctgatgcaactctatgtgttttgaaatagatctgaggctccttataggaatagacaatggtctcttcagttgaatttttgctgacttttctcaatatgtgacaatctcttaattttcctgactctaccctatctaggttctcctcttgtgtcttccttcactcctttaataaatcttagttctcagtcctccactgtattttctatataatgccttagatttcatctcagtcactgtagtgctttcactatttctgcacagatgatgctataatatttacttcagccttcaaaattctaaccagctcttctctaaaaccctactagacatttcttcttgggcaacctacctatacctcaagttggatgtatttttaactgaattcatcatgtctctgaaattgtctctgtctcttaattttcttaacactattcctcccgttcattaggaagttcagtctcctttgactcctctcctttcctgactgcatattcatttggtcctatagtattgtctgtttgatcatcttgatatctgcaaagtccatttttccttctggcacttccttttccatctcttcaactggactggcactgcagttcaatacccagaaatgcacatagtaattacttgttgaatcaataaatgaataactttcct

SEQ ID NO: 86768 - DNA, 401 bp, Homo sapiens
tcagataaaatgaaaatgggaaaaacttatcaaagggccccggtctcctaagtgccctgatgttgagtaaaggccaaatgccccagttttacttactcagatctgctttctgtgattaagaagagatgcacactagagagaggcactttgaaaaacacagcccaggcaaaattcttaaaaagactggctctggtggcggggcgggtggtgaaggactcagggacaccgtgcatgcagcattgagggagttaatgcagacttgctagcagacagcttggaacgttctgggataggccctgcctgaagaacatgcagtgtggttagccatcaagttcccatgtgcagaagtgccttgctcagcaggggcaaaatcagcacgtctgtggcaacagcaacaatga

SEQ ID NO: 86769 - DNA, 1010 bp, Homo sapiens
cctgctgaggacatgaggacccgtctttttgcagtgccaggcagggtggccaaagaggactggactctggacctggagccccgtggtccagttcacattcaccccacaagagtttcaggaggcctcccacggtgcctgtgctgggtggcggtggtggtgccaagaggaatggaatgtcctgggctccttcaggagctctctacccaggggcaaggagagcccagagagaagcgccctggtctcttgagcttcctgatctgctcctgtcccccgctctcctccactcccttgcctttccctaggttgtcccctccctgggcttttgtgtgttttgggagatgtcacctaaccaggacattgatattcaatcccatcccccttcctcccaccctgccccactttgatttaatcctttggctgtgggctgaggcctcccagggaagctgggtggggtgggtgttgagaccccctcagaccagcacagagacctgtccttgtgcagtctgcaccctgcactccctcccttgcctgtagatgttctggatgacagtagaggaaatggacaaggtcagtttgaatatcccagaacacagtgctctgtctcctcccaccagtccagttagcttcccttctggaccaatagacgaggggagaccccatggatcctctggctgggaagccactgaccaggtggccagtggggcagggtgggaagaggggttaaggtgcagtgatgatggcctgttttggagtgtgtctgagactgggattgcatttggggtttcccgtgtgcttgggatgctagagggtcacctgcaggaggcctggggccggcgagaaatctcctgtgatgccctgtgaaatggcttgtctcctcccccatcagggcccaccgaaagctcaggggagcacagaagcccatggaagcccagggagatgtccctggggcagacactaaggcaggtgttgaagacaagctgcttgtcaagaagcatttcccggcaagagag

SEQ ID NO: 86770 - DNA, 774 bp, Homo sapiens
ctggagcagctgtaacttttcatgggctccacagttcagtgaggggtggcagcattcccagacaactcctgtgtattaattatacatatatttgagtgccaattgcaccccaaatccagacttcctggtgccagacaacttgttcattccccaatcaagtccactttctcatgcttactctatgaaaagggcacccatgatagggtcggggtcccccctctagaatgcagacccacactgggacccaagacctccttacttgagaacagagatctccccaggctgccctcttggaagaacagagggcagaagccttactgagccaaatgtcctggtatctggagaagggcaagcgcaacatctcattttgagaggggacaagtggagatatccctggtttggtcagctgaacttgaagaccaaagccaagagtaactcattcaatgctggttactcagtgacccaggttccaagcaagtctctcacaaagctttaatgagtacctgcccctagagtaaagtaatgaagacaataccaagtgctgtatgggtcatgcctcacttaacaacagggatatgatctgagaaatacatctttaggcgattttgccattgtagggacatcatagagtacattttcataaatctagatggtatggcctaccacacacttaggctatatggtctagcctattgttcctaggctctaaacctgtgcagcatattactacactgaatgctgtaggcaatgataacataacggtaagtatttatg

SEQ ID NO: 86771 - DNA, 338 bp, Homo sapiens
tgcttgctgcttgctgtgcctgtccttgcatcctaacagatgtcgtacgagtgctccccacaaagaaggctgtaatatggacagcagggagaaaacatcaaaaaatcatcctaatggtccataagtgccaggaaagcagacaggtggcaggccgctgctgaggccagatgccatcctgcccacagtaccggtactggctcagacaaaggctggaggccttccagcgagtgggatcagacagcctccctcacctgccagagtatccgattctccaggatgctctgagtgtcctcagtcgggtggtagcagcacaccccttcctccccatctcccctccc

SEQ ID NO: 86772 - DNA, 562 bp, Homo sapiens
catggtggcgggcacctataatccccgctactcaggatgctgaggcaggagaatcacttgaacccaggaggcagaggttgtagtgagccgagatcgcaccatcgcactccagcctgggcgacagggcaagactgactctaaataaataaataaataaataaatccaaaatgaagcacagagaagactgaaaaaatggacaaagcatttgtaggacaaactcaagatgtctaacatcccagaaaaaaaggggactacgtgaagaaatacttgaaatatttctaaatttgaggaaactataaattcacactatgtaagcccacactcactgcaagctcaattaacccaaagcacactaaacacaaagcaaagcacgctgaggcccatcacagtcaaactgctgaaaaccagtgacaaagtgcaaatctcagaagcacagagaggaaaacgagtcaccttacatatgcaggagcaaagataaggacgacaacgtgtttctcatcacaaactggagaggccacgaaagaaatgaccaacaacctcaaattccaaacagaaatatct

SEQ ID NO: 86773 - DNA, 697 bp, Homo sapiens
ttatcattctagatttatcagtgatgaaattggacacactcgattttcctcccactggtaatatttgcagtcagcatgaatagactttctcagtacagttttcaactcctggcacaacagtatcctttttccaaactatagcataaatcacagaaaagtatctcctcatttgtttgggatgagttttaattcagaaacaatttatagtaatattctaagagactgactgaatttgctttcccaactgaaaaaggaatcaactatttgttattatttaatgaagctttgaagcatgaggaagtcaattattcttcagtgcagtgatgtacaaaggggactcctgcattttccctgttccctgaagagattaagaacttctgagtggagacaaacgggaaaaaatattgtttgtggaaccttgcctaggcttgatgagaaggaggaaagagctcttacagctaaaactaatcagtaactgtggtttctccaaacatggaagaattttccatcaacagtcacaatggggagtgtctagttggaccatcatggaagatggatgggcctcaagaaggttagcaggattaaatgaagcaaaaaggatggagccctaattcaataggaatgatgtgattataagaagagaaagagacaccaaagcacagaggcaagatggtgtgaggacacaatgggaaggtgg

SEQ ID NO: 86774 - DNA, 1178 bp, Homo sapiens
gcctccgtcaaagaacctcaccattctagcccacagttgagatgcctaaggctcttccctcactgcctatgctctatcacaagttggacataacaatcttaaattgtttctctatattttcattgctcctttatttggatagaagaactcttgattctctaacgtctttcctttgtaacattcttccaagattgcagtggaatgttgaaattctttggtaatacttttgcgatgattctagctttttacctgcaaaagccatagcttctaagagttagtgatttgattgacttgagcgttacctcctctttctttcggaggtgctaatgagagcagcaggaaggaagaagagaaaattaagtgtctgggaagcctccagattagcaataaagatgtggcttcttagaatttgacttactctactgattaggttttttcttgaatgcctgaaggttttaaaagttcatgctaaaattccacgctgaaaattacacttggaacactgtagattgtgcacattattctgatgctgattttccaactatttgcagcaaaatatgggcagtgaaatgcatccacgaggaagaaacattacttcatattgtcttccccaataactcccaaaccataaatccagtctgtttttaggaaattgcacataccttcatggtgtggtggaaaaaaggaggcattcaaaagagatggagttggaaacctgactttatattaattaagttaagagctgtggaactttagatacattccttaacattactgtatctcagtttgcctttctgtaaaatgggtatgataataagtacttcattaaattattgtgaggtttgtgtgagaccatatgactaataataaataatgtataaatatatgaaataccctgtttggccgggcgcggtggctcaagcctgtaatcccagcagtttgggaggctgaggcgggcggatcatctgaggtcaggagttcgagaccagcctgaccaacatggagaaaccccgtctctactaaaaatacaaaatgagctgggcatggtagcacacgcctgtaattccagctattcaggaggctgaggcaggggaattgcttgaacccgggaggtggaggttgcagtgagccgagatcacgccattgcactccaacctgggcaataagagcaaaactcc

SEQ ID NO: 86775 - DNA, 1112 bp, Homo sapiens
ccttagggagtcaatgtgtgtgttgctgcttatttaaatacagttcagttggagccccaagagtgccaatgtgctcctcacaattcccaaatgcctctcttcctgaacaccagaagtggtgggcacctgagtgggaaatttcaggcaacttaatttagttcctcagtgcctactcttgaagaactgggttttcattctagagaggaaactcagggaagggcgtgttgcctatcacaggttcgcatactaagttttaaaaacttttcttggtgtgacttatgccaaggaattatgaagactttttccttgagcattgcatgaaggctacaaagttggaacaggcatgtcctgggtgtgaaagtttaatttccctacctcatttatttatttaatttagagatgggggtctcactatgttgcccatcccggcttccaactcctgggctcaagcaatcctcccacgtcagtctctcaaatagctgggactacaggcccacgccaccatgccctacttcctcatttattttaaattttttgtaccacagtctctctttttaattttatgactgctgaattaatcctagactctgtcttaaaactaagaattgatgtattggcaggaacagctggacattcaagatgtttttgtgattccttttttaaaaatctccttttgtacctgtaatatctacaatatataatctttctttatcgacttaaggaggaaggagaaaggaagaacctgacttctgtgtgaaggaccttactgtcgatcaagactgttactcaaagttctatctcttagtcattgcacctgacctgatccaaaacatatatatatatttgtatgcacccctagagacagctgtatatatatacggttttgccaggttgtacgtttttttctcgagttgtaagtgaacacagtagcactcgtttacattgtcaaggggacatctttagagaacacattttctcactgttgagctaataatgctttgtgaatgtatgatctaaggagaaacccttgtagttatacccgatgatgctgtctgttggaaagtaaattttgaatgtctttttccaaaaataaaaaataaaaacatgctttc

SEQ ID NO: 86776 - DNA, 347 bp, Homo sapiens
tatttttattgttttttgttgttgttgtttgcatcccaggaaatgcacacatgggcagtctatagctaacagtgtcctcagggactcaactgcctgcttttctgctctctctgtctttgcacgtttcctttaggaagttacctcatggacatcaggaaggagaaaggctggaaaaggacttcctcagctgtgtttccctttaaggagccttcccaaaagacaggtccaataactagagctcacatctcagacagaacagcacatggtcactcaaagcttcaagagaggccaagaattgttgtccctcatttgggcacattgccagatccagtagcacaggccactgc

SEQ ID NO: 86777 - DNA, 313 bp, Homo sapiens
gttccaacacatttccgccacacctaagtaaaattccttacccattaagcaatttcttcctatccttcccatcccccaggccctggcaaccaccaatctgtgttctgtctctatggatttatttatcctgggtatttcatataaatgaaattagacaacatgtaaccttttgtgtctggcttcttttatgtagcgtaattttttaaaggaccacccacattgcagccatacttcattcttctttatgactgaatgatattttatagtattatcatcataatatttgtgtgccacaaattatccattcatccac

SEQ ID NO: 86778 - DNA, 2328 bp, Homo sapiens
  misc_feature (9)..(10): n is a, c, g, or t
  misc_feature (12)..(12): n is a, c, g, or t
gacggccgnncngagcgaatgcaggcgacttgcgagctgggagcgatttaaaacgctttggattcccccggcctgggtggggagagcgagctgggtgccccctagattccccgcccccgcacctcatgagccgaccctcggctccatggagcccggcaattatgccaccttggatggagccaaggatatcgaaggcttgctgggagcgggaggggggcggaatctggtcgcccactcccctctgaccagccacccagcggcgcctacgctgatgcctgctgtcaactatgcccccttggatctgccaggctcggcggagccgccaaagcaatgccacccatgccctggggtgccccaggggacgtccccagctcccgtgccttatggttactttggaggcgggtactactcctgccgagtgtcccggagctcgctgaaaccctgtgcccaggcagccaccctggccgcgtaccccgcggagactcccacggccggggaagagtaccccagccgccccactgagtttgccttctatccgggatatccgggaacctaccagcctatggccagttacctggacgtgtctgtggtgcagactctgggtgctcctggagaaccgcgacatgactccctgttgcctgtggacagttaccagtcttgggctctcgctggtggctggaacagccagatgtgttgccagggagaacagaacccaccaggtcccttttggaaggcagcatttgcagactccagcgggcagcaccctcctgacgcctgcgcctttcgtcgcggccgcaagaaacgcattccgtacagcaaggggcagttgcgggagctggagcgggagtatgcggctaacaagttcatcaccaaggacaagaggcgcaagatctcggcagccaccagcctctcggagcgccagattaccatctggtttcagaaccgccgggtcaaagagaagaaggttctcgccaaggtgaagaacagcgctaccccttaagagatctccttgcctgggtgggaggagcgaaagtgggggtgtcctggggagaccaggaacctgccaagcccaggctggggccaaggactctgctgagaggcccctagagacaacacccttcccaggccactggctgctggactgttcctcaggagcggcctgggtacccagtatgtgcagggagacggaaccccatgtgacagcccactccaccagggttcccaaagaacctggcccagtcataatcattcatcctgacagtggcaataatcacgataaccagtactagctgccatgatcgttagcctcatattttctatctagagctctgtagagcactttagaaaccgctttcatgaattgagctaattatgaataaatttggaaggcgatccctttgcagggaagctttctctcagacccccttccattacacctctcaccctggtaacagcaggaagactgaggagaggggaacgggcagattcgttgtgtggctgtgatgtccgtttagcatttttctcagctgacagctgggtaggtggacaattgtagaggctgtctcttcctccctccttgtccaccccatagggtgtacccactggtcttggaagcacccatccttaatacgatgatttttctgtcgtgtgaaaatgaagccagcaggctgcccctagtcagtccttccttccagagaaaaagagatttgagaaagtgcctgggtaattcaccattaatttcctcccccaaactctctgagtcttcccttaatatttctggtggttctgaccaaagcaggtcatggtttgttgagcatttgggatcccagtgaagtagatgtttgtagccttgcatacttagcccttcccaggcacaaacggagtggcagagtggtgccaaccctgttttcccagtccacgtagacagattcacagtgcggaattctggaagctggagacagacgggctctttgcagagccgggactctgagagggacatgagggcctctgcctctgtgttcattctctgatgtcctgtacctgggctcagtgcccggtgggactcatctcctggccgcgcagcaaagccagcgggttcgtgctggtccttcctgcaccttaggctgggggtggggggcctgccggcgcattctccacgattgagcgcacaggcctgaagtctggacaacccgcagaaccgaagctccgagcagcgggtcggtggcgagtagtggggtcggtggcgagcagttggtggtgggccgcggccgcactacctcgaggacatttccctcccggagccagctctcctagaaaccccgcggcggc

SEQ ID NO: 86779 - DNA, 1637 bp, Homo sapiens
  misc_feature (9)..(10): n is a, c, g, or t
  misc_feature (12)..(12): n is a, c, g, or t
gacggccgnncngagcgaatgcaggcgacttgcgagctgggagcgatttaaaacgctttggattcccccggcctgggtggggagagcgagctgggtgccccctagattccccgcccccgcacctcatgagccgaccctcggctccatggagcccggcaattatgccaccttggatggagccaaggatatcgaaggcttgctgggagcgggaggggggcggaatctggtcgcccactcccctctgaccagccacccagcggcgcctacgctgatgcctgctgtcaactatgcccccttggatctgccaggctcggcggagccgccaaagcaatgccacccatgccctggggtgccccaggggacgtccccagctcccgtgccttatggttactttggaggcgggtactactcctgccgagtgtcccggagctcgctgaaacccttgctggactgttcctcaggagcggcctgggtacccagtatgtgcagggagacggaaccccatgtgacagcccactccaccagggttcccaaagaacctggcccagtcataatcattcatcctgacagtggcaataatcacgataaccagtactagctgccatgatcgttagcctcatattttctatctagagctctgtagagcactttagaaaccgctttcatgaattgagctaattatgaataaatttggaaggcgatccctttgcagggaagctttctctcagacccccttccattacacctctcaccctggtaacagcaggaagactgaggagaggggaacgggcagattcgttgtgtggctgtgatgtccgtttagcatttttctcagctgacagctgggtaggtggacaattgtagaggctgtctcttcctccctccttgtccaccccatagggtgtacccactggtcttggaagcacccatccttaatacgatgatttttctgtcgtgtgaaaatgaagccagcaggctgcccctagtcagtccttccttccagagaaaaagagatttgagaaagtgcctgggtaattcaccattaatttcctcccccaaactctctgagtcttcccttaatatttctggtggttctgaccaaagcaggtcatggtttgttgagcatttgggatcccagtgaagtagatgtttgtagccttgcatacttagcccttcccaggcacaaacggagtggcagagtggtgccaaccctgttttcccagtccacgtagacagattcacagtgcggaattctggaagctggagacagacgggctctttgcagagccgggactctgagagggacatgagggcctctgcctctgtgttcattctctgatgtcctgtacctgggctcagtgcccggtgggactcatctcctggccgcgcagcaaagccagcgggttcgtgctggtccttcctgcaccttaggctgggggtggggggcctgccggcgcattctccacgattgagcgcacaggcctgaagtctggacaacccgcagaaccgaagctccgagcagcgggtcggtggcgagtagtggggtcggtggcgagcagttggtggtgggccgcggccgcactacctcgaggacatttccctcccggagccagctctcctagaaaccccgcggcggc

SEQ ID NO: 86780 - DNA, 1761 bp, Homo sapiens
agccggagagcaagcggcctgtgcccagatcctgggagaaccccagccgagcccagcctagcccgagcccagcccgagcggagccggagccccaagcccgagccgcgcccagcccgagcagagccctccagccgctcaccccgcgtgccaccccagcgaccctcagccgctctctgcccttctctcggccccgcgcccgccctcgcggcccctctgcccaatgaaactggccgcgatgatcaagaagatgtgcccgagcgactcggagctgagtatcccggccaagaactgctatcgcatggtcatcctcggctcgtccaaggtgggcaagacggccatcgtgtcgcgcttcctcaccggccgcttcgaggacgcctacacgcctaccatcgaggacttccaccgcaagttctactccatccgcggcgaggtctaccagctcgacatcctcgacacgtccggcaaccacccgttccccgccatgcggcgcctctccatcctcacaggagacgttttcatcctggtgttcagtctggacaaccgcgactccttcgaggaggtgcagcggctcaggcagcagatcctcgacaccaagtcttgcctcaagaacaaaaccaaggagaacgtggacgtgcccctggtcatctgcggcaacaagggtgaccgcgacttctaccgcgaggtggaccagcgcgagatcgagcagctggtgggcgacgacccccagcgctgcgcctacttcgagatctcggccaagaagaacagcagcctggaccagatgttccgcgcgctcttcgccatggccaagctgcccagcgagatgagcccagacctgcaccgcaaggtctcggtgcagtactgcgacgtgctgcacaagaaggcgctgcggaacaagaagctgctgcgggccggcagcggcggcggcggcggcgacccgggcgacgcctttggcatcgtggcacccttcgcgcgccggcccagcgtacacagcgacctcatgtacatccgcgagaaggccagcgccggcagccaggccaaggacaaggagcgctgcgtcatcagctaggagccccgccgcgctggcgacacaacctaaggaggacctttttgttaagtcaaatccaacggcccggtgcgccccaggccgggagcgcgcgcggactggcgtctcccctcccggcgatccgcccccagcactggggaggcgccactgaaccgagaagggacggtcatctgctccggaaggaaagagaacgggccaagactgggactattccccacccccggtcccccattgaggcccgccacccccataactttgggagcgagggcccagccgagggtggatttatcttctcaaagacctaagagtgagcgcggggtgggggagggatgtgaagttatccagcctctgctaggcttcaagaaaccgtcatgcccgcttgagggtcaggacccacggggcattatcttgtctgtgattccgggttgctgtgacagccggtagagcctctgccctcccgaaactaagcgggggggcgtgggtcaaatcatagccaagtgacttgtttacatgtgagtgaaactgcacaaaggaacacaaaacaaaacttgcactttaacggtagttccggtgtcaacatggacacgaacaaaaccttacccaggtgtttatactgtgtgtgtgtgaggtctttaaagttattgctttatttggttttttaatatacaataaaataatttaaaatggaaaaaaaaaaa

SEQ ID NO: 86781 - DNA, 477 bp, Homo sapiens
aaaaaaaaaaaaaaaaaaaaggggggggggggggggggccttctttttggggggggaaaaatttttatcttctcaaagacctaagagtgagcgcggggtgggggagggatgtgaagttatccagcctctgctaggcttcaagaaaccgtcatgcccgcttgagggtcaggacccacggggcattatcttgtctgtgattccgggttgctgtgacagccggtagagcctctgccctcccgaaactaagcgggggggcgtgggtcaaatcatagccaagtgacttgtttacatgtgagtgaaactgcacaaaggaacacaaaacaaaacttgcactttaacggtagttccggtgtcaacatggacacgaacaaaaccttacccaggtgtttatactgtgtgtgtgtgaggtctttaaagttattgctttatttggttttttaatatacaataaaataatttaaaatggaaaaaaaaaaa

SEQ ID NO: 86782 - DNA, 1563 bp, Homo sapiens
tgctgaggtgactctagaggacccgccacaagccgcgatgatcaagaagatgtgcccgagcgactcggagctgagtatcccggccaagaactgctatcgcatggtcatcctcggctcgtccaaggtgggcaagacggccatcgtgtcgcgcttcctcaccggccgcttcgaggacgcctacacgcctaccatcgaggacttccaccgcaagttctactccatccgcggcgaggtctaccagctcgacatcctcgacacgtccggcaaccacccgttccccgccatgcggcgcctctccatcctcacaggagacgttttcatcctggtgttcagtctggacaaccgcgactccttcgaggaggtgcagcggctcaggcagcagatcctcgacaccaagtcttgcctcaagaacaaaaccaaggagaacgtggacgtgcccctggtcatctgcggcaacaagggtgaccgcgacttctaccgcgaggtggaccagcgcgagatcgagcagctggtgggcgacgacccccagcgctgcgcctacttcgagatctcggccaagaagaacagcagcctggaccagatgttccgcgcgctcttcgccatggccaagctgcccagcgagatgagcccagacctgcaccgcaaggtctcggtgcagtactgcgacgtgctgcacaagaaggcgctgcggaacaagaagctgctgcgggccggcagcggcggcggcggcggcgacccgggcgacgcctttggcatcgtggcacccttcgcgcgccggcccagcgtacacagcgacctcatgtacatccgcgagaaggccagcgccggcagccaggccaaggacaaggagcgctgcgtcatcagctaggagccccgccgcgctggcgacacaacctaaggaggacctttttgttaagtcaaatccaacggcccggtgcgccccaggccgggagcgcgcgcggactggcgtctcccctcccggcgatccgcccccagcactggggaggcgccactgaaccgagaagggacggtcatctgctccggaaggaaagagaacgggccaagactgggactattccccacccccggtcccccattgaggcccgccacccccataactttgggagcgagggcccagccgagggtggatttatcttctcaaagacctaagagtgagcgcggggtgggggagggatgtgaagttatccagcctctgctaggcttcaagaaaccgtcatgcccgcttgagggtcaggacccacggggcattatcttgtctgtgattccgggttgctgtgacagccggtagagcctctgccctcccgaaactaagcgggggggcgtgggtcaaatcatagccaagtgacttgtttacatgtgagtgaaactgcacaaaggaacacaaaacaaaacttgcactttaacggtagttccggtgtcaacatggacacgaacaaaaccttacccaggtgtttatactgtgtgtgtgtgaggtctttaaagttattgctttatttggttttttaatatacaataaaataatttaaaatggaaaaaaaaaaa

SEQ ID NO: 86783 - DNA, 201 bp, Homo sapiens
tttttttccattttaaattattttattgtatattaaaaaaccaaataaagcaataactttaacggtagttccggtgtcaacatggacacgaacaaaaccttacccaggtgtttatactgtgtgtgtgtgaggtctttaaagttattgctttatttggttttttaatatacaataaaataatttaaaatggaaaaaaaaaaa

SEQ ID NO: 86784 - DNA, 1756 bp, Homo sapiens
caggctggtacggcccggggtgttatggatggagaacccagccgagcccagcctagcccgagcccagcccgagcggagccggagccccaagcccgagccgcgcccagcccgagcagagccctccagccgctcaccccgcgtgccaccccagcgaccctcagccgctctctgcccttctctcggccccgcgcccgccctcgcggcccctctgcccaatgaaactggccgcgatgatcaagaagatgtgcccgagcgactcggagctgagtatcccggccaagaactgctatcgcatggtcatcctcggctcgtccaaggtgggcaagacggccatcgtgtcgcgcttcctcaccggccgcttcgaggacgcctacacgcctaccatcgaggacttccaccgcaagttctactccatccgcggcgaggtctaccagctcgacatcctcgacacgtccggcaaccacccgttccccgccatgcggcgcctctccatcctcacaggagacgttttcatcctggtgttcagtctggacaaccgcgactccttcgaggaggtgcagcggctcaggcagcagatcctcgacaccaagtcttgcctcaagaacaaaaccaaggagaacgtggacgtgcccctggtcatctgcggcaacaagggtgaccgcgacttctaccgcgaggtggaccagcgcgagatcgagcagctggtgggcgacgacccccagcgctgcgcctacttcgagatctcggccaagaagaacagcagcctggaccagatgttccgcgcgctcttcgccatggccaagctgcccagcgagatgagcccagacctgcaccgcaaggtctcggtgcagtactgcgacgtgctgcacaagaaggcgctgcggaacaagaagctgctgcgggccggcagcggcggcggcggcggcgacccgggcgacgcctttggcatcgtggcacccttcgcgcgccggcccagcgtacacagcgacctcatgtacatccgcgagaaggccagcgccggcagccaggccaaggacaaggagcgctgcgtcatcagctaggagccccgccgcgctggcgacacaacctaaggaggacctttttgttaagtcaaatccaacggcccggtgcgccccaggccgggagcgcgcgcggactggcgtctcccctcccggcgatccgcccccagcactggggaggcgccactgaaccgagaagggacggtcatctgctccggaaggaaagagaacgggccaagactgggactattccccacccccggtcccccattgaggcccgccacccccataactttgggagcgagggcccagccgagggtggatttatcttctcaaagacctaagagtgagcgcggggtgggggagggatgtgaagttatccagcctctgctaggcttcaagaaaccgtcatgcccgcttgagggtcaggacccacggggcattatcttgtctgtgattccgggttgctgtgacagccggtagagcctctgccctcccgaaactaagcgggggggcgtgggtcaaatcatagccaagtgacttgtttacatgtgagtgaaactgcacaaaggaacacaaaacaaaacttgcactttaacggtagttccggtgtcaacatggacacgaacaaaaccttacccaggtgtttatactgtgtgtgtgtgaggtctttaaagttattgctttatttggttttttaatatacaataaaataatttaaaatggaaaaaaaaaaa

SEQ ID NO: 86785 - DNA, 399 bp, Homo sapiens
aataaagcagattgccctccctaatgtgggcaggccccattcaatcagtttaaggcctgaacagaacaaaaaggcttactttcctgcaagtaagagggaatttcgacttgcctggttaccctgagttgggacattggtttggatgcacaccgaaacatcagctcttcctggcttggaggcctttgggctggaactaaataatgcgtattagctctcctgggtcaccaggttgctgacagcagatcttgggacttgtcagcctctgaaattgtagatttatcccaaggaattggctaaaacgattatggaggctgacatatatatgtgggtgtatatgcatacatacatattcatagagatttatcataaggaaaacacacacacacacacacacataca

SEQ ID NO: 86786 - DNA, 584 bp, Homo sapiens
taacctaacttacctagttacttaagtacacatcaaaaccaggcagctaaatcaggagctcctaacctagggcccaggaagcaaaagagtacagaaactacatacaaaagccaaagtttaggtaaacattgtgtactcatagctttcccaaccaaaactgggattggctggcaggttaaggggggatttgtaatgaaaaatagcaaaggaatggtaaccaggataactaggtcaccaacgagctaaagacacataatcaacaaaagggtatactaagtaatgaaaccaaggaaaagttctgccaaggcaccaaaacagtagatgaggaaaggacagaacctactcctagtcagtctgatagctaggtaaaattatcaaggcaacctttattttaggttatcaaacttagacaaagtaaagcctggtaagcctttctactccagagagcagaaatggcaagactcaaaaggaagcagtattacagtaagtcactatatggcatgaatcaaaggtgaagctttcagataaaatcacaagagatttccttgtgtgatacatcttcagagtattctggacattcttga

SEQ ID NO: 86787 - DNA, 815 bp, Homo sapiens
gtttatatgtgctccatctttgaccaaaacgtcattatgggtgcatgactacatttatataagtattcattcttgagcttcagtttatggacaagctaaagttcacgaggagaaatacaaatattgtgtatactacctaatggaaaaagttgggcatacaaattgttcaaatactgagagtaggcccagcatggttgctcacacctataatcccagcactttgggaggctgcaggagttcaagaccagcctgggcaacatagtgtgacccccatgtggaaaaataaaatacagagtaaattgttatgatacaactaacacacattgtaaatcgacggattatccgctttaacattactttagtgtttttttttgtttgttttttgtttttttttgagacggagtctcgctctgtcacccaggctggtgtgcagtgacgcaatctcggctcacattgcaagctctgccttccgggttcatggcattctcctgcctcagcctcctgagtagctgggactacaggcacccgccaccatgcccggctaattttttttattttttagtaaagatggggtttcaccatgttagccaggatggtctcgatctcctgacctcgtgatccgcccacctcagcctcccaaagtactgggattacaggcgtgagccactgcgcctggcctgctttagtgttttttgatacattttatggaaaaggtggtaataaaaattgaaagtgtttttagtttatttaaaaaccagttgtcatagtaaatagtgaattccattcttttttgcattttaagttaaataacaaac

SEQ ID NO: 86788 - DNA, 370 bp, Homo sapiens
agtgtggaagccactggaaaaaatatgagacttagatacataatttgagtaaaaatggctcaaagtcatgagggtaaagttttttgtatttccattttattcgagcggcatcgtttttaaaaatcattatgaatttgaccctatatagatgtttccaaataattctttttcaccttcataaaattccttcctgtggctgtgagatgccttgcctatcagttttcaagcttagttgtctttctcatcctttaccattttagctttaaaaaacaaaagtgacaattagaacttcctgcctgctgggcctcactgaaagaccgatattggcctgataaggagatatttattttgttttagtggcttcagaaat

SEQ ID NO: 86789 - DNA, 542 bp, Homo sapiens
  misc_feature (238)..(238): n is a, c, g, or t
gcaaaagatgcagtagtgggcatcccctctccattcagagcgattcagcactcattcattgagtatctacctactctgtaccaggctcttttggtgctggagagaccgtggtaagaacattatttcacccttccaggaaaaagaaacgtttctaagcctgtacatccaagagacagcccaggagtacaagttgcgccatgacatgggcatggagggagggagaagtcctctggggagngctgcatcacacaacatcaaatgctgagaaccatctcatgttcacgctacatatttactgtctcctatgaataaaattccagacagggtttcagagaacaccaatgcaaatggacctgtatcaggtaatatgccacctttcttcatgtgacctgtccatgcagcagctcttgtgaggtggtagcaagatcggagatggagtcttgctctgttgccaggctggagtgcagtggtgcgaccttggctcactgcaacctccacctcctgggttcaagcaattctcctgcctcagccacctgagtagc

SEQ ID NO: 86790 - DNA, 707 bp, Homo sapiens
  misc_feature (258)..(258): n is a, c, g, or t
gaggtttaagggctaccctgctctatttgtcctgcacaagaactaggcacagagtgaaagcaggtccagtgggcctgattttccacatggaagtcatcagccctctgctgcatgagaagaaaggatattataggctgggcatccaggctgtcaattacctacctctgaaggaagcatgccggaggctatatgagagttcttcctgtgtgcggaacactcactgaatcagatttctagggctctgtgtaagtgagcagnttaagggctacccaaatggccaatacacatatatatatatcagaaggggctcagtttcattagtcatcaaggatatgcaaatttaaaccaaaatgctatgccactacatatccaacacaatgatttaaatgaaatagaagagagtacaagtgtgggcaaagatttgaagcaaatggaactctggaactcctggtggaagaggaaaactgatagtaaccactaatggcaaacacggaaatactctatgacctagcatttctactgctaagtatatacccaacagaaaagtgaatatgcatgccaaagtgccattatttgtaatagccccaaaccagaagcaactcaatgtccaccaacagtagaacgaaccagaagcaacccaaagtccaccaacagtagaacgaacaactcgaagcatattcatgcagtaagaatgaatgaacttacag

SEQ ID NO: 86791 - DNA, 339 bp, Homo sapiens
tcagttctatatccacatatttgtaacttgtaaattaccagtaatagactgaaccacattttttccttttctggttttgaattgaaaaattactgctttatttgtttttttccttttagaactggttttatgagaattggaagttaactttggggatggcttatttctgtgctcagtttttgtttagggatatatacatccttgtataaggatacatatataaatatatacatatgactagaggtctctgcattttttttttccattttttgagatggagttttgctctcgttgcccaggctggaatgcaatggcacgaacccgactcactgcaacttc

SEQ ID NO: 86792 - DNA, 224 bp, Homo sapiens
tgctctgtagctttttaaagatacagctacaatcaacaaaggactggcacatttcagaccacagctacttttctactacaatgtgacttcatatttatttagtcctatcctgtcccaaacaaggtttgttaagacagcttacaaaaatacacacagaataaaccataaaattatttataagggattgacaatttgtcgacgcggccgcgaatttagtagtagta

SEQ ID NO: 86793 - DNA, 531 bp, Homo sapiens
tgatcatatgcttgcatttgttcatctgtttcagtaatactagtcctgttttctagtttagcaaggacttgttccatgacttcaacataatctgtttcattgtcagccactggttcagtataatcttcctcatcctctgctttatagtaatagggctccgtgtagacatcagagtcaagtgtggtacttgactcatttgcagttgattgagataatgtccgaaatctccccattaatgaagagccactgtcctcatacccactcagactctgtgtgcttttgttccatactacttccaaggctgatttagccctctgcagtgtagatccaaattttgggaagctgaaagtcttatcagaaaggtcaatgcttaatcgactatgccatgatttgggtggggcatcctctgaatcatcactttgcaattcactttgacttcgatacatcatggacaactggttttgattttggtatagctcattagaattagctccctgataagaatcatattggccaacccactggccttgt

SEQ ID NO: 86794 - DNA, 232 bp, Homo sapiens
ccgcgcccagcctcagttaagtcttaacttgagtatggtcctagctgtgctgtggagtactagggggtgaggccactcataaggggaacatcggctgctagggaaagccggttgtaggcccccaagaggtgaaagcaaagaatgaagcattgcttggggttccataacatacctggggagggcagcctggtcaaagagggcatttctgccttcaactggcaaggcctgcacc

SEQ ID NO: 86795 - DNA, 354 bp, Homo sapiens
tcttgtctggacttctgctttaatgttttaactggtctcactgtggccattgttgcccccacccccaacaatctattttcatataatagctagcataaacataaatcacatcattacttcccttcttaaaactctccatggttggccaggcgtggtggctcacgcctataatcccagcacttcgggaggtggaggcaagtggatcatgaggtcaggagttggagactagcctgaccaacgtggtgaaaccctgtctctactaaaaatacaaaaattagctgggtgtggtggcgcgtgcctgtaatcccagctactcaggaggctgaggcagcagaatcacttgaacccaagaga

SEQ ID NO: 86796 - DNA, 320 bp, Homo sapiens
tcctgggaccttctgccccttttggctgtagccatccctgcaggctataatcctacggcttccaaccagcctgcttggacgcaggtgggaaagagggctaggcaccatgcaagggattgcttacttctttcctctgctcccacctctgcctcctgccatttcccctgatgttttattgttttggtggttgttctcactgatggtaatagttagaatattcattatgtgtttggcttgctcgttagaacttaaattctttgaattacatcatttcaatagaaccagtacaatatttctatacttgctctatctcccagcag

SEQ ID NO: 86797 - DNA, 404 bp, Homo sapiens
acaaagatttacacctccgttttattctaagggttttatagttttagctctgaaatttaggtctttggtgcgttttgagttaatttttgtctatggtatgaaggaggagtttaacttcattcttctgcctgtggctgtctagtcctagtaccatttgttcaaaagactacctattgaatggccttagcacttctgtcaaaactcagttgaccataaaatatgggtttatttctgaactctcaactctattccatggacctatatgtctctctctatgccagcagcacacagtcttgattattgtagctttgtagtaagttttaagattggaaagtgtgagtccttcaactttggtctttttatttattttggttattcctggtcccttgcattttcatatgatt

SEQ ID NO: 86798 - DNA, 370 bp, Homo sapiens
gtatattcaaacaaaagaaaagaaattattattttggcagattatcaacgatgactgtagtgttagtgtgtaaattgaaaagtggttgatcaggacaaaaatgtaaaactattattagatactgatagaactaagaaagtgacttctaaatcctagttggaaggattaccctttgtttagggcagttaatttgcttaagttacacagtcagggtgggtgattagcccaaagaagatgttttgtgtcggtggattgagaactctgttgacaaaatagttgacaaaaatagcctcacaaaagcacaatctgaaataggccttattattcatggaaaactctggtaattattatcagcctttttaaaagaaaa

SEQ ID NO: 86799 - DNA, 1989 bp, Homo sapiens
agcttcgggggcgagcgctcgtgtgtgtgagtgcgcgccggccagcgcgccttctgcggcaggcggacagatcctcggcgcggcagggccggggcaagctggacgcagcatgatgcgcgcagtgtgggaggcgctggcggcgctggcggcggtggcgtgcctggtgggcgcggtgcgcggcgggcccgggctcagcatgttcgcgggccaggcggcgcagcccgatccctgctcggacgagaacggccacccgcgccgctgcatcccggactttgtcaatgcggccttcggcaaggacgtgcgcgtgtccagcacctgcggccggcccccggcgcgctactgcgtggtgagcgagcgcggcgaggagcggctgcgctcgtgccacctctgcaacgcgtccgaccccaagaaggcgcacccgcccgccttcctcaccgacctcaacaacccgcacaacctgacgtgctggcagtccgagaactacctgcagttcccgcacaacgtcacgctcacactgtccctcggcaagaagttcgaagtgacctacgtgagcctgcagttctgctcgccgcggcccgagtccatggccatctacaagtccatggactacgggcgcacgtgggtgcccttccagttctactccacgcagtgccgcaagatgtacaaccggccgcaccgcgcgcccatcaccaagcagaacgagcaggaggccgtgtgcaccgactcgcacaccgacatgcgcccgctctcgggcggcctcatcgccttcagcacgctggacgggcggccctcggcgcacgacttcgacaactcgcccgtgctgcaggactgggtcacggccacagacatccgcgtggccttcagccgcctgcacacgttcggcgacgagaacgaggacgactcggagctggcgcgcgactcgtacttctacgcggtgtccgacctgcaggtgggcggccggtgcaagtgcaacggccacgcggcccgctgcgtgcgcgaccgcaccgacagcctggtgtgcgactgcaggcacaacacggccggcccggagtgcgaccgctgcaagcccttccactacgaccggccctggcagcgcgccacagcccgcgaagccaacgagtgcgtggcctgtaactgcaacctgcatgcccggcgctgccgcttcaacatggagctctacaagctttcggggcgcaagagcggaggtgtctgcctcaactgtcgccacaacaccgccggccgccactgccattactgcaaggagggctactaccgcgacatgggcaagcccatcacccaccggaaggcctgcaaagcctgtgattgccaccctgtgggtgctgctggcaaaacctgcaaccaaaccaccggccagtgtccctgcaaggacggcgtgacgggtatcacctgcaaccgctgcgccaaaggctaccagcagagccgctctcccatcgccccctgcataaagatccctgtagcgccgccgacgactgcagccagcagcgtggaggagcctgaagactgcgattcctactgcaaggcctccaaggggaagctgaagattaacatgaaaaagtactgcaagaaggactatgccgtccagatccacatcctgaaggcggacaaggcgggggactggtggaagttcacggtgaacatcatctccgtgtataagcagggcacgagccgcatccgccgcggtgaccagagcctgtggatccgctcgcgggacatcgcctgcaagtgtcccaaaatcaagcccctcaagaagtacctgctgctgggcaacgcggaggactctccggaccagagcggcatcgtggccgataaaagcagcctggtgatccagtggcgggacacgtgggcgcggcggctgcgcaagttccagcagcgtgagaagaagggcaagtgcaagaaggcctagcgccgaggcagcgggcgggcgggccgggcgggcccgagggcggggcgagcgagacggcgcttggc

SEQ ID NO: 86800 - DNA, 1948 bp, Homo sapiens
agcttcgggggcgagcgctcgtgtgtgtgagtgcgcgccggccagcgcgccttctgcggcaggcggacagatcctcggcgcggcagggccggggcaagctggacgcagcatgatgcgcgcagtgtgggaggcgctggcggcgctggcggcggtggcgtgcctggtgggcgcggtgcgcggcgggcccgggctcagcatgttcgcgggccaggcggcgcagcccgatccctgctcggacgagaacggccacccgcgccgctgcatcccggactttgtcaatgcggccttcggcaaggacgtgcgcgtgtccagcacctgcggccggcccccggcgcgctactgcgtggtgagcgagcgcggcgaggagcggctgcgctcgtgccacctctgcaacgcgtccgaccccaagaaggcgcacccgcccgccttcctcaccgacctcaacaacccgcacaacctgacgtgctggcagtccgagaactacctgcagttcccgcacaacgtcacgctcacactgtccctcggcaagaagttcgaagtgacctacgtgagcctgcagttctgctcgccgcggcccgagtccatggccatctacaagtccatggactacgggcgcacgtgggtgcccttccagttctactccacgcagtgccgcaagatgtacaaccggccgcaccgcgcgcccatcaccaagcagaacgagcaggaggccgtgtgcaccgactcgcacaccgacatgcgcccgctctcgggcggcctcatcgccttcagcacgctggacgggcggccctcggcgcacgacttcgacaactcgcccgtgctgcaggactgggtcacggccacagacatccgcgtggccttcagccgcctgcacacgttcggcgacgagaacgaggacgactcggagctggcgcgcgactcgtacttctacgcggtgtccgacctgcaggtgggcggccggtgcaagtgcaacggccacgcggcccgctgcgtgcgcgaccgcaccgacagcctggtgtgcgactgcaggcacaacacggccggcccggagtgcgaccgctgcaagcccttccactacgaccggccctggcagcgcgccacagcccgcgaagccaacgagtgcgtggcctgtaactgcaacctgcatgcccggcgctgccgcttcaacatggagctctacaagctttcggggcgcaagagcggaggtgtctgcctcaactgtcgccacaacaccgccggccgccactgccattactgcaaggagggctactaccgcgacatgggcaagcccatcacccaccggaaggcctgcaaagcctgtgattgccaccctgtgggtgctgctggcaaaacctgcaaccaaaccaccggccagtgtccctgcaaggacggcgtgacgggtatcacctgcaaccgctgcgccaaaggctaccagcagagccgctctcccatcgccccctgcataaagatccctgtagcgccgccgacgactgcagccagcagcgtggaggagcctgaagctgcccgccagcccaacaccttccaggctgaggggttgtcactccttcctggggctgcagagaaggaaggagccagatgctggggatacagaaggaggcttgggcacagggtcgcacaagcagaatgcagggggcccaggagctgggcgtgggggagaatcacatcttcattttcattcgcctctaactaaaaatttagcatttcctccatggcaaagagaggccgcagaccgcagcatgcggccaagcctgcaccgtggtcactggcggaagtcacagcggtttacacatcacattctagctggtgcagatatcataaatatcgttcatgctggttattgcttctcaaaacgacagaagttactagacctgctgctagatcctgatttataatcattaataaagaagcactcgcgtaacgtaaccat

SEQ ID NO: 86801 - DNA, 399 bp, Homo sapiens
gtgcagtggcacgatcttgggatctcagctcgcggcaacctctgcctcctgggttcaagtgattctcatgcctcagcctcccaagtagctgggattacaggtgcccaccacaacacacccggataatttttatatttttagtagagacagggtttcaccatgttggccaggctggtcttgaacttctgagctcaggcaatccacccacctcggcctcccaaagtgctaggattaagagcatgagcccctgcgcctggcctgtagtttaactgatgttttatttagcatgtgctaataaagcaaaaaggggataggaaagaatgtacctttttctgcagtatcttattcaccctcctttaacactaaatactttataatcacacaaatattatactccat

SEQ ID NO: 86802 - DNA, 330 bp, Homo sapiens
aaaatcttcacctagcattgttgggattatatggttacatcatctgaagttgacagaccaaaatatagaggcttcagaggtctccaaatagaactaaacatgtaattcagattgttaggaggtagtataaatgagctaaatctcatctttattacggtagagttaatgggtgatgtctaaagttgtctgaagtctataaatcatgacaaattatgatgtggtgattgtattcaacagtctttcagttgcagggataaaaccccagtttaaactagagtaagagaaagaatgtgttggtttaagctcctggaaagtgcaggcaagggtagt

SEQ ID NO: 86803 - DNA, 275 bp, Homo sapiens
gtttggattgctaccagttctactgttcactttttgacaatgttgctttccccattgccaaagccctgaacccataacctgtatttgtgctttgccccaaagttgaccatcttattcgtatatgattcttaaagttgaaaatccataaggccgggcgcagtggctcatgcctgtaatcccagcactttgggaggccgaggcgggcggatcacgaggtcaggagatggagatcatcctggctaacaccgtgaaaccccgtcttttctaaaaattcc

SEQ ID NO: 86804 - DNA, 372 bp, Homo sapiens
tccaggcagatctagacacattccaaggtgatacctggaatggggcaatgaagcagttttgtccactcattcatcatatgtgaacggagcaaacaaatcaaccaaggccctgccttcatggagtgtgtgtcccaggaccgggctgagcgataaaggagccacacagttcatccgaaggtttcatgctgtggaggaatataacacggggcacatccaagaggggggctggagctccgattttctaaatatcaggactgcttcactgagaaggtgatgtttgagcagatacccaaagtgagagaaggatccacgcagcacctggaaggataaagccaggcaaagggaatgacaaaaatgtggaggttgcagtta

SEQ ID NO: 86805 - DNA, 176 bp, Homo sapiens
aaaaaatataaataaataaatacatacatacatacagacgtaaagtattaagtatttaatccttctggaatttaattagcttcacaaacagaaatgtatgctgcataaactgcattcacaggataagcatctatgggatttttctttcttttttttttaagacaagagtcttgctc

SEQ ID NO: 86806 - DNA, 267 bp, Homo sapiens
cttcaccttaaagtttgagaaccactgctgtaaactgatagaatacatttgtcaacaaccattacatcctagtggaagtcaagcaaaagtcttctctgttttaagcttaaagaataagacagtatctttgcagtgtgatcctagtttatctcagaagtggaaaatggaagcttcatttaatttctgacaggtggatgtcactatggtctcatctcagttattattcaaaattcttacagtttgaagtttttgaaaatattagagaat

SEQ ID NO: 86807 - DNA, 313 bp, Homo sapiens
tgtcatttcagagagacgatttgtcttttaaacagacagcataaacatatacaatactgaaaatgtattttgcaaatgattttcttattttctttagctttattgtaagaatacagtatataacctacaaatagttaaatgattggttatattattggtaaagcttctgatcaccagtgtgctattagtagttaaaattttgaggagtcaagttatacacagattttcaactctgggctatccatgcccctaattctcaccttgttgaaggctcaactgtagttcatccaaaaggtagatacagttttatgtt

SEQ ID NO: 86808 - DNA, 693 bp, Homo sapiens
cagggcttatctaagattgggaaggtcagcgatactgaaattccctacagctttcagtcccatcctgttttacttgcttgtggacattgcttaagcccagtgggtttgtgatgctatttagaacttaggtgggtatgtttcacataccttcagtgctatctcacctggacctttacgcggcccagtgaggaggttgggttaatgtaactcctaagtaaaggaccttctggatcctggctgggatctttccactatatgttgctggacttgggctggtctgtttctgatttcataggtaaattgtagaaggttcctgtcctgtccaggccctcaccaaaaagtttccagaaggaaaagtcaaatacgatgaatttggtctgattattccacattgttaaacatattttcttatgtgaacgcttagtctggcaattgccttgacctttctggtttaattaccatatcagattgatttatttcttccttgttctggatgttctcagtgcttacctgaccttaacactgagttccctccaaaaatcagtgctcacatctctcctaacagaggactagaatgacctactcttccctgaccttttctctgtctcataaaaatgtaatagtctcgtcatttctggtcctgctccagcgctttctgtataactttcatggactataaatctggtatcttgg

SEQ ID NO: 86809 - DNA, 153 bp, Homo sapiens
gtgtttatatgcatgatttcaaaagtaaatgacaaatgtaatgacaggagttagtctaccatcctcaccataatcaaaaacaacagcaacaaaaccaccttcacttaggatactggtaaaccctcgtacattcatatctacccctcagaagac

SEQ ID NO: 86810 - DNA, 795 bp, Homo sapiens
cacgcccagccaattatttgtttgtttgtttgtttgttttttcatagaaatggggttttgccaggttgcccaggctggtctcaaactcctgagctcaagtgatctgcctgcctcagcctcccaaagtgctgggattacaggcatgatgagccactgtgcctggactactttctctctgagggtgagatgaacagagacccagtaagacatgtgttcgttattttaaactgctgacatttgtggcattgtttgttactgcggtataacctatcctaccctgtttaaggccccctcttaatactactttacatctcatttgtacaggatgtgttcagaatggatgcgcaatgaatccttcttaagttgaggtaaactccatcaactgaattgcttcagggctgcagaagctgaaatgggtattttcatctcttcatccagaaaggcttcatttgggacacctgtgggaatgcctgttccgctttcacgttagccaatctttaaagctttcattagctatgataaattattcaaaaaggaggaacacttgaaacctctttagaatattgacgtggaccgacagtaaatgaatggaaaagtacctccaggttcgaggctaactttcatttaattttttagaggaaccagtcgagttgttaaaatgatcagaaacgggcctggccagagccagctcttcaaagaggggatgttattacctccttgaccattcacttaatcagatctggtcgatgtcaagaaaacaaaattcctcgtgcgatggtgggctcaggatataat

SEQ ID NO: 86811 - DNA, 427 bp, Homo sapiens
gaaactgaatggaataagagctcctgatgaattagatgagtcgtagagactgaaaagatgggcttcgtcattgccctcagtatgataacacaagcttctaaatacttctcttaaatcaatttttttttgtaattacaaatacttgctaggtaataaaataacattaaaattatcagtaaaatatgtttacaaaataatgtgaaaaactttagtttttcagtgtttttgtatttcatttgccaagtgctttgaggaagaagtggcaagatttttttgaaataactttaaataacaaaagctaaatgcctttcatagtgctcattttagaaagtatggatagttcaacaacacaaaaagaaaattgaaatgacacattactacaaattctgtaatattttttactcttcagtagattgcaagctttttc

SEQ ID NO: 86812 - DNA, 333 bp, Homo sapiens
cctgcctcagcctcccaagtagctgggattacaggcgtgcaccaccatgcccagctaatttttgtatttttaatagagacagggtttcaccatgttggccaggctggtctcgaactcctgacctcaaatgacccacctgcctcagcctcccaaagtgctgggattacaggtgtgagccactgcacttggctgtaaatgatcttattcaggtgctaaatggtgggctaggagcctgagagagaataattggttcttttctctgtacggttggtcccatagggccacttccatctcttatttacctatgccttttttctagtcttgatgattgac

SEQ ID NO: 86813 - DNA, 747 bp, Homo sapiens
ggccatttattaaattgccaacacctggaacccctttctaccacatgcgttttggtggcagacaaagaatttcacctagatttgtttaatcaaagccacactacatacagttggatatagagagatagagacaaatgtacatggacaacaaaaaaaatagtgcaaatgcagttgaggcaaaaacattaagatcccagcatgtgcatcctgtatctacaacaatgccattgaaagtatgagctgtgtcattggaagtacagcagcggaaacagccactcatgaagttcctgttgggaaaggatttgggctgctggctggctgctttacttccttgtgttcctgccattattttctagctgatttctccaccttccctaccatttctatactggaatcaatatccattcaataacattttacattgcaacccaaagccctagatgttcaaaagtgtaacaaaagagatagtagaaaagggtactgaacagagtgatcaagggaagaagcaggagagaactagaaagctgagtgttgtggatggacataaagagagtacaatatttaagaaaaagttatcaaaagtaaagattgacaagtgaaaggaaaaaaggcataggaaatgtggaaatggaaatttgcctaggtgaaataaaacaaggagaaaaaaattagtcacagaataatcacatcatagatggtaaatgcgagaaagacaagtcagtaaagaaggagacagaaagaagtacc

SEQ ID NO: 86814 - DNA, 359 bp, Homo sapiens
tttttttgacaaaaatagtatatatttattatgtacaacatgtattttgagacatgtatacattgtggaatgtctaaattgagctaacaaatacattatctcacataccatgtttttttgtggtgacaacattcaacaatatagaccatttcacaaatttgcatgttatctttgtgcaggggctatgccaatcttctctgtattttttcaatcttggtgtatgtgctgctgaagcacacaccctaattcctttcatttaaggatctagttaacctttctcttaagtataaccatgtattttgttaagcaatatctttttattacaaaaatgccatttttttctggttagaaaattgatt

SEQ ID NO: 86815 - DNA, 456 bp, Homo sapiens
gtgggcatatagtagaaagtggggcttgttgttgaaaaaattttggttgttggtgttgaaaagaacagcggtctgtatgccaaggacaatttcttttagaatgtcccgattggctgcataggaagcatttgccagggaattgtccaggcattcgaatagagaccatggcttgtgccatgaccattgctgtacgcagagttcccctcacgccttcacagactttaatgtatgaggtgagtacatcaccccctggtggaattttgcctttaatggggcaaatagccacctgacagtctggatttacttgttcataagccataagttctataacaagtcattggccctggctatcagggatagctttttctgctgcgtcttgaagatggacaataaagtctggatacggttcatgttgtccccgtctgacggctgtaaaacatgggcatagtttgtcat

SEQ ID NO: 86816 - DNA, 331 bp, Homo sapiens
gaacaaacaaacaaacaaacaaacaaaaaacagggtaccagggagtggcttttgtgtgtgcctgggaggggtacctagtccatgctccagccccatccgtggcctccatggtgcccaactttcctgagaagtatgctctgctcttatttctttagggattatccaggaaagtcatgggtgttggattaaatgctagtctgttttcctagcaagagtccccacaatggtcctctaaaatgatttaccctcagtaactggctagttggtctgctaatcacctttggctagtcgatctgctaattaccttttctccctaagcttaataagattc

SEQ ID NO: 86817 - DNA, 342 bp, Homo sapiens
gtggctcatgcttataatcccagcactttgggagactgaggtgggaggattgcttgagcccaggagttcaagaccagcctggggcaacatagtgaaaccctgtctgtacaaaaataaataaataacaattagccaggcatggtggcatgtgcgtgtagtccctgctgttttggaggctgaagtgggaggatcgtttgagcccaggaggttagggctgcagtgagccgtgaccatgccactgcactccagcctgagcaacagagcaagaccctctctcaaaaaaatcaatctctttgtctaaaaaaacatagtagagttgagcttgttttattccctataaaa

SEQ ID NO: 86818 - DNA, 423 bp, Homo sapiens
agtgcctttgcatgtacaggtctgtctgcaggaacattctgctgacttctgtccatcccttttcactcagctttcgtcaatccaactgattttcagtccacagaccccaagcctgcaggaagctcttcagagactaagtaagcccttgtagcaagcctgaaaagattctgaagtccggtgaaacagctgacgccaaccagtttgaagaccccacataggaacagaatcagcatgaggacagtttcttcatctgtctgtcctatgatttcaccctgcactctttgaccaatcaacaatcttcacacttctgcctgttctaaaactcttataaactttagccccaaactcctcacggaggtggatttgaggtttcctcccatctctttattcggtagccctccaattaaatctctttctcctgca

SEQ ID NO: 86819 - DNA, 555 bp, Homo sapiens
ctctcaaaagttctatcttcagcccaaacctctctcatagtgtccaaatttgtataatataatctctacttcacatctcaaatgtttcatattcaaaaaaaagctccttgtcttccccccacttaatgatgtcacaccctgcaaagcactccccatctcagttgatgctagtttcatccttaaacttactcaggccaaaatcttggagccaatacctatagccaaaacctatagccaatctgacaggaaattattttggctccgcctataaaatataaccagaatccaaccatttctcacaatatccaagctatgataaggatcatcatatctctcacctggattactatgctagccctctaacttcatctccctgctacacttgcttcctatggtctattctcaacataatgtccagagaaaaataattttcaatcataaaaaactcaaaacccaggcatggtggctcacacttgcagtcccagctacttgtgatgctgaggcaggaggactgcttgaacgcgggagatgaagttagagagtctccgtcgaact

SEQ ID NO: 86820 - DNA, 490 bp, Homo sapiens
catttattaaggactctctgctccagcctctcactctcactctcctccgctcaaactcagctcacttgagagtctcctcccgccagctgtggaaagaactttgcgtctctccagcaatgcatctccttgcgattctgttttgtgctctctggtctgcagtgttggccgagaactcggatgattatgatctcatgtatgtgaatttggacaacgaaatagacaatggactccatcccactgaggaccccacgccgtgcgcctgcggtcaggagcactcggaatgggacaagctcttcatcatgctggagaactcgcagatgagagagcgcatgctgctgcaagccacggacgacgtcctgcggggcgagctgcagaggctgcgggaggagctgggccggctcgcggaaagcctggcgaggccgtgcgcgccgggggctcccgcagaggccaggctgaccagtgctctggacgagctgctgcaggcgacccg

SEQ ID NO: 86821 - DNA, 1174 bp, Homo sapiens
atttgggacagagtctcactctgttgcccaggctggtgtgcagtgtcacagtcatggctcactgcagcctcaacctccctgggctcagttgatcctcccacctcagcctcccaggtagctgggactacaggcacacgccaccacatgcagctaatttttttgtattttttggagatgggtttttgctgtgttgcccaggcttgtcttgaactcctgggctcaagtgatctgcccgctttggcctcctaaagtgctgggattacaagtgtgagctactgcatcccacagtatcttggatttttataaggccagacatttacctctggtaatctcttgagccatgtgtttcatttttatgctcacagaataatttggtgtaatggggcttatcaacccaaatttcagaactttaaattcatgtatctttttctacactgatgactatactcaaagcatcttactttaattatataaatgtatatactgtctttctcaactggggtttcaagagagaattaagcccaaaataaaataatttgtgtatcttattttctcatttttctctaggatgatacacagctaatacccttctagatgcatagaaaaaagttaatttattatatacaatggataccttaaggcaagagttgacaaacttttcctgcaaaggaccagatagtaaatattttaggcttcgtgggtcataaagtgtctattgtaactgtttaaccctaccttgtagcatgaaatacttaaacaaatgagtgtggctcaaataatataaaattttattcatagacactgaaagttgaatttcagataactttaacatgtcacagaatactcttaaatttttttcaaccattaaaaaatgtaaaaaacgatccttttatatagttcatgatcatgattaggtgttcatgcacgtatgtgaaagatgccacccttgaaccttgttactattaatacgtcagcacattacctgtctgacccgaaaaaaaaaaaaaagggtaaaaaacactcctagttcacaggaatcataaaaagaggcagcaggccaaatccactaagtgttgtttgctggctagcctccaccttagagaatgagagcttattttttagcagaattctaattggtaagggctgaatcatatatgaaagtatagatgatact

SEQ ID NO: 86822 - DNA, 833 bp, Homo sapiens
cagggctggtgcacaaatatggccaattcaaggagaaacagggcagataatcccacagagccggtgacacgcccatcctattcctgagtagacagagccatttccatcactctcaggcctctgtgggtaattggagctgacaaggtcccatgcatagcagatgagattagtcccagctggacgtttcccagaaatggtcctggggtttccagtaacctctcagatgagatcacttgtctagagatcactctggaatatgtctcatataaggcaaggagtcatggaaactgaatcatgttgagagaggatgttgtaggaatagaagcttctggacaaagaatgaggaagactctggagatctagagagtggggatttgtgagtggtttcaggttttgtttttgtttttcttctcttggcacccccaagcactaggcttatttgctggacagaaatagatcttaagtggagactgcaagttcttccgacgtgatgcactggaggagatgcatgcctggaaaagctctgccacttgctggctgggtggcctgggaacctctgggtctcaggctcctcatccataaaatggggataataactaattctcattaaataagaaacacaagattgatttgtggtaagcttaataagtaacaactactcgagaaaatagccttttaaagaactgacaaccattgctaagtgtctaccctaaaaaaagaaataccagagatataagaaaaggtatacgtgcaaaaaaaaagttcattgtttaatggaaaatattagaaatatattcaacaaagggaatgttcagtaccccctccccaccaaa

SEQ ID NO: 86823 - DNA, 293 bp, Homo sapiens
catggaggtggtttcccccatgcggttctcatgatagtgagtgagttctcatgagagctgatggttttaaagtgtggcacttcctggttcgttctctctctctctctctctctctctctgtctcacctgctgctatataagatgtgccttgcttcccctttgtcttccacaatgattgtgaatttcctgaggccttcccagccatgcagaactgtgagtcaattaaatctcctttctttataaattacccagtctctggtggtatttttttttttgaggtaagactctcactc

SEQ ID NO: 86824 - DNA, 384 bp, Homo sapiens
aaaagtcagaagagcatacatttaagtagtatctagggcaatcaatcagcatccttggcatctgatagggataaaaattattaaattttccaatctaattagaagtgatggtgattgtgcattaagttgtggtattagcatcatcattatctgaatgataaccatggtcctcatggactgagcccaggcgccctgacagctcagcacatatgacaaccccagcaggcaggtgcgtatcatgaccctcatcttccagatgaacaccggtgatcaaaaatacgaagcgatgtgactcaggccccacagccagtaagaagcacacacaaaatgtcagcctgagttcctgctcccacccatgcttatcacaaggctgtctccccttcc

SEQ ID NO: 86825 - DNA, 446 bp, Homo sapiens
atttcagttacatcacatactctgtcctcttgcggtgcgggtcttccccagttgattatacacagataatcaatgactttatttgggagggattggagctatagaataatctatcttaccaatctgatggaccatttgtaagagctgttggtcaaattggatcttcatttgacaaataaatactagagctgcagaaagtaaagtttactccaacccaattaatcattaatacatccacaggaaaaatacattttctccacatggaatattgatttttctatgaatattacctccacattgaaaaacgagtgagtcactgcagttaagccagtgtaccttgatgttgaattccctgaagaaggtacaattatatttacattcccttagcaagaatttggctaagtgataagcacttttctcttttcttttctttttttttttttttt

SEQ ID NO: 86826 - DNA, 384 bp, Homo sapiens
gttttacatgatcgatttttctttgctctgattagtgatttgaaagatggtgatggaataatctgatttttatagactgatttccaagtattcttgtgaatgcgtattatttaccacaaaactttttttttaatgtgcctttcaaagatgagggccaatcaacagacatttaaactggaaaatctttaccccaaattaatttgcttcttggttgatgactactgtttactaattgtgtcatctgtgtctcaccaaagcagaaggtacactcttcttgcaactgggtagttgatgtcaatgaggagttattgcattttctgtgaaaacaataaaatcatagggttcaatcccaagctatttcctttcctacaatgttccctttgt

SEQ ID NO: 86827 - DNA, 348 bp, Homo sapiens
ctggctgctcaccctcccctcaccccttactgcggctcagcccaggtgtgtgctcaaccctctcctcttctgctttctctttattcccatggtttcaactactatttccacaacaatgattcctacaatcatcctaacatgtccaacagactgttgaatattctcatccggataaaacccagccttctcctgatatgaccactatggcctttttcttcttctctgctcacagtcagattgccagatcttgtcaattctcaacttctcaagaatcttttttttttttttttaattcctagttagcattcccactcagcttcatatttcctgatccctgggggatgaaaa

SEQ ID NO: 86828 - DNA, 364 bp, Homo sapiens
tgacattttggatgctgagttggtgccgtagtgagtccagaattctgcggaacttggtttcggttaatgaattttgtaggtgagatagtcttaaatctttagagtttagaaagtggaatgtcctacccagcataaaaatcccccagtgatgtacatgtcctagttcccagaacctatacataggttaacatatatggcaggcgtgattacgattaaataatttgatatgagtagattattgtcaaggtggtcccaatctcatcacagcagtcctaataagcagaaaacctttccaggcttccctgttgtcagtgaaccagggaagcctggtgtgtgggaagaactctattcgccattggttgct

SEQ ID NO: 86829 - DNA, 196 bp, Homo sapiens
tactctagaggtatccccgcgtttaccttctgctctccgtcgaccttctgcaatccatgtcttagtttcactaaggcataaattagtgaaagcaagtccttgcccaaggggcagatgttcagagaagggagaggtgtgaggttcaggggcactggtggaagttaagggacaagggtgttacaggggagaatgtggt

SEQ ID NO: 86830 - DNA, 442 bp, Homo sapiens
cattttcatcattatgagtggcagcttttgtaaaacttctctttatccatcttccaagggataacctaaacatcttaattactaacctttccatttcccagaatgccatcagtatttagttttgaaatatcccttttaaaataatgtgccagttaccttttaaaaaaaattgttttagagatgggttctcactatgttggcctggttggtcttgaactcctggcttcaagcgttccttccgtcttggcctcccaaagtgttaggattacaggcatgaactaccacggttggcccaccttttgatgcattataattttcatgttttttaaaaatgtaaatatacatgtggttcaacagagaaaaatctgaagaaaaacttaaagcatttttggtgatgatttgcccttactcatacaaaatcataattgttgacttaatgaac

SEQ ID NO: 86831 - DNA, 513 bp, Homo sapiens
aatgcaagggaatggtttctccttatccccacctccatcctcacccctgggagatacatgcctgcttaccaggaccaattttctacttatttagctaaaaataattgacctttgaaagtcataacccaagtaattgaatttgaactaaaatctaaagataaacctaatctttcaggcattctttcctcccactcttttgatctttttgacccccactaagtcttaccaggtatattggagtagaggaaatttcatactagaatacagtactgtgtcatgtttcattaatgtcaaagatttcatgtagtaaatagaacaagaaggtaccactttgtataatattcaaaatctatacagcacattgctaagcagagtatacactcaagaaatgtagaattggtaatattatactagaaaatgaacttccagtattgctattattttactaatatgcatagtcactgacctgtgaagagtgaacagtatgtagaagtgcctttgagataggaaatt

SEQ ID NO: 86832 - DNA, 266 bp, Homo sapiens
ctcctgctctgctctcctccctcaggtaccccttagcaaacacatgtctttcatgtgctctttctaaaatgcaaatctggttacttcacaagctcaattaaatgccctcagctgtccttaggaatgagactaacctttcctgatctggtcctcgctacctctctagcctcctcatctacttgctccttgctctgtgcctaatcacacactccttctgggttctggctgccctctgactgaaattcctgttattcccggtctgccta

SEQ ID NO: 86833 - DNA, 732 bp, Homo sapiens
ctcagtaaatgttggctagttatgtgaaccagaacttgagatggaagtgaagcagaaacgatagggagttgttcaaaaatacctgatctgctagggaaatattttttaaaacaaggctgcttttcacaaggaggggtaggcacacttgaattaagatcagattgattatatgtttttgttcagctttgatgttgaattgtttaatcaaatggcagactctgccccgcttccaggaagagctcaactccaactaggaggaagcaggtaatgtgagccatggcatcttccccgtttagatttcctgactctttgtttatcttctttgtcaatgtgcgtctgaaccttcccaacagagtttaaaatgttcaacttcaaagctaaattctgatggaaaacacttcctaagaggctgaaggcttactctaggggtgaaagaagaggaaaggcgatggatcacaccacatttgtggaaaatgttaatgctatgtgatcttgcctccttagacccagatagatgcaaaggataaggaactcggtttatagcaacagatactccaaaagtgctttgcatcctgttctgacactaactggttgtgaatcacttgttaaagataaggataacaacaataccatttcttgagcccttactgggtgtctggtattgtgcaaagtactgtctatatattacctcagtttccacaacaaccttatgaaatatttcttccttttgtg

SEQ ID NO: 86834 - DNA, 721 bp, Homo sapiens
aaggaaccctgcagcagacctcgaataaaatgtgacttgatgtttgttgccacttcctcaacttggttagcaaattcaagttttgaaagacgattcgtctcagagaagttgatcctgaacctccacgtcacattttagtcggttgctattaggtgggtaatgcctaataacatgggttcctcaaatcacaaaggagaatgctctcaagtcctcatgttaactttagtaagtcagttaactttacagcaactaaagagatcaattaaaaagaacccttaagtctgactgtcccaggtaactttacttgctgtacagatagtgcacagatatggatgagggctgcacatggctgatttgaaaacccatgtggggccgggtgtggtggctcacgcctgtaatcccagcactttgggaggccaaggcgggtggatcacgaggttagttcaggaccagcctggccaagatggtgaaaccccatctctactaaaaatacgaaaattagctgggcttggtggcagatgcctgtaattcctgctactcgggaggctgaggcagagaattgcttgaacccgggaggcggaggttgcagtgagccgagattgcgccactgcactccagcctgggcgacacagtgagactctcctcaaaacaaaaaaaaaagaaagaaaacccatgtgggccgcatgtgcacagcctggggctgctttccacaggcctggat

SEQ ID NO: 86835 - DNA, 3571 bp, Homo sapiens
ggtttacaaacacgggctcccggcaggtgcgcgccgccccgcccgtgcgcggccggggttcgagggtggctcccgcgggcctcggggtgcccggacgggggctgcggtgctggctgcgtgcccgcttcttccatgccgtcctggggcaccggaaaatccgccgccaggcgctgtccccgacacgggctgtcgcctggttgggcccggaaatgggacgtcgcgctttctcagggagcgtagaagcagccagggcctctccaagccgctgctgtgacagaaagtgagtgagctgccggaggatgtccaccgccacgacagtcgcccccgcggggatcccggcgaccccgggccctgtgaacccaccccccccggaggtctccaaccccagcaagcccggccgcaagaccaaccagctgcagtacatgcagaatgtggtggtgaagacgctctggaaacaccagttcgcctggcccttctaccagcccgtggacgcaatcaaattgaacctgccggattatcataaaataattaaaaacccaatggatatggggactattaagaagagactagaaaataattattattggagtgcaagcgaatgtatgcaggacttcaacaccatgtttacaaattgttacatttataacaagcccacagatgacatagtgctaatggcccaagctttagagaaaatttttctacaaaaagtggcccagatgccccaagaggaagttgaattattaccccctgctccaaagggcaaaggtcggaagccggctgcgggagcccagagcgcaggtacacagcaagtggcggccgtgtcctctgtctccccagcgaccccctttcagagcgtgccccccaccgtctcccagacgcccgtcatcgctgccacccctgtaccaaccatcactgcaaacgtcacgtcggtcccagtccccccagctgccgccccacctcctcctgccacacccatcgtccccgtggtccctcctacgccgcctgtcgtcaagaaaaagggcgtgaagcggaaagcagacacaaccactcccacgacgtcggccatcactgccagccggagtgagtcgcccccgccgttgtcagaccccaagcaggccaaagtggtggcccggcgggagagtggtggccgccccatcaagcctcccaagaaggacctggaggacggcgaggtgccccagcacgcaggcaagaagggcaagctgtcggagcacctgcgctactgcgacagcatcctcagggagatgctatccaagaagcacgcggcctacgcctggcccttctacaagccagtggatgccgaggccctggagctgcacgactaccacgacatcatcaagcacccgatggacctcagcaccgtgaaaaggaagatggatggccgagagtacccagacgcacagggctttgctgctgatgtccggctgatgttctcgaattgctacaaatacaatcccccagaccacgaggttgtggccatggcccggaagctccaggacgtgtttgagatgaggtttgccaagatgccagatgagcccgtggaggcaccggcgctgcctgcccccgcggcccccatggtgagcaagggcgctgagagcagccgtagcagtgaggagagctcttcggactcaggcagctcggactcggaggaggagcgggccaccaggctggcggagctgcaggagcagctgaaggccgtgcacgagcagctggccgccctgtctcaggccccagtaaacaaaccaaagaagaagaaggagaagaaggagaaggagaagaagaagaaggacaaggagaaggagaaggagaagcacaaagtgaaggccgaggaagagaagaaggccaaggtggctccgcctgccaagcaggctcagcagaagaaggctcctgccaagaaggccaacagcacgaccacggccggcagacagctgaagaaaggcggcaagcaggcatctgcctcctacgactcagaggaagaggaggagggcctgcccatgagctacgatgaaaagcgccagcttagcctggacatcaaccggctgcccggggagaagctgggccgggtagtgcacatcatccaatctcgggagccctcgctcagggactccaaccccgacgagatagaaattgactttgagactctgaaacccaccactttgcgggaactggagagatatgtcaagtcttgtttacagaaaaagcaaaggaaaccgttctcagcaagcgggaagaaacaggcagccaagtcgaaagaggagctagctcaggaaaagaagaaggagctggaaaagcgtctgcaggatgtcagcgggcagctgagcagcagcaagaagcccgcccggaaagagaagcccggctcagcaccctcagggggcccgtccaggctcagcagcagcagctcctccgagtctgggagcagcagctccagcgggtccagctctgacagcagtgactcagaatgaactggcttcggacagaacaggacagatggatgtcgcacacgccgagactctgccgtacccctctgtggttcatattactacttctgttccatggtgtgcaggtctgcttcttaattcagtgttatgatatcttccagtttttgctttcataggtcagagatctatcttgtgtgtgcgttagacttgatgagaaggtgtgaactctgcagaaagtctcttcttcatcactgaattcagtcacttggagatgacaacttcaaatgctaacccgatgaccccagaaaaccgtgtgagattcgtaccgaagaaccttgtggaatccctttgcttaggcccaacctggtcgatagctcgagaaagaattttttccaaggaaatgtctcggatatgggtactgtatttgaaagctgttagctttgtcaacacgcattgtccttgtcatttgggccccgagctctgaccctcgtgtctgacgcggccacctctttctggaggggctgaggacagatgtgcctgcttgtggagaccaggctgggcctaagcgaagggtcatcgcagccccagcccggagcgtggagcccttggggggtggtcgggtgggatgtgcgttctccgctcgtggtgatgtcaggagctcctcggagggaacagagcggctgtgtatgcagcctgcaggtttccatacactgaagcttttacctcaactttaaaaaaaaaaaaagaagaaaagatttaaaaaaaaaaaaaaaggagactttttttgtaaggttcggcaattttctacggaagtccagcccgctgtgagtccccgcctggctagcgctgcccctgctgctgctgccgcgccacccttgggaaccacttcccgagcttatgtgtatataaatagttatttattaacatcattggtcatttttaaaaaaaagaaaataagaaaaaaccgcagaagaaatgcattcacacagtcgcagagatgcaggccttgccagtggtgtgccgggcgcgggtcctgtctggcggcggcctgtcgtctccaggtgctaactcctgccaccgcgcggtgctcacccacgtctgttcgcgcgctcgcc

SEQ ID NO: 86836 - DNA, 1736 bp, Homo sapiens
  misc_feature (7)..(7): n is a, c, g, or t
  misc_feature (10)..(10): n is a, c, g, or t
  misc_feature (32)..(32): n is a, c, g, or t
cccaacntgntcgatagctcgagaaagaattntttccaaggaaatgtctcggatatgggtactgtatttgaaagctgttagctttgtcaacacgcattgtccttgtcatttgggccccgagctctgaccctcgcatctgcctcctacgactcagaggaagaggaggagggcctgcccatgagctacgatgaaaagcgccagcttagcctggacatcaaccggctgcccggggagaagctgggccgggtagtgcacatcatccaatctcgggagccctcgctcagggactccaaccccgacgagatagaaattgactttgagactctgaaacccaccactttgcgggaactggagagatatgtcaagtcttgtttacagaaaaagcaaaggaaaccgttctcagcaagcgggaagaaacaggcagccaagtcgaaagaggagctagctcaggaaaagaagaaggagctggaaaagcgtctgcaggatgtcagcgggcagctgagcagcagcaagaagcccgcccggaaagagaagcccggctcagcaccctcagggggcccgtccaggctcagcagcagcagctcctccgagtctgggagcagcagctccagcgggtccagctctgacagcagtgactcagaatgaactggcttcggacagaacaggacagatggatgtcgcacacgccgagactctgccgtacccctctgtggttcatattactacttctgttccatggtgtgcaggtctgcttcttaattcagtgttatgatatcttccagtttttgctttcataggtcagagatctatcttgtgtgtgcgttagacttgatgagaaggtgtgaactctgcagaaagtctcttcttcatcactgaattcagtcacttggagatgacaacttcaaatgctaacccgatgaccccagaaaaccgtgtgagattcgtaccgaagaaccttgtggaatccctttgcttaggcccaacctggtcgatagctcgagaaagaattttttccaaggaaatgtctcggatatgggtactgtatttgaaagctgttagctttgtcaacacgcattgtccttgtcatttgggccccgagctctgaccctcgtgtctgacgcggccacctctttctggaggggctgaggacagatgtgcctgcttgtggagaccaggctgggcctaagcgaagggtcatcgcagccccagcccggagcgtggagcccttggggggtggtcgggtgggatgtgcgttctccgctcgtggtgatgtcaggagctcctcggagggaacagagcggctgtgtatgcagcctgcaggtttccatacactgaagcttttacctcaactttaaaaaaaaaaaaagaagaaaagatttaaaaaaaaaaaaaaaggagactttttttgtaaggttcggcaattttctacggaagtccagcccgctgtgagtccccgcctggctagcgctgcccctgctgctgctgccgcgccacccttgggaaccacttcccgagcttatgtgtatataaatagttatttattaacatcattggtcatttttaaaaaaaagaaaataagaaaaaaccgcagaagaaatgcattcacacagtcgcagagatgcaggccttgccagtggtgtgccgggcgcgggtcctgtctggcggcggcctgtcgtctccaggtgctaactcctgccaccgcgcggtgctcacccacgtctgttcgcgcgctcgcc

SEQ ID NO: 86837 - DNA, 3468 bp, Homo sapiens
agcggatgtgccggggccggcgagccaaagaggagccggccgcgcgggccgggaggggacggccgccggagccgcgaggccaactgtcgcctggttgggcccggaaatgggacgtcgcgctttctcagggagcgtagaagcagccagggcctctccaagccgctgctgtgacagaaagtgagtgagctgccggaggatgtccaccgccacgacagtcgcccccgcggggatcccggcgaccccgggccctgtgaacccaccccccccggaggtctccaaccccagcaagcccggccgcaagaccaaccagctgcagtacatgcagaatgtggtggtgaagacgctctggaaacaccagttcgcctggcccttctaccagcccgtggacgcaatcaaattgaacctgccggattatcataaaataattaaaaacccaatggatatggggactattaagaagagactagaaaataattattattggagtgcaagcgaatgtatgcaggacttcaacaccatgtttacaaattgttacatttataacaagcccacagatgacatagtgctaatggcccaagctttagagaaaatttttctacaaaaagtggcccagatgccccaagaggaagttgaattattaccccctgctccaaagggcaaaggtcggaagccggctgcgggagcccagagcgcaggtacacagcaagtggcggccgtgtcctctgtctccccagcgaccccctttcagagcgtgccccccaccgtctcccagacgcccgtcatcgctgccacccctgtaccaaccatcactgcaaacgtcacgtcggtcccagtccccccagctgccgccccacctcctcctgccacacccatcgtccccgtggtccctcctacgccgcctgtcgtcaagaaaaagggcgtgaagcggaaagcagacacaaccactcccacgacgtcggccatcactgccagccggagtgagtcgcccccgccgttgtcagaccccaagcaggccaaagtggtggcccggcgggagagtggtggccgccccatcaagcctcccaagaaggacctggaggacggcgaggtgccccagcacgcaggcaagaagggcaagctgtcggagcacctgcgctactgcgacagcatcctcagggagatgctatccaagaagcacgcggcctacgcctggcccttctacaagccagtggatgccgaggccctggagctgcacgactaccacgacatcatcaagcacccgatggacctcagcaccgtgaaaaggaagatggatggccgagagtacccagacgcacagggctttgctgctgatgtccggctgatgttctcgaattgctacaaatacaatcccccagaccacgaggttgtggccatggcccggaagctccaggacgtgtttgagatgaggtttgccaagatgccagatgagcccgtggaggcaccggcgctgcctgcccccgcggcccccatggtgagcaagggcgctgagagcagccgtagcagtgaggagagctcttcggactcaggcagctcggactcggaggaggagcgggccaccaggctggcggagctgcaggagcagctgaaggccgtgcacgagcagctggccgccctgtctcaggccccagtaaacaaaccaaagaagaagaaggagaagaaggagaaggagaagaagaagaaggacaaggagaaggagaaggagaagcacaaagtgaaggccgaggaagagaagaaggccaaggtggctccgcctgccaagcaggctcagcagaagaaggctcctgccaagaaggccaacagcacgaccacggccggcagacagctgaagaaaggcggcaagcaggcatctgcctcctacgactcagaggaagaggaggagggcctgcccatgagctacgatgaaaagcgccagcttagcctggacatcaaccggctgcccggggagaagctgggccgggtagtgcacatcatccaatctcgggagccctcgctcagggactccaaccccgacgagatagaaattgactttgagactctgaaacccaccactttgcgggaactggagagatatgtcaagtcttgtttacagaaaaagcaaaggaaaccgttctcagcaagcgggaagaaacaggcagccaagtcgaaagaggagctagctcaggaaaagaagaaggagctggaaaagcgtctgcaggatgtcagcgggcagctgagcagcagcaagaagcccgcccggaaagagaagcccggctcagcaccctcagggggcccgtccaggctcagcagcagcagctcctccgagtctgggagcagcagctccagcgggtccagctctgacagcagtgactcagaatgaactggcttcggacagaacaggacagatggatgtcgcacacgccgagactctgccgtacccctctgtggttcatattactacttctgttccatggtgtgcaggtctgcttcttaattcagtgttatgatatcttccagtttttgctttcataggtcagagatctatcttgtgtgtgcgttagacttgatgagaaggtgtgaactctgcagaaagtctcttcttcatcactgaattcagtcacttggagatgacaacttcaaatgctaacccgatgaccccagaaaaccgtgtgagattcgtaccgaagaaccttgtggaatccctttgcttaggcccaacctggtcgatagctcgagaaagaattttttccaaggaaatgtctcggatatgggtactgtatttgaaagctgttagctttgtcaacacgcattgtccttgtcatttgggccccgagctctgaccctcgtgtctgacgcggccacctctttctggaggggctgaggacagatgtgcctgcttgtggagaccaggctgggcctaagcgaagggtcatcgcagccccagcccggagcgtggagcccttggggggtggtcgggtgggatgtgcgttctccgctcgtggtgatgtcaggagctcctcggagggaacagagcggctgtgtatgcagcctgcaggtttccatacactgaagcttttacctcaactttaaaaaaaaaaaaagaagaaaagatttaaaaaaaaaaaaaaaggagactttttttgtaaggttcggcaattttctacggaagtccagcccgctgtgagtccccgcctggctagcgctgcccctgctgctgctgccgcgccacccttgggaaccacttcccgagcttatgtgtatataaatagttatttattaacatcattggtcatttttaaaaaaaagaaaataagaaaaaaccgcagaagaaatgcattcacacagtcgcagagatgcaggccttgccagtggtgtgccgggcgcgggtcctgtctggcggcggcctgtcgtctccaggtgctaactcctgccaccgcgcggtgctcacccacgtctgttcgcgcgctcgcc

SEQ ID NO: 86838 - DNA, 3232 bp, Homo sapiens
agcggatgtgccggggccggcgagccaaagaggagccggccgcgcgggccgggaggggacggccgccggagccgcgaggccaactgtcgcctggttgggcccggaaatgggacgtcgcgctttctcagggagcgtagaagcagccagggcctctccaagccgctgctgtgacagaaagtgagtgagctgccggaggatgtccaccgccacgacagtcgcccccgcggggatcccggcgaccccgggccctgtgaacccaccccccccggaggtctccaaccccagcaagcccggccgcaagaccaaccagctgcagtacatgcagaatgtggtggtgaagacgctctggaaacaccagttcgcctggcccttctaccagcccgtggacgcaatcaaattgaacctgccggattatcataaaataattaaaaacccaatggatatggggactattaagaagagactagaaaataattattattggagtgcaagcgaatgtatgcaggacttcaacaccatgtttacaaattgttacatttataacaagcccacagatgacatagtgctaatggcccaagctttagagaaaatttttctacaaaaagtggcccagatgccccaagaggaagttgaattattaccccctgctccaaagggcaaaggtcggaagccggctgcgggagcccagagcgcaggtacacagcaagtggcggccgtgtcctctgtctccccagcgaccccctttcagagcgtgccccccaccgtctcccagacgcccgtcatcgctgccacccctgtaccaaccatcactgcaaacgtcacgtcggtcccagtccccccagctgccgccccacctcctcctgccacacccatcgtccccgtggtccctcctacgccgcctgtcgtcaagaaaaagggcgtgaagcggaaagcagacacaaccactcccacgacgtcggccatcactgccagccggagtgagtcgcccccgccgttgtcagaccccaagcaggccaaagtggtggcccggcgggagagtggtggccgccccatcaagcctcccaagaaggacctggaggacggcgaggtgccccagcacgcaggcaagaagggcaagctgtcggagcacctgcgctactgcgacagcatcctcagggagatgctatccaagaagcacgcggcctacgcctggcccttctacaagccagtggatgccgaggccctggagctgcacgactaccacgacatcatcaagcacccgatggacctcagcaccgtgaaaaggaagatggatggccgagagtacccagacgcacagggctttgctgctgatgtccggctgatgttctcgaattgctacaaatacaatcccccagaccacgaggttgtggccatggcccggaagctccaggacgtgtttgagatgaggtttgccaagatgccagatgagcccgtggaggcaccggcgctgcctgcccccgcggcccccatggtgagcaagggcgctgagagcagccgtagcagtgaggagagctcttcggactcaggcagctcggactcggaggaggagcgggccaccaggctggcggagctgcaggagcagacagctgaagaaaggcggcaagcaggcatctgcctcctacgactcagaggaagaggaggagggcctgcccatgagctacgatgaaaagcgccagcttagcctggacatcaaccggctgcccggggagaagctgggccgggtagtgcacatcatccaatctcgggagccctcgctcagggactccaaccccgacgagatagaaattgactttgagactctgaaacccaccactttgcgggaactggagagatatgtcaagtcttgtttacagaaaaagcaaaggaaaccgttctcagcaagcgggaagaaacaggcagccaagtcgaaagaggagctagctcaggaaaagaagaaggagctggaaaagcgtctgcaggatgtcagcgggcagctgagcagcagcaagaagcccgcccggaaagagaagcccggctcagcaccctcagggggcccgtccaggctcagcagcagcagctcctccgagtctgggagcagcagctccagcgggtccagctctgacagcagtgactcagaatgaactggcttcggacagaacaggacagatggatgtcgcacacgccgagactctgccgtacccctctgtggttcatattactacttctgttccatggtgtgcaggtctgcttcttaattcagtgttatgatatcttccagtttttgctttcataggtcagagatctatcttgtgtgtgcgttagacttgatgagaaggtgtgaactctgcagaaagtctcttcttcatcactgaattcagtcacttggagatgacaacttcaaatgctaacccgatgaccccagaaaaccgtgtgagattcgtaccgaagaaccttgtggaatccctttgcttaggcccaacctggtcgatagctcgagaaagaattttttccaaggaaatgtctcggatatgggtactgtatttgaaagctgttagctttgtcaacacgcattgtccttgtcatttgggccccgagctctgaccctcgtgtctgacgcggccacctctttctggaggggctgaggacagatgtgcctgcttgtggagaccaggctgggcctaagcgaagggtcatcgcagccccagcccggagcgtggagcccttggggggtggtcgggtgggatgtgcgttctccgctcgtggtgatgtcaggagctcctcggagggaacagagcggctgtgtatgcagcctgcaggtttccatacactgaagcttttacctcaactttaaaaaaaaaaaaagaagaaaagatttaaaaaaaaaaaaaaaggagactttttttgtaaggttcggcaattttctacggaagtccagcccgctgtgagtccccgcctggctagcgctgcccctgctgctgctgccgcgccacccttgggaaccacttcccgagcttatgtgtatataaatagttatttattaacatcattggtcatttttaaaaaaaagaaaataagaaaaaaccgcagaagaaatgcattcacacagtcgcagagatgcaggccttgccagtggtgtgccgggcgcgggtcctgtctggcggcggcctgtcgtctccaggtgctaactcctgccaccgcgcggtgctcacccacgtctgttcgcgcgctcgcc

SEQ ID NO: 86839 - DNA, 340 bp, Homo sapiens
ggggtagagtgtgtactgtacaaaagttcatggatttcaactgaggaagaggttttgcaaaattgcttcaaaaatgagggggaagccatgcctggctaattttatatttttagtagagacggggtttctccatattggtcaggctggtctcgaacttgtgacctcaggtgatccgcccgcctcagcctcccaaagtgcctgtaatcccagctgctggggaggctaaggcaggagaattgcttgaaccagggaggtggaggttgcggtgagccaagatcgagccattgcactccagcctgggcaacaagagtgaaactccatctcaaaaacaaaacaaaca

SEQ ID NO: 86840 - DNA, 369 bp, Homo sapiens
aaaaaactgttatccaaaatgaaacatttgttaaaagaagtggattatgctattaaagatgtgccccccacccccatgtgtttgttcctatcgtagtaatgctgattgttaatggatggcatagtaactttaattgtgttcacaggcctttgttcttaaaattatgcactcttccctgttttttcttagcattttatcaatttgcatagaagagaaaatgatttgtaacaggtttctctggtcacatcactgaggagagtcaacaaaagaagtcattcaattgaggttaaatctttacacaaagaaggcattaatagcttaaaagaataaagaaatcctgatatggttattgtgacttttccatttatc

SEQ ID NO: 86841 - DNA, 436 bp, Homo sapiens
ggaatgattcaacactatgtggccagtttaaacaagactctgggaggtgtggttgggtgacttggtctgcgtggctgagcattacatcttctctatgtggaaagattggtgtgtatggaggtgtggattaagacctaattaaaaaaaaatttgaggtggaatggaatctataggaggaatctatgaagacgccctgcatcagacatcctgtccaaagggcctagttttctcatctctgtggtgcttagtaagtgtttctctaaggagacatcacagccactgccgaaaacaacctcatcttagcagcagagagaggcccacactctcacaccatgcacctcttcctcttgatcccagagtaccgaaaaagagttttggactaagaaacctgggaggttgctaccgatctggactaggccttgtgctcttgttaatg

SEQ ID NO: 86842 - DNA, 486 bp, Homo sapiens
ctgctctcccatctttgagtgctatgtttactaagagtctattaggttcattcccaggcttgtttatgctcactgtatttcttattgtcattatgtaccttaatgtaatgtgagtcagaaaaaaaacatatttctgtgaagactggatagaacgctttggaaagatttgataaaagcaagttactaaaaagagtgttggcagacctgtaacaaaaaattgacaaaagttatggtctatgtggaacctgccctcagaatgttcttttagtttcccaaggcttcacattctgtgttaaagaaacaaactgaaattcatggacaatgcattgcgagtgtgatttatacaagaaaggcaatctagacgtcttagcaatggaatgtaaccatgttttttaaaagcctaagtcatatatcaaatgattgtcaaaacgataacccaaaacaatgtataggttttgtgttaaaataaaatgaaatatttaaagt

SEQ ID NO: 86843 - DNA, 620 bp, Homo sapiens
cccccccccactttttagagctttttgtatctaataggcaaaacagggctgttagggaaggcttcagtttttaaaatacaagctgttaaactccaaaaggtgtaatacttaagtacaagggtaaagaaagctcaagaaggaatgtgaagtggtatacaaaaaggctgagtggaaaaaatggctaaaaatgttttgtcatattctgttgaattcacaagagctagtaaattgggaaaaatttaaatgttgtctgattctatcaaaacactttcatatgttgtaaagtatccatttgggcttaaaacctaactaaaattcaaaattgttaatactgaatatgtaattcttatgacattggtttcaaaaataatattcctccccaaatttgaataaaggagatagctttaaaatattagttctacccgggctcggtggttcacacctgtaatcctggcactttgggagtccgaggcaggtggatcacttgaggtcaggagttcgagaccaacctggcgaacatagtgaaaccccacctccattaaaaatacaaaaattagctgagcatggtggctcatgcctgtaatcccagctactcaggaggctgaggcaggagaattgct

SEQ ID NO: 86844 - DNA, 266 bp, Homo sapiens
gtacctctcttctgtttcccatgccatcccaaaccagaggcctgaggctctggattttttttgcatcaaatcaaatcagcgaacatgagggtaaacctgttgtaaagagatttccattaagtacctgttaggtaccatatgcaggaaaggcttagaaatgacccccgggcatccagcatgcaccccaggggctgacagcagactcctcaagtgcaccttagtgaaagtgagtgcccctggccggccatctggtccatcgttgccag

SEQ ID NO: 86845 - DNA, 149 bp, Homo sapiens
gatcaacggtacttgttttaaagaagcttatgtggactttgtcttttctcgttgccacaacctcttttaatgtgcctatagtccactatagcatgcatatctcaaattgcaattccttgcaattctggaataaacgctttattttggag

SEQ ID NO: 86846 - DNA, 418 bp, Homo sapiens
ctaatttttgtatttttagtagagatgggggtttcactatgttggcccaggctggtctcaaactcctgaccttgtgatccgcccacgttggcctcccagagtgctgggattataggcgtgagccattcgcccctggcctgttttcacattttctttagtaggaagtgctgtacagatatctcacgttgaggaaatgctttatattgcctttgtcttaatatttcaagggcaaaccaaaagagatactagcttaactaatgatccacttctgcatgctttatttggatctaggataaatcagtaccccaccccccggagtttaagtgatgattggtaaatgtcagagaaagatttcataccaaacaaaatgtattctatttatttaaaatagtttatttttattttcatttacttattt

SEQ ID NO: 86847 - DNA, 431 bp, Homo sapiens
tggcccttgtatgtgtagttgttaagaagtggggtgaaggtaaattgtgtagtggagagaaccaaggtggcagaattccagctatagcattgtttcttgctggtgagttgttagcttgtttgtgagtgctgttttcatgttctgtcagtttcattaatagacaaaacagtgaaattaatgaaagtctactggcatcttcttttttattttttatttttattttttggttaagatacaggcggaagtgcagtggtgcgatcataagctcactgcagcctcgaattcctgggcttgaggaatcctcctccctcagctactcaagaggctgaggctggagggatcgcttgagcccaggaagttgagactgtaatgagctatgattgtgccactgcaatccttggctgcaaagtgagatcctatctcttaaaatt

SEQ ID NO: 86848 - DNA, 398 bp, Homo sapiens
ggtaactggagacaaagttataagcaaagacttctgtcattttggcatgttttgaactttgaaccacaagaagatataatatattccaaaaattatacatctaattaagtgaaaaaggtagaaagccatgctagcgtgcctgtgtaaggaaactgaacagacacatacccttgtacacgtatacagtctcgatgaaaggatattcaaagaatggataattatggctgtttcttggaggggacttgagttctggagaaaactggtgtgagggcgacttatttcttactgagtgtcctttgtacatttttaatttgtatttcaaaataataatgaaactagctaatttgatacttgaaaaaaattaaaattttctaaaattgtgtgcattctttcaggca

SEQ ID NO: 86849 - DNA, 450 bp, Homo sapiens
tcgatctagaggatcccgttagtttaagggctactcaagcatcaaggctgcgttggtttgatttcttctgaggtctcttcactggtagatagccatcttctcactgcgtcctcagatggtctttttttctgtgttggcacccctggttctgctctctcattataaagacatcagtcatactagattaggtaaaatgaataattttaccttaattacttctttaacaaccctatctccaaaaacctgacacattctgagcttgtggctatgtttatgtctcatctgcctggctatgttaacttttcccagcaggaaaagatggcacactcaaagaagtaattgaggagagttgaatgaagggactattgtatgggtagggttaagggagccaacaaggaatggttaaaaaccctgagtaatctgcatgtggtggtgcatacctatagtccc

SEQ ID NO: 86850 - DNA, 652 bp, Homo sapiens
atagggtgtgaccacccacaccacctggccaggatctgctgcagccattcctcacgacgacctcacccaggttcaccaccaccaggaggtgatcctggtgcaggcatgccaggaggtggtgggtagcgacgacttggatggggaaccagatactcatcctggtgccagagctggccagcggcgaccaccaccaccacctcgagcaggccctggtcaccatcgtgggggctggcaagggtggatgtggcaccatcttgggcaacaagaagtgggggcagaagcgagtgcagatcaggaacctggagggcaagttatctgtctccatgtggtactcggatgaaaacaaaaagacattaaccataaaatagtggttgagaaacagatcactggagagaactcacctcctgattattcagagtatatgacaggaaagaaacttcctccttggaggaatacctggcattgacagctcagatcccaaaaaactgcagaattcgccagaatgaagccaagaaaaatttaaaagatgatgttccatgaacaatagctggccctcgccaaggctgcacaaagatgttcaaggataactgacatgagaaaacatctgcacactcactgtcacggagtccacttctgcacagaatgtagaaga

SEQ ID NO: 86851 - DNA, 581 bp, Homo sapiens
gcgagcgatcgcgatgggagcagtggatgcgagagtgaaattgatgcaggagctggggccgcgacgggagcttgtgtgtgtgtgtgtgtatgtgtgtgcgcacgcgcacacgacgttgacaggcgctgtgtgtgaccctaatggactatttaaatgtgactgtatgtacgtgattatgactgcgtcgcgttgtgcgtgaccacgttcgtaaaggtggtgatagcagccgctatggggccaaaaacaaagaattgagctttgcgttgagtgacaggcatagtccttcgtgaatgtgtggggagcagtttttgtgctggcccgtagctggattggagtgggggcaacctagaaggaggggagaagaatgggacacagtgtagacaacatagttcaagagtttctccgtaaattagagcagagaaatggagcagcaggttggggtagagggctggggaagacggctggggaacaaccacccatcaacatgttgttggaaatgagccacgagaggggggaaaagtccaggcaagggtaagtaaacaaggctcatctgtgtgggtgtagttaaaaatgcaagaatt

SEQ ID NO: 86852 - DNA, 368 bp, Homo sapiens
ttagggcgtgttcaaggaagtggttgaagataaaagaggagttggttgttaatgaattatgaattccattatgaaggcatacaggaaaagtgttgaaagttgggaagaatgagaaaaggggacaaatgttatttcacttaaattccctaatttcttataagctttggcctattttcatatattgggaacttgtatgatttttcttctacgagttgactatctgttcctttgtccattttgtgtgctatttaaacagcagactttacactatcaatgtcccaaatcatcctctgacacccttcaggcccctgtggctggtcccttgagtagctgaggggcaaagcagggcccatgggtgaaagagcaag

SEQ ID NO: 86853 - DNA, 492 bp, Homo sapiens
caagaattaaaaaaaatagaaaagggtaatcgcgctgcagagagtaaaccatgagctgaagatttcagatatagggggaaaataccctgtgtttggtagaggtcaacaaaagtgagatgtggtgagttatatacaatctcatggcaggaaattcaaaactagagtttgtggagggaggaagaaaggtctgaaggtagtgaacaacaaggaggccggccatctgttccattttcagacccactggtaagaggctgtagctggggaaatgttgagagggctgcagagtcctccagatacagcctagtttctgttagactcagaatgttagggcgtgttcaaggaagtggttgaagataaaagaggagttggttgttaatgaattatgaattccattatgaaggcatacaggaaaagtgttgaaagttgggaagaatgagaaaaggggacaaatgagacttgatggtatacaatgtccgaaaagacagttgacta

SEQ ID NO: 86854 - DNA, 324 bp, Homo sapiens
gggccagaaggacctggtgccgacacaccacaccatgggccagaaggacctggtgccgaccacaccacaccacaggggatagaaggacctggtactgaccacaccacaccacgggccagaaggacctggtgccgacacaccacaccatgggccagaaggacctggtgccgaccacaccacactcataggggccagaaggacccggtactgaccacaccacaccacaggggccagaaggacctggtactgaccacaccacaccacaggggatagaaggacccactactgaccacaccacaccacaggggctagaaggacctggtg

SEQ ID NO: 86855 - DNA, 654 bp, Homo sapiens
ggcttattttatggggtagggggccgctggtaggcgaagattgtccgagggagagggggaggatgaagccagtgcgtggcggaccctgcagccgcgagatgttgatgcctaagaagaaccggattgccatttatgaactcctttttaaggagggagtcatggtggccaagaaggatgtccacatgcctaagcacccggagctggcagacaagaatgtgcccaaccttcatgtcatgaaggccatgcagtctctcaagtcccgaggctacgtgaaggaacagtttgcctggagacatttctactggtaccttaccaatgagggtatccagtatctccgtgattaccttcatctgcccccggagattgtgcctgccaccctacgccgtagccgtccagagactggcaggcctcggcctaaaggtctggagggtgagcgacctgcgagactcacaagaggggaagctgacagagatacctacagacggagtgctgtgccacctggtgccgacaagaaagccgaggctggggctgggtcagcaaccgaattccagtttagaggcggatttggtcgtggacgtggtcagccacctcagtaaaattggagaggattcttttgcattgaataaacttacagccaaaaaaccttaaaaaaaa

SEQ ID NO: 86856 - DNA, 577 bp, Homo sapiens
ggcttattttatggggtagggggccgctggtaggcgaagattgtccgagggagagggggaggatgaagccagtgcgtggcggaccctgcagccgcgagatgttgatgcctaagaagaaccggattgccatttatgaactcctttttaaggagggagtcatggtggccaagaaggatgtccacatgcctaagcacccggagctggcagacaagaatgtgcccaaccttcatgtcatgaaggccatgcagtctctcaagtcccgaggctacgtgaaggaacagtttgcctggagacatttctactggtaccttaccaatgagggtatccagtatctccgtgattaccttcatctgcccccggagattgtgcctgccaccctacgccgtagccgtccagagactggcaggcctcggcctaaaggtctggagggtgagcgacctgcgagactcacaagaggggaagctgacagagatacctacagacgccacgtgctgcgaaaaactggtggcgcatgaatagcgaggtgccgactgaatagcgaggtgccgatgaatagcgaggtcccgagtgaataggt

SEQ ID NO: 86857 - DNA, 656 bp, Homo sapiens
  misc_feature (223)..(223): n is a, c, g, or t
tccgccacgagggaatgtgtgtagatgctctcttaagagaagaaccccgcgaggttggcccacatttatatgaacactccctctgtttaaaggagagggagagtccctgtgtggccccacagaaagagagttgtcccaccacatgcctaagccaccccgcgaggtctggccacagacccacagagatgttgcccacaccctgtcacatgtccactgaaggccncactggcacgttcttctcccagttcccgagggctaacgctgagaggagaccacgctttgccctcggagaccacatttctactggtaccttaccaatgagggtatccagtatctccgtgattaccttcatctgcccccggagattgtgcctgccaccctacgccgtagccgtccagagactggcaggcctcggcctaaaggtctggagggtgagcgacctgcgagactcacaagaggggaagctgacagagatacctacagacggagtgctgtgccacctggtgccgacaagaaagccgaggctggggctgggtcagcaaccgaattccagtttagaggcggatttggtcgtggacgtggtcagccacctcagtaaaattggagaggattcttttgcattgaataaacttacagccaaaaaaccttaaaaaaaa

SEQ ID NO: 86858 - DNA, 212 bp, Homo sapiens
gatcttggcacagtaacttagttcctcatgaactacatttgtcgtaaaatggtcaaaatgaaaagaccagagtcacgtaaaaactcttatcagctgctgttttcttagagtacataaccttaggatatattatcgtgcatattctttaatggtaggtttgttgaaaatcagtcatagcccaaacagaaataaatgtgacatgctaagaaatg

SEQ ID NO: 86859 - DNA, 722 bp, Homo sapiens
atttcgctggctttgttttctcatctctccaggtagatgcttagctcattgtgatgattttaaagcacttgcaaattctttaacattctttccttcaaaaaatggagtcaaattttcctccacttgaatgttggccagacatagtgacttcttatgaacagcctgtggcagaagtgatggtatgtgactttcaagaataggtcaccaaaaagaatcatttctgcctgactttctcttggatcacttatttgggagaacctagtcgtcacgtgagaatacatgagcgtccctctggagaggcccatgtagagaagacaaccatgtgagtaaacttcctgggaagtggatgcttctattctgtcaaaccttcaaacgattgcagctttggccaacatgtgactgcagcttcatgagagacctcaagccagaactatccagccaagctatttttgaattcctgacccataaaaactatgagagataataaatatttgttgtttcaagccactaactttaggggtaatttgttttacagcactagaaagctaatatactcattagtcatcggccatttttctgctctaatacaagcatttaaatgctatagatttctctctacattagctgaatctcacaagtttggatatgcaggatcatttggatttaaatattttctgatttctattattattatttttaacttacgagttacttagaattgt

SEQ ID NO: 86860 - DNA, 895 bp, Homo sapiens
aagtttctaatcatgccttggtctttccagttagcccccaagctgaacccatcggaaatccaagagttgccttattagaacaaagacatgcatcactaaggaaattccaatgggtttaacagctctgtgtcaggaacaagtgtcaaagaccaaatatgataagaaaagatgctcttagcacccttatccctcaggaattctccaaggtttggggagctctctgctagtcattgaggatgaagaccagatacatatttatcatgatatcacaaggcttattatacaaaatttgagtatttcttgcagaagtgaataaaatagaacataagaatcatctccagtaaagcaagtgtggttgtcctttccaggtcctgtgaaaatgaagggaagagagtgtctgctcagctccactaggggctcccaccatcacggtcaggagaccactctctccctgatgtaggtgagctggggcacgtgtaatagaggcctctgcttgaaggaatatcatcaggaaacagcagtcagggcactagtggcccctgacaaacacagggcagagccccgggtctagtctgggtgtaggtggcttctgggtgatagtggcttctcttcctctaggaactgtttggaaactgaagagtgtctggcctggacagcacctacacctccctctaagtttgaagccatctcaggatggctgcgctttggatgtgactgttcattttctatggctgagtctctctagatttggcagttccctgtggctcagtgaattagaaacagttctctcctgtttgtaccttctttaaacatgaggattaatctgagtgacaagtgcctgaatgtctgaactggtcattggagagaatcgtaaatacaaactatcttttttttt

SEQ ID NO: 86861 - DNA, 340 bp, Homo sapiens
ataaagcatctgtcctcttcaaggaaacaaggaatgtctggttctcctttctagcctgtgaagtaggagatggtgtcatttgttgtacagaagcaggagccccatgttactgggctgcaactactgactgctttggttaacatactgaaaatttcatcagttgtctttaataaaagaccatgtgtatagggaaagatctgagcagttgtcattgagtttctcttccccagcccatgagctacagctggcagagagcaaggacaccagtatgtaatccaacagccagttacctgaaatttttgcatttcagtattagagttaggtagactttgagtctgtt

SEQ ID NO: 86862 - DNA, 516 bp, Homo sapiens
aggaagagttcattctatgattagtgttattttttacccctcaaatgcttggtagaattttccactgaagtcatctctgggaccagcattttgtttgtggagagattttagattattattattgtattctattgtgtcattttaaaattttatacatgtgtgtgtttatctataatattccctttcttctgttttctttgtgtttgttttatctagcttcttgagatggatgtaaattttttagcctcatttcttctaaaatgtatacttaagactagaaatttccctctactacattacctatattccatacactttgatttgtggtatttttgttaattcagttcaaaatgccttctaatttcatgatgatagcttctttgactacaggttatttagaagtgtgtttcatggatgggtgcagtggctcaagcctgtaatctcagcactttgggaggctgaggtgggagcatcatttgagcccaggagtttgagaccagcccaggcaacatagca

SEQ ID NO: 86863 - DNA, 3502 bp, Homo sapiens
agttttacaaaactgtccttgctcttcctgcgtttgcccagtcaagggtatttttgcctgaggtcggaatgatgctgttagtcctggtgatatgattgcatagcaacacagagcagctctgagaggggaggaggaggagaagaaggaagacagggaagtgggagagacagagggagagtgtcttacagctgccgcctgcttctcagacctgacggaatcagaagctacataatattcgccgtgtgagtggctatcgtaatagataacatttgaatatctactaaatgccagaaactatgaattaactcctctcaacaaagctaagaggtgcttaatgatcaatagttggtgcaaccctcccacgatgtcatgactggcaggcagctgaccagttccatcatagcagcagcctccgaagcacctgcccccaccctcaggttagagctgctgtcaccagccctgcacctcctcaagatggtgctggggttccctgcctaagcctaaagctgttgaacgggtctgttggtgcctctggacccctggaaccaccagccatgaatctgtgttggaatgaaataaaaaagaagtctcacaacctccgcgctcgcctagaggccttctcagaccacagtggaaagcttcagctccctcttcaagagattattgactggctcagccaaaaggatgaggagttgtcagctcagctgcccctacagggggatgtggccctggtgcaacaggagaaggagacacatgcggcctttatggaagaagtcaagtctcgggccccctacatctattctgtgctggagtcagctcaggccttcctgtcccagcacccatttgaggagttagaggagcctcattctgagagcaaagatacctccccgaaacagcggatccagaatctcagccgctttgtatggaagcaggcgacggtggccagtgaactgtgggagaagttgacagcccgctgtgtggaccagcaccgtcacattgagcggactctggagcagctcttggagattcaaggggcaatggaggaactaagcactactctaagccaagctgagggagtccgagccacttgggagcccattggggatctcttcattgattcactcccagagcacatccaggctattaagctgttcaaagaagaattctcccccatgaaagatggagtaaagttggtgaatgatctggcccaccaacttgccatttctgatgtgcacttgtcaatggagaattcccaggccctggaacagatcaacgtccgatggaaacaactacaggcgtcagttgagtgagaggcttaagcagctccaggatgcccaccgggactttgggcctgggtcacagcactttctctcctcctctgtccaggttccctgggaaagagcaatttcacccaataaagttccctactacatcaaccaccaggctcagaccacatgctgggaccatcccaagatgacagagttataccaaaccctagctgatctgaacaacattaagttctcagcttatcgcactgccatgaaactccgcagagtccagaaagccctgcgcttggacctggtaactttaaccacagccctggaaatcttcaatgagcatgatctgcaggccagtgagcacgtgatggatgtggtagaggtcattcactgcctgactgccttatatgaacgtttggaggaggaaagaggcatcctggtcaatgtgccactctgtgtggacatgagcctcaattggctcctcaatgtttttgatagtggtcgcagcggaaagatgcgggcattgtcttttaagactggcattgcatgcttgtgtggcacggaagtgaaggaaaaacttcagtacctcttcagccaagtggccaactcaggcagccagtgtgaccagcgccaccttggtgtcctgcttcatgaggccattcaggtgccccgtcagctgggtgaagtggcagcctttgggggcagcaatgtggagcccagtgtccgtagttgcttccgttttagcaccgggaagccagtcattgaagcatcccagttcctggagtgggtcaacctggagccccagtccatggtgtggctgcctgttctgcatcgggtaaccattgctgagcaagtgaagcatcagaccaagtgctctatctgtaggcagtgccccatcaaggggttcaggtaccggagtctgaagcaattcaacgttgacatctgccagacctgcttcttgacaggcagggccagcaaaggcaataagctgcactaccccatcatggagtattacacaccgaccacatccagtgagaacatgagggactttgccacaaccttaaagaacaaattccgctccaagcattatttcagcaaacaccctcagcgaggttatctgcctgtgcaatcagtgctggaggctgactacagtgagacgccggcttcttccccgatgtggccacacgccgacacacactcccgaattgagcattttgcgagcaggcttgctgagatggaaagtcaaaattgctccttctttaatgacagcttgtccccagatgacagcatagacgaggaccagtacctgctgcggcactccagccccatcacagaccgggagccagcctttggacagcaggctccatgcagtgtggctacagaaagcaaaggggagctacagaagatcctggcccacttggaagatgagaaccggattctccagggagagctgaggcgcctgaagtggcagcatgaggaggcagctgaggcacccagtctggctgacggctccactgaggcagcaacagaccaccgcaatgaggagcttctggccgaggcccgtatccttcggcaacataagagccgcctggagacgcgcatgcagatcctcgaagatcacaacaagcagctagagtcccagctgcagcgtctgagggagcttctcctgcagccacccaccgaatcagatggcagtggctctgcaggctcgtccctagcttcctctccacagcagtcagaaggcagtcacccccgggagaagggacagaccactccagataccgaggctgcagatgatgtggggtcaaagagccaggatgtcagcctgtgcttggaggacatcatggagaaactccgtcatgccttccccagtgtgcgaagttctgatgtgactgccaacaccctgctggcctcttgatggagccagatccccatcctatagttcatagtcctctcctggttccggtcaaagcctttcctcagccttcacccaacctttccagtttccactggccccacattcctcaactagtattatttgggctctgggcagcagcagggatctggtggtatgtgaggtgcatgcgggcagtgatgggagaaggggaggcatgattcttctgaccctagaaatgttccctttaatcttcaagttcgagatcagccctttaagtacctttctgttgcagcccaggcaaatatcacttggccattcagatggggag

SEQ ID NO: 86864 - DNA, 3652 bp, Homo sapiens
agttttacaaaactgtccttgctcttcctgcgtttgcccagtcaagggtatttttgcctgaggtcggaatgatgctgttagtcctggtgatatgattgcatagcaacacagagcagctctgagaggggaggaggaggagaagaaggaagacagggaagtgggagagacagagggagagtgtgcatacagcagctgtcgggcatccctgtctcagggacttcttcgctgattcacagaggcagcccagccccggcctcccagcttacagctgccgcctgcttctcagacctgacggaatcagaagctacataatattcgccgtgtgagtggctatcgtaatagataacatttgaatatctactaaatgccagaaactatgaattaactcctctcaacaaagctaagaggtgcttaatgatcaatagttggtgcactgcctatcctcatcccccccatgagccttggtttttatgcaacctatggtcatgcagggatgcccttacaccctcccacgatgtcatgactggcaggcagctgaccagttccatcatagcagcagcctccgaagcacctgcccccaccctcaggttagagctgctgtcaccagccctgcacctcctcaagatggtgctggggttccctgcctaagcctaaagctgttgaacgggtctgttggtgcctctggacccctggaaccaccagccatgaatctgtgttggaatgaaataaaaaagaagtctcacaacctccgcgctcgcctagaggccttctcagaccacagtggaaagcttcagctccctcttcaagagattattgactggctcagccaaaaggatgaggagttgtcagctcagctgcccctacagggggatgtggccctggtgcaacaggagaaggagacacatgcggcctttatggaagaagtcaagtctcgggccccctacatctattctgtgctggagtcagctcaggccttcctgtcccagcacccatttgaggagttagaggagcctcattctgagagcaaagatacctccccgaaacagcggatccagaatctcagccgctttgtatggaagcaggcgacggtggccagtgaactgtgggagaagttgacagcccgctgtgtggaccagcaccgtcacattgagcggactctggagcagctcttggagattcaaggggcaatggaggaactaagcactactctaagccaagctgagggagtccgagccacttgggagcccattggggatctcttcattgattcactcccagagcacatccaggctattaagctgttcaaagaagaattctcccccatgaaagatggagtaaagttggtgaatgatctggcccaccaacttgccatttctgatgtgcacttgtcaatggagaattcccaggccctggaacagatcaacgtccgatggaaacaactacaggcgtcagttgagtgagaggcttaagcagctccaggatgcccaccgggactttgggcctgggtcacagcactttctctcctcctctgtccaggttccctgggaaagagcaatttcacccaataaagttccctactacatcaaccaccaggctcagaccacatgctgggaccatcccaagatgacagagttataccaaaccctagctgatctgaacaacattaagttctcagcttatcgcactgccatgaaactccgcagagtccagaaagccctgcgcttggacctggtaactttaaccacagccctggaaatcttcaatgagcatgatctgcaggccagtgagcacgtgatggatgtggtagaggtcattcactgcctgactgccttatatgaacgtttggaggaggaaagaggcatcctggtcaatgtgccactctgtgtggacatgagcctcaattggctcctcaatgtttttgatagtggtcgcagcggaaagatgcgggcattgtcttttaagactggcattgcatgcttgtgtggcacggaagtgaaggaaaaacttcagtacctcttcagccaagtggccaactcaggcagccagtgtgaccagcgccaccttggtgtcctgcttcatgaggccattcaggtgccccgtcagctgggtgaagtggcagcctttgggggcagcaatgtggagcccagtgtccgtagttgcttccgttttagcaccgggaagccagtcattgaagcatcccagttcctggagtgggtcaacctggagccccagtccatggtgtggctgcctgttctgcatcgggtaaccattgctgagcaagtgaagcatcagaccaagtgctctatctgtaggcagtgccccatcaaggggttcaggtaccggagtctgaagcaattcaacgttgacatctgccagacctgcttcttgacaggcagggccagcaaaggcaataagctgcactaccccatcatggagtattacacaccgaccacatccagtgagaacatgagggactttgccacaaccttaaagaacaaattccgctccaagcattatttcagcaaacaccctcagcgaggttatctgcctgtgcaatcagtgctggaggctgactacagtgagacgccggcttcttccccgatgtggccacacgccgacacacactcccgaattgagcattttgcgagcaggcttgctgagatggaaagtcaaaattgctccttctttaatgacagcttgtccccagatgacagcatagacgaggaccagtacctgctgcggcactccagccccatcacagaccgggagccagcctttggacagcaggctccatgcagtgtggctacagaaagcaaaggggagctacagaagatcctggcccacttggaagatgagaaccggattctccagggagagctgaggcgcctgaagtggcagcatgaggaggcagctgaggcacccagtctggctgacggctccactgaggcagcaacagaccaccgcaatgaggagcttctggccgaggcccgtatccttcggcaacataagagccgcctggagacgcgcatgcagatcctcgaagatcacaacaagcagctagagtcccagctgcagcgtctgagggagcttctcctgcagccacccaccgaatcagatggcagtggctctgcaggctcgtccctagcttcctctccacagcagtcagaaggcagtcacccccgggagaagggacagaccactccagataccgaggctgcagatgatgtggggtcaaagagccaggatgtcagcctgtgcttggaggacatcatggagaaactccgtcatgccttccccagtgtgcgaagttctgatgtgactgccaacaccctgctggcctcttgatggagccagatccccatcctatagttcatagtcctctcctggttccggtcaaagcctttcctcagccttcacccaacctttccagtttccactggccccacattcctcaactagtattatttgggctctgggcagcagcagggatctggtggtatgtgaggtgcatgcgggcagtgatgggagaaggggaggcatgattcttctgaccctagaaatgttccctttaatcttcaagttcgagatcagccctttaagtacctttctgttgcagcccaggcaaatatcacttggccattcagatggggag

SEQ ID NO: 86865 - DNA, 259 bp, Homo sapiens
ttcacaaaatcatttttagtatttatggcatttaccaaggagacagtgtattacacatgggaaagtgcaccacagaactcagccacggatgagcagcccaatttgcccaggatgtggctaacaagagtatcaataatcacacagggtgctaacagccatacaggaattaccttttttgtcttaggtttcatgggtatattcggttttggacttagcttggctaccgcaaggtggaactgttcactgcctggtcatcttc

SEQ ID NO: 86866 - DNA, 949 bp, Homo sapiens
tcaaagtttgatgagctttacattggaaactcaaaagcttgcactctcattttggctcagatgccaatttgctgggtgcccctgtggtgagtcatgaaacctccttgggccgcaatttcatcatctctaaaaacagaaattatcatacaacctacctcctgggaggtgctgcacaagaagcagctgatggaagtttcaaaatccaatttgtggccgagcgcggtggttcacgcctgtaatcccagcactttgggaggccgaggcaggtggatcacctgaggtcgggagtttgagaccagcctgacatacatggagaaaccccgtctctaccaaaaatacaaaaattagctggggcgtggtggcaggcgcctgtaattccagctacttgggaggctgaggcaggagactcacttgaacccgggaggcggaggtttcagtgagccgagatcgtgccattgcactccagcctgggtaacgagcaaaactctgtctcaaaaaaaaaaaaaaaaaaaatccaatttgtaacccattaaggccatctacagcaatggtacagcaaacttcttttgccattgtgattcataagagaggctcagagtcccagaacacaatgacatgtgttgatgcaactcagaggtggagagaatggagcaaataatgagaaaaaaaatgctttaaatgagtttattttgacctcaaaatacattgtaagagcaacatcctacgttaataaatgttctagcccggtcttcgcgaacatttatgtgcatacaaatcacctgggatcttgttagaaggcagtaggtctggggtggggcctgagattctgcatttctaaccaggtcctgggagatgctgatgctatcgagccacaaccacactttgagtagcaacctctggcctatccttattgtttgttatattaaaatgctgcctctcagtcttctgt

SEQ ID NO: 86867 - DNA, 639 bp, Homo sapiens
gcacacagtgcccatcctctcccctgagctcactctgttcctgtcttctgactcgtttagtgctttgccgtgctttatagttatttgcatgcgtgggagccctgatggccgctggattctatccccgtgcatgggaaaaagcctgaagagtgttcacctgggtaacgagcaaaactctgtctcaaaaaaaaaaaaaaaaaaaatccaatttgtaacccattaaggccatctacagcaatggtacagcaaacttcttttgccattgtgattcataagagaggctcagagtcccagaacacaatgacatgtgttgatgcaactcagaggtggagagaatggagcaaataatgagaaaaaaaatgctttaaatgagtttattttgacctcaaaatacattgtaagagcaacatcctacgttaataaatgttctagcccggtcttcgcgaacatttatgtgcatacaaatcacctgggatcttgttagaaggcagtaggtctggggtggggcctgagattctgcatttctaaccaggtcctgggagatgctgatgctatcgagccacaaccacactttgagtagcaacctctggcctatccttattgtttgttatattaaaatgctgcctctcagtcttctgt

SEQ ID NO: 86868 - DNA, 480 bp, Homo sapiens
aaacacacatttctaggttcattccagacctgtttagtcagaatctctgaccatagagcttgagaatttgcatttaagcaggttcttccaggtcattcctttgttggtccctattaggcaacagcctccctaggggaaaaaggaggtgaaagtcatcttgtgtttcctgctggaaggaccactttaatttgggctccaagatttgagagctatcaacaaatgggatcttcagatccagatattgaggaggatcagatatgattgtgggcccggcgcagtggctcatgcctgtaatcccagcactttgggaggccaaggtgggtggatcatgaggtcaggagttcaagaccagcctggctaacatggtgaaaccctgtctctactaaaaatacaaaaaaattagccaggcatggtggcgggcacctgtcatcccagctacttgagaggctgaggcaaggagaatctcttgaacctgggagg

SEQ ID NO: 86869 - DNA, 422 bp, Homo sapiens
cagaccttggcagtgtggagggagagagcctggttcttctgccgagccctgggcagccttctggtgtcccatgatagaagaaagactcacatttctttgcaccattgagcccatcactgcagcaccagagcatctgacatctgcaaaacaacatcattaggtaggtgttaacttttccccactggtaggcctggtgctcgtaaatgtactgtgacgagtgtaatgtgtttatgagaatgcgcataaattatcagaaataggctgcatttttaatatcacttaatatatcaagttggcctctaagcagccacacgctatattgcaaatgctgagctgacttgctggcatcagtgctccatcatgctctccatgccgaggccatagcgtatgccaagaaggaggcaggggacccctagagtggt

SEQ ID NO: 86870 - DNA, 501 bp, Homo sapiens
accgcacccagcggtgactctttctccactttctctttattttcctctttgtcattgtatttcctaagtatcctgagatgcatttatgatcacaaaaaaaagatgataagcctcactcaggtaataaagcagcacaaaacacgtgttcccttgttcggacagagcactgtggttatttctaaggctacagttgtctgagccacttgggaaaggtgagtctcagctcgtctatctataaaacaatagttaatataatagtgggtatttattgagaaattgttacattctaagcactgtctatatttatctgtaatccacgtgaccactgtgtgaggtaggtatttcttaggttggtgcaaaagtaattgcggtttttgctgttgaaagtaaaaccacaattacttttgcaccaacctgatacctgattttacagataaggaagcttatgttgcccaggttacaccggagctggaaagaggtaggaatggagattccaatcca

SEQ ID NO: 86871 - DNA, 581 bp, Homo sapiens
ttctgccccggtcactgcagagcccacagtcacagactcgttctaacagtggattcacccacacgttccctaggctcatcattacagcctctgctgagttacaggcaacccgcaccttcacacaccttttgcctaactgacctatttattatttccatcatataactcatgcttttctcaatctaggtcttcattaatttctgttctcaggcctagaatgtccttttatccattgtcccatgactaacttccatacagactcaaagactcagcccacacacgccttgctccttaaattttcccctgatccttgacactggaaataattgaattctcatagcacttctgtttatacacagtctatctagacttgagggcaggatctagacttgagggcagtgccttcaatccctcatatgtggtcagcagtcaagcaggtgatggatagacaaatgaataagtggagatttttattgtcattagttatacgtaagttaatgaaactaggaatagctttctttttctttcattgacaaatctctttcagatctctagctcatttctctccctaatacttcttt

SEQ ID NO: 86872 - DNA, 657 bp, Homo sapiens
gcttatagatttattcaacctgtaatcagtagctactgagtacagagtatggggcagaggaaacagattctgccttgaagggagatttaatgtttatttattcagctaatatttgagggtctgctatttgccaggcaccattctaagcactcagatatgggagtatataggcagtttctcccgctctgattgatttttttttcttcccagactaagtcagtgctacactttgaggattttgaaagcagagggcctggaaagttggccaatttttttttaaagtaaatgaaggtaaatatatttaaccatagatgccatatcaaaaaagtactcatttgtcttgctttattataaagtctaaactagaacagtttatttttgagtttcaaaaatcatgagttggttcaaataattgtaaacttacattttaattaatcagaactcaagtaattagaatcctctatttaatccagaattatttaacttgattttaaggggatgatggctcattgtgaactgcagcaatgcctactagaatttgtttttgtttttgttttttgagagggagtctcactgtgttgcccaggcagagcttgcagtgagccaagatcgcaccactgcactccagcctgggcagcagagtgagactctgtctca

SEQ ID NO: 86873 - DNA, 2104 bp, Homo sapiens
  misc_feature (2095)..(2096): n is a, c, g, or t
  misc_feature (2098)..(2103): n is a, c, g, or t
aagccggagagaagagagagcccggccagacccactgcgatgagacagcaggacgcgcccaagcccactcctgcagcccgccgctgctccggcctggcccggagggtgctgaccatcgccttcgccctgctcatcctgggcctcatgacctgggcctacgccgccggggtgccgctggcctccgatcgctacggcctcctggccttcggcctctacggggccttcctttcagcgcacctggtggcgcagagcctcttcgcgtacctggagcaccggcgggtggcggcggcggcgcgggggccgctggatgcagccaccgcgcgcagtgtggcgctgaccatctccgcctaccaggaggaccccgcgtacctgcgccagtgcctggcgtccgcccgcgccctgctgtacccgcgcgcgcggctgcgcgtcctcatggtggtggatggcaaccgcgccgaggacctctacatggtcgacatgttccgcgaggtcttcgctgacgaggaccccgccacgtacgtgtgggacggcaactaccaccagccctgggaacccgcggcggcgggcgcggtgggcgccggagcctatcgggaggtggaggcggaggatcctgggcggctggcagtggaggcgctggtgaggactcgcaggtgcgtgtgcgtggcgcagcgctggggcggcaagcgcgaggtcatgtacacagccttcaaggcgctcggagattcggtggactacgtgcaggtctgtgactcggacacaaggttggaccccatggcactgctggagctcgtgcgggtactggacgaggacccccgggtaggggctgttggtggggacgtgcggatccttaaccctctggactcctgggtcagcttcctaagcagcctgcgatactgggtagccttcaatgtggagcgggcttgtcagagctacttccactgtgtatcctgcatcagcggtcctctaggcctatataggaataacctcttgcagcagtttcttgaggcctggtacaaccagaagttcctgggtacccactgtacttttggggatgaccggcacctcaccaaccgcatgctcagcatgggttatgctaccaagtacacctccaggtcccgctgctactcagagacgccctcgtccttcctgcggtggctgagccagcagacacgctggtccaagtcgtacttccgtgagtggctgtacaacgcgctctggtggcaccggcaccatgcgtggatgacctacgaggcggtggtctccggcctgttccccttcttcgtggcggccactgtgctgcgtctgttctacgcgggccgcccttgggcgctgctgtgggtgctgctgtgcgtgcagggcgtggcactggccaaggcggccttcgcggcctggctgcggggctgcctgcgcatggtgcttctgtcgctctacgcgcccctctacatgtgtggcctcctgcctgccaagttcctggcgctagtcaccatgaaccagagtggctggggcacctcgggccggcggaagctggccgctaactacgtccctctgctgcccctggcgctctgggcgctgctgctgcttgggggcctggtccgcagcgtagcacacgaggccagggccgactggagcggcccttcccgcgcagccgaggcctaccacttggccgcgggggccggcgcctacgtgggctactgggtggccatgttgacgctgtactgggtgggcgtgcggaggctttgccggcggcggaccgggggctaccgcgtccaggtgtgagtccagccacgcggatgccgcctcaagggtcttcaggggaggccagaggagagctgctgggccccgagccacgaacttgctgggtggttctctgggcctcagtttccctcctctgccaaacgagggggtcagcccaagattcttcagtctggactatattgggactgggacttctgggtctccagggagggtatttattggtcaggatgtgggatttgaggagtggaggggaaagggtcctgctttctcctcgttcttatttaatctccatttctactgtgtgatcaggatgtaataaagaattttatttattttcaannannnnnna

SEQ ID NO: 86874 - DNA, 2108 bp, Homo sapiens
  misc_feature (2)..(2): n is a, c, g, or t
  misc_feature (4)..(5): n is a, c, g, or t
  misc_feature (8)..(9): n is a, c, g, or t
  misc_feature (24)..(24): n is a, c, g, or t
  misc_feature (2099)..(2100): n is a, c, g, or t
  misc_feature (2102)..(2107): n is a, c, g, or t
gnannccnngcgcccgggactcangccccttcctttcccctctcgctcccagcaggacgcgcccaagcccactcctgcagcccgccgctgctccggcctggcccggagggtgctgaccatcgccttcgccctgctcatcctgggcctcatgacctgggcctacgccgccggggtgccgctggcctccgatcgctacggcctcctggccttcggcctctacggggccttcctttcagcgcacctggtggcgcagagcctcttcgcgtacctggagcaccggcgggtggcggcggcggcgcgggggccgctggatgcagccaccgcgcgcagtgtggcgctgaccatctccgcctaccaggaggaccccgcgtacctgcgccagtgcctggcgtccgcccgcgccctgctgtacccgcgcgcgcggctgcgcgtcctcatggtggtggatggcaaccgcgccgaggacctctacatggtcgacatgttccgcgaggtcttcgctgacgaggaccccgccacgtacgtgtgggacggcaactaccaccagccctgggaacccgcggcggcgggcgcggtgggcgccggagcctatcgggaggtggaggcggaggatcctgggcggctggcagtggaggcgctggtgaggactcgcaggtgcgtgtgcgtggcgcagcgctggggcggcaagcgcgaggtcatgtacacagccttcaaggcgctcggagattcggtggactacgtgcaggtctgtgactcggacacaaggttggaccccatggcactgctggagctcgtgcgggtactggacgaggacccccgggtaggggctgttggtggggacgtgcggatccttaaccctctggactcctgggtcagcttcctaagcagcctgcgatactgggtagccttcaatgtggagcgggcttgtcagagctacttccactgtgtatcctgcatcagcggtcctctaggcctatataggaataacctcttgcagcagtttcttgaggcctggtacaaccagaagttcctgggtacccactgtacttttggggatgaccggcacctcaccaaccgcatgctcagcatgggttatgctaccaagtacacctccaggtcccgctgctactcagagacgccctcgtccttcctgcggtggctgagccagcagacacgctggtccaagtcgtacttccgtgagtggctgtacaacgcgctctggtggcaccggcaccatgcgtggatgacctacgaggcggtggtctccggcctgttccccttcttcgtggcggccactgtgctgcgtctgttctacgcgggccgcccttgggcgctgctgtgggtgctgctgtgcgtgcagggcgtggcactggccaaggcggccttcgcggcctggctgcggggctgcctgcgcatggtgcttctgtcgctctacgcgcccctctacatgtgtggcctcctgcctgccaagttcctggcgctagtcaccatgaaccagagtggctggggcacctcgggccggcggaagctggccgctaactacgtccctctgctgcccctggcgctctgggcgctgctgctgcttgggggcctggtccgcagcgtagcacacgaggccagggccgactggagcggcccttcccgcgcagccgaggcctaccacttggccgcgggggccggcgcctacgtgggctactgggtggccatgttgacgctgtactgggtgggcgtgcggaggctttgccggcggcggaccgggggctaccgcgtccaggtgtgagtccagccacgcggatgccgcctcaagggtcttcaggggaggccagaggagagctgctgggccccgagccacgaacttgctgggtggttctctgggcctcagtttccctcctctgccaaacgagggggtcagcccaagattcttcagtctggactatattgggactgggacttctgggtctccagggagggtatttattggtcaggatgtgggatttgaggagtggaggggaaagggtcctgctttctcctcgttcttatttaatctccatttctactgtgtgatcaggatgtaataaagaattttatttattttcaannannnnnna

SEQ ID NO: 86875 - DNA, 404 bp, Homo sapiens
cctcaggtgatccacccgcctcggcctcccaaagtgctgggattacaggtgtgagccacggcgctcggccccaaatgcctcttaaaggtcctaccatctctcagcactgttacgttggggatgaagcctcaacatgagttttggggacaaacaatatttaaatggtagcagtagccaagtggtatactacaacttctcaaagtagtttcaaatccactctccctccccatcatccctgaagcatccacagcagggatccatacccctttttacagataggaatggggccctgacatggggcacactgtgcttgaggtcaggaagctctccagtggtgcagggtagcagaactatccctctgggggccagtcattccctgtgcttctctcccaccaccagaggct

SEQ ID NO: 86876 - DNA, 380 bp, Homo sapiens
tggcaattaatacaacataggatccaagattaagtcctgaaacagaaaacgaacattagtgggaaaactggaaatagctgaattaagtctgtagttcagttactactattgtaacattgttaaatcattacctttgataattgtattataattatctaagatgtggacataaggggaacctaggtgaaggatagatgggaatcttttgcctattttctgtaactttaaaattttttcacaataaaaatgaagagagtatgtttgcttagtattgtgtatacactgcaacagtttagtattcaagaatatataaaatccccacttagccaaccttttcaggatgtgcccgccctgcccaatacacttttatattctagcca

SEQ ID NO: 86877 - DNA, 3116 bp, Homo sapiens
ggcggggaggaggaggaggacggacggacagggccagcctgctgtccggctgccgcccgccgtggtgtgagggggtttctgcgcacccacagtcgccaccgtcccacctgggctgccggagcctccccctggacccctggtgcccactgccaccctcatccggtgtgagagcgctgcttccgcttcgcggacgccgcgggcatggactattcgtacgacgaggacctggacgagctgtgccccgtgtgcggggacaaggtgtccggctaccactacggactgctcacgtgtgagagctgcaagggcttcttcaagcgcacggtgcagaacaacaagcactacacgtgcaccgagagccagagctgcaagatcgacaagacgcagcgcaagcgctgtcccttctgccgcttccagaaatgcctgacggtggggatgcgcctggaagccgtgcgcgctgaccgtatgaggggtggccggaacaagtttgggccgatgtacaagcgggaccgggccctgaaacagcagaagaaggcacagattcgggccaatggcttcaagctggagacagggcccccgatgggggtgcccccgccgccccctcccgcaccggactacgtgctgcctcccagcctgcatgggcctgagcccaagggcctggccgccggtccacctgctgggccactgggcgactttggggccccagcactgcccatggccgtgcccggtgcccacgggccactggctggctacctctaccctgcctttcctggccgtgccatcaagtctgagtacccggagccttatgccagccccccacagcctgggctgccgtacggctacccagagcccttctctggagggcccaacgtgcctgagctcatcctgcagctgctgcagctggagccggatgaggaccaggtgcgggcccgcatcttgggctgcctgcaggagcccaccaaaagccgccccgaccagccggcggccttcggcctcctgtgcagaatggccgaccagaccttcatctccatcgtggactgggcacgcaggtgcatggtcttcaaggagctggaggtggccgaccagatgacgctgctgcagaactgctggagcgagctgctggtgttcgaccacatctaccgccaggtccagcacggcaaggagggcagcatcctgctggtcaccgggcaggaggtggagctgaccacagtggccacccaggcgggctcgctgctgcacagcctggtgttgcgggcgcaggagctggtgctgcagctgcttgcgctgcagctggaccggcaggagtttgtctgcctcaagttcatcatcctcttcagcctggatttgaagttcctgaataaccacatcctggtgaaagacgctcaggagaaggccaacgccgccctgcttgactacaccctgtgccactacccgcactgcggggacaaattccagcagctgctgctgtgcctggtggaggtgcgggccctgagcatgcaggccaaggagtacctgtaccacaagcacctgggcaacgagatgccccgcaacaacctgctcatcgaaatgctgcaagccaagcagacttgagcctgggccgggggcggggccgggactgggggcgggactgggggcggggcctgggcggggccgcagccacaccgctggctccgcatggttcattttctgatgcccaccgaggagccccagccccgtcccagaggccgctgcccctgagttctgacactgtgtgtttgggaaggtgggtgaggctgggcagggcctggcggaggtggagtggccactggcacttgcctgctgcttggagtgccccaaggaggtggctgttaaccacccgccccgccccctccctgctcccagctctctctcctggagtctgaagcctgcaggtccggggaggaggttcgggattccctggtgggcctcgacgtcccttggatcagaggtcatcccttcctcctctcctggaaacagacagggagaagttgagcaggtatcaactaggggaggagagagggtctccagtgttccccccatagagaccaggagggagagcctctgttttgtaaactaaggataaccgagtttgctaaattgagaggggctattgggccctagaggacactaggagactggttaggacaaaaagaccttctccctagcccttctaccccacctgacctctgcaagagggggcattgatacatcatcgggaaaaaactttgctccaggcatcactgattccctctcccacccaaggagaacgtttggtacaatcgacatcctagccccacccagaggtggccctcccaggctggtatttatctgcaaggttgtagtcaagaggtttttctccccgctttttgtttttaagcttctagacactccttgaaatgtgtgtgtgatggagggaaggggacagatttgaggactgaagctggggcttggggattgccactaagtacagctgacggtttctccccggacactcgcctactaagtacccttggggtggtgctgggtcattacttctgagccccagccccaatccagagaagcgctgttgcccgccctccacccactaggtgaacagcaggatgccctgttgggggcttcaggtctctgtgggtgggaatgcaagtgaacttgggagggggcacgggcctgtagatcagggatagcgctgttgatcccctctctgtggctccaacccgttgggtcccttgctgcaaacccatgaagctggccctcagctccctgaccccctgtcctaggtcatgaaggacactctgcagggtgaagcaccagggagaggcctcggctgtctcctgtccccggcggggtgcctgctgtccgtcccgctttcatgttactgttgcagcttgtgctgagcctgcccagttggaggagactgggcacccctgcctcctgcctcccgcctcccgccaccctgtctcagtacctcccctccccgccccctgaaacatgtgcccctgccaaggccggagacccacagccctgaaacgagaagtgcccttaaggatcaccccagcccccacagccctggaataaatttcgcaattagtttccaaaaaaaa

SEQ ID NO: 86878 - DNA, 2267 bp, Homo sapiens
gtggaggaggaaggagatgtgtcaaacagaggagtggagctgctgcagctggagccggatgaggaccaggtgcgggcccgcatcttgggctgcctgcaggagcccaccaaaagccgccccgaccagccggcggccttcggcctcctgtgcagaatggccgaccagaccttcatctccatcgtggactgggcacgcaggtgcatggtcttcaaggagctggaggtggccgaccagatgacgctgctgcagaactgctggagcgagctgctggtgttcgaccacatctaccgccaggtccagcacggcaaggagggcagcatcctgctggtcaccgggcaggaggtggagctgaccacagtggccacccaggcgggctcgctgctgcacagcctggtgttgcgggcgcaggagctggtgctgcagctgcttgcgctgcagctggaccggcaggagtttgtctgcctcaagttcatcatcctcttcagcctggatttgaagttcctgaataaccacatcctggtgaaagacgctcaggagaaggccaacgccgccctgcttgactacaccctgtgccactacccgcactgcggggacaaattccagcagctgctgctgtgcctggtggaggtgcgggccctgagcatgcaggccaaggagtacctgtaccacaagcacctgggcaacgagatgccccgcaacaacctgctcatcgaaatgctgcaagccaagcagacttgagcctgggccgggggcggggccgggactgggggcgggactgggggcggggcctgggcggggccgcagccacaccgctggctccgcatggttcattttctgatgcccaccgaggagccccagccccgtcccagaggccgctgcccctgagttctgacactgtgtgtttgggaaggtgggtgaggctgggcagggcctggcggaggtggagtggccactggcacttgcctgctgcttggagtgccccaaggaggtggctgttaaccacccgccccgccccctccctgctcccagctctctctcctggagtctgaagcctgcaggtccggggaggaggttcgggattccctggtgggcctcgacgtcccttggatcagaggtcatcccttcctcctctcctggaaacagacagggagaagttgagcaggtatcaactaggggaggagagagggtctccagtgttccccccatagagaccaggagggagagcctctgttttgtaaactaaggataaccgagtttgctaaattgagaggggctattgggccctagaggacactaggagactggttaggacaaaaagaccttctccctagcccttctaccccacctgacctctgcaagagggggcattgatacatcatcgggaaaaaactttgctccaggcatcactgattccctctcccacccaaggagaacgtttggtacaatcgacatcctagccccacccagaggtggccctcccaggctggtatttatctgcaaggttgtagtcaagaggtttttctccccgctttttgtttttaagcttctagacactccttgaaatgtgtgtgtgatggagggaaggggacagatttgaggactgaagctggggcttggggattgccactaagtacagctgacggtttctccccggacactcgcctactaagtacccttggggtggtgctgggtcattacttctgagccccagccccaatccagagaagcgctgttgcccgccctccacccactaggtgaacagcaggatgccctgttgggggcttcaggtctctgtgggtgggaatgcaagtgaacttgggagggggcacgggcctgtagatcagggatagcgctgttgatcccctctctgtggctccaacccgttgggtcccttgctgcaaacccatgaagctggccctcagctccctgaccccctgtcctaggtcatgaaggacactctgcagggtgaagcaccagggagaggcctcggctgtctcctgtccccggcggggtgcctgctgtccgtcccgctttcatgttactgttgcagcttgtgctgagcctgcccagttggaggagactgggcacccctgcctcctgcctcccgcctcccgccaccctgtctcagtacctcccctccccgccccctgaaacatgtgcccctgccaaggccggagacccacagccctgaaacgagaagtgcccttaaggatcaccccagcccccacagccctggaataaatttcgcaattagtttccaaaaaaaa

SEQ ID NO: 86879 - DNA, 2840 bp, Homo sapiens
ggcggggaggaggaggaggacggacggacagggccagcctgctgtccggctgccgcccgccgtggtgtgagggggtttctgcgcacccacagtcgccaccgtcccacctgggctgccggagcctccccctggacccctggtgcccactgccaccctcatccggtgtgagagcgctgcttccgcttcgcggacgccgcgggcatggactattcgtacgacgaggacctggacgagctgtgccccgtgtgcggggacaaggtgtccggctaccactacggactgctcacgtgtgagagctgcaagggcttcttcaagcgcacggtgcagaacaacaagcactacacgtgcaccgagagccagagctgcaagatcgacaagacgcagcgcaagcgctgtcccttctgccgcttccagaaatgcctgacggtggggatgcgcctggaagccgtgcgcgctgaccgtatgaggggtggccggaacaagtttgggccgatgtacaagcgggaccgggccctgaaacagcagaagaaggcacagattcgggccaatggcttcaagctggagacagggcccccgatgggggtgcccccgccgccccctcccgcaccggactacgtgctgcctcccagcctgcatgggcctgagcccaagggcctggccgccggtccacctgctgggccactgggcgactttggggccccagcactgcccatggccgtgcccggtgcccacgggccactggctggctacctctaccctgcctttcctggccgtgccatcaagtctgagtacccggagccttatgccagccccccacagcctgggctgccgtacggctacccagagcccttctctggagggcccaacgtgcctgagctcatcctgcagctgctgcagctggagccggatgaggaccaggtgcgggcccgcatcttgggctgcctgcaggagcccaccaaaagccgccccgaccagccggcggccttcggcctcctgtgcagaatggccgaccagaccttcatctccatcgtggactgggcacgcaggtgcatggtcttcaaggagctggaggtggccgaccagatgacgctgctgcagaactgctggagcgagctgctggtgttcgaccacatctaccgccaggtccagcacggcaaggagggcagcatcctgctggtcaccgggcaggaggtggagctgaccacagtggccacccaggcgggctcgctgctgcacagcctggtgttgcgggcgcaggagctggtgctgcagctgcttgcgctgcagctggaccggcaggagtttgtctgcctcaagttcatcatcctcttcagcctggatttgaagttcctgaataaccacatcctggtgaaagacgctcaggagaaggccaacgccgccctgcttgactacaccctgtgccactacccgcactgcggggacaaattccagcagctgctgctgtgcctggtggaggtgcgggccctgagcatgcaggccaaggagtacctgtaccacaagcacctgggcaacgagatgccccgcaacaacctgctcatcgaaatgctgcaagccaagcagacttgagcctgggccgggggcggggccgggactgggggcgggactgggggcggggcctgggcggggccgcagccacaccgctggctccgcatggttcattttctgatgcccaccgaggagccccagccccgtcccagaggccgctgcccctgagttctgacactgtgtgtttgggaaggtgggtgaggctgggcagggcctggcggaggtggagtggccactggcacttgcctgctgcttggagtgccccaaggaggtggctgttaaccacccgccccgccccctccctgctcccagctctctctcctggagtctgaagcctgcaggtccggggaggaggttcgggattccctggtgggcctcgacgtcccttggatcagaggtcatcccttcctcctctcctggaaacagacagggagaagttgagcaggtatcaactaggggaggagagagggtctccagtgttccccccatagagaccaggagggagagcctctgttttgtaaactaaggataaccgagtttgctaaattgagaggggctattgggccctagaggacactaggagactggttaggacaaaaagaccttctccctagcccttctaccccacctgacctctgcaagagggggcattgatacatcatcgggaaaaaactttgctccaggcatcactgattccctctcccacccaaggagaacgtttggtacaatcgacatcctagccccacccagaggtggccctcccaggctggtatttatctgcaaggttgtagtcaagaggtttttctccccgctttttgtttttaagcttctagacactccttgaaatgtgtgtgtgatggagggaaggggacagatttgaggactgaagctggggcttggggattgccactaagtacagctgacggtttctccccggacactcgcctactaagtacccttggggtggtgctgggtcattacttctgagccccagccccaatccagagaagcgctgttgcccgccctccacccactaggtgaacagcaggatgccctgttgggggcttcaggtctctgtgggtgggaatgcaagtgaacttgggagggggcacgggcctgtagatcagggatagcgctgttgatcccctctctgtggctccaacccgttgggtcccttgctgcaaacccacagccctgaaacgagaagtgcccttaaggatcaccccagcccccacagccctggaataaatttcgcaattagtttccaaaaaaaa

SEQ ID NO: 86880 - DNA, 1302 bp, Homo sapiens
tgttcctgtgttagtttgctgagaatgatggtttccagcttcatccatgtccctgcaaaggacatgaactcattcttttttatggctgcataacttttgtttcttatgctgggacaaatacagcttatttgtacactgctgggaatgatctaacacagggaaagtcatagtgcaggaaagagaaggaataaatataacataataaaagataaggattatttagtaatgtctaaagagaaaatgtgtgcttatttgcaggtttgaaaagcagagatgatgtcccaaaactagtgactgagttcctggcaaagaaatttgacctggaccagttgataactcatgttttaccatttaaaaaaatcagtgaaggatttgagctgctcaattcaggacaaagcattcgaacggtcctgacgttttgagatccaaagtggcaggaggtctgtgttgtcatggtgaactggagtttctcttgtgagagttccctcatctgaaatcatgtatctgtctcacaaatacaagcataagtagaagatttgttgaagacatagaacccttataaagaattattaacctttataaacatttaaagtcttgtgagcacctgggaattagtataataacaatgttaatatttttgatttacattttgtaaggctataattgtatcttttaagaaaacatacacttggatttctatgttgaaatggagatttttaagagttttaaccagctgctgcagatatataactcaaaacagatatagcgtataaagatatagtaaatgcatctcccagagtaatattcacttaacacattgaaactattattttttagatttgaatataaatgtattttttaaacacttgttatgagttaacttggattacattttgaaatcagttcattccatgatgcatattactggattagattaagaaagacagaaaagattaagggacgggcacatttttcaacgattaagaatcatcattacataacttggtgaaactgaaaaagtatatcatatgggtacacaaggctatttgccagcatatattaatattttagaaaatattccttttgtaatactgaatataaacatagagctagagtcatattatcatacttatcataatgttcaatttgatacagtagaattgcaagtccctaagtccctattcactgtgcttagtagtgactccatttaataaaaagtgtttttagtttttaacaactacactgatgtatctatatatatctataacatgttaaaaattcttaagaaaattaaaaattata

SEQ ID NO: 86881 - DNA, 2105 bp, Homo sapiens
atgtgaaggcacaagctgctgttatatacaacagagtgaactgagcatcagtcagaaaaagtctatgtttgcagaaatacagatccaagacaaagacaggatgggcactgctggaaaagttattaaatgcaaagcagctgtgctttgggagcagaagcaacccttctccattgaggaaatagaagttgccccaccaaagactaaagaagttcgcattaagattttggccacaggaatctgtcgcacagatgaccatgtgataaaaggaacaatggtgtccaagtttccagtgattgtgggacatgaggcaactgggattgtagagagcattggagaaggagtgactacagtgaaaccaggtgacaaagtcatccctctctttctgccacaatgtagagaatgcaatgcttgtcgcaacccagatggcaacctttgcattaggagcgatattactggtcgtggagtactggctgatggcaccaccagatttacatgcaagggcaaaccagtccaccacttcatgaacaccagtacatttaccgagtacacagtggtggatgaatcttctgttgctaagattgatgatgcagctcctcctgagaaagtctgtttaattggctgtgggttttccactggatatggcgctgctgttaaaactggcaaggtcaaacctggttccacttgcgtcgtctttggcctgggaggagttggcctgtcagtcatcatgggctgtaagtcagctggtgcatctaggatcattgggattgacctcaacaaagacaaatttgagaaggccatggctgtaggtgccactgagtgtatcagtcccaaggactctaccaaacccatcagtgaggtgctgtcagaaatgacaggcaacaacgtgggatacacctttgaagttattgggcatcttgaaaccatgattgatgccctggcatcctgccacatgaactatgggaccagcgtggttgtaggagttcctccatcagccaagatgctcacctatgacccgatgttgctcttcactggacgcacatggaagggatgtgtctttggaggtttgaaaagcagagatgatgtcccaaaactagtgactgagttcctggcaaagaaatttgacctggaccagttgataactcatgttttaccatttaaaaaaatcagtgaaggatttgagctgctcaattcaggacaaagcattcgaacggtcctgacgttttgagatccaaagtggcaggaggtctgtgttgtcatggtgaactggagtttctcttgtgagagttccctcatctgaaatcatgtatctgtctcacaaatacaagcataagtagaagatttgttgaagacatagaacccttataaagaattattaacctttataaacatttaaagtcttgtgagcacctgggaattagtataataacaatgttaatatttttgatttacattttgtaaggctataattgtatcttttaagaaaacatacacttggatttctatgttgaaatggagatttttaagagttttaaccagctgctgcagatatataactcaaaacagatatagcgtataaagatatagtaaatgcatctcccagagtaatattcacttaacacattgaaactattattttttagatttgaatataaatgtattttttaaacacttgttatgagttaacttggattacattttgaaatcagttcattccatgatgcatattactggattagattaagaaagacagaaaagattaagggacgggcacatttttcaacgattaagaatcatcattacataacttggtgaaactgaaaaagtatatcatatgggtacacaaggctatttgccagcatatattaatattttagaaaatattccttttgtaatactgaatataaacatagagctagagtcatattatcatacttatcataatgttcaatttgatacagtagaattgcaagtccctaagtccctattcactgtgcttagtagtgactccatttaataaaaagtgtttttagtttttaacaactacactgatgtatctatatatatctataacatgttaaaaattcttaagaaaattaaaaattata

SEQ ID NO: 86882 - DNA, 359 bp, Homo sapiens
tgaacgtaacagcacttggtaaactgtgggatattattattttattttaaaaagttatgctatgtccttgagactagtgttataatgttccaaaatagataacttttctgtaaccacaaagcatgagtgatacaggcttttgctgtgttctgggtaaactcattccacctcagtggcttctgtccattggagcagcagcagtgacgcatatgggcttgagtgaggatagtattattcttggtccttctcaacatggagagtcctcagctccatttccacaactatacattttctagggagttgttaacatctcagtgcagatgtgggatatttttaagcactttttttaagtggcgaaa

SEQ ID NO: 86883 - DNA, 227 bp, Homo sapiens
gacctgcggggcctgtccggacccgaggcggcgctcgggatggtctcccgtggagcagaaacgccgtttcctgggtgaggactcttagtcgcccacctggacggcggcggagacatccgcgccacctgctccccaaatccacctggacgcgcactcagcaggggtgcgggggaggggcttccttccttgggggcctcgcctagagcccccgcccctgggatgcccag

SEQ ID NO: 86884 - DNA, 1268 bp, Homo sapiens
  misc_feature (669)..(669): n is a, c, g, or t
  misc_feature (1082)..(1082): n is a, c, g, or t
atttactaataacatcttttttcagaagcagatggatcaataaaggaaatacggccaactcttaactctgagcaaaaaggtagaacccattaataaagtggaaatgaggtgaaccttgggagacagtagctacagtggacatcggttgttcttcagcattctatcatgtattcaccccactacaggtaattgcatctcaatttcctctgggagcattaccacctccccattgcctgtagccttattggacatgtaaatcagagttccctagcctcccctagccaagggataggcatctgacctatgctgggccaatcagactcactgcttctcttaagatttttaatctgaagtatatgaagtgtcttcaaattgttcatggaagtgaatattatgaaaaaactgagtgaatttcaattttgtgtaccaaaataaacttgtactaacttgttataacatatctgaatagggtctagtttgaggcatgtgaagaaggataagacttcagtttgaaaagaggccatatcagagcaacatgaaatctgctaaaaatgaagaaagaacaaacatcaaatttatgatgaagcttgggtggaagaatggtgaaatcattgatgctttacaaaaagtttatgggcacaatgatgctttctaaagatttggggccanaaaatatacaaaaagtttatggcctcaaataaatcagcagtttacaaatggataactcattttaagaagggatgggaccgtgttgaagatgaagccagcagtggcagaccatccacatcaatttgcaaaaaaaaaaaaaatcatcttgttcttgccataattgacgagggccaacaattaagtgccctaattgaacagggctgataataacagctgaaataatggccaacaccacaaacatctcaactggttcagcttatacatgtgactgaagaattaaaattgaacaaactttccattcaatgagtgccaaaactgttgtgcccagatcagctgaaacaagagcagagctttcaatggatattttaaacaagtgggatcaagatcctgaagcatttctttgaagaactgtnacagaaaatgaaacatggctttaccaggacaatcctgaagacaaagcccaatcagagcaatggctaccaagagtggcccagtcaagagcaaaggtcatggcaacagtgttttgggatgctcaactcacttagctgttgactttctggagagccaaataacaacagtgtctgcttattatgagagtg

SEQ ID NO: 86885 - DNA, 542 bp, Homo sapiens
ctaagaaggttatattttgtttctttgacttgaaggacccatattaactaaaaacaaattgccaagacaattattcatctctccctcccacctaatcaagaattatgtgaaagttctaagtgcctctgtccctcctctttctctctgtctggattccttgggactgacatcatagacatggaggagtctctgactttttaaagtttttgacagtcttgaatgttgtggttttccagtgagttatgggaagagttggagaggactcaaatgcagctctaatgcttcagtggaatcaggagacggttagagagtgaaactctggaagctttgggggatgttgtaaatgagagaatgtacggtcagtagtttctctggcattttaatagagggttattatccatggtctttaattttgggtcatttttctctgttattaagtaagttggacacttggaatatgcagactgattttaatattactctgagctaaacaatgtttaggaagagaaatttgttgcaaataaagtcgtataacaatctta

SEQ ID NO: 86886 - DNA, 316 bp, Homo sapiens
aaaacttaattcccactgcattctcttagtgctttataaataacttgggaatgagatgaactctaaaggtacataaaactgccccagattaagacaaaaatgttttcattaaagtagggaatcagttttaagtagtttgcaaacatgggtggaattttataaggagttttattttgggggtgtggggggacagtgagcttaaagtaaaaatgaaaaaggatctatcctatcactcaagaaaaaccagacgcttgaggtcaggagttcaaggtcagcctggccagatggtgaaaccccgtctctactaaaatacaaa

SEQ ID NO: 86887 - DNA, 415 bp, Homo sapiens
gtctatattacctggctccattatctatgagcatgtttaagctagatacaaattcataaaatctaaagctagataaaaagtttcagaatccacctatcaggaaactaagacacactttctatttggaaagcacattccaaaaacactagctttgttttcgcaatcagaaagccaattcctgtcactagaaaaaacaaaagttgatgcagtttcaatttcgtaacatgcagatgtaatttaggttttctttattaaatgtgtggttgcagacattactgagccatctcaactactgacagcctgactacttgtgaaagatggcttttgtgccaccagaattttaggcttaggggaaattagtgaaaatgcaaccccatgggaagccaaggtaacctggaaaaacaaaactaacagc

SEQ ID NO: 86888 - DNA, 153 bp, Homo sapiens
atgtgttgagtgaagggatggaagggaattatacatctgcatgcccacatcttaatttaaatatgtgaacaaaaatttcaaataagcacccaacaaggccattatatttatctattaaattaactttcctgctctctgagacaattatttgac

SEQ ID NO: 86889 - DNA, 309 bp, Homo sapiens
ggagatcgtgtatataaggcctgatttaaactgtgaggtcaataaaggtttcaatgcagaagtaatacttggaaaggatgagttagaattagaaaggtcacaaagaatgcctaaaggtgttaagagtgagaagtgctttgagacagagcaaaaggaaatatttgagaggataatcaaggcttagtgactaattaatgtgtaaggaaggggaaaacaaaagaatcaaaagaccttttacattttaagtccagaggtctgaaagaatgatgttctgtcaacagaactagggaaattagaagtaagtgaaga

SEQ ID NO: 86890 - DNA, 425 bp, Homo sapiens
gacttgctctggaggtgttgtactctcagtcaaggcccagaggcagtgagcagtcagctcacccctactctgaatgcctgtcagaaggagccctgcttgccctcatgcggggacagcctcggtgccctttaatccagattctaatcgtgcatttgctttttccaagtgctagcacttcctccagtgggcttgagagagcaaacctagttggttttattttgtcaacagtaattctttcgcttatgcttgaagtcctccgaaatgaatttgtagggtcctgagtgagcacaatggtaaaggaattgagtagacatctctgctgtcatggttttaggccacagactgtagtggaaagagcacgtacttcagacgtgggcagacccgaggtcagggtcctgtcgtatcacttccagcagcgtgatctt

SEQ ID NO: 86891 - DNA, 119 bp, Homo sapiens
ggatcgatcgagccggtaccagcaataaaagaattatcacagaattgcaggggaaaccccatagagaagactcattcttagatgagtatacaatccatgggggtctttaggatatttaa

SEQ ID NO: 86892 - DNA, 556 bp, Homo sapiens
ggacaaaacgatttcagattaaatcatcagtgaagcttagtttagtgtcctgctcaggcagtgacccaatgcctacaaccctatctagacaggatggtggaagattctttttggaagcatgcagactgtgactctccaatgagggtagtaaccgggatttgctaaaggcaaagaccctgtaggatagtgaagatatatgagaatgcagtctgtgttcagactattctgtaaaatccatcacttatcatttcttcacctttacaaagtccattgaaatagaggtgactctaaataaagggctgtatcttgtttagcatagaatcccctacagccaatggttttacatctcacatatggtaagcacgtagatactggatggcgagaaggacagagggatggatggacaaatgaatggtgaccagaggaaatgtgtatagaccagctaggcaggactccattcattcaacacattttcagtgagccgctgctatgtgtcaggcactgcccttggtgctggagaaacagcctctccaatcattgaccctggagatcacgt

SEQ ID NO: 86893 - DNA, 737 bp, Homo sapiens
acaaatatacagttaaatagaaggaatacgttttagtattttatagcacagtcggattagtgtaatcaacaacaatatgtctttcaaaataattagaatacatgatttgaaatatttccaacatgaagaaatgataaatgtttgagatgataaatatcctaaataccttgatttgatcattacatattgaatatgtgtatcaaaatatcatgtgtgccccttaaatgtgtacaattattatgtaacaaaaaattgtaaaaccgaaagtttgttcatttctttatatatcttattgacaagggaaggtatcaccaacagaatggacttgatattgataagaggtagatctgctcaacaagacttgggaaggaggatggaataaactgtatggtgtttgagaaatatacaccagacacatacaaatgtgtatctgtgtgtatgtgtttatacatctcacatgtattgtaatagtgcccttaatgaaaacactctgcctctggcaaaaaacaaaaaacaaaacacccctctttttgtttttccacatgactgcgaaacaattacagcttctagtaggagggcttctcctgttcctgggaaaagagctgggttggttggcatttgcataatcgtctttggggccattgtgggtgggtttgggctgctgacacagagctgcagactggccacctgtccaaaacaaatgaactcagcctttgtgtaacattatctggttatcc

SEQ ID NO: 86894 - DNA, 403 bp, Homo sapiens
tctggtatatctccatcagagctcttgggtgaccaggtgcaatgagcaatgtcagtgagcaatgagtagtattttgaacggaatcttttattctgagctacagtctcaacagtggacttaaaatattcggcaaaccatgttgttaaatagatgtgctttcatcaaggctctgttctgtttgtactgcacaagccagagtagatttagcttatttcttaagggccctacaatttttggaatgataagtgatcattgttccacttggaagtcaccagtagcattggctcctaacatgctgagtcagcctatcctttgaagtttggaagccaggtattgacttatcgtttctagctaggaaagtactacatggcttcttcttccagtagagagttatttcatctca

SEQ ID NO: 86895 - DNA, 229 bp, Homo sapiens
ttatcatcaccatgggtgctccatccccctactgagtcaaatgcagagtctcacaatcattgtattcttcctcccccaggagcacccattctctctttacaccaattggccactgccagggatgaagagggatgatggtgctccatcccccgaggtggaaaaaagttccaggctgaggaaacagcatatgtgaaggtccagtggggacagagatttgaagagatgaaag

SEQ ID NO: 86896 - DNA, 432 bp, Homo sapiens
taaacaccgcatctcataaatatcctgtgcgtctctctaaaaggcaaggacttttttaaaaaaaacttaagccttatacaattgtcacatctaaaaatgtaattccttaatattacaaaaaattcagagactttaaaaatttgttttagttgttaaatttggtttatttgcattaggatccaaaaaaagggaccaacatagtatctggttaatgtttcctaagcttctttatctgtagcttccctcactcttcttcccctcaatttatcttaaaaagaaacttggttgtttgtcctatagtttcttacattctggattttgctaattgtgtccattcagagtgcaaggaagagtgttcctttaccttgaattttatgtaaacttgtagttatatccagaggaggcttgatctaattcagattgcggtgtttt

SEQ ID NO: 86897 - DNA, 400 bp, Homo sapiens
catatttcaatgcccatctgcctcctctatagattgcaagctccatgaggagggtgcacctgtcattcaaggttgcatcctcattgcctagggcagtgcctgatacatcatccggttcagtaaatatcaacggaatgagttaaaacaggaaagcttattagcacagaaaccaaagcagcacacatgccctcttgagattgacaaaattgtgctgtagtcctgcgctgcttgttgttaagtgactttagggaagtcatcgtggccatctacagattgaggaaatcaacgtaattatctctgaggtccctcccaaattctcatgtgtagttgacatctgttatctattgcttatatgtcactgaattggcaggtatgcataaatagaatttgcatctaacta

SEQ ID NO: 86898 - DNA, 505 bp, Homo sapiens
aagcagttatttggctgggcagaaatctgaaatcacaaacccattctgattggttagttaattaggatactgccagctgagggatattgaaggctggaggatacagactttagttgtttgtcgaagtctgttggaacattctgtggtttgaccttcagcaggggtaactgcagtcctctcccaatctcccaactccactttagaaagccttagtcttagttacttaattttcttttgttcggttataggtgctgatatgatttggctctgtgtccccacccaaatctcatcttaaattgtaatccccgcatgtggcggaacagacctgtaatccccacttgtggagggagtgagctgataggataatgggggcagtttctcccatgctgttcttgtgacagtgagtgagttctcacgagatctgatggttttataagtgtttgacagcttttccttcacatgctaacacactctcctgccaccttgtgaagaaggtgcctgcttc

SEQ ID NO: 86899 - DNA, 176 bp, Homo sapiens
tgcgtgtggaggtgtgtgcctatgtgcgttcccgcatctaacatgtgcctgcccacatctccttcttcaagagagccttgcaagttctccgcattgggactgggtgcgtcgcctgcgtgtgcaccaatagtctggtcacaaagtttcttgctacgtgtgtactttctcatccccct

SEQ ID NO: 86900 - DNA, 416 bp, Homo sapiens
tagggacagtcctacagctagtcctgcctcaagcagagaaaattagtatattcccaccctggcttccttagttagcttggcataatattttcaaggctgaaatttagatttctgacttaaaagtgggctaatctctttaaacttggatccagtattgaggatccaaacttagcacctagaactaaggaataccattataattgataaaaacattaagatccagtggataaactggcaaagaaaagacaaaggacattcatagaaaacatcatgactagtaaatatgtagggaaaaaaattaaacctattaagaagaccataacaataataaaatattctatcctgggaagaataggaaagaagaaactagaaatctcatatattgccggtggcaatataccttggaataagcctta

SEQ ID NO: 86901 - DNA, 246 bp, Homo sapiens
ctaatttcttcttttttccttcaattattgatcacctaacaagagtttattataggaaagtaataaaaagctgcaagaactagtattacagttaacaagaaacaataaagatgattatatgtgaagatttcaatgctgagatcttcaaaagcatttcaaactgaagccaaaaattagctaatattcagtttttaataaattcattgttaaaattttattccaaattttaatgctgatcaataaccc

SEQ ID NO: 86902 - DNA, 430 bp, Homo sapiens
ataacccaaagcttccccaaatgcatgctaccaacaggttaccaggtgagcagccagaggcctttgctacaagcagtctcatccaccacacaaagattaccattttctatcaatttacgacatgaaaaagcttgaaagcactgctgtcaagtcagatttgccactgagtcaaaataaaggcattttcagacattcaagaactgaaattttacttatatgaaaaaactgaaaaggtaaagtggcaaaacaacaaagaaaacacaacacgacctggaagaaacagtggcagctgagtatgaaccagaagtaacaagtgaaaaagaaaacaacagtatacccttgtcactgacagtgggagattctcctttaataacaagttaaatgacagtattatttccttcctcagggtagcccttaaactgcgggtacc

SEQ ID NO: 86903 - DNA, 857 bp, Homo sapiens
aacgttgggcccatgcaaataatctttttatactgtggggatggggcccaccttaaggtcgatcccatctctacaaaacaaaattagctgggcatggtggtgcacacctgtagtccctattactcaggatgctgagcaggactgcttgagcccaggttgttgaggccacagtaagctgagatcatgctactgcactccagcatgggtaacaaagtgagaccctgtcccaaaaatataacttaaaagggatgttcacaccaacctagaattttaggcccagccagaagtaatgtacaacagttgttttcaaagatgcaggggctcaaaaataagagtgatgccttacttaacgatgggtatacattctgagaaacacgcgggtgatttcattgttaatgtcagcctactacacacctgggtcaaaggtagggcctgttcattgctcccaggctactcacctgcacagcctgttactatactgaatgcaacaggagttctaacagtggtatttgcgtatctgtacacagaaaaggtacagtaaaaataaggtgcagtcacacactatcatacatgcaatacactgttgactaaaatgtcattacatagtgcatgactacgtacttccaactctctcaagggatttcttggagaaaccattcaggatgaagtaaatcaaaaaagggaatgtggatgcaggaaatgaagaccagcacctaagagaggtgcagatcagatgactccaggaaaatgggtattggcaaaataacaacacatctgaatatcttgagaggtttagacaatagatgaaagttcacagctgaggccgtgcacagtggcttatacctgtaatcccagca

SEQ ID NO: 86904 - DNA, 711 bp, Homo sapiens
aaaaaaaaaaaaaaaatttttgagatgggcgtctcactattgccacccaggctggagcacagtggcacgatcttggctcactgcaacctcgtctcccaggttcaagcaattctcctgcctcaggctcctaagtagctgggattacaggcgtgcaccaccacgcctggctgattcttgtatttttagtagagacggtctcaccatgttggccaggctgctctcgaacccctgacctcaaatgatctgtccaccttggcctcccaaagtgctgggattacaggcatgagccactgcgcctggccaaaaataaatttttttaaccgaagggaggctgggtgcagtgggccaagcctgtagtcccagctacttgagagcctgcagtgggaggatcacttgagcccaggagtttgagtctaagcctggtcaacatagcaagagcctgtctcaaaagaagaaatctgcagcctaagcaacatagtcagatcccatctctacaaaacaaaattagctgggcatggtggtgcacacctgtagtccctattactcaggatgctgagcaggactgcttgagcccaggttgttgaggccacagtaagctgagatcatgctactgcactccagcatgggtaacaaagtgagaccctgtcccaaaaatataacttaaaagggatgttcacaccaacctagaattttaggcccagccagaagtaa

SEQ ID NO: 86905 - DNA, 386 bp, Homo sapiens
ttttttttaattggtagagctggcttatgtgttttgccatgaactgccatggtgctctaggccaatgccaaaggtagcatctttgttcttcttaaatgtctatgttctgtgctagctttccctggaacagaccttcagcatccaggcagcagacacagacaagttcttagcccacaggaggagattaataattggctgttgataatatgagtgaatggttctcagagtgtttccccccagcagcagcagtatcacctgggaactagataaaatgcaaattattggaccccaccatagacttactgaatcagaaatgctggaagaggggtctagcaatgttttatcaagacctccagatgattctgatgcatgctgaagtgtgagaa

SEQ ID NO: 86906 - DNA, 347 bp, Homo sapiens
catccctcacacccactcccagcctcagactcacagctatctccctccgcactcccggagggacggttggatgccctggccttcagcacacggcatggccctctgtccccattttgggttctgtgcacagtgggacacacgtgcatgcagtcatagttacacacacacacacacgacactccctcacggtgcctgtgtctgcatgactctgcacacacaaccacacagagactcacatagacacacacaggcctgtctagagacagacgtcacacacacaggcgtgcacagacacacatgggcagacacactcacggacacaaacaccgcacttgcggggggataga

SEQ ID NO: 86907 - DNA, 362 bp, Homo sapiens
cttggcgaagaatgggagaggtcaaaggtgggagcgaggccgctggctggtgagtagagccccaccagagcagatgagctggaagtgcagcagagttagagcctgggctggactgtcggtggggtagagtctaagttgtttccggtctgagccttcaagttgctgggctgtccttggcgtggcgagtcccaggagaaccagtgagacaagactggtggttctcaaagactcatatgtcccttacaggcgcctgcccccgcaaccgattcgaccactccctagatttggtgagactaattccaccccattttctttctcctacatgcccactccccacccctcaattcctgagtctgagccct

SEQ ID NO: 86908 - DNA, 726 bp, Homo sapiens
atggctgtgtttctgcagctgctaccgctgctgctctcgagggcccaagggaaccctggggcttctctggacggccgccctggggaccgggtgaatctctcctgcggaggagtctctcatcccatccgctgggtctgggcacccagcttcccggcctgcaagggcctgtccaaaggacgccgaccgatcctgtgggcctcttcgagcgggacccccaccgtgcctcccctccagcctttcgtcggccgcctacgctccctggactctggtatccggcggctggagctcctcttgagcgcgggagactcgggcacttttttctgcaagggccgccacgaggacgagagccgtacagtgcttcacgtgctgggggacaggacctattgcaaggcccccgggcctacccatgggtccgtgtatccccagctcctgatcccgctgctgggcgctgggttggtgctcggactgggagctttgggcctggtctggtggctgcacaggcgcctgcccccgcaaccgattcgaccactccctagatttgctccacttgtgaaaaccgagccccagaggccagtaaaggaggaagagcccaagattccaggggacctggaccaggaaccgagcctgctctatgcggatctggaccatctagccctcagcaggccccgccggctgtccacagcggaccctgctgatgcctccaccatctatgcagttgtagtttga

SEQ ID NO: 86909 - DNA, 459 bp, Homo sapiens
tttggtcccaatgtaaaatgaagtctcagaacccacggctcagccattttgagagtgagatgaggaggcccacgcccacagaggcccctccggcgcacagctgccatgacaatatgggccagtgcccaggaataggaaggatcaagttaaatgtttgtgatccaataacaaaaccacaacatgggccccattaagcaaggtttaggtagaagctaatgaactgaatctaattttcttttgaccatctttgacaaggaataagctctgctataatgagtttcttaggcaattcaaatatagacattacagtggggctcaataaaaaaaaacaactctcacaaaggagctgatctcctcaaatagactctaaggtggtttaactgggaagcatatatatatttctttaaaactcttccgtgaataatcaggaataattatcaattttaaaatactttttat

SEQ ID NO: 86910 - DNA, 446 bp, Homo sapiens
gtaatattagaactttctattggacttataatgaactgaaatctttggacttttttgtttcttttcttcacttcagcagttttcttctccctggcattcttcctatcttgtttttcagtttttgtctgaaaaggactttatattcattcatgttaaataaatttttcttgtttcgttgtgtcaaacagtgtgactgctgacttacccattattagctcttcctcttagctttgtgttttctgtgcattttgacaagcctgtggcatcctgtgaatccatgccatcagagcccctggccacaagagctgagcttgtccagagctcttcaggctgaatgcccagttgtcttgtctgggaagtgattctccaccctgtgcacagaggcacatggttcctcttcctgaacttgtcctgagagccattggattgcaaggctgacctgccgt

SEQ ID NO: 86911 - DNA, 320 bp, Homo sapiens
ggtatagacacaacttgcacatcacctactttcaccagggagacccaacaactccaattacagcatcaagagaaatcagagataacacaggaaatatagcctcataatttacaaagaaagactaccttcagactcactctggtatgtgagggaatatcacataaccagtaattacttttaatttaatctaatgtgaaaatataattgttcattctctaaaatagattttatctttccagcaattgctagaagagcattatggtattttatataaggtcactagcaatgtgaaaggaactttagaagtattaataataaca

SEQ ID NO: 86912 - DNA, 1007 bp, Homo sapiens
gatcataacactactccagtctgggtgatgaagtgagacctgtctacaaaaaaaagaagcccaaactaaacctaaagcaagcagaaagaagaaaaaaaaaaagaggcagaaaataaatgcaattgtaaacaaattaatagaaaacaatcaaaaaactaatttttgaaaagagcagtaaaattgataaacctctggcaaaattgacaaaaaaagagaaggaattccaatctttgattccaatcttaggaatcaaagaaaagataacagtatagatcctcattagaacgacacaaagaaaataccatgaacaactctatgcacataggattagatgaaccaattccttgaaaggcatacagtacccaaacttaaataaacctcaataaattctctatttttaaaaattgaaccattgtttaaaaccttactagcaaattcataaaacatttaaagatataacaaattctacaaatctcttccagaaagaataatcactttgcaattcattttacaagaccagaattaacatgataccataccaagataaagataacacaaggaaaaaacaaacaaaaacaattgcacaatatccaaaatgaacacagacataaaaatcctcaaaaaataaaaatctagatacataagctgaataatgtaccatgaccaagtttggggttgggaggaaatataagctgtttcaaaattctggaatcagtaaaatccatgattttaacagtctaaacaaaaagaatgaccaaactgatacagaaagagcatagaaaattcagcatccactcatgaaactctgctaacaacaaattaatagatgggaacttgctcaacatgacaaagggaatttaagaaaagcctacagcttgcatacataatggtcaaaaacaatgctttcaaaatcctaagatccagaacaagactgagatggccactttctccatgttattgttctggccactgcaatcaggcaagaaaaatcatagactaaaaagaat

SEQ ID NO: 86913 - DNA, 747 bp, Homo sapiens
tccccactcccggaccgggaaagttgtaaatatggggacgatcagggcacatttgctgttagttgtattgtttccgcctccccactagctacggctccactcccgggcgaggcctgtcaccgaccagcagtcgctccgctcagcccggagctctcctaatccccgagctcaagtagattccgctggcccgcggcctgcactctccgccgggcctacgcctccccggccgcccagcaggagcccagtccccgccaccggagccggccgggagagggtacaaaaccaccgctacccaaggcggctgccaccagagaggagcgaactctagactcgcctgtggaagagacctggggccgctaaggaaacggcggggaggggagcgaggaggagagacgctgaggacctggcgccggcgccgccgccgccgccgccgaaataaagagcaggaatttacctgggcgaatcggcgtctgaatccaaggggaggccgaggccgctgtggcgagagactataatccgggccgggagggggggtggctacggctcctcttccgtctcctcagtgcggggaacatgtagagccggggggagaccagccgagaagacaaatcgttgcttcttcttcctcctcctcctccttctcccacatagaaacactcacaaacacccgaccacgggcccgagctaccgggggggcatcgccgcgggcccgggaaccaattctcctgtcggcgggggcgtccctcc

SEQ ID NO: 86914 - DNA, 266 bp, Homo sapiens
gatctcatcagcgtgcaaacctagcatcttctgtggccacaagccacacacttgctttttttgaatgtgatgtaaaatttgtacagtaaagtttttatattttctatcaactacatttgtcttccagacatgctattaatttaaattaaaatggttagtattaacaaacatgctgtatcgggtttttttgccactggcaagaacatgccctctgtgctaagccaggcctgggtgtctggagtttgtgaataaagttataccaaggt

SEQ ID NO: 86915 - DNA, 757 bp, Homo sapiens
gtctaacgcagctgtctgtgcagctcccgggaggggtgagaacagccagccacctggctgaacttgctgggaaccgacgtcaggagcaggagctaggctgcagtgggcctcacgggggcctggacggggagagcggctccgtgggctctggggccttccctctccacgcaattgcgatcccagtgatgggtgggacagagatccccgttgtccctgtcaccgctcccgcctccacttgccgggcctgaggacaattgaggggctctgcgagccctgggcgcccccccagcccaaccctcctccctggggccccgccggcccccaggcctcccctggcctggccttccttgctgagggggcgggccagcgggaggaagtcatccgctgtattgtcgtcttaatgcctgtgcgatgaggtgtgaaattctatgttcccaaaatttgttatcagcctcgctcctgtcctccggagcgggctgtgcggaggcagccgggagaacagtcggctccgaggacaagagtgatgggagcgccccggccccgcggaatccatcattccggagggaaccttcggcaggcttcattaggctcgaaacgatcatgaatatcctcccctcacctgttctcattaataatggctcccctcttatcttttttttgccacacgtatcattcttttaagaaacatacacaacccagggagaaagcccggcgcctgcccgggagcccagccgcagcctctgcgtcccgcccctcc

SEQ ID NO: 86916 - DNA, 112 bp, Homo sapiens
tcctggctttcacacattcgtgcagtcccctttcacaatacaccagggctgacccatgggaccaacagaatatggcagaagtaacagcacatcactttcatactagattttc

SEQ ID NO: 86917 - DNA, 513 bp, Homo sapiens
tacttgcaggtaaaatccatgttcttcagcaggccccaagcactttgtgatccactggaggaatctgtgatgcaactgccctcttccatgcccctgtgattgcacacagcttcttccctctgccaggacctccctgctacctaggaaaccggctggcagagcaacccttccattcctgtgttacagaaacaccttgcacacattgcagttgttgtatgtatcacactttactgtatcttccccatgtctgtctcccctaagaggcaacgtgattcttgaggtcaaggggcaaccgtcaatacactccctggcaccagagaagtcttccttaaatgttgatgagctggtggccccaccagtcaataggtcaaacaacttaaccatccctcctgccacctggcttaaaaccgacccctaaatccctacatccaccacacagctgccctgtccctgtaaaaaccttaccaccccctaccccctcatgcccaaggctaacttgcaacaatgttcatt

SEQ ID NO: 86918 - DNA, 492 bp, Homo sapiens
tgagatggagtctcactctgttgcccaggctggagtacagtggtgagatcttggctcactgcaacctccacctccctcctgaccaagcgattctcctgcctcagcctcctgaatagctaggattacagacgtgtgccaccatgtctggctaatttttttgtatttttagtagacacggggtttcaccatgttggctaggctggtctcaaactcctgacctcaggtgattcgcctgccttggcctcccaaaatgctgggattacaagcgtgagcaaccgcgcccggctataacaggttatttcaaaaacctatcaacaaaattaaagttaccagtacttactcttaaacagtatgctacacagtttattacaaagtagtattttagcttattgcctaattatattttctatgtgtagtataaatacatatgccatgtgagaggttttatcttttatacaaactgcaggaagacagaagcaactgtggggtaac

SEQ ID NO: 86919 - DNA, 729 bp, Homo sapiens
ctataataaaataattctgtcaaaattttagacatgagaaacatcagttcctcttttaacatatgacaagtactcctaatgtctagaatgtagaatgaccacttattcgtctgtcatgtagattccactattaattttgaaatccatacggcattttataggaaattgaataaaactcaaatgtttctgattaaattttgcttacctcttgaatcttttctttcctgaaaactcatcaaactgaaatgcctttgtaagaacttcttgattgtgtcttttggaaaatagaaagccacattctgtaaaaagatataaacaacattactttctcaaaaactctaattcaatatataaatagtataccttcacattcatgaatcctactgtgttcaaagtttactagttttctagttattcctttattcatatttatgtagaatatttcagaataagtaatatttaattttaaagaatatgtttcacaaggtattttctgatgttttaaacttgttttatcaacagaagatacatgctcagagtaaattgtgtgttttcaacctcagcgctactgaaatgtgtgttggattgtttttgttgcgagagggctgtcctctgcatcacaggatgtttagcagaatctctggcatctacccactaaatgccagtctcacccccaccctcaatcctgacaaacaaaaatatctccaaacattgtcaaatgtccccttc

SEQ ID NO: 86920 - DNA, 788 bp, Homo sapiens
gagccggcgggtccctgggcggtagctgttttactcttgtaaaagcgctgccttttgcctgtgctggctctgtttctgtgaacttccgggctgccgagcctttctttttatttactgcttgctcggctgcacggctttcggctcctaatgccttttttcttatctttttataaacatacacctgattgccttgccgattctgcattactgggcagagtaagagctctgcttctaatgctgcccgcttaagacagggactgatagctgtagcatatcctaggtcttttttcctatctattggaggaggaggctcaggtataaacccccgtttcctctgttatttcggcccggtgatattagggtggagggaagaggaggtgataaggcaggtgacattttctcctccttgctctttttaggctcttctgcgtgtaacagagctaaggctgctctaattaaagcctataacgttaaagctgttactgggacctgttgcctttgcacatgttaagatttctccccatttgttcccagagttctacgtctagcgttccttcttccgggaaccacgggcttgggatcacaagagtttgcattgcaacagtttgtctagcatggatgattaggtcccttaattgagcctgtgaaactgaggctccgctagccttaagtaactgttttaatactttcatataatgtttctgctgtgctaataactgtggtcccatgatgaaaactcagcttgacccaacttcccccagaacttggtaactttgagtgggcaccaa

SEQ ID NO: 86921 - DNA, 716 bp, Homo sapiens
ggatcacaaatgcatgccaccatgcctggctaattttaaaaatatatattttgtagagacaggctcttcctacattgctcagactggtctgaaactcctgggctcaagcagtcctcctgcctttgcctcccaaagtgctaggattccaggcatgagttaccatgcctggctcttactgattttttttaaagcactacataaatacagtcaacgcagtcaccatattgtagaaaaacagaagtatatacagttaaatgttttatgttggatgtacacatttgaagaggaacatagaaaaaaagtatggaaaaggaatgttgaccgagcttttatgcttaagcagcagatgaagatagaaccaagatcactgaaagcaagtgtttagaacagcaaaaagagtatcccaacatttcagcattggaactacagaaagttttcagacagaggggaagttaccaattttaaatgctaagtaaagcatgagattttgctgcttgatcttgcagatactgaccagattagttctaacaaaatatggaaggagtggcatacggtggaagaaagaaggcagtagctgctgttgtagttattcatgttagcctcagaggatggtgagacatccagatgaagaggttggtacgcaattctagaattgaggaggtgtctagatagagatataaattgtagtgacatcagtaaagagacaataacaggct

SEQ ID NO: 86922 - DNA, 354 bp, Homo sapiens
gagggttacccgactagcccgacagtcccgagctatacgacagtccccgactagcccgacagccccgactagcccgacagccccgaatagcccgacagccccgactagcccgacagcagaggggacccaggttctctcctggacatggaagaaggccatgaggcctatcattgaagatggtggtcttggaagatgaccccttccctgcagcccagcagtagtgaggggcctctccccacgtccaccagctgggccttccttggaggaccagagacatacgggaacttggatgtgtgccccccaggacctgaaccaggccttcgttactcacccacatacctgagcacagctgca

SEQ ID NO: 86923 - DNA, 542 bp, Homo sapiens
tgcctcctctcttccacatgtttaacttccagattacaagaatgccaaagttacaatgcagtcccttggggccactgtttaggaaaggtgcatttctttcactttcaaccacggtctacaagatgtggctacaaggcaatccttccccactggcaaaaggacgtcatcaacacagttgtccctttctgcgatggtaatgtctcgctttacagactcgacaggtgcagtgctctaatgcggcccgggaggctcctttgtagaatggatgagtctgccaactcctgtctgcagacactttgaagtcccaaggcagatgaggctgcaaatggaccaaacactgaacaatgctggccgtcccgtgtgtggctcagaaattaagagcacacaccagataagtgggcttattctcctgtgagagcacaggcagcatgaacacaataccgaagagtgttcctttcagcggctccttgagtagggcttttctttcccctgaggcattcctcctggtggcacaatgctcacctgtcatttccacctgtctg

SEQ ID NO: 86924 - DNA, 436 bp, Homo sapiens
ttaggtgggtagttctgatttagaatctctagtagccagaaatctgagatggcctccatgactcctgactcctagtattcaaacctttacgtaaacctcttttaatcaatagaatatggcaaaagtgaaaggattttccagatatgattaaatctctaatctattgtctttaagttaatcaaatggagattatcctgcataggtctaacctatttggatgaatgaccttgaagaagcaagcaaccatgaattctacagttgcaaggaaataaattctgtcagaagcatcttggaagaatacctgagctccttaaatcagtgaagcttagccttaatttagccctgtgtaaccctcaacagagaaccctcttaagctgtgtctgaaatcttgattcatgaaaaacataagataataaatatatgctgttttatgcca

SEQ ID NO: 86925 - DNA, 184 bp, Homo sapiens
ccagaataggagatacaatgatacaggattagtgccttttggacagtagactgttctgtaattaaaatgtagtatactgcttttttgtacagttttgttttaataaaacttttttttaatttgtgtttattttagtattgtacctattagagaataaaatgtataactgaaaaaaaaaaaactg

SEQ ID NO: 86926 - DNA, 1322 bp, Homo sapiens
cagagagggaccatgaattctaataatctatttgtaagagcagcaatctggaatttaatagctcactagtatggccttcagtgattagtgctatatttgttacaaacagaaagatccaaattgttggttttatatcaatcactgcaggtttgatcatcatcaccagcaatcttattaatagaatgaatagaattctcagtgatgaaaaacattttttgtgctttttacttgttgaatcataagattatcaactgaaaatctttggacctatatccattcagtgtctacttaaatacaatttacctctattttatcatgagcccctcccccagtttcctcccacgaatgttctgcctccccttgccccagcatgtctctctgtgactaaagaattcttccaatccactaataacatttcttatttctgcacatctaggatgacagtacgagccatagtgaccaccaagaccccatctcattagctgtggaaatggcagcagtcaaccacactatcttggcattggcccgacaaggagccaacgaaatcaagacagaggccctggatgatgactgatcagggaggttaaacatgacaagttaacttagtttagacgtagcaccttagcagactttcctcggtccttaacatgtgttcttacagtataacttgcagtttcttgtatgtcaggtagctgttagggtcttgttctgtgaagatggcatggtgccctcagcctttgcatatactctctcagtattaactcccagtaaataataaccaaccaaccaaccaaccaaacttccctctcccagcccccgaggctagaaaatcttgctgctccgtcttagcattccaagaaagtgcttccaggtatttagatagccctcagttctcaaatattagactacgtgtaaaatcttgggtacctttagattcttgtaacactagtctgtactcccttttccttccccaagactgataggatgcaagctgaggtcgtggcacaggaatgacagacaccatttggggagtatccacagagtcaaaggaacactagaatccccacctcagcgtgaggataattgatttccagctgcaataagccgtgcctcattatagccacactgtggctagattatacttctttgggtgctgtgctaagaatgtcaatggaaaaagccgatctcagattttgtttgaagttaacatgcctgacacagacatcctttcctctcacaagctgtgtgacttagtagataaaatactgccttctgcctttgggaccatgattaaaaacaaagacaaaaaccaaaagtcatta

SEQ ID NO: 86927 - DNA, 2327 bp, Homo sapiens
gccagacaaagacagtcagtctgatgtgattgagacaagggaggtttttcagggggagactgggagataggggcctcccctcccccttctcctcttcctgcgccggcctcaacccctccccagtcccctcccgacgggcgccccacgcggaagacacccctccccctcccgccttccctcctccctatctcagcccttcgtactgggacgttggggagggggctgtgccgggcggagagaactcagcgaggattctgagaatggtagataacgcagatcatctctggaaaggatattgatccgcctcatgtaaagtatgcttagttcctttccagtggttttgctggaaaccatgtctcattatacagatgaacccagatttaccatagagcagatagatctgcttcagcgacttcggcgtactggaatgactaaacatgaaattctccatgccttggaaactttggaccgtcttgatcaagagcatagtgacaagtttggaagaaggtccagctatggaggaagttcatatgggaatagtactaacaatgtcccagcatcttcctctacagctacagcttccacacagacgcagcattcgggaatgtccccgtcacctagcaacagttatgatacttccccacagccttgcactaccaatcaaaatgggagggagaataatgagcgattatctacatccaatggaaagatgtcaccaactcgctaccatgcaaacagcatgggtcagaggtcatacagttttgaagcctcagaagaggacctagatgtagatgataaagtggaagaattaatgaggagggacagcagtgtgataaaagaggaaatcaaagcctttcttgccaatcggaggatttcccaagcagttgttgcacaggtaacaggtatcagtcagagccggatctctcattggctgttgcagcagggatcagacctgagtgaacagaagaaaagagcattttaccgatggtatcaacttgagaagacaaaccctggcgctacactaagtatgagaccagcccccattccaatagaggaccctgaatggagacaaacgcctcccccagtctctgccacatctggtactttccgactgcgacgagggagtcgatttacctggagaaaggagtgcctggctgttatggaaagttacttcaatgagaatcaatacccagatgaagcaaagagggaagaaattgcaaacgcttgcaatgcagttatacagaagccaggcaaaaagctgtcagatctggaaagagttacctccctgaaagtatataattggtttgctaacagaaggaaggagatcaagaggagagccaatattgaagcagcaatcctggagagtcatgggatagatgtgcagagtccaggaggccactcaaacagtgatgatgtcgacgggaatgactactctgagcaggatgacagtacgagccatagtgaccaccaagaccccatctcattagctgtggaaatggcagcagtcaaccacactatcttggcattggcccgacaaggagccaacgaaatcaagacagaggccctggatgatgactgatcagggaggttaaacatgacaagttaacttagtttagacgtagcaccttagcagactttcctcggtccttaacatgtgttcttacagtataacttgcagtttcttgtatgtcaggtagctgttagggtcttgttctgtgaagatggcatggtgccctcagcctttgcatatactctctcagtattaactcccagtaaataataaccaaccaaccaaccaaccaaacttccctctcccagcccccgaggctagaaaatcttgctgctccgtcttagcattccaagaaagtgcttccaggtatttagatagccctcagttctcaaatattagactacgtgtaaaatcttgggtacctttagattcttgtaacactagtctgtactcccttttccttccccaagactgataggatgcaagctgaggtcgtggcacaggaatgacagacaccatttggggagtatccacagagtcaaaggaacactagaatccccacctcagcgtgaggataattgatttccagctgcaataagccgtgcctcattatagccacactgtggctagattatacttctttgggtgctgtgctaagaatgtcaatggaaaaagccgatctcagattttgtttgaagttaacatgcctgacacagacatcctttcctctcacaagctgtgtgacttagtagataaaatactgccttctgcctttgggaccatgattaaaaacaaagacaaaaaccaaaagtcatta

SEQ ID NO: 86928 - DNA, 2096 bp, Homo sapiens
gtggaatggaacagtgaagaagcattggaatggtagataacgcagatcatctctggaaaggatattgatccgcctcatgtaaagtatgcttagttcctttccagtggttttgctggaaaccatgtctcattatacagatgaacccagatttaccatagagcagatagatctgcttcagcgacttcggcgtactggaatgactaaacatgaaattctccatgccttggaaactttggaccgtcttgatcaagagcatagtgacaagtttggaagaaggtccagctatggaggaagttcatatgggaatagtactaacaatgtcccagcatcttcctctacagctacagcttccacacagacgcagcattcgggaatgtccccgtcacctagcaacagttatgatacttccccacagccttgcactaccaatcaaaatgggagggagaataatgagcgattatctacatccaatggaaagatgtcaccaactcgctaccatgcaaacagcatgggtcagaggtcatacagttttgaagcctcagaagaggacctagatgtagatgataaagtggaagaattaatgaggagggacagcagtgtgataaaagaggaaatcaaagcctttcttgccaatcggaggatttcccaagcagttgttgcacaggtaacaggtatcagtcagagccggatctctcattggctgttgcagcagggatcagacctgagtgaacagaagaaaagagcattttaccgatggtatcaacttgagaagacaaaccctggcgctacactaagtatgagaccagcccccattccaatagaggaccctgaatggagacaaacgcctcccccagtctctgccacatctggtactttccgactgcgacgagggagtcgatttacctggagaaaggagtgcctggctgttatggaaagttacttcaatgagaatcaatacccagatgaagcaaagagggaagaaattgcaaacgcttgcaatgcagttatacagaagccaggcaaaaagctgtcagatctggaaagagttacctccctgaaagtatataattggtttgctaacagaaggaaggagatcaagaggagagccaatattgaagcagcaatcctggagagtcatgggatagatgtgcagagtccaggaggccactcaaacagtgatgatgtcgacgggaatgactactctgagcaggatgacagtacgagccatagtgaccaccaagaccccatctcattagctgtggaaatggcagcagtcaaccacactatcttggcattggcccgacaaggagccaacgaaatcaagacagaggccctggatgatgactgatcagggaggttaaacatgacaagttaacttagtttagacgtagcaccttagcagactttcctcggtccttaacatgtgttcttacagtataacttgcagtttcttgtatgtcaggtagctgttagggtcttgttctgtgaagatggcatggtgccctcagcctttgcatatactctctcagtattaactcccagtaaataataaccaaccaaccaaccaaccaaacttccctctcccagcccccgaggctagaaaatcttgctgctccgtcttagcattccaagaaagtgcttccaggtatttagatagccctcagttctcaaatattagactacgtgtaaaatcttgggtacctttagattcttgtaacactagtctgtactcccttttccttccccaagactgataggatgcaagctgaggtcgtggcacaggaatgacagacaccatttggggagtatccacagagtcaaaggaacactagaatccccacctcagcgtgaggataattgatttccagctgcaataagccgtgcctcattatagccacactgtggctagattatacttctttgggtgctgtgctaagaatgtcaatggaaaaagccgatctcagattttgtttgaagttaacatgcctgacacagacatcctttcctctcacaagctgtgtgacttagtagataaaatactgccttctgcctttgggaccatgattaaaaacaaagacaaaaaccaaaagtcatta

SEQ ID NO: 86929 - DNA, 2519 bp, Homo sapiens
gccagacaaagacagtcagtctgatgtgattgagacaagggaggtttttcagggggagactgggagataggggcctcccctcccccttctcctcttcctgcgccggcctcaacccctccccagtcccctcccgacgggcgccccacgcggaagacacccctccccctcccgccttccctcctccctatctcagcccttcgtactgggacgttggggagggggctgtgccgggcggagagaactcagcgaggattctgagaatggtagataacgcagatcatctctggaaaggatattgatccgcctcatgtaaagtatgcttagttcctttccagtggttttgctggaaaccatgtctcattatacagatgaacccagatttaccatagagcagatagatctgcttcagcgacttcggcgtactggaatgactaaacatgaaattctccatgccttggaaactttggaccgtcttgatcaagagcatagtgacaagtttggaagaaggtccagctatggaggaagttcatatgggaatagtactaacaatgtcccagcatcttcctctacagctacagcttccacacagacgcagcattcgggaatgtccccgtcacctagcaacagttatgatacttccccacagccttgcactaccaatcaaaatgggagggagaataatgagcgattatctacatccaatggaaagatgtcaccaactcgctaccatgcaaacagcatgggtcagaggtcatacagttttgaagcctcagaagaggacctagatgtagatgataaagtggaagaattaatgaggagggacagcagtgtgataaaagaggaaatcaaagcctttcttgccaatcggaggatttcccaagcagttgttgcacaggtaacaggtatcagtcagagccggatctctcattggctgttgcagcagggatcagacctgagtgaacagaagaaaagagcattttaccgatggtatcaacttgagaagacaaaccctggcgctacactaagtatgagaccagcccccattccaatagaggaccctgaatggagacaaacgcctcccccagtctctgccacatctggtactttccgactgcgacgagggagtcgatttacctggagaaaggagtgcctggctgttatggaaagttacttcaatgagaatcaatacccagatgaagcaaagagggaagaaattgcaaacgcttgcaatgcagttatacagaagccaggcaaaaagctgtcagatctggaaagagttacctccctgaaagtatataattggtttgctaacagaaggaaggagatcaagaggagagccaatattgaagcagcaatcctggagagtcatgggatagatgtgcagagtccaggaggccactcaaacagtgatgatgtcgacgggaatgactactctgagcaggatacttggcaagtacgcaatggggaggaggaggagggaagaagttcagagggaggcagagaagcagagaaggatgacagtacgagccatagtgaccaccaagaccccatctcattagctgtggaaatggcagcagtcaaccacactatcttggcattggcccgacaaggagccaacgaaatcaagacagaggccctggatgatgactgatcagggagctgcagtatctctcttcctgaggtccagaggccattaaagaataaacatggggcttagaggtgtcttgggccaccaaacacaggaagggacacaggatctctctgaactttggaacagaccctcatattctggggccagaagtttgcccagaaagcagcaggtggctctgcctggctgtagagcccagctcattggctgtccctgggcttcgtctccctcttccgagtagttgctgcctttcttcagatcaggttaccacaatgcctccccgctgctgacgcttcatcccccacacctccagccccagttacctggagcttctcagaacccactttgccggtgctaaaacacaagagggggtgaaagtggctgccagtaatggccagaaaccaaccaccagaggccaggctgaaagacaagctccgggtgtccaggggctgacgggccaaccatgtggcaggtcccaggccccacccactgcgccatccgcctctgagctccacagtggtcccactaatgggaacctcctctagggagagtgatactgcaccttcacccgtaggactcatatttataacaatgtgtaatggctgtagcaaaaagcccttgtttctagatgtaaatggtcaaagaaacaagcgctctattgttttgaataaaatagttcaaatgagtcctgtatcattgtatctcctattctggattagtgccttttggacagtagactgttctgtaattaaaatgtagtatactgcttttttgtacagttttgttttaataaaacttttttttaatttgtgtttattttagtattgtacctattagagaataaaatgtataactgaaaaaaaaaaaactg

SEQ ID NO: 86930 - DNA, 2432 bp, Homo sapiens
gccagacaaagacagtcagtctgatgtgattgagacaagggaggtttttcagggggagactgggagataggggcctcccctcccccttctcctcttcctgcgccggcctcaacccctccccagtcccctcccgacgggcgccccacgcggaagacacccctccccctcccgccttccctcctccctatctcagcccttcgtactgggacgttggggagggggctgtgccgggcggagagaactcagcgaggattctgagaatggtagataacgcagatcatctctggaaaggatattgatccgcctcatgtaaagtatgcttagttcctttccagtggttttgctggaaaccatgtctcattatacagatgaacccagatttaccatagagcagatagatctgcttcagcgacttcggcgtactggaatgactaaacatgaaattctccatgccttggaaactttggaccgtcttgatcaagagcatagtgacaagtttggaagaaggtccagctatggaggaagttcatatgggaatagtactaacaatgtcccagcatcttcctctacagctacagcttccacacagacgcagcattcgggaatgtccccgtcacctagcaacagttatgatacttccccacagccttgcactaccaatcaaaatgggagggagaataatgagcgattatctacatccaatggaaagatgtcaccaactcgctaccatgcaaacagcatgggtcagaggtcatacagttttgaagcctcagaagaggacctagatgtagatgataaagtggaagaattaatgaggagggacagcagtgtgataaaagaggaaatcaaagcctttcttgccaatcggaggatttcccaagcagttgttgcacaggtaacaggtatcagtcagagccggatctctcattggctgttgcagcagggatcagacctgagtgaacagaagaaaagagcattttaccgatggtatcaacttgagaagacaaaccctggcgctacactaagtatgagaccagcccccattccaatagaggaccctgaatggagacaaacgcctcccccagtctctgccacatctggtactttccgactgcgacgagggagtcgatttacctggagaaaggagtgcctggctgttatggaaagttacttcaatgagaatcaatacccagatgaagcaaagagggaagaaattgcaaacgcttgcaatgcagttatacagaagccaggcaaaaagctgtcagatctggaaagagttacctccctgaaagtatataattggtttgctaacagaaggaaggagatcaagaggagagccaatattgaagcagcaatcctggagagtcatgggatagatgtgcagagtccaggaggccactcaaacagtgatgatgtcgacgggaatgactactctgagcaggatacttggcaagtacgcaatggggaggaggaggagggaagaagttcagagggaggcagagaagcagagaaggtagaagaagagaggaggatctgatccaaacaagatgacagtacgagccatagtgaccaccaagaccccatctcattagctgtggaaatggcagcagtcaaccacactatcttggcattggcccgacaaggagccaacgaaatcaagacagaggccctggatgatgactgatcagggaggttaaacatgacaagttaacttagtttagacgtagcaccttagcagactttcctcggtccttaacatgtgttcttacagtataacttgcagtttcttgtatgtcaggtagctgttagggtcttgttctgtgaagatggcatggtgccctcagcctttgcatatactctctcagtattaactcccagtaaataataaccaaccaaccaaccaaccaaacttccctctcccagcccccgaggctagaaaatcttgctgctccgtcttagcattccaagaaagtgcttccaggtatttagatagccctcagttctcaaatattagactacgtgtaaaatcttgggtacctttagattcttgtaacactagtctgtactcccttttccttccccaagactgataggatgcaagctgaggtcgtggcacaggaatgacagacaccatttggggagtatccacagagtcaaaggaacactagaatccccacctcagcgtgaggataattgatttccagctgcaataagccgtgcctcattatagccacactgtggctagattatacttctttgggtgctgtgctaagaatgtcaatggaaaaagccgatctcagattttgtttgaagttaacatgcctgacacagacatcctttcctctcacaagctgtgtgacttagtagataaaatactgccttctgcctttgggaccatgattaaaaacaaagacaaaaaccaaaagtcatta

SEQ ID NO: 86931 - DNA, 1654 bp, Homo sapiens
cagagagggaccatgaattctaataatctatttgtaagagcagcaatctggaatttaatagctcactagtatggccttcagtgattagtgctatatttgttacaaacagaaagatccaaattgttggttttatatcaatcactgcaggtttgatcatcatcaccagcaatcttattaatagaatgaatagaattctcagtgatgaaaaacattttttgtgctttttacttgttgaatcataagattatcaactgaaaatctttggacctatatccattcagtgtctacttaaatacaatttacctctattttatcatgagcccctcccccagtttcctcccacgaatgttctgcctccccttgccccagcatgtctctctgtgactaaagaattcttccaatccactaataacatttcttatttctgcacatctaggatgacagtacgagccatagtgaccaccaagaccccatctcattagctgtggaaatggcagcagtcaaccacactatcttggcattggcccgacaaggagccaacgaaatcaagacagaggccctggatgatgactgatcagggagctgcagtatctctcttcctgaggtccagaggccattaaagaataaacatggggcttagaggtgtcttgggccaccaaacacaggtaagccaacagagttcggctcccgtacgtggtgtggtgggacctggggcctggagccacttgtactcctggggtgggactgagggagggaaagggctcccccacttcaggctggtcactgtatgttgacttccctctgggaagcaaaattccacttgtaaaaatcagcttccaagacaaaagatgatccgatgtcacttctgggtcaccaggaagggacacaggatctctctgaactttggaacagaccctcatattctggggccagaagtttgcccagaaagcagcaggtggctctgcctggctgtagagcccagctcattggctgtccctgggcttcgtctccctcttccgagtagttgctgcctttcttcagatcaggttaccacaatgcctccccgctgctgacgcttcatcccccacacctccagccccagttacctggagcttctcagaacccactttgccggtgctaaaacacaagagggggtgaaagtggctgccagtaatggccagaaaccaaccaccagaggccaggctgaaagacaagctccgggtgtccaggggctgacgggccaaccatgtggcaggtcccaggccccacccactgcgccatccgcctctgagctccacagtggtcccactaatgggaacctcctctagggagagtgatactgcaccttcacccgtaggactcatatttataacaatgtgtaatggctgtagcaaaaagcccttgtttctagatgtaaatggtcaaagaaacaagcgctctattgttttgaataaaatagttcaaatgagtcctgtatcattgtatctcctattctggattagtgccttttggacagtagactgttctgtaattaaaatgtagtatactgcttttttgtacagttttgttttaataaaacttttttttaatttgtgtttattttagtattgtacctattagagaataaaatgtataactgaaaaaaaaaaaactg

SEQ ID NO: 86932 - DNA, 2399 bp, Homo sapiens
gccagacaaagacagtcagtctgatgtgattgagacaagggaggtttttcagggggagactgggagataggggcctcccctcccccttctcctcttcctgcgccggcctcaacccctccccagtcccctcccgacgggcgccccacgcggaagacacccctccccctcccgccttccctcctccctatctcagcccttcgtactgggacgttggggagggggctgtgccgggcggagagaactcagcgaggattctgagaatggtagataacgcagatcatctctggaaaggatattgatccgcctcatgtaaagtatgcttagttcctttccagtggttttgctggaaaccatgtctcattatacagatgaacccagatttaccatagagcagatagatctgcttcagcgacttcggcgtactggaatgactaaacatgaaattctccatgccttggaaactttggaccgtcttgatcaagagcatagtgacaagtttggaagaaggtccagctatggaggaagttcatatgggaatagtactaacaatgtcccagcatcttcctctacagctacagcttccacacagacgcagcattcgggaatgtccccgtcacctagcaacagttatgatacttccccacagccttgcactaccaatcaaaatgggagggagaataatgagcgattatctacatccaatggaaagatgtcaccaactcgctaccatgcaaacagcatgggtcagaggtcatacagttttgaagcctcagaagaggacctagatgtagatgataaagtggaagaattaatgaggagggacagcagtgtgataaaagaggaaatcaaagcctttcttgccaatcggaggatttcccaagcagttgttgcacaggtaacaggtatcagtcagagccggatctctcattggctgttgcagcagggatcagacctgagtgaacagaagaaaagagcattttaccgatggtatcaacttgagaagacaaaccctggcgctacactaagtatgagaccagcccccattccaatagaggaccctgaatggagacaaacgcctcccccagtctctgccacatctggtactttccgactgcgacgagggagtcgatttacctggagaaaggagtgcctggctgttatggaaagttacttcaatgagaatcaatacccagatgaagcaaagagggaagaaattgcaaacgcttgcaatgcagttatacagaagccaggcaaaaagctgtcagatctggaaagagttacctccctgaaagtatataattggtttgctaacagaaggaaggagatcaagaggagagccaatattgaagcagcaatcctggagagtcatgggatagatgtgcagagtccaggaggccactcaaacagtgatgatgtcgacgggaatgactactctgagcaggatacttggcaagtacgcaatggggaggaggaggagggaagaagttcagagggaggcagagaagcagagaaggatgacagtacgagccatagtgaccaccaagaccccatctcattagctgtggaaatggcagcagtcaaccacactatcttggcattggcccgacaaggagccaacgaaatcaagacagaggccctggatgatgactgatcagggaggttaaacatgacaagttaacttagtttagacgtagcaccttagcagactttcctcggtccttaacatgtgttcttacagtataacttgcagtttcttgtatgtcaggtagctgttagggtcttgttctgtgaagatggcatggtgccctcagcctttgcatatactctctcagtattaactcccagtaaataataaccaaccaaccaaccaaccaaacttccctctcccagcccccgaggctagaaaatcttgctgctccgtcttagcattccaagaaagtgcttccaggtatttagatagccctcagttctcaaatattagactacgtgtaaaatcttgggtacctttagattcttgtaacactagtctgtactcccttttccttccccaagactgataggatgcaagctgaggtcgtggcacaggaatgacagacaccatttggggagtatccacagagtcaaaggaacactagaatccccacctcagcgtgaggataattgatttccagctgcaataagccgtgcctcattatagccacactgtggctagattatacttctttgggtgctgtgctaagaatgtcaatggaaaaagccgatctcagattttgtttgaagttaacatgcctgacacagacatcctttcctctcacaagctgtgtgacttagtagataaaatactgccttctgcctttgggaccatgattaaaaacaaagacaaaaaccaaaagtcatta

SEQ ID NO: 86933 - DNA, 1128 bp, Homo sapiens
attcggcacgtgggaagcagagaaggtagaagaagagaggaggatctgatccaaacaaggacttaccctttccaaagctctttgatacggagttcccctgaagatgacaggtgagaaacataccccttatttgtaacaccatcttcagtgcctgacgtacatcctgcaatgccagcttccttcacagctttattgtttaacacattgagtgcgcggggaggacagcttcacactagttctaggatgacagtacgagccatagtgaccaccaagaccccatctcattagctgtggaaatggcagcagtcaaccacactatcttggcattggcccgacaaggagccaacgaaatcaagacagaggccctggatgatgactgatcagggaggttaaacatgacaagttaacttagtttagacgtagcaccttagcagactttcctcggtccttaacatgtgttcttacagtataacttgcagtttcttgtatgtcaggtagctgttagggtcttgttctgtgaagatggcatggtgccctcagcctttgcatatactctctcagtattaactcccagtaaataataaccaaccaaccaaccaaccaaacttccctctcccagcccccgaggctagaaaatcttgctgctccgtcttagcattccaagaaagtgcttccaggtatttagatagccctcagttctcaaatattagactacgtgtaaaatcttgggtacctttagattcttgtaacactagtctgtactcccttttccttccccaagactgataggatgcaagctgaggtcgtggcacaggaatgacagacaccatttggggagtatccacagagtcaaaggaacactagaatccccacctcagcgtgaggataattgatttccagctgcaataagccgtgcctcattatagccacactgtggctagattatacttctttgggtgctgtgctaagaatgtcaatggaaaaagccgatctcagattttgtttgaagttaacatgcctgacacagacatcctttcctctcacaagctgtgtgacttagtagataaaatactgccttctgcctttgggaccatgattaaaaacaaagacaaaaaccaaaagtcatta

SEQ ID NO: 86934 - DNA, 2930 bp, Homo sapiens
gccagacaaagacagtcagtctgatgtgattgagacaagggaggtttttcagggggagactgggagataggggcctcccctcccccttctcctcttcctgcgccggcctcaacccctccccagtcccctcccgacgggcgccccacgcggaagacacccctccccctcccgccttccctcctccctatctcagcccttcgtactgggacgttggggagggggctgtgccgggcggagagaactcagcgaggattctgagaatggtagataacgcagatcatctctggaaaggatattgatccgcctcatgtaaagtatgcttagttcctttccagtggttttgctggaaaccatgtctcattatacagatgaacccagatttaccatagagcagatagatctgcttcagcgacttcggcgtactggaatgactaaacatgaaattctccatgccttggaaactttggaccgtcttgatcaagagcatagtgacaagtttggaagaaggtccagctatggaggaagttcatatgggaatagtactaacaatgtcccagcatcttcctctacagctacagcttccacacagacgcagcattcgggaatgtccccgtcacctagcaacagttatgatacttccccacagccttgcactaccaatcaaaatgggagggagaataatgagcgattatctacatccaatggaaagatgtcaccaactcgctaccatgcaaacagcatgggtcagaggtcatacagttttgaagcctcagaagaggacctagatgtagatgataaagtggaagaattaatgaggagggacagcagtgtgataaaagaggaaatcaaagcctttcttgccaatcggaggatttcccaagcagttgttgcacaggtaacaggtatcagtcagagccggatctctcattggctgttgcagcagggatcagacctgagtgaacagaagaaaagagcattttaccgatggtatcaacttgagaagacaaaccctggcgctacactaagtatgagaccagcccccattccaatagaggaccctgaatggagacaaacgcctcccccagtctctgccacatctggtactttccgactgcgacgagggagtcgatttacctggagaaaggagtgcctggctgttatggaaagttacttcaatgagaatcaatacccagatgaagcaaagagggaagaaattgcaaacgcttgcaatgcagttatacagaagccaggcaaaaagctgtcagatctggaaagagttacctccctgaaagtatataattggtttgctaacagaaggaaggagatcaagaggagagccaatattgaagcagcaatcctggagagtcatgggatagatgtgcagagtccaggaggccactcaaacagtgatgatgtcgacgggaatgactactctgagcaggatgacagtacgagccatagtgaccaccaagaccccatctcattagctgtggaaatggcagcagtcaaccacactatcttggcattggcccgacaaggagccaacgaaatcaagacagaggccctggatgatgactgatcagggaggttaaacatgacaagttaacttagtttagacgtagcaccttagcagactttcctcggtccttaacatgtgttcttacagtataacttgcagtttcttgtatgtcaggtagctgttagggtcttgttctgtgaagatggcatggtgccctcagcctttgcatatactctctcagtattaactcccagtaaataataaccaaccaaccaaccaaccaaacttccctctcccagcccccgaggctagaaaatcttgctgctccgtcttagcattccaagaaagtgcttccaggtatttagatagccctcagttctcaaatattagactacgtgtaaaatcttgggtacctttagattcttgtaacactagtctgtactcccttttccttccccaagactgataggatgcaagctgaggtcgtggcacaggaatgacagacaccatttggggagtatccacagagtcaaaggaacactagaatccccacctcagcgtgaggataattgatttccagctgcaataagccgtgcctcattatagccacactgtggctagattatacttctttgggtgctgtgctaagaatgtcaatggaaaaagccgatctcagattttgtttgaagttaacatgcctgacacagacatcctttcctctcacaagctgtgtgacttagtagataaaatactgccttctgcctttgggaccatgattaaaaacaaagacaaaaaccaaaagtcattaaaaaaaaataattgatttccagctgcaataagccgtgcctcattatagccacactgtggctagattatacttctttgggtgctgtgctaagaatgtcaatggaaaaagccgatctcagattttgtttgaagttaacatgcctgacacagacatcctttcctctcacaagctgtgtgacttagtagataaaatactgccttctgcctttgggaccatgattaaaaacaaagacaaaaaccaaaagtcattaaaaaaaaaaaacccagcttgagagcattggaaaaaaaaaatatgagctgaatgtctaatggatgctaagtccagttttcagaaccactgtacattccatggcacagttagcagtgcctgcctggaaaagttttggaggtcatcgtggaagttgctttgcctcctgtcagtgtcccctttccctgctaccaaaaaagtctttcaaggatggagctaaggtcaaaaatgagtgaaaaaacttgcagtgtttgtatccattaaacggaagccccctcactctgagaggtcactagaggacttcatagtggggttgtgctgcttatcacagatgcagacacttgcccagataggagc

SEQ ID NO: 86935 - DNA, 629 bp, Homo sapiens
tccacttaagtatttttgctggttattagcatttgcttggacttagcttagcaaatcatttgttctcactaaatgaggttgtagagaattcctaggtctgtttagctaatatttggtaaataatataatacaaactatttttttcagtaattttccattaatactctaatgtagagtaatacacttgagatgggcaaaacacttctgagttatcacgtagcctgggcttattgcactccatgtacctaatctattgttctggtattatttacataactaaaattttggttctgatatttaccaaaattgaggaaaatgtaaattgtatgccatatgaaattaggttttatgttacacctatgttcacctactaatacatttagtatctgtaccaatccatttgccatggcacaatcattctagcatgggacataccttcattttcaatacagaagcttatgtagaaatattgcatcttctgagcattctgtataatatgtgctttggtagatactgtcaataaagagacttctttttatctctttttttttagtttgctggaaaccatgtctcattatacagatgaacccagatttaccatagagcagatagatctgcttcagcgactt

SEQ ID NO: 86936 - DNA, 3372 bp, Homo sapiens
tagagcacggtcacaggaaggcctctgctgggccgagtctgcggtccctgagccatcacagcactggcgtcttcagacacaccctggctgcaaggcaggacactccccctgccgagagacaccatgtgcgtcatcattgcctcccctggaagagcccacagccttctatgatctcccccccgggctcgccctgccttccacggccatggtcacgttgggtatgcagtacttttcaaggataaatttttgtttatgttttttaagtgcctaagcaagatacagacctctggaacctgccagagagtcggcctatgccctgtccccatccctccccaccctgcactggcccttgagggtgggcacagggcggctgcccctctccagtgtccctggcgttctgcaggcagaacaaggcaaggacaagctagcgggagagatcgcttcacagccatatcaggctggcttcgtcactgttttccagcgtttctttctttagggccgtttctgtttatgtggtttggtcttggttcatagagaatttaagagtctgcttagggaaatctcagtagccactaagaagacaggagagcaagacagcctcagagcagcattccagctctggctttggtaggagttggaaatgtgtccacatccaagagggcgaagcgtcgaatcatcctagctcatgagcctgctgactcacctgccagcgtgagccaccggagccccagctgcctttccgagccctctctgcctagactagagggatcagggtgtctgctcgggagggcttgggaaagccagcaatcaggcgttcagatcccaagtgtgtctttggaaatgagtgtgagagtatttgtttcttttttaaaaaataatttaagtctgacctaaatatggggcctttattctgtgatgggtgtacgacagattattttgtgactgcagtctgttcaaatcacatcactaagcagcgctgagatgatttgttggtgcattaaaaggttttgcatcatggaacaatccatacccaggcactttattttcattaataatccagcatttttgttcagacaatgtaataacccaaacactgggtattcatatttgacacatgggcaaacttgccagtggaatggaattgtgacctgacagagaagggaaggcaggctgacgaaggtgatcgaatgggagaacagtgctgtggtgatcatgagaatgaggcttttctgtagcatgtaaaccaaaccggacccttggcagttcgtcgtccctcagttctccagatgctattttttgcaggttctaccaagtgcttgttgattaccctagttgtaattatctagggaagagatgaatgtaagtgagagtgcagagcactggggagggtgacagtgaaatgcgattagaggcagcaagagagtcctagtctgttctcacataaccggacttgaacgctccagtgcgagcagagtgctgggggtggattccactgccgaaccacggcagctttgctttactcttcagcatgggggtggtaactagctgcacagcaagttatgaaatggaaagcaagcttaacagctgtaatctcatcggataccctggagcaaatgccttgggattgcctgaagtgaagtgtttagcatccaccaaatagttgagtttctaagatgggccatgcgggatccctgccacacgggtgtgggggcagcgcgctcctccctgcctcggctgctgtgtgtcttagtcttcatgtttccccttggcgtctcctctggtccctgtccatcttgtgcaccatgtgtccctgagggcgagtcacacctgtgtcttgagtctgctgtaaggtgttcagtctacctcaaggggtcatcatggtaagctctatcccacggcatcctccgtccatcaccacacacactggaatgtatcccccccgccctgccccttcgataacctcctgaccttgtctttcctataatcaccacaaactcctagtgcaaattggatgctgctttaaatgtgaaaacaattgttcaaaagctataaaacctgaatgaaagctgaagctgaatttataagccttgttgcatatgagccaaaagtgcaaaaagctctatataatgaactaacctgccactcgtataaatataaatatatataaatatattaaaatcagactgttctacaaaattgtgtatttgtatttttgtgtacgtacaattttctgctaagcagaaggaggatgtagtataggatgctgtgagaagagatttggtttaatcctatttctttgttacttatttttgttaacatcagatgcctgtctttgtcttatatgtgtatgacactgtttgggaaagctgcagtatctctcttcctgaggtccagaggccattaaagaataaacatggggcttagaggtgtcttgggccaccaaacacaggtaagccaacagagttcggctcccgtacgtggtgtggtgggacctggggcctggagccacttgtactcctggggtgggactgagggagggaaagggctcccccacttcaggctggtcactgtatgttgacttccctctgggaagcaaaattccacttgtaaaaatcagcttccaagacaaaagatgatccgatgtcacttctgggtcaccaggaagggacacaggatctctctgaactttggaacagaccctcatattctggggccagaagtttgcccagaaagcagcaggtggctctgcctggctgtagagcccagctcattggctgtccctgggcttcgtctccctcttccgagtagttgctgcctttcttcagatcaggttaccacaatgcctccccgctgctgacgcttcatcccccacacctccagccccagttacctggagcttctcagaacccactttgccggtgctaaaacacaagagggggtgaaagtggctgccagtaatggccagaaaccaaccaccagaggccaggctgaaagacaagctccgggtgtccaggggctgacgggccaaccatgtggcaggtcccaggccccacccactgcgccatccgcctctgagctccacagtggtcccactaatgggaacctcctctagggagagtgatactgcaccttcacccgtaggactcatatttataacaatgtgtaatggctgtagcaaaaagcccttgtttctagatgtaaatggtcaaagaaacaagcgctctattgttttgaataaaatagttcaaatgagtcctgtatcattgtatctcctattctggattagtgccttttggacagtagactgttctgtaattaaaatgtagtatactgcttttttgtacagttttgttttaataaaactttttttta

SEQ ID NO: 86937 - DNA, 3438 bp, Homo sapiens
tagagcacggtcacaggaaggcctctgctgggccgagtctgcggtccctgagccatcacagcactggcgtcttcagacacaccctggctgcaaggcaggacactccccctgccgagagacaccatgtgcgtcatcattgcctcccctggaagagcccacagccttctatgatctcccccccgggctcgccctgccttccacggccatggtcacgttgggtatgcagtacttttcaaggataaatttttgtttatgttttttaagtgcctaagcaagatacagacctctggaacctgccagagagtcggcctatgccctgtccccatccctccccaccctgcactggcccttgagggtgggcacagggcggctgcccctctccagtgtccctggcgttctgcaggcagaacaaggcaaggacaagctagcgggagagatcgcttcacagccatatcaggctggcttcgtcactgttttccagcgtttctttctttagggccgtttctgtttatgtggtttggtcttggttcatagagaatttaagagtctgcttagggaaatctcagtagccactaagaagacaggagagcaagacagcctcagagcagcattccagctctggctttggtaggagttggaaatgtgtccacatccaagagggcgaagcgtcgaatcatcctagctcatgagcctgctgactcacctgccagcgtgagccaccggagccccagctgcctttccgagccctctctgcctagactagagggatcagggtgtctgctcgggagggcttgggaaagccagcaatcaggcgttcagatcccaagtgtgtctttggaaatgagtgtgagagtatttgtttcttttttaaaaaataatttaagtctgacctaaatatggggcctttattctgtgatgggtgtacgacagattattttgtgactgcagtctgttcaaatcacatcactaagcagcgctgagatgatttgttggtgcattaaaaggttttgcatcatggaacaatccatacccaggcactttattttcattaataatccagcatttttgttcagacaatgtaataacccaaacactgggtattcatatttgacacatgggcaaacttgccagtggaatggaattgtgacctgacagagaagggaaggcaggctgacgaaggtgatcgaatgggagaacagtgctgtggtgatcatgagaatgaggcttttctgtagcatgtaaaccaaaccggacccttggcagttcgtcgtccctcagttctccagatgctattttttgcaggttctaccaagtgcttgttgattaccctagttgtaattatctagggaagagatgaatgtaagtgagagtgcagagcactggggagggtgacagtgaaatgcgattagaggcagcaagagagtcctagtctgttctcacataaccggacttgaacgctccagtgcgagcagagtgctgggggtggattccactgccgaaccacggcagctttgctttactcttcagcatgggggtggtaactagctgcacagcaagttatgaaatggaaagcaagcttaacagctgtaatctcatcggataccctggagcaaatgccttgggattgcctgaagtgaagtgtttagcatccaccaaatagttgagtttctaagatgggccatgcgggatccctgccacacgggtgtgggggcagcgcgctcctccctgcctcggctgctgtgtgtcttagtcttcatgtttccccttggcgtctcctctggtccctgtccatcttgtgcaccatgtgtccctgagggcgagtcacacctgtgtcttgagtctgctgtaaggtgttcagtctacctcaaggggtcatcatggtaagctctatcccacggcatcctccgtccatcaccacacacactggaatgtatcccccccgccctgccccttcgataacctcctgaccttgtctttcctataatcaccacaaactcctagtgcaaattggatgctgctttaaatgtgaaaacaattgttcaaaagctataaaacctgaatgaaagctgaagctgaatttataagccttgttgcatatgagccaaaagtgcaaaaagctctatataatgaactaacctgccactcgtataaatataaatatatataaatatattaaaatcagactgttctacaaaattgtgtatttgtatttttgtgtacgtacaattttctgctaagcagaaggaggatgtagtataggatgctgtgagaagagatttggtttaatcctatttctttgttacttatttttgttaacatcagatgcctgtctttgtcttatatgtgtatgacactgtttgggaaagctgcagtatctctcttcctgaggtccagaggccattaaagaataaacatggggcttagaggtgtcttgggccaccaaacacaggtaagccaacagagttcggctcccgtacgtggtgtggtgggacctggggcctggagccacttgtactcctggggtgggactgagggagggaaagggctcccccacttcaggctggtcactgtatgttgacttccctctgggaagcaaaattccacttgtaaaaatcagcttccaagacaaaagatgatccgatgtcacttctgggtcaccaggaagggacacaggatctctctgaactttggaacagaccctcatattctggggccagaagtttgcccagaaagcagcaggtggctctgcctggctgtagagcccagctcattggctgtccctgggcttcgtctccctcttccgagtagttgctgcctttcttcagatcaggttaccacaatgcctccccgctgctgacgcttcatcccccacacctccagccccagttacctggagcttctcagaacccactttgccggtgctaaaacacaagagggggtgaaagtggctgccagtaatggccagaaaccaaccaccagaggccaggctgaaagacaagctccgggtgtccaggggctgacgggccaaccatgtggcaggtcccaggccccacccactgcgccatccgcctctgagctccacagtggtcccactaatgggaacctcctctagggagagtgatactgcaccttcacccgtaggactcatatttataacaatgtgtaatggctgtagcaaaaagcccttgtttctagatgtaaatggtcaaagaaacaagcgctctattgttttgaataaaatagttcaaatgagtcctgtatcattgtatctcctattctggattagtgccttttggacagtagactgttctgtaattaaaatgtagtatactgcttttttgtacagttttgttttaataaaacttttttttaatttgtgtttattttagtattgtacctattagagaataaaatgtataactgaaaaaaaaaaaactg

SEQ ID NO: 86938 - DNA, 2731 bp, Homo sapiens
gccagacaaagacagtcagtctgatgtgattgagacaagggaggtttttcagggggagactgggagataggggcctcccctcccccttctcctcttcctgcgccggcctcaacccctccccagtcccctcccgacgggcgccccacgcggaagacacccctccccctcccgccttccctcctccctatctcagcccttcgtactgggacgttggggagggggctgtgccgggcggagagaactcagcgaggattctgagaatggtagataacgcagatcatctctggaaaggatattgatccgcctcatgtaaagtatgcttagttcctttccagtggttttgctggaaaccatgtctcattatacagatgaacccagatttaccatagagcagatagatctgcttcagcgacttcggcgtactggaatgactaaacatgaaattctccatgccttggaaactttggaccgtcttgatcaagagcatagtgacaagtttggaagaaggtccagctatggaggaagttcatatgggaatagtactaacaatgtcccagcatcttcctctacagctacagcttccacacagacgcagcattcgggaatgtccccgtcacctagcaacagttatgatacttccccacagccttgcactaccaatcaaaatgggagggagaataatgagcgattatctacatccaatggaaagatgtcaccaactcgctaccatgcaaacagcatgggtcagaggtcatacagttttgaagcctcagaagaggacctagatgtagatgataaagtggaagaattaatgaggagggacagcagtgtgataaaagaggaaatcaaagcctttcttgccaatcggaggatttcccaagcagttgttgcacaggtaacaggtatcagtcagagccggatctctcattggctgttgcagcagggatcagacctgagtgaacagaagaaaagagcattttaccgatggtatcaacttgagaagacaaaccctggcgctacactaagtatgagaccagcccccattccaatagaggaccctgaatggagacaaacgcctcccccagtctctgccacatctggtactttccgactgcgacgagggagtcgatttacctggagaaaggagtgcctggctgttatggaaagttacttcaatgagaatcaatacccagatgaagcaaagagggaagaaattgcaaacgcttgcaatgcagttatacagaagccaggcaaaaagctgtcagatctggaaagagttacctccctgaaagtatataattggtttgctaacagaaggaaggagatcaagaggagagccaatattgaagcagcaatcctggagagtcatgggatagatgtgcagagtccaggaggccactcaaacagtgatgatgtcgacgggaatgactactctgagcaggatacttggcaagtacgcaatggggaggaggaggagggaagaagttcagagggaggcagagaagcagagaaggatgacagtacgagccatagtgaccaccaagaccccatctcattagctgtggaaatggcagcagtcaaccacactatcttggcattggcccgacaaggagccaacgaaatcaagacagaggccctggatgatgactgatcagggagctgcagtatctctcttcctgaggtccagaggccattaaagaataaacatggggcttagaggtgtcttgggccaccaaacacaggtaagccaacagagttcggctcccgtacgtggtgtggtgggacctggggcctggagccacttgtactcctggggtgggactgagggagggaaagggctcccccacttcaggctggtcactgtatgttgacttccctctgggaagcaaaattccacttgtaaaaatcagcttccaagacaaaagatgatccgatgtcacttctgggtcaccaggaagggacacaggatctctctgaactttggaacagaccctcatattctggggccagaagtttgcccagaaagcagcaggtggctctgcctggctgtagagcccagctcattggctgtccctgggcttcgtctccctcttccgagtagttgctgcctttcttcagatcaggttaccacaatgcctccccgctgctgacgcttcatcccccacacctccagccccagttacctggagcttctcagaacccactttgccggtgctaaaacacaagagggggtgaaagtggctgccagtaatggccagaaaccaaccaccagaggccaggctgaaagacaagctccgggtgtccaggggctgacgggccaaccatgtggcaggtcccaggccccacccactgcgccatccgcctctgagctccacagtggtcccactaatgggaacctcctctagggagagtgatactgcaccttcacccgtaggactcatatttataacaatgtgtaatggctgtagcaaaaagcccttgtttctagatgtaaatggtcaaagaaacaagcgctctattgttttgaataaaatagttcaaatgagtcctgtatcattgtatctcctattctggattagtgccttttggacagtagactgttctgtaattaaaatgtagtatactgcttttttgtacagttttgttttaataaaacttttttttaatttgtgtttattttagtattgtacctattagagaataaaatgtataactgaaaaaaaaaaaactg

SEQ ID NO: 86939 - DNA, 2860 bp, Homo sapiens
tagagcacggtcacaggaaggcctctgctgggccgagtctgcggtccctgagccatcacagcactggcgtcttcagacacaccctggctgcaaggcaggacactccccctgccgagagacaccatgtgcgtcatcattgcctcccctggaagagcccacagccttctatgatctcccccccgggctcgccctgccttccacggccatggtcacgttgggtatgcagtacttttcaaggataaatttttgtttatgttttttaagtgcctaagcaagatacagacctctggaacctgccagagagtcggcctatgccctgtccccatccctccccaccctgcactggcccttgagggtgggcacagggcggctgcccctctccagtgtccctggcgttctgcaggcagaacaaggcaaggacaagctagcgggagagatcgcttcacagccatatcaggctggcttcgtcactgttttccagcgtttctttctttagggccgtttctgtttatgtggtttggtcttggttcatagagaatttaagagtctgcttagggaaatctcagtagccactaagaagacaggagagcaagacagcctcagagcagcattccagctctggctttggtaggagttggaaatgtgtccacatccaagagggcgaagcgtcgaatcatcctagctcatgagcctgctgactcacctgccagcgtgagccaccggagccccagctgcctttccgagccctctctgcctagactagagggatcagggtgtctgctcgggagggcttgggaaagccagcaatcaggcgttcagatcccaagtgtgtctttggaaatgagtgtgagagtatttgtttcttttttaaaaaataatttaagtctgacctaaatatggggcctttattctgtgatgggtgtacgacagattattttgtgactgcagtctgttcaaatcacatcactaagcagcgctgagatgatttgttggtgcattaaaaggttttgcatcatggaacaatccatacccaggcactttattttcattaataatccagcatttttgttcagacaatgtaataacccaaacactgggtattcatatttgacacatgggcaaacttgccagtggaatggaattgtgacctgacagagaagggaaggcaggctgacgaaggtgatcgaatgggagaacagtgctgtggtgatcatgagaatgaggcttttctgtagcatgtaaaccaaaccggacccttggcagttcgtcgtccctcagttctccagatgctattttttgcaggttctaccaagtgcttgttgattaccctagttgtaattatctagggaagagatgaatgtaagtgagagtgcagagcactggggagggtgacagtgaaatgcgattagaggcagcaagagagtcctagtctgttctcacataaccggacttgaacgctccagtgcgagcagagtgctgggggtggattccactgccgaaccacggcagctttgctttactcttcagcatgggggtggtaactagctgcacagcaagttatgaaatggaaagcaagcttaacagctgtaatctcatcggataccctggagcaaatgccttgggattgcctgaagtgaagtgtttagcatccaccaaatagttgagtttctaagatgggccatgcgggatccctgccacacgggtgtgggggcagcgcgctcctccctgcctcggctgctgtgtgtcttagtcttcatgtttccccttggcgtctcctctggtccctgtccatcttgtgcaccatgtgtccctgagggcgagtcacacctgtgtcttgagtctgctgtaaggtgttcagtctacctcaaggggtcatcatggtaagctctatcccacggcatcctccgtccatcaccacacacactggaatgtatcccccccgccctgccccttcgataacctcctgaccttgtctttcctataatcaccacaaactcctagtgcaaattggatgctgctttaaatgtgaaaacaattgttcaaaagctataaaacctgaatgaaagctgaagctgaatttataagccttgttgcatatgagccaaaagtgcaaaaagctctatataatgaactaacctgccactcgtataaatataaatatatataaatatattaaaatcagactgttctacaaaattgtgtatttgtatttttgtgtacgtacaattttctgctaagcagaaggaggatgtagtataggatgctgtgagaagagatttggtttaatcctatttctttgttacttatttttgttaacatcagatgcctgtctttgtcttatatgtgtatgacactgtttgggaaagctgcagtatctctcttcctgaggtccagaggccattaaagaataaacatggggcttagaggtgtcttgggccaccaaacacaggtaagccaacagagttcggctcccacccactgcgccatccgcctctgagctccacagtggtcccactaatgggaacctcctctagggagagtgatactgcaccttcacccgtaggactcatatttataacaatgtgtaatggctgtagcaaaaagcccttgtttctagatgtaaatggtcaaagaaacaagcgctctattgttttgaataaaatagttcaaatgagtcctgtatcattgtatctcctattctggattagtgccttttggacagtagactgttctgtaattaaaatgtagtatactgcttttttgtacagttttgttttaataaaacttttttttaatttgtgtttattttagtattgtacctattagagaataaaatgtataactgaaaaaaaaaaaactg

SEQ ID NO: 86940 - DNA, 1788 bp, Homo sapiens
gccagacaaagacagtcagtctgatgtgattgagacaagggaggtttttcagggggagactgggagataggggcctcccctcccccttctcctcttcctgcgccggcctcaacccctccccagtcccctcccgacgggcgccccacgcggaagacacccctccccctcccgccttccctcctccctatctcagcccttcgtactgggacgttggggagggggctgtgccgggcggagagaactcagcgaggattctgagaatggtagataacgcagatcatctctggaaaggatattgatccgcctcatgtaaagtatgcttagttcctttccagtggttttgctggaaaccatgtctcattatacagatgaacccagatttaccatagagcagatagatctgcttcagcgacttcggcgtactggaatgactaaacatgaaattctccatgccttggaaactttggaccgtcttgatcaagagcatagtgacaagtttggaagaaggtccagctatggaggaagttcatatgggaatagtactaacaatgtcccagcatcttcctctacagctacagcttccacacagacgcagcattcgggaatgtccccgtcacctagcaacagttatgatacttccccacagccttgcactaccaatcaaaatgggagggagaataatgagcgattatctacatccaatggaaagatgtcaccaactcgctaccatgcaaacagcatgggtcagaggtcatacagttttgaagcctcagaagaggacctagatgtagatgataaagtggaagaattaatgaggagggacagcagtgtgataaaagaggaaatcaaagcctttcttgccaatcggaggatttcccaagcagttgttgcacaggtaacaggtatcagtcagagccggatctctcattggctgttgcagcagggatcagacctgagtgaacagaagaaaagagcattttaccgatggtatcaacttgagaagacaaaccctggcgctacactaagtatgagaccagcccccattccaatagaggaccctgaatggagacaaacgcctcccccagtctctgccacatctggtactttccgactgcgacgagggagtcgatttacctggagaaaggagtgcctggctgttatggaaagttacttcaatgagaatcaatacccagatgaagcaaagagggaagaaattgcaaacgcttgcaatgcagttatacagaagccaggcaaaaagctgtcagatctggaaagagttacctccctgaaagtatataattggtttgctaacagaaggaaggagatcaagaggagagccaatattgaagcagcaatcctggagagtcatgggatagatgtgcagagtccaggaggccactcaaacagtgatgatgtcgacgggaatgactactctgagcagactgataggatgcaagctgaggtcgtggcacaggaatgacagacaccatttggggagtatccacagagtcaaaggaacactagaatccccacctcagcgtgaggataattgatttccagctgcaataagccgtgcctcattatagccacactgtggctagattatacttctttgggtgctgtgctaagaatgtcaatggaaaaagccgatctcagattttgtttgaagttaacatgcctgacacagacatcctttcctctcacaagctgtgtgacttagtagataaaatactgccttctgcctttgggaccatgattaaaaacaaagacaaaaaccaaaagtcatta

SEQ ID NO: 86941 - DNA, 594 bp, Homo sapiens
gcctatgagttatttagcaacttaaaattttttcccaaatatttgggattttttggtcattttgcttgtaacttctatcttaattgtcttatagattgtggtctgtatgctacgctctaaatctctgaggcttccattagggtttactacacaatcagtttttgcatacattccatgtatacttgagaaaaaatatgttctcagagttgcatccatgagtcggtaatagcatatattgtttggatctccatatacttgctggattgtttattgtttccatttgacctatcaacaagtgaaagaggtgtacagaaacttcctaatttcccactgtggtgatggatttatcaatttcttccttaagtatcaatatgtgctttgtctatttttgaggaatttaattatatgcataatgtttaaaactattatatctttttgattaactcaaccttttattattatagcaactttcccttccttaataatgcttttgtcctaaagtctattttacctgatattaatatagctattatagctttttgttagtattttcatgatatgtgtcttttaatttcaacttttatatacctttat

SEQ ID NO: 86942 - DNA, 274 bp, Homo sapiens
ctggaggagcactaagcccaggagttccaggctgcagtgagctgtgatcttgcactgcactccagcctgggtgacagagcaagaccttgtctctaaaaagacaaaaaaggagaagcaaggtgcagtaggagaaagaggcagaggaattttactagtacgtctgagctggattgtttcctttgatcctccacacctatctgtgctctgctccatatgccaagaggccagcccctcacactgactgtccaggctctatgccgtctgccttgtgcct

SEQ ID NO: 86943 - DNA, 1999 bp, Homo sapiens
gggaggcggaggttgcagtgagccgagatcgcaccactgtacgacagagcaagactccgtctcaaaaaaacaataaaaagaattgctggaggagggaagtgaggggcggctggcgggggactgctgggctggtgcagagggagtcaaggatccctaagagagaggcaggggtgttcagctctcccacctctgctggatgaacttgcagagcctccttggtgacccagccggtgcagagactctgctcaggacaacacccttgcctgggacccccacatctctggccccagcagcagcccttgggggggtccctttatcttcctccactcctacccaggcttcctcagcaggagatgaggcaggacatttccactccctttctggaaggttcagaaggttaatgagagctaagcacgtaagtccatttagggggatgaacttctgggaagagaggaacctgggtctgggctgacgtccaagggcgggctgggtgacggtccctctgatcacggaccctgtccacccactgcccagggccctgcctcgacccctctgaccagccaccgagccccagagggatctccatgaatgtcagagacattgactggaggccttatctccagtgggagaccccttctcttcccactgtgggccggttccagcctgggctgtccaggaagtgacctctcagggcctgggaagggtgtggccagtggttcttggttgtactcaactcatctgccttgggtctaaggctggggtgaatggaagggcccacctggaccctggagggacaccaggctcatactaaaatcccaaaaagtgaaaagctttccccaggcccaagcagagaaactggaccttgaagctacatctctggacttagtcctcaaagtaggagacatttgcctctaagctgttctctcccaccccacctttctgtgagccgccggttccctgttgtccacatcaagctgtgtgctgggcactgggtgcaggaatagcttgaccacagtctctatcctgggggtaaaggggtgaccagcccacagagggatggactgcaaacagacagtcccaaagtgccatgagagaagctctcagggcctgggcgtgatggttcatgcctggaatcccagcactttgggaggccgaggtgggtggatcagttgaggtcaggagttcgagaccagcctggccaataaggtgaaactccatctctactaaaaataaataaataaataaataaataaataaataatacaaaaattagccgggcatggtggcatgcacctgtaaacccagctacttgggaggctgaggcaggagaatcacttgaaccccagaggcagaggctgaagtgagccaagattacgtcactgcattccagcctgggtgacagagcgagactccatctcaaaaaaaaaaaagaaaaaaaaagagagagagagagacagagagaggctctcagcctgcaggaaagggctctctccttgttggccaaaccagtgggccctttagctgtgacgggtgtgccctgggcccaccaggacaggagcaaggtcaggagggctgctctgctctgcaaaacagaggctgatggatctgaagtttctgttactgggagaataaagggaggtgaaggagacacgtggtaggtcccctgggaaggtggtgggaatgcgtgtgaaatgctcggagaggcacagtaagaaccggcctgtttagaatccagtgttctacgcctgccccaggccccagcaattctgcttctagacatctccccatgagaaatgagcactgagcctcccaaacatgtcttttgggaggccaaggggagcggatcacttgaggtcaggagttcgagaccagcctggccaacatattgaaaccccgtctctactaaaaatacaaaaattagccaggcctggtggtgggtgcctatagtcccagctactcgggaggctgaggcaggagaatcgcttgaacccgggaggtg

SEQ ID NO: 86944 - DNA, 639 bp, Homo sapiens
gatttatcaaagagaccatggtttcctctttgctgaggtgatctctgcctcttggttcatttgtcttttcttgcatcaataccatactatcttaatttatgttgctttgtaatatttttggaaatctggtagtgaaagccttccaacttttttattctttaagattgtcttgccttctctgttccccatgtttcctaaattaattttggaatctcaggattaattttcacaaatgaatttttggtactatgcctgtaattgcattggttttataaaataacctgaggataattgacatctttacaatatcgagttttccagttgatgaatatggtataattgtccatttacctaggttgtctttaacttttctcaagagtgttttatagttttcattgtagaaatcttgatttgtttaatttatttctagtatattttgctttgtatttttaatttgtttttcaatgtttttggctagtacgtagaattgcaatatctttttgtatattgactttatagctggtgacatttataaattcaattatttattccaatactttgtggattttggattttctatatatatataatcctgttaataccaataaaagaaagtcttacctaacgtctaaactttat

SEQ ID NO: 86945 - DNA, 676 bp, Homo sapiens
  misc_feature (21)..(21): n is a, c, g, or t
aatcgagctcggtaccatatnggttggacgatgaaggtaagaaattctggggtgggtaggtgggagagagtgggccacttcacagctgtggtggccacatgtctcagattttctggaaccatctagctctaaaatattctctatggttttagaccttaaatcctgaattttggcatggaaaatgaggctcaagtgacgtctgctcacgtgtctcttgcgttagttatctgtataacaggcctcttacatgatatttctaccctcaccaaaaaaggagaaaatgagaagaagatttaggttaaaaaaatatatattccccacccagcctctgcttgaaatgtgaggttttggttttggacagcggcgttggttgttgacgtcattgatccaactattttatttcccacttcactttgcttgcccaggtgtggtccaaggagtatgagggctgttaagataaaaccaggctccggaaattcaaatgaaatgtctacctgaacctcctcaagtctttcctgtgggctgtgtatttatttataagcctattgggctttggcagcagaaaaaaagaagaaaggaggaatttgtttctaaaatgaaaaccaaatttagttaatataaatgctacccatgtgcaactcgtccaacctatatggtacgagctcgattcgtatct

SEQ ID NO: 86946 - DNA, 847 bp, Homo sapiens
  misc_feature (21)..(21): n is a, c, g, or t
aatcgagctcggtaccatatnggttggacgatgaaggtaagaaattctggggtgggtaggtgggagagagtgggccacttcacagctgtggtggccacatgtctcagattttctggaaccatctagctctaaaatattctctatggttttagaccttaaatcctgaattttggcatggaaaatgaggctcaagtgacgtctgctcacgtgtctcttgcgttagttatctgtataacaggcctcttacatgatatttctaccctcaccaaaaaaggagaaaatgagaagaagatttaggttaaaaaaatatatattccccacccagcctctgcttgaaatgtgaggttttggttttggacagcggcgttggttgttgacgtcattgatccaactattttatttcccacttcactttgcttgcccaggtgtggtccaaggagtatgagggctgttaagataaaaccaggctccggaaattcaaatgaaatgtctacctgaacctcctcaagtctttcctgtgggctgtgtatttatttataagcctattgggctttggcagcagaaaaaaagaagaaaggaggaatttgtttctaaaatgaaaaccaaatttagttaatataaatgctacccatgtgcaactcgtcctgccagatcccagtaaatgtacaaatatcaaaataacacaatagataaaaatcacggtggaaaaagagaaattgagacacttctgtgttttgcagggccagaataatctacacagtttactccttccaccatgcatattttacatactacattattatctgattttatataatattcacattgtaatttctgaatcaactct

SEQ ID NO: 86947 - DNA, 279 bp, Homo sapiens
gtcgagttcactaacgtttagctttcaggtgctccctagcctttctggagatgcacaacagttcagtcacagagcctgtttctgtaggtgaccaggtgcactgcagtggcctggcgtttgacactggaatggctgattttgaatcctggcaaagccccccagctggttgtgtttgaccttgagccagtcacattgcctctcagaaacttggtttctttatttataaaatgggaataaaaacagagacgttttgctctgtaaaccatggggctgctctga

SEQ ID NO: 86948 - DNA, 200 bp, Homo sapiens
tctacatgtgaaagatacaacaataaacacaactatagctccttacctgatgaagcttacggtcaagtggagagaattcagacactaggctgggtgcagtggctcacgcctgtaatcccagcactttgggaggctgaggtgggtggatcacaaggtcaggagatcaagaccatcctggctaacatggcgcaatcccacct

SEQ ID NO: 86949 - DNA, 466 bp, Homo sapiens
taagccctgaagaatcagagtacatataatgctctacacctttttccacttaatttatctcagaacaaagatctaacctttcaaagaacagctgttgtagtgagaattccactctttggaaatgtataaatcagacacaaattcaaaatgcagtattttttgtgtcagccttgtaatcctttaacagtgagtcctatgggaatttaaaaattacgatagtatcagctaatatttcattgaggcattgtgccatgtctggccctggactaaccccttttctttacctctcacaacgaccttagaaggaagctgagtgtccacagtcgtgtagctgagaggccttaggaaggtaaattctcttcaccaatgtgcagagccaagaggtagcacagccaagattttaagccagatctgtctgattctactaccacctactacaaagagctttcttgtcataggataaagg

SEQ ID NO: 86950 - DNA, 638 bp, Homo sapiens
actcctacaaggttggacacaatgcagcctagggatgaacagtcatgaattttgtactgaaaaaatttacatttcattaacattttaaattacaaaggcaggtctacaaataccgatttgtgtgtttgtgtgtgtgtgtgtgctcattgcattttccaagcaaacaagtgaataatgtgctaactgtatcctttgtttttttatttttgatttctctttttattgtaaaacgtaagctgtgatgtgtagtgacattaattttagtaaaacctactttacgttctctatagataatatgcacataaagtctacataatgttttcttatgtaataaatgctttgggataatgaagggtacttcgagcatcattcctcagctgtttagtaaaccagctctacagagacttgcctttctaattctgcagctacatgggtagaaattaatctacttgaaaatgaattagcaatataaaaatgtaatattttatgattaatattaactagaaattaagactgaattattcaacttcagtttgccattctttgaaagaagttacattttgggaagttctgtgaagttagaaaaagtttgaaagtgtgttgcgggaaatagtggctgactagtgtaatgaattgaa

SEQ ID NO: 86951 - DNA, 361 bp, Homo sapiens
cttccctccttagagcaagtgctgcagaggctggtggaactgaagatgagccaagctgcctttgcatctttgcaagtttactgtgaccatggaacctggtgtttccttgacaatgcctacaactgaatctaataggtcagagcaagggttcagttgctggccaggcattagccttgagggaaggctggcactcctagcaatggaccctgctaggctttagggccctcctggcatcttcggttcccactgatctctaggattagacacaagaatgctcagaggaagggaattttttttttttttttttttttttggaaatggcgggtttgggggacccgaccacaattacgaaatcatggta

SEQ ID NO: 86952 - DNA, 203 bp, Homo sapiens
atatttggcaaatctgtaccctagttttgtttagttgtgtgtgggcgtggggttatattcagcactggaaattgtgggagcccagctgtgcatcaacagcttctccatccagttagggagagtgggagctccccatctaagtttaaggttgcagctcttcctcccatagatctgtggtttaccctcagccccagcccctgcaa

SEQ ID NO: 86953 - DNA, 261 bp, Homo sapiens
  misc_feature (24)..(26): n is a, c, g, or t
tagtcaccagcagcagaggactgnnngaaccgatgaagagcagaaggtcgacgccgtcgaccttctgctctggaagtacagggcagaaagcgctacaagaaggattgagtagtgaactctgtgatatgctgccaactggtcaagaaaggagacaaagagctgaccattagatttgacgagactgagtttgttggcaacgctgggaagaatagtcaccgtagagtcgtagggaatatggttgacgagagcagaaggtcgacg

SEQ ID NO: 86954 - DNA, 539 bp, Homo sapiens
ggaatcaggggctcccttatcaaagctgggaaacttagaacaacagctgtgccgctcatggacctgtagtctctcctgttaagcagagtgctgagttcatgtgatagcaaacacagctctgccagaccacagggtcaccaggcaggcactccatccctccctccagggggagaccacggcatgccttggatgaggtgacttggccaactgtcttgtggccccagctcctgacattacaatgtgatgactgtgacacttggaagagaaatgtctcaggtatcgtggtcctgggtcctgtggtacaggaccttgtctctgcggtcctgtacttttgcttcacaattagaagaattgaaagcttcaggttgtttcaggtatgttttttcaagaagtgcaatagtagtgtgtttatagatgttttccttagagttagttttgggggagagaagatgactgcccttccatcctgcaggtggattggctggggaatgaggccatctcttttcagagtgagcagtgaaccatttttgtctgtacac

SEQ ID NO: 86955 - DNA, 270 bp, Homo sapiens
gcttctgaggcagaggaaacagcaggtgcaagcctttacacaggattgtgcttgggatgacttgaggaacagcaagaaggccagtgatggagcaaataaaaacagcagcaaaggatgagcttacatagggatctgtaggtcatggtaagaattttggattttactaagggagatggggaccactagaagatatggagcaaaagaatggcataatctgacttacattttaaaaggatcactctgctacttgtggaaaactgtagcagggta

SEQ ID NO: 86956 - DNA, 406 bp, Homo sapiens
ttggtttggtctgttgagcctagtgcaggagctcagtccaaaccaatgaacttctataaattttatttaacggaggcttgtattagtttccaatgactactgtaacaaattaccacaacattggtgactttggtaattcagtcacatctgctaagtctttgtcacagttgggatcacgtggaataatcgcttgaacccaggaggtgaaggttgcagtgagctgaggcgacggccactgccctccagcctgggagacagagcgagattccatcttaaatttaaacatggggcagctatcaaccaaagtcaaaagagaaacaaaaatataaggcatctgttaaaacattactttcaagtaaatgtaagcaggttttgaaaaattaattggctgcgtgtggtggcccac

SEQ ID NO: 86957 - DNA, 264 bp, Homo sapiens
  misc_feature (5)..(5): n is a, c, g, or t
  misc_feature (9)..(10): n is a, c, g, or t
  misc_feature (13)..(15): n is a, c, g, or t
  misc_feature (109)..(109): n is a, c, g, or t
  misc_feature (261)..(261): n is a, c, g, or t
caaangagnncannngatggctaccctcccaagtgtctaggtccccttgaccctgtggtactaatagcttgccattcctctgtcaccactgctttctgcttagcacacntcccctctgcccatgtgctatgcttgccttttcgcttgccaaagggaagtggttccgccaaaagcgtgtgtcccatcccctctggcccccagggtctccaggtgtggtgttgctgcgacagcccagctacaccccgtcctatgcagagctgnctt

SEQ ID NO: 86958 - DNA, 385 bp, Homo sapiens
ttctttttgtgagagaaacacttttgtgatttgaagttaatttccaaaaagatttataattctggattttttaaagtttttctctataaacattgttttaaaaacacataacataatatttaccatcttaaatttattgatgtgtatacttcagggccaggcatggttgtggctctcatctgtaatcccaagattttgggaggccaagacagggggatccctggagcccaaaagtttgagaccagcctgggaaacatagggagacccctctctataaaaagaaaaaattaatgatagccgtgtatggtggtgtgaagctgtggtcccagctacatgggagattgaattgtgccactacactccagctcgggtgaccctgtctcaa

SEQ ID NO: 86959 - DNA, 102 bp, Homo sapiens
agtgtcctgcagcagcagtgcaatgtgattgatttcagaaatttaaaaaatatttgctgacactgcactccagcctgggcgacagagcgagactccgtctca

SEQ ID NO: 86960 - DNA, 314 bp, Homo sapiens
cccaacacgatattcctactgctttctgtgccttcagtaataaaatccttttccttcaacccatggatgtcttctgccagcatccatgaaaccataacaggtcagcttattagctccagtagggcaaaagcaaatctcagatcctgataaccagccaatcctttctgagtccaatcctctgttatgggacatgattatttatttaaaatcttccctgttcagattaccctgtgatttctgtctcccaactggactctgtctgatacatcacagcagcagacgcatcctccttaggtggctattcatagtcctta

SEQ ID NO: 86961 - DNA, 217 bp, Homo sapiens
gatcaaatttttgagacaatccttggtctggattggttaatgaaaatgtcttgtttaagaggttctattaaaaaatatttctagtgtattagtcataattgtttttgtggagtgggggtaaaccacaccattaagggaataaaatgtaatttgaaagaggtgattataagatttgtttcaggccccaaaatataaataaaaattggtgtggaatctc

SEQ ID NO: 86962 - DNA, 594 bp, Homo sapiens
cgcccgcactttcccgcggcgttacgaggggccaactccgggtgcccgagcccgaacccctccccggccgagaaagtgcgcggggcccggctcagccgccacacgtcggggcttctgagccgctggcacttaaggcgctcctccctcgtcccggggctgggctttcaagagagctcaaggctgccagagagtgatccgagagatggatgacttcgcaaagccgcgcccacagacggcccagcggggtgagcgcgtcgcagcccgcactcaaggaggtcttggggcgcggcgaaggggctccgggtcccagcccgaaggcgacctcagttcccccgagagcggccccgtgactaggcacatttttgccggcaccgaggcgggggagccggcagccccggaaggccgggccgcgcgctcagacggccagcgtccgccccctcttgccccgccgcccaccggccgctcaaacttaggggctccggagtcccagctctcgggcccggggacgcggctggattctcccccaaggcccacgcgagcgggctcagtccccagaccttcccgcaacttcccacccgttcgccctcgggctcg

SEQ ID NO: 86963 - DNA, 233 bp, Homo sapiens
ataccactaattaccccctaccactgtggcaatgctaccacagattttgttcttttttttaaagacagggtctttctatgtcacccaggctaaagtacggtggctattcacaggcatgatcacagtgcactgtagccttaaactcctggactcaagccatcctcccaagtggctagtactacaggaacttgccactgtagccagctagattttgttcttttttctcaaaaaga

SEQ ID NO: 86964 - DNA, 398 bp, Homo sapiens
tttcaatgcgtgcatttgttttttataatgatcttttctatgatactgggtgagataaaaaccaacttatttgcctttaagagcttctttgttttctgccatttgtgctagcaacagtcagagaaaactttttttttatagcaaattgtttttctcaacacattctgtctggaaaagaatgttctctagttaccacctctttggtctaagggcatctccttggtttctgtgttacagcctctttgtgttaattataagttgctttgctttacagactcaaaatgaatgttacagtgactgataaaagccaggatcctgagttcaagatcctgaccaattgggtgcttcatttgaaatcagaatctgtgttcactgtggtttacttggggtatgtgtta

SEQ ID NO: 86965 - DNA, 489 bp, Homo sapiens
attttgtaatgcactttaaaatatttgtgccatttaaataatgacaaagcaatcaatgcatacatttcaatggagacagtatacaaagttaaagcaactgatacatatatttcagtggagacagtaggataacagtgttagcaaatatgtgtcatctctttaaatttgggaggaatcagaagctaaagatttaaaacaaataaaacatacctgaagaaaagtagcaatttctgaaattgtagtaatcttggaatggttatcaaacctagcaaataatacttaataagtgttacctaatatacctaattggaatgtttgtttaaaatattaaattaatttatactgaaagttttaactgcaatttcataattcatgaattctataaaagaaatctccctcactaaaaatatgatcaatcaaaactaccagttttgcacaccaatcccaagtttaagcatattttgtatttaaagttataatttaattatg

SEQ ID NO: 86966 - DNA, 389 bp, Homo sapiens
tctcattcacatgcttaagggagttctacatctagaagtgaaaggtcagtgcacccgagtgaatttgtcaagggaaacagagcagcggtctcatgaggaaatgaggaaatggcatgaggaaatggtttcatggaagacagtttttccacagaccagggtgtggggaggatggttttgggatgaaactgtttcaccttagatcatcaggcattagacaggttctcataaggagcatgcaacctacatcccttgcatgcacagttcacaatagggtttgcgttcctatgagagtctaatgccactgctgatctcacaggaggcagagctcaggcagtaatgctcgcttgcctaccactcgcctcctgctgtgtggcccagtggctaacagg

SEQ ID NO: 86967 - DNA, 138 bp, Homo sapiens
gcaagatggcacctctacactccagcctgggtgacagtgcaagactccatctcggaaaaaaaaacgaaaaaggaatatggacattttaatgtggtataggccatgtataaggcctataggtttttatttgttttggtt

SEQ ID NO: 86968 - DNA, 321 bp, Homo sapiens
ttaaactagcatttcatattatgaggttatatgaataaaattctatgactagacatcttaagttttgaacctataacctactattttatttcctttgtgtagtcagatagatttactgtccaatgtattgaaatcaatactaataaatgggacgtgcatcaaagagggatttaactggacactgattcccagaacacgtttcaaatatgggcaaaagaaaaaaggctatggctgaagcccattagaacactgtgacctctggcactgtgaacaggcctaacaactcttaagttcaaatcccgcttctgtcacagacttgct

SEQ ID NO: 86969 - DNA, 429 bp, Homo sapiens
cggtcaacttaagcaaatgaatagaagaaaggaaagatctggagagcataaatgttcactgttgttccatgttcttagattccctttccttcttttgcacatggatcctatttacatatattttattacattttttattactgctgtagcaaattaccacaaatttaatgacaaaaaaaaaccccacaagcctctttttttacagatctggaggtcagaagtctaaatcaaggtgtcagcaggactgttctcctcctgaggctttgagagcagaatctgtttctttgatttttttttcagcttccagaggctacctgtattcctttcctatgatccttttctcaccttgtcattcaaacttctactactgactgaccctcttcctcccctctaacaaatacttttgtgattacattgggtctaccggga

SEQ ID NO: 86970 - DNA, 386 bp, Homo sapiens
cacaaagtaagtaagattggtttaaggaagggaaggaaagactaaatacaaggtcaaatgtcactataattggtgtctgcacatgggattaaacaagtaagattgatgtgaattttattctttcattttttatgtagactcactgattgggtaactgtggaaataatgtcacagtgcctttttaagttaagaacatgtagttgtgatcaggagcggtggctcacgcctgtaatcccagcagtttgggaggctgaagtgggtggatcacctgaggtcaggagttcaagaccagcctggccaacatggcaaaaccccgcctctactaaaaatacaaaaagtaggtgggcgcctgtaattccagctactggggaggctgaggcaggaga

SEQ ID NO: 86971 - DNA, 358 bp, Homo sapiens
ccctttccaataacatggccacctggtttttattttcccagcaggatgcctgttggcttttaatgaccaaatttccatcagatcccctagaataaggccacatcccccccagacttcccagggcagggccatgccttcttcagtgcccctcacacccgcccttctcctcaccagagcaaactgtgtccctccaggacatggtcacctcagtttagaacccccagggtggaccatgttctctcagagtccccagacttcctaaaacacaggtacagtacatttctcagctggcaattacaaaggaaaactcagtcactccgtgttgtaactcaatacgtttctaacaaagcaagccgta

SEQ ID NO: 86972 - DNA, 898 bp, Homo sapiens
cacagctcttccatgttgtagcaggtgttagaatgttattcttttatggctgaataatattccattctatggctaggccacacgtttctttacatattcctttttatggctgaataatactggagcctcttgaaccatcatctttgaaatctgtgaagttccaaagaagactttggacagcccaactgccctgtgcttcccttgaagaagccaatattggaccatattttggttttgttaggaacacagcacccattatataagagctagttcaaagtcactgcttcttgaagagagaatactttcaaatctgtctcctcgtcgacgcccgtcctgactagttgggtccctgcgaacaatgaccaagctctccctggtgtgggtagagggtgattctcccagctggaggtcacctggggcaagatcctcatgaagcccaagcagatttagggttcccagccaacaggcagtcctcacatctgggctcgctagaactgcacatggagcttaccagatttaccgagacccccgagatctcagccacagctggctcccctggggtcacacacctgtccggagccagtgagcagcaccctcttcacctgtccaggtgagcacggctgggtgcagcttgtggtcctgtggtcctgctgtggatgctgaggtcaagggctgcaagtggcgggctctacaggacttggctggcccagcagagtggtgtttcaaagaaatgaagtgaaatcttacccagagcccctgtgtgtgaagcagacgagaagggggctagtctgtttggagcacagggagcccctcaatgcccctcggactccaggatcaaggaacccacctcagatcaggtgcagcctggctaggaagggtgaggcgccagggaggacac

SEQ ID NO: 86973 - DNA, 337 bp, Homo sapiens
ctcaatctcccaggctcaagcaatcctcccacctcagcctcccaagtagctgggactacaggtgcatgccaccacctctggataattttttttttttttttgtagagacaggatcttgctatgttgctcaggctggtctcaaactcctgacctcaagtgatcctcctgcttggcctccaaaagtgctgggattacaggcatgagctgccatgcccagcctcaaatttctttaaaatgatttttatctttcttcaacgataaggttcttgcctatattttaccagagagcaactagtttcctgcgtatccctctattttatctttctttgtatattta

SEQ ID NO: 86974 - DNA, 366 bp, Homo sapiens
  misc_feature (177)..(177): n is a, c, g, or t
  misc_feature (236)..(236): n is a, c, g, or t
  misc_feature (241)..(241): n is a, c, g, or t
  misc_feature (347)..(347): n is a, c, g, or t
  misc_feature (358)..(359): n is a, c, g, or t
gaattcttatgttttaccagtacacttttcaaaataaaattatttatttgtactatatcccaccctctgtagaagagctttcaagataattttagaatatggtcatttatggagaagtctgaagaatccatgtcatacctaatatattttccattccctgagacctactttaacatnttgttatcatgttcactgttatattgacttcatcatcactaacagcagagaatatattngcttntttcatgcaacataaaaactagttattaggccggacgtggtggctcatgcctgtaatccagcacttctggaggctgaggcaggcagatcacctgaagtcaggagtncgagaccagcnnggccact

SEQ ID NO: 86975 - DNA, 547 bp, Homo sapiens
cacataaatgagactgttgttaaattatcctttttcctgggggaggagaatgctgtgctgtctccttccctttgattgaagccttccttactgttatcttgacaggtgacagaatgaatatcagctgtggaacttatagatatgtgggtccatatgtgtttacacatatccccatgtacacgtatggattcattgcttgcactttcatttatacacactgcaggccacatgtagagaaagcagtaggaacatttcaaggaaactctgtgcttcctgatactcctttcctagcaccgttccttggctccatagctctgcaatcccaattcaagcatgggaagtgatgacagtatgtaaagtgtcagtttcccttaccacacagaaactcttccaggccaggatcttgaaatgcttctagtcctgcactgtctgctatggtagctaccagccagatgtggctcttgagccctggaagcgtggctagctagccccaatcaagataggccatatgtataaaatatatgctggcatccaaagacttagtaga

SEQ ID NO: 86976 - DNA, 390 bp, Homo sapiens
gatggtctgcaaggttgggaattcaatttgcattgtaattcagccactgccaggatgagatcctacttctggttttcagccatctcagctctgcatctatgggacataagggcagacatagaaacttttgattcattcatgtggtgcttgagctgggaatttgaatccctgaattcattcttcttttttcccccactttgtctagtacaattaggagcaaccaaccactctcgttatacttgttaattttacaaaaatgtttaaggtatctgctacacacccacctagaaccttgcctcttagaagcctttgggagtatttaataatattttctgtgtctctattgtcccatcatgccctgtactctcctctttttactactggacgtag

SEQ ID NO: 86977 - DNA, 507 bp, Homo sapiens
tatgataggtccgggtagtaggaggtgtacactctggtccaatcagatgtggccaggtgaaggtgtcaggtgggtgcctctgctgtgtgtgggctagagagcatctcagagaagtcatgcaggtagggaagcacctctctggttcttggtggagctctctggagtggtatggctaaacactgaagaagatgatgaggatgtcgctgctgtgctcaaaagggcccagccttcttgtcataatcgtatacttgttatcctatttaacactcatgatcatccagtgaagggttaacactattctacagaagagacaactgagatacagaaaggtggaaaaacattgcttcaaaagttatttttatgaaatgttaattgtctcacatatctggattccaacctgagggaaaatgtcaccccagataatagcctggagttccatagccaaagtaattatcgcttctctctccttctcacttaacatactccagccacacaggtattcttctg

SEQ ID NO: 86978 - DNA, 851 bp, Homo sapiens
gtcttgggctggcacgaagagctgcccggccagagcatcccggccaggtgagtgtcagaagacaaattgaagtattcagctaaataagcaactgcaaaactgaatttattcctcttcaagaactactcttcttgtatgttgagtgaccatttggctgccaagagaaactgctttgcctaggaaataatatggactgaaaaatcagtttcaaacacaaatgaaaaatattccttatgtttggtcatcttctttccacatcaaatatacatgtaaagatgtatataagatataatctgaagataatcaaacagctattaactggatttctgcatttcgcctatccttcaaaaccagcctcaagtctacctttatgttgagagagtgtatctttaactcatggtgttctctttctcctttcacatttcctgtaaactcatcatgaattgccttgtttattgttttgatttctcattcaacaacaccagaatactctgtgtttagggtaaccttagacttcagttttcctgaggagtttcagtttacacgtcttgcaccggtacaattaacagtgcccctttcaggttaaaaagtgtctcagtgtagttcataaattatatagtcaccccatgtgtgcagcaatcagagctttttcaatgcaaagttgattatgatgggcataaatgaatcataataaaaagttctagtatgatcccatctgactgggcttcttgtgatggcccatttcaacaccatgggtgtcattagtggcttcacaatggttcttcttgtaaattccctcatgacctagagttttgatttatgccatcctagcccactttaagctctgactc

SEQ ID NO: 86979 - DNA, 1542 bp, Homo sapiens
cctagcactaaatttgcttagctttatagtaggatacaggacaggaaattaagcatgcatgatgcttgggtccctcctcacctgcctaaagagcgtgcatgagcttgtggtatttggatgaggttgtggtatgtgggggtttgccttgatgcaaagaagcttctatgtgggtttcccaccagtcatataggcctacggttcacaggtctcccagccccatgtactgtcccatagattgtaggtttcacagtgcacaaaatggatgtctgtccctggtacccaatattccaaatttatcttaatttgggtcatttacaagaaactcgtgctgggataagacaaacctaaaatttcccaagcaggcatagttctgggagaaaaatggtacagacctgctattaactctttgctcacacatacataaagaaaagtacacaaatcatgagtatgtaacatcattgatattggcaaagtgaatacatctctgtaaccagactcagatcaagaaatgatacattctggccaggtgtggtggctcatgcctgtaatctcagcactttggcaggccaaggtgggtggatcacttgaggccaggagttcgagaccagtgtggccaacatggtgaaaccccacctctactaaacacacatacacacccacaaattagccaggtgcagtggtacattcgtgtaatcccagctacttgggaggctgaggtgcacaagtgagaatcgcttgagcctgggaggcagatgttgcagtgagccaagatggtgccactatactccagcctgggcaacagagtgaaactctgtcaaaaaaagaaaaagaaaaagaaaaagaaaaagaaaagaaaagaaagaaagaaaacattctagaattccagaagccattctcattccctatttaagtcactaacccaagagtaattaatatcctgagttccaacaccttggatttgtatgggttatttttaaaccttctataaatggaattttatgatatgtttgtttgatccacctatgttgtatgtagttgtatttcatttattcccatttctgcattgtcttgaattgtacaactattttacatatttatctattctaatttcaatggatatttgagttgtttccaatttttaactattttttaaaattatactctaagttcaataaacatacatgtgcatgtgtctttatagtagaatgatttataatcctttgggtatatacccagtatatacccaagtaatgggattgttgggtcaaatggtatttctgattctagatccttgaggaatcaccacactgtcttccacaatggttgaactaatttacactcccaccaacagtgtaaaagcatttctatttctccacatcatctccagcatctgttgtttcctgactttttaatgattgccattctaactggtgtgtgatggtatctcattgtggttttgatttgcatttctctaaagaccagtgatgatgagctttctttcatatgtttgttggccaaataaatatcttcttttgaaaagtg

SEQ ID NO: 86980 - DNA, 396 bp, Homo sapiens
cccccacttttatttttagaaactttgatatagcttgtaaaagccaagacaaatttctaccagaattagagatatggcattcatccagccagccatcaaacatttttgaaaaccaactatctgctaggcaccatgctaagaggtagaaaaagctgcctccctacaagagatagaacctttaacctccatacgaaagagctcttaatcttttgcttgaattctccaaagttcagcatctccaactgacattaatatatttttgattcgatgacctgaagacaaccaaaactttaatgagctcagtctttatccctaacctacctctcctactatttcctctcctggttgatggctgatattaatctgtgctagaaacttaataggctgtcaatatat

SEQ ID NO: 86981 - DNA, 434 bp, Homo sapiens
taaagttgagtgttcctcaatcagaaattgcaatattttatttaaatgagacagagatctcttagtttgagttgtaatagcaaacctcagagatagtcccatatagcctgggcaacataaggagactctgcctctatgaaaaatttactttttaaattattttattttgtagatatggggttttgccatattgcccaggctgttcttgaactcctgaactcaagctcacccctcggcctcccaaagtgctgtgattacaggtgtgagccaccatgcccagctcctacaaaaaattttaaaattagccagtcatagtggtgcgttcctgtaatcccagctacttgggagaagggggtgtggacactgaggcagaaggatcacttgagcccaggaggtcaaggctgtagtgagccatgatcatgctactgcactgc

SEQ ID NO: 86982 - DNA, 398 bp, Homo sapiens
aatagtcttccagatgtgtgacaactttgagcttagctacagccattatctacattttggaaggggagtggaaaactgagttcattatttaaattatacgggaaaattgaattcttattgccttcctggcctgattgcctcgggaaaaggtagttttattttattttttgcctttctaccaatttcttcaacactgtatttgacctgacgaatgtaaacacagtagaactttccacagtaccttgcatttgccataagaaagatgttattgccaccaaggggtgacatttcttgactgtggaagtagtctagttatttagaattcaacttttattttgtgcttactttccctagttcttgatattaactatacttaatatgtaccaatctgcccagtt

SEQ ID NO: 86983 - DNA, 487 bp, Homo sapiens
caacaaagcattggtaagcatggaaacttgcttaatgcaaccaagaaaacacgagtcctacagagattaatgctggcagcaccaatcacaaaatacaacttagtaaaaagaattttctgttttctggattaggctgagaaaagtgtcttctgatatgtatcatcatgcacatacaaatatataaagccacacagaatagacaaatgataaacaaggcacagtggcaatagctacttcagaaagcctgctacattagaaatcgaacttaagtgtgcaaagggggagaatgctaagtagataaatacttaagtaataggctgttcaataggtctttcccatttagagcactgagacattttctcttccctctctttgtgggagagaagggaggtgctccaatgcaaatcaaaccagggaggaagctagaaaaccacttgcaggacagtaaaatgcttaccagaaaggaagattgacatcttacttcact

SEQ ID NO: 86984 - DNA, 452 bp, Homo sapiens
tacaaatagcacaaaccttcttccaagctccaggttttcccatggcctcttctcttagattaactgctatctcccttaaatgtccatagttggaagcatgggacatgcttggccctctgcagacaccctatattggagtgcaccttctggctgaaaagtaacagaggcattcaggccccatggtagcagcagcagcttgatacaggccgcatggggccataggaagagcacaggcccttgagtcaggagtcttggttctgtttcagccaagtagggtgatgtcagacaagtcctttgcctctcttggtctcagtttcctcatctgtaaactaggatttcggtgaggcttgaaagacaagatagttcccaaattattaccaaatcagactctaaacccattaacatatttaattgaaacagatacatacccacatccagacttttaccagatg

SEQ ID NO: 86985 - DNA, 290 bp, Homo sapiens
gctattcttgaactcctgagctgaagtggtcctcccgcctcggactcccaaagtgctgggattacagacatgagccattgtgccaggccagtatttcctttaaatcgttgttttcaatttcttttcttaccagatttttttttttttaagaaaatgctggccaggtgcagtggctcacacctgtaacaccaacactttgagaggccaaggcaggaggattgcttgcacccaggagtttgagaccagcctgggcaacatagggagaggagaccctgtctctacaaaaagat

SEQ ID NO: 86986 - DNA, 535 bp, Homo sapiens
ggggagagcagccagcaggcagggcacctgtgtacgtcgatgactgaccaccccatggtaccccagatctatctccccaaaacactattctttctgcctgggacccacagctcggggaccgccaagccccccttccagctttcagaccagctacaacagcaggacccgccagggcccgccagcagctcggcacccaccctgggccttctccccgccatcgccaccaccatcgctgtctgcttcctgctgcatagccttgggccctcctgacctcggccaccccaagtggagaagccagagaaatgacacaggggtcttcggccacacccaactgctcctgccaccacctccagggggtgcccaacacgtcgagggcagtccacatgggattggctagacactctagagctttactgtacccaagttacatcttcttttttgtagaaggatcttaatttcccatagtgctatggggctcttttgtaaaatacgtgtccatattaaaaaagaaaaatgtatttattctaccgataaa

SEQ ID NO: 86987 - DNA, 199 bp, Homo sapiens
  misc_feature (46)..(46): n is a, c, g, or t
aaaaccaaaggggttcgcccccccctttgggcacttttgggaaaanaattgattttccaaagagaaaaaaagtttgccagaagtttgtcaagtcaaccaatgtagaaagctttgcttatggtaataaaaatggctcatacttatatagcacttactttgttgcaagtactgctgtaaataaatgctttatgcaaaccaa

SEQ ID NO: 86988 - DNA, 4754 bp, Homo sapiens
cggagccgtgtgcgccgggagcgcggaacagcttgtccacccgccggccggaccagggctcctgaacctagcccagctggacggagaaatggactctagcctcctctgatagcctcatgccaggccccgtgcacattgctttgcttgcctccctcaatcctcatagcttctctttgggaagcctttgggtctgaagtgtctgtgagacctcacagaagagcacccctgggctccacttacctgccccctgctccttcagggatggaggcaatggcggccagcacttccctgcctgaccctggagactttgaccggaacgtgccccggatctgtggggtgtgtggagaccgagccactggctttcacttcaatgctatgacctgtgaaggctgcaaaggcttcttcaggcgaagcatgaagcggaaggcactattcacctgccccttcaacggggactgccgcatcaccaaggacaaccgacgccactgccaggcctgccggctcaaacgctgtgtggacatcggcatgatgaaggagttcattctgacagatgaggaagtgcagaggaagcgggagatgatcctgaagcggaaggaggaggaggccttgaaggacagtctgcggcccaagctgtctgaggagcagcagcgcatcattgccatactgctggacgcccaccataagacctacgaccccacctactccgacttctgccagttccggcctccagttcgtgtgaatgatggtggagggagccatccttccaggcccaactccagacacactcccagcttctctggggactcctcctcctcctgctcagatcactgtatcacctcttcagacatgatggactcgtccagcttctccaatctggatctgagtgaagaagattcagatgacccttctgtgaccctagagctgtcccagctctccatgctgccccacctggctgacctggtcagttacagcatccaaaaggtcattggctttgctaagatgataccaggattcagagacctcacctctgaggaccagatcgtactgctgaagtcaagtgccattgaggtcatcatgttgcgctccaatgagtccttcaccatggacgacatgtcctggacctgtggcaaccaagactacaagtaccgcgtcagtgacgtgaccaaagccggacacagcctggagctgattgagcccctcatcaagttccaggtgggactgaagaagctgaacttgcatgaggaggagcatgtcctgctcatggccatctgcatcgtctccccagatcgtcctggggtgcaggacgccgcgctgattgaggccatccaggaccgcctgtccaacacactgcagacgtacatccgctgccgccacccgcccccgggcagccacctgctctatgccaagatgatccagaagctagccgacctgcgcagcctcaatgaggagcactccaagcagtaccgctgcctctccttccagcctgagtgcagcatgaagctaacgccccttgtgctcgaagtgtttggcaatgagatctcctgactaggacagcctgtggcggtgcctgggtggggctgctcctccagggccacgtgccaggcccggggctggcggctactcagcagccctcctcaccccgtctggggttcagcccctcctctgccacctcccctatccacccagcccattctctctcctgtccaacctaacccctttcctgcgggcttttccccggtcccttgagacctcagccatgaggagttgctgtttgtttgacaaagaaacccaagtgggggcagagggcagaggctggaggcagggccttgcccagagatgcctccaccgctgcctaagtggctgctgactgatgttgagggaacagacaggagaaatgcatccattcctcagggacagagacacctgcacctccccccactgcaggccccgcttgtccagcgcctagtggggtctccctctcctgcctactcacgataaataatcggcccacagctcccaccccacccccttcagtgcccaccaacatcccattgccctggttatattctcacgggcagtagctgtggtgaggtgggttttcttcccatcactggagcaccaggcacgaacccacctgctgagagacccaaggaggaaaaacagacaaaaacagcctcacagaagaatatgacagctgtccctgtcaccaagctcacagttcctcgccctgggtctaaggggttggttgaggtggaagccctccttccacggatccatgtagcaggactgaattgtccccagtttgcagaaaagcacctgccgacctcgtcctcccccgccagtgccttacctcctgcccaggagagccagccctccctgtcctcctcggatcaccgagagtagccgagagcctgctcccccaccccctccccaggggagagggtctggagaagcagtgagccgcatcttctccatctggcagggtgggatggaggagaagaattttcagaccccagcggctgagtcatgatctccctgccgcctcaatgtggttgcaaggccgctgttcacccacagggctaagagctagcgctgccgcaccccagagtgtgggaagggagagcggggcagtctcgggtggctagtcagagagagtgtttgggggttccgtgatgtagggtaaggtgccttcttattctcactccaccacccaaaagtcaaaaggtgcctgtgaggcaggggcggagtgatacaacttcaagtgcatgctctctgcagccagcccagcccagctggtgggaagcgtctgtccgtttactccaaggtggggtctttgtgagagtgagctgtaggtgtgcgggaccggtacagaaaggcgttcttcgaggtggatcacagaggcttcttcagatcagtgcttgagtttggggaatgcggccgcattccctgagtcaccaggaatgttaaagtcagtgggaacgtgactgccccaactcctggaagctgtgtccttgcacctgcatccgtagttccctgaaaacccagagaggaatcagacttcacactgcaagagccttggtgtccacctggccccatgtctctcagaattcttcaggtggaaaaacatctgaaagccacgttccttactgcagaatagcatatatatcgcttaatcttaaatttattagatatgagttgttttcagactcagactccatttgtattatagtctaatatacagggtagcaggtaccactgatttggagatatttatggggggagaacttacattgtgaaacttctgtacattaattattattgctgttgttattttacaagggtctagggagagacccttgtttgattttagctgcagaacgtattggtccagcttgctcttcagtgggagaaaacacttgtaagttgctaaacgagtcaatcccctcattaaggaaaactgacagaggagggcgtgactcacccaagcatatataactagctagaagtgggccaggacaggccgggcgcggtggctcacgcctgtaatcccagcagtttgggaggtcgaggtaggtggatcacctgaggtcgggagttcgagaccaacctgaccaacatggagaaaccctgtctctattaaaaatacaaaaaaaaaaaaaaaaaaaaatagccgggcatggtggcgcaagcctgtaatcccagctactcaggaggctgaggcagaagaattgaacccaggaggtggaggttgcagtgagctgagatcgtgccgttactctccaacctggacaacaagagcgaaactccgtcttagaagtggaccaggacaggaccagattttggagtcatggtccggtgtccttttcactacaccatgtttgagctcagacccccactctcattccccaggtggctgacccagtccctgggggaagccctggatttcagaaagagcaagtctggatctgggaccctttccttccttccctggcttgtaactccaccaacccatcagaaggagaaggaaggagactcacctctgcctcaatgtgaatcagaccctaccccaccacgatgtggccctggcctgctgggctctccacctcagccttggataatgctgttgcctcatctataacatgcatttgtctttgtaatgtcaccaccttcccagctctccctctggccctgccttcttcggggaactcctggaaatatcagttactcagccctgggccccaccacctaggccactcctccaaaggaagtctaggagctgggaggaaaagaaaagaggggaaaatgagtttttatggggctgaacggggagaaaaggtcatcatcgattctactttagaatgagagtgtgaaatagacatttgtaaatgtaaaacttttaaggtatatcattataactgaaggagaaggtgccccaaaatgcaagattttccacaagattcccagagacaggaaaatcctctggctggctaactggaagcatgtaggagaatccaagcgaggtcaacagagaaggcaggaatgtgtggcagatttagtgaaagctagagatatggcagcgaaaggatgtaaacagtgcctgctgaatgatttccaaagagaaaaaaagtttgccagaagtttgtcaagtcaaccaatgtagaaagctttgcttatggtaataaaaatggctcatacttatatagcacttactttgttgcaagtactgctgtaaataaatgctttatgcaaaccaa

SEQ ID NO: 86989 - DNA, 4470 bp, Homo sapiens
cggagccgtgtgcgccgggagcgcggaacagcttgtccacccgccggccggaccagggctcctgaacctagcccagctggacggagaaatggactctagcctcctctgatagcctcatgccaggccccgtgcacattgctttgcttgcctccctcaatcctcatagcttctctttgggaagcctttgggtctgaagtgtctgtgagacctcacagaagagcacccctgggctccacttacctgccccctgctccttcagggatggaggcaatggcggccagcacttccctgcctgaccctggagactttgaccggaacgtgccccggatctgtggggtgtgtggagaccgagccactggctttcacttcaatgctatgacctgtgaaggctgcaaaggcttcttcaggcgaagcatgaagcggaaggcactattcacctgccccttcaacggggactgccgcatcaccaaggacaaccgacgccactgccaggcctgccggctcaaacgctgtgtggacatcggcatgatgaaggagttcattctgacagatgaggaagtgcagaggaagcgggagatgatcctgaagcggaaggaggaggaggccttgaaggacagtctgcggcccaagctgtctgaggagcagcagcgcatcattgccatactgctggacgcccaccataagacctacgaccccacctactccgacttctgccagttccggcctccagttcgtgtgaatgatggtggagggagccatccttccaggcccaactccagacacactcccagcttctctggggactcctcctcctcctgctcagatcactgtatcacctcttcagacatgatggactcgtccagcttctccaatctggatctgagtgaagaagattcagatgacccttctgtgaccctagagctgtcccagctctccatgctgccccacctggctgacctggtcagttacagcatccaaaaggtcattggctttgctaagatgataccaggattcagagacctcacctctgaggaccagatcgtactgctgaagtcaagtgccattgaggtcatcatgttgcgctccaatgagtccttcaccatggacgacatgtcctggacctgtggcaaccaagactacaagtaccgcgtcagtgacgtgaccaaagccggacacagcctggagctgattgagcccctcatcaagttccaggtgggactgaagaagctgaacttgcatgaggaggagcatgtcctgctcatggccatctgcatcgtctccccagatcgtcctggggtgcaggacgccgcgctgattgaggccatccaggaccgcctgtccaacacactgcagacgtacatccgctgccgccacccgcccccgggcagccacctgctctatgccaagatgatccagaagctagccgacctgcgcagcctcaatgaggagcactccaagcagtaccgctgcctctccttccagcctgagtgcagcatgaagctaacgccccttgtgctcgaagtgtttggcaatgagatctcctgactaggacagcctgtggcggtgcctgggtggggctgctcctccagggccacgtgccaggcccggggctggcggctactcagcagccctcctcaccccgtctggggttcagcccctcctctgccacctcccctatccacccagcccattctctctcctgtccaacctaacccctttcctgcgggcttttccccggtcccttgagacctcagccatgaggagttgctgtttgtttgacaaagaaacccaagtgggggcagagggcagaggctggaggcagggccttgcccagagatgcctccaccgctgcctaagtggctgctgactgatgttgagggaacagacaggagaaatgcatccattcctcagggacagagacacctgcacctccccccactgcaggccccgcttgtccagcgcctagtggggtctccctctcctgcctactcacgataaataatcggcccacagctcccaccccacccccttcagtgcccaccaacatcccattgccctggttatattctcacgggcagtagctgtggtgaggtgggttttcttcccatcactggagcaccaggcacgaacccacctgctgagagacccaaggaggaaaaacagacaaaaacagcctcacagaagaatatgacagctgtccctgtcaccaagctcacagttcctcgccctgggtctaaggggttggttgaggtggaagccctccttccacggatccatgtagcaggactgaattgtccccagtttgcagaaaagcacctgccgacctcgtcctcccccgccagtgccttacctcctgcccaggagagccagccctccctgtcctcctcggatcaccgagagtagccgagagcctgctcccccaccccctccccaggggagagggtctggagaagcagtgagccgcatcttctccatctggcagggtgggatggaggagaagaattttcagaccccagcggctgagtcatgatctccctgccgcctcaatgtggttgcaaggccgctgttcacccacagggctaagagctagcgctgccgcaccccagagtgtgggaagggagagcggggcagtctcgggtggctagtcagagagagtgtttgggggttccgtgatgtagggtaaggtgccttcttattctcactccaccacccaaaagtcaaaaggtgcctgtgaggcaggggcggagtgatacaacttcaagtgcatgctctctgcagccagcccagcccagctggtgggaagcgtctgtccgtttactccaaggtggggtctttgtgagagtgagctgtaggtgtgcgggaccggtacagaaaggcgttcttcgaggtggatcacagaggcttcttcagatcagtgcttgagtttggggaatgcggccgcattccctgagtcaccaggaatgttaaagtcagtgggaacgtgactgccccaactcctggaagctgtgtccttgcacctgcatccgtagttccctgaaaacccagagaggaatcagacttcacactgcaagagccttggtgtccacctggccccatgtctctcagaattcttcaggtggaaaaacatctgaaagccacgttccttactgcagaatagcatatatatcgcttaatcttaaatttattagatatgagttgttttcagactcagactccatttgtattatagtctaatatacagggtagcaggtaccactgatttggagatatttatggggggagaacttacattgtgaaacttctgtacattaattattattgctgttgttattttacaagggtctagggagagacccttgtttgattttagctgcagaacgtattggtccagcttgctcttcagtgggagaaaacacttgtaagttgctaaacgagtcaatcccctcattaaggaaaactgacagaggagggcgtgactcacccaagcatatataactagctagaagtgggccaggacaggccgggcgcggtggctcacgcctgtaatcccagcagtttgggaggtcgaggtaggtggatcacctgaggtcgggagttcgagaccaacctgaccaacatggagaaaccctgtctctattaaaaatacaaaaaaaaaaaaaaaaaaaaatagccgggcatggtggcgcaagcctgtaatcccagctactcaggaggctgaggcagaagaattgaacccaggaggtggaggttgcagtgagctgagatcgtgccgttactctccaacctggacaacaagagcgaaactccgtcttagaagtggaccaggacaggaccagattttggagtcatggtccggtgtccttttcactacaccatgtttgagctcagacccccactctcattccccaggtggctgacccagtccctgggggaagccctggatttcagaaagagcaagtctggatctgggaccctttccttccttccctggcttgtaactccaccaacccatcagaaggagaaggaaggagactcacctctgcctcaatgtgaatcagaccctaccccaccacgatgtggccctggcctgctgggctctccacctcagccttggataatgctgttgcctcatctataacatgcatttgtctttgtaatgtcaccaccttcccagctctccctctggccctgccttcttcggggaactctggaagcatgtaggagaatccaagcgaggtcaacagagaaggcaggaatgtgtggcagatttagtgaaagctagagatatggcagcgaaaggatgtaaacagtgcctgctgaatgatttccaaagagaaaaaaagtttgccagaagtttgtcaagtcaaccaatgtagaaagctttgcttatggtaataaaaatggctcatacttatatagcacttactttgttgcaagtactgctgtaaataaatgctttatgcaaaccaa

SEQ ID NO: 86990 - DNA, 2385 bp, Homo sapiens
cggagccgtgtgcgccgggagcgcggaacagcttgtccacccgccggccggaccagaagcctttgggtctgaagtgtctgtgagacctcacagaagagcacccctgggctccacttacctgccccctgctccttcagggatggaggcaatggcggccagcacttccctgccgcctcaatgtggttgcaaggccgctgttcacccacagggctaagagctagcgctgccgcaccccagagtgtgggaagggagagcggggcagtctcgggtggctagtcagagagagtgtttgggggttccgtgatgtagggtaaggtgccttcttattctcactccaccacccaaaagtcaaaaggtgcctgtgaggcaggggcggagtgatacaacttcaagtgcatgctctctgcagccagcccagcccagctggtgggaagcgtctgtccgtttactccaaggtggggtctttgtgagagtgagctgtaggtgtgcgggaccggtacagaaaggcgttcttcgaggtggatcacagaggcttcttcagatcagtgcttgagtttggggaatgcggccgcattccctgagtcaccaggaatgttaaagtcagtgggaacgtgactgccccaactcctggaagctgtgtccttgcacctgcatccgtagttccctgaaaacccagagaggaatcagacttcacactgcaagagccttggtgtccacctggccccatgtctctcagaattcttcaggtggaaaaacatctgaaagccacgttccttactgcagaatagcatatatatcgcttaatcttaaatttattagatatgagttgttttcagactcagactccatttgtattatagtctaatatacagggtagcaggtaccactgatttggagatatttatggggggagaacttacattgtgaaacttctgtacattaattattattgctgttgttattttacaagggtctagggagagacccttgtttgattttagctgcagaacgtattggtccagcttgctcttcagtgggagaaaacacttgtaagttgctaaacgagtcaatcccctcattaaggaaaactgacagaggagggcgtgactcacccaagcatatataactagctagaagtgggccaggacaggccgggcgcggtggctcacgcctgtaatcccagcagtttgggaggtcgaggtaggtggatcacctgaggtcgggagttcgagaccaacctgaccaacatggagaaaccctgtctctattaaaaatacaaaaaaaaaaaaaaaaaaaaatagccgggcatggtggcgcaagcctgtaatcccagctactcaggaggctgaggcagaagaattgaacccaggaggtggaggttgcagtgagctgagatcgtgccgttactctccaacctggacaacaagagcgaaactccgtcttagaagtggaccaggacaggaccagattttggagtcatggtccggtgtccttttcactacaccatgtttgagctcagacccccactctcattccccaggtggctgacccagtccctgggggaagccctggatttcagaaagagcaagtctggatctgggaccctttccttccttccctggcttgtaactccaccaacccatcagaaggagaaggaaggagactcacctctgcctcaatgtgaatcagaccctaccccaccacgatgtggccctggcctgctgggctctccacctcagccttggataatgctgttgcctcatctataacatgcatttgtctttgtaatgtcaccaccttcccagctctccctctggccctgccttcttcggggaactcctggaaatatcagttactcagccctgggccccaccacctaggccactcctccaaaggaagtctaggagctgggaggaaaagaaaagaggggaaaatgagtttttatggggctgaacggggagaaaaggtcatcatcgattctactttagaatgagagtgtgaaatagacatttgtaaatgtaaaacttttaaggtatatcattataactgaaggagaaggtgccccaaaatgcaagattttccacaagattcccagagacaggaaaatcctctggctggctaactggaagcatgtaggagaatccaagcgaggtcaacagagaaggcaggaatgtgtggcagatttagtgaaagctagagatatggcagcgaaaggatgtaaacagtgcctgctgaatgatttccaaagagaaaaaaagtttgccagaagtttgtcaagtcaaccaatgtagaaagctttgcttatggtaataaaaatggctcatacttatatagcacttactttgttgcaagtactgctgtaaataaatgctttatgcaaaccaa

SEQ ID NO: 86991 - DNA, 2434 bp, Homo sapiens
cggagccgtgtgcgccgggagcgcggaacagcttgtccacccgccggccggaccagggctcctgaacctagcccagctggacggagaaatggactctagcctcctctgatagcctcatgccaggccccgtgcacattgctttgcttgcctccctcaatcctcatagcttctctttgggaagcctttgggtctgaagtgtctgtgagacctcacagaagagcacccctgggctccacttacctgccccctgctccttcagggatggaggcaatggcggccagcacttccctgcctgaccctggagactttgaccggaacgtgccccggatctgtggggtgtgtggagaccgtgatgtagggtaaggtgccttcttattctcactccaccacccaaaagtcaaaaggtgcctgtgaggcaggggcggagtgatacaacttcaagtgcatgctctctgcagccagcccagcccagctggtgggaagcgtctgtccgtttactccaaggtggggtctttgtgagagtgagctgtaggtgtgcgggaccggtacagaaaggcgttcttcgaggtggatcacagaggcttcttcagatcagtgcttgagtttggggaatgcggccgcattccctgagtcaccaggaatgttaaagtcagtgggaacgtgactgccccaactcctggaagctgtgtccttgcacctgcatccgtagttccctgaaaacccagagaggaatcagacttcacactgcaagagccttggtgtccacctggccccatgtctctcagaattcttcaggtggaaaaacatctgaaagccacgttccttactgcagaatagcatatatatcgcttaatcttaaatttattagatatgagttgttttcagactcagactccatttgtattatagtctaatatacagggtagcaggtaccactgatttggagatatttatggggggagaacttacattgtgaaacttctgtacattaattattattgctgttgttattttacaagggtctagggagagacccttgtttgattttagctgcagaacgtattggtccagcttgctcttcagtgggagaaaacacttgtaagttgctaaacgagtcaatcccctcattaaggaaaactgacagaggagggcgtgactcacccaagcatatataactagctagaagtgggccaggacaggccgggcgcggtggctcacgcctgtaatcccagcagtttgggaggtcgaggtaggtggatcacctgaggtcgggagttcgagaccaacctgaccaacatggagaaaccctgtctctattaaaaatacaaaaaaaaaaaaaaaaaaaaatagccgggcatggtggcgcaagcctgtaatcccagctactcaggaggctgaggcagaagaattgaacccaggaggtggaggttgcagtgagctgagatcgtgccgttactctccaacctggacaacaagagcgaaactccgtcttagaagtggaccaggacaggaccagattttggagtcatggtccggtgtccttttcactacaccatgtttgagctcagacccccactctcattccccaggtggctgacccagtccctgggggaagccctggatttcagaaagagcaagtctggatctgggaccctttccttccttccctggcttgtaactccaccaacccatcagaaggagaaggaaggagactcacctctgcctcaatgtgaatcagaccctaccccaccacgatgtggccctggcctgctgggctctccacctcagccttggataatgctgttgcctcatctataacatgcatttgtctttgtaatgtcaccaccttcccagctctccctctggccctgccttcttcggggaactcctggaaatatcagttactcagccctgggccccaccacctaggccactcctccaaaggaagtctaggagctgggaggaaaagaaaagaggggaaaatgagtttttatggggctgaacggggagaaaaggtcatcatcgattctactttagaatgagagtgtgaaatagacatttgtaaatgtaaaacttttaaggtatatcattataactgaaggagaaggtgccccaaaatgcaagattttccacaagattcccagagacaggaaaatcctctggctggctaactggaagcatgtaggagaatccaagcgaggtcaacagagaaggcaggaatgtgtggcagatttagtgaaagctagagatatggcagcgaaaggatgtaaacagtgcctgctgaatgatttccaaagagaaaaaaagtttgccagaagtttgtcaagtcaaccaatgtagaaagctttgcttatggtaataaaaatggctcatacttatatagcacttactttgttgcaagtactgctgtaaataaatgctttatgcaaaccaa

SEQ ID NO: 86992 - DNA, 1725 bp, Homo sapiens
tctgaagaagcctctgtgatccacctcgaagaacgcctttctgtaccggtcccgcacacctacagctcactctcacaaagaccccaccttggagtaaacggacagacgcttcccaccagctgggctggcctggctgcagagagcatgcacttgaagttgtatcactccgcccctgcctcacaggtccatttgtattatagtctaatatacagggtagcaggtaccactgatttggagatatttatggggggagaacttacattgtgaaacttctgtacattaattattattgctgttgttattttacaagggtctagggagagacccttgtttgattttagctgcagaacgtattggtccagcttgctcttcagtgggagaaaacacttgtaagttgctaaacgagtcaatcccctcattaaggaaaactgacagaggagggcgtgactcacccaagcatatataactagctagaagtgggccaggacaggccgggcgcggtggctcacgcctgtaatcccagcagtttgggaggtcgaggtaggtggatcacctgaggtcgggagttcgagaccaacctgaccaacatggagaaaccctgtctctattaaaaatacaaaaaaaaaaaaaaaaaaaaatagccgggcatggtggcgcaagcctgtaatcccagctactcaggaggctgaggcagaagaattgaacccaggaggtggaggttgcagtgagctgagatcgtgccgttactctccaacctggacaacaagagcgaaactccgtcttagaagtggaccaggacaggaccagattttggagtcatggtccggtgtccttttcactacaccatgtttgagctcagacccccactctcattccccaggtggctgacccagtccctgggggaagccctggatttcagaaagagcaagtctggatctgggaccctttccttccttccctggcttgtaactccaccaacccatcagaaggagaaggaaggagactcacctctgcctcaatgtgaatcagaccctaccccaccacgatgtggccctggcctgctgggctctccacctcagccttggataatgctgttgcctcatctataacatgcatttgtctttgtaatgtcaccaccttcccagctctccctctggccctgccttcttcggggaactcctggaaatatcagttactcagccctgggccccaccacctaggccactcctccaaaggaagtctaggagctgggaggaaaagaaaagaggggaaaatgagtttttatggggctgaacggggagaaaaggtcatcatcgattctactttagaatgagagtgtgaaatagacatttgtaaatgtaaaacttttaaggtatatcattataactgaaggagaaggtgccccaaaatgcaagattttccacaagattcccagagacaggaaaatcctctggctggctaactggaagcatgtaggagaatccaagcgaggtcaacagagaaggcaggaatgtgtggcagatttagtgaaagctagagatatggcagcgaaaggatgtaaacagtgcctgctgaatgatttccaaagagaaaaaaagtttgccagaagtttgtcaagtcaaccaatgtagaaagctttgcttatggtaataaaaatggctcatacttatatagcacttactttgttgcaagtactgctgtaaataaatgctttatgcaaaccaa

SEQ ID NO: 86993 - DNA, 4632 bp, Homo sapiens
cggagccgtgtgcgccgggagcgcggaacagcttgtccacccgccggccggaccagaagcctttgggtctgaagtgtctgtgagacctcacagaagagcacccctgggctccacttacctgccccctgctccttcagggatggaggcaatggcggccagcacttccctgcctgaccctggagactttgaccggaacgtgccccggatctgtggggtgtgtggagaccgagccactggctttcacttcaatgctatgacctgtgaaggctgcaaaggcttcttcaggcgaagcatgaagcggaaggcactattcacctgccccttcaacggggactgccgcatcaccaaggacaaccgacgccactgccaggcctgccggctcaaacgctgtgtggacatcggcatgatgaaggagttcattctgacagatgaggaagtgcagaggaagcgggagatgatcctgaagcggaaggaggaggaggccttgaaggacagtctgcggcccaagctgtctgaggagcagcagcgcatcattgccatactgctggacgcccaccataagacctacgaccccacctactccgacttctgccagttccggcctccagttcgtgtgaatgatggtggagggagccatccttccaggcccaactccagacacactcccagcttctctggggactcctcctcctcctgctcagatcactgtatcacctcttcagacatgatggactcgtccagcttctccaatctggatctgagtgaagaagattcagatgacccttctgtgaccctagagctgtcccagctctccatgctgccccacctggctgacctggtcagttacagcatccaaaaggtcattggctttgctaagatgataccaggattcagagacctcacctctgaggaccagatcgtactgctgaagtcaagtgccattgaggtcatcatgttgcgctccaatgagtccttcaccatggacgacatgtcctggacctgtggcaaccaagactacaagtaccgcgtcagtgacgtgaccaaagccggacacagcctggagctgattgagcccctcatcaagttccaggtgggactgaagaagctgaacttgcatgaggaggagcatgtcctgctcatggccatctgcatcgtctccccagatcgtcctggggtgcaggacgccgcgctgattgaggccatccaggaccgcctgtccaacacactgcagacgtacatccgctgccgccacccgcccccgggcagccacctgctctatgccaagatgatccagaagctagccgacctgcgcagcctcaatgaggagcactccaagcagtaccgctgcctctccttccagcctgagtgcagcatgaagctaacgccccttgtgctcgaagtgtttggcaatgagatctcctgactaggacagcctgtggcggtgcctgggtggggctgctcctccagggccacgtgccaggcccggggctggcggctactcagcagccctcctcaccccgtctggggttcagcccctcctctgccacctcccctatccacccagcccattctctctcctgtccaacctaacccctttcctgcgggcttttccccggtcccttgagacctcagccatgaggagttgctgtttgtttgacaaagaaacccaagtgggggcagagggcagaggctggaggcagggccttgcccagagatgcctccaccgctgcctaagtggctgctgactgatgttgagggaacagacaggagaaatgcatccattcctcagggacagagacacctgcacctccccccactgcaggccccgcttgtccagcgcctagtggggtctccctctcctgcctactcacgataaataatcggcccacagctcccaccccacccccttcagtgcccaccaacatcccattgccctggttatattctcacgggcagtagctgtggtgaggtgggttttcttcccatcactggagcaccaggcacgaacccacctgctgagagacccaaggaggaaaaacagacaaaaacagcctcacagaagaatatgacagctgtccctgtcaccaagctcacagttcctcgccctgggtctaaggggttggttgaggtggaagccctccttccacggatccatgtagcaggactgaattgtccccagtttgcagaaaagcacctgccgacctcgtcctcccccgccagtgccttacctcctgcccaggagagccagccctccctgtcctcctcggatcaccgagagtagccgagagcctgctcccccaccccctccccaggggagagggtctggagaagcagtgagccgcatcttctccatctggcagggtgggatggaggagaagaattttcagaccccagcggctgagtcatgatctccctgccgcctcaatgtggttgcaaggccgctgttcacccacagggctaagagctagcgctgccgcaccccagagtgtgggaagggagagcggggcagtctcgggtggctagtcagagagagtgtttgggggttccgtgatgtagggtaaggtgccttcttattctcactccaccacccaaaagtcaaaaggtgcctgtgaggcaggggcggagtgatacaacttcaagtgcatgctctctgcagccagcccagcccagctggtgggaagcgtctgtccgtttactccaaggtggggtctttgtgagagtgagctgtaggtgtgcgggaccggtacagaaaggcgttcttcgaggtggatcacagaggcttcttcagatcagtgcttgagtttggggaatgcggccgcattccctgagtcaccaggaatgttaaagtcagtgggaacgtgactgccccaactcctggaagctgtgtccttgcacctgcatccgtagttccctgaaaacccagagaggaatcagacttcacactgcaagagccttggtgtccacctggccccatgtctctcagaattcttcaggtggaaaaacatctgaaagccacgttccttactgcagaatagcatatatatcgcttaatcttaaatttattagatatgagttgttttcagactcagactccatttgtattatagtctaatatacagggtagcaggtaccactgatttggagatatttatggggggagaacttacattgtgaaacttctgtacattaattattattgctgttgttattttacaagggtctagggagagacccttgtttgattttagctgcagaacgtattggtccagcttgctcttcagtgggagaaaacacttgtaagttgctaaacgagtcaatcccctcattaaggaaaactgacagaggagggcgtgactcacccaagcatatataactagctagaagtgggccaggacaggccgggcgcggtggctcacgcctgtaatcccagcagtttgggaggtcgaggtaggtggatcacctgaggtcgggagttcgagaccaacctgaccaacatggagaaaccctgtctctattaaaaatacaaaaaaaaaaaaaaaaaaaaatagccgggcatggtggcgcaagcctgtaatcccagctactcaggaggctgaggcagaagaattgaacccaggaggtggaggttgcagtgagctgagatcgtgccgttactctccaacctggacaacaagagcgaaactccgtcttagaagtggaccaggacaggaccagattttggagtcatggtccggtgtccttttcactacaccatgtttgagctcagacccccactctcattccccaggtggctgacccagtccctgggggaagccctggatttcagaaagagcaagtctggatctgggaccctttccttccttccctggcttgtaactccaccaacccatcagaaggagaaggaaggagactcacctctgcctcaatgtgaatcagaccctaccccaccacgatgtggccctggcctgctgggctctccacctcagccttggataatgctgttgcctcatctataacatgcatttgtctttgtaatgtcaccaccttcccagctctccctctggccctgccttcttcggggaactcctggaaatatcagttactcagccctgggccccaccacctaggccactcctccaaaggaagtctaggagctgggaggaaaagaaaagaggggaaaatgagtttttatggggctgaacggggagaaaaggtcatcatcgattctactttagaatgagagtgtgaaatagacatttgtaaatgtaaaacttttaaggtatatcattataactgaaggagaaggtgccccaaaatgcaagattttccacaagattcccagagacaggaaaatcctctggctggctaactggaagcatgtaggagaatccaagcgaggtcaacagagaaggcaggaatgtgtggcagatttagtgaaagctagagatatggcagcgaaaggatgtaaacagtgcctgctgaatgatttccaaagagaaaaaaagtttgccagaagtttgtcaagtcaaccaatgtagaaagctttgcttatggtaataaaaatggctcatacttatatagcacttactttgttgcaagtactgctgtaaataaatgctttatgcaaaccaa

SEQ ID NO: 86994 - DNA, 4252 bp, Homo sapiens
tacgcgtgtctgcgacacttgcaatgatgaaggagttcattctgacagatgaggaagtgcagaggaagcgggagatgatcctgaagcggaaggaggaggaggccttgaaggacagtctgcggcccaagctgtctgaggagcagcagcgcatcattgccatactgctggacgcccaccataagacctacgaccccacctactccgacttctgccagttccggcctccagttcgtgtgaatgatggtggagggagccatccttccaggcccaactccagacacactcccagcttctctggggactcctcctcctcctgctcagatcactgtatcacctcttcagacatgatggactcgtccagcttctccaatctggatctgagtgaagaagattcagatgacccttctgtgaccctagagctgtcccagctctccatgctgccccacctggctgacctggtcagttacagcatccaaaaggtcattggctttgctaagatgataccaggattcagagacctcacctctgaggaccagatcgtactgctgaagtcaagtgccattgaggtcatcatgttgcgctccaatgagtccttcaccatggacgacatgtcctggacctgtggcaaccaagactacaagtaccgcgtcagtgacgtgaccaaagccggacacagcctggagctgattgagcccctcatcaagttccaggtgggactgaagaagctgaacttgcatgaggaggagcatgtcctgctcatggccatctgcatcgtctccccagatcgtcctggggtgcaggacgccgcgctgattgaggccatccaggaccgcctgtccaacacactgcagacgtacatccgctgccgccacccgcccccgggcagccacctgctctatgccaagatgatccagaagctagccgacctgcgcagcctcaatgaggagcactccaagcagtaccgctgcctctccttccagcctgagtgcagcatgaagctaacgccccttgtgctcgaagtgtttggcaatgagatctcctgactaggacagcctgtggcggtgcctgggtggggctgctcctccagggccacgtgccaggcccggggctggcggctactcagcagccctcctcaccccgtctggggttcagcccctcctctgccacctcccctatccacccagcccattctctctcctgtccaacctaacccctttcctgcgggcttttccccggtcccttgagacctcagccatgaggagttgctgtttgtttgacaaagaaacccaagtgggggcagagggcagaggctggaggcagggccttgcccagagatgcctccaccgctgcctaagtggctgctgactgatgttgagggaacagacaggagaaatgcatccattcctcagggacagagacacctgcacctccccccactgcaggccccgcttgtccagcgcctagtggggtctccctctcctgcctactcacgataaataatcggcccacagctcccaccccacccccttcagtgcccaccaacatcccattgccctggttatattctcacgggcagtagctgtggtgaggtgggttttcttcccatcactggagcaccaggcacgaacccacctgctgagagacccaaggaggaaaaacagacaaaaacagcctcacagaagaatatgacagctgtccctgtcaccaagctcacagttcctcgccctgggtctaaggggttggttgaggtggaagccctccttccacggatccatgtagcaggactgaattgtccccagtttgcagaaaagcacctgccgacctcgtcctcccccgccagtgccttacctcctgcccaggagagccagccctccctgtcctcctcggatcaccgagagtagccgagagcctgctcccccaccccctccccaggggagagggtctggagaagcagtgagccgcatcttctccatctggcagggtgggatggaggagaagaattttcagaccccagcggctgagtcatgatctccctgccgcctcaatgtggttgcaaggccgctgttcacccacagggctaagagctagcgctgccgcaccccagagtgtgggaagggagagcggggcagtctcgggtggctagtcagagagagtgtttgggggttccgtgatgtagggtaaggtgccttcttattctcactccaccacccaaaagtcaaaaggtgcctgtgaggcaggggcggagtgatacaacttcaagtgcatgctctctgcagccagcccagcccagctggtgggaagcgtctgtccgtttactccaaggtggggtctttgtgagagtgagctgtaggtgtgcgggaccggtacagaaaggcgttcttcgaggtggatcacagaggcttcttcagatcagtgcttgagtttggggaatgcggccgcattccctgagtcaccaggaatgttaaagtcagtgggaacgtgactgccccaactcctggaagctgtgtccttgcacctgcatccgtagttccctgaaaacccagagaggaatcagacttcacactgcaagagccttggtgtccacctggccccatgtctctcagaattcttcaggtggaaaaacatctgaaagccacgttccttactgcagaatagcatatatatcgcttaatcttaaatttattagatatgagttgttttcagactcagactccatttgtattatagtctaatatacagggtagcaggtaccactgatttggagatatttatggggggagaacttacattgtgaaacttctgtacattaattattattgctgttgttattttacaagggtctagggagagacccttgtttgattttagctgcagaacgtattggtccagcttgctcttcagtgggagaaaacacttgtaagttgctaaacgagtcaatcccctcattaaggaaaactgacagaggagggcgtgactcacccaagcatatataactagctagaagtgggccaggacaggccgggcgcggtggctcacgcctgtaatcccagcagtttgggaggtcgaggtaggtggatcacctgaggtcgggagttcgagaccaacctgaccaacatggagaaaccctgtctctattaaaaatacaaaaaaaaaaaaaaaaaaaaatagccgggcatggtggcgcaagcctgtaatcccagctactcaggaggctgaggcagaagaattgaacccaggaggtggaggttgcagtgagctgagatcgtgccgttactctccaacctggacaacaagagcgaaactccgtcttagaagtggaccaggacaggaccagattttggagtcatggtccggtgtccttttcactacaccatgtttgagctcagacccccactctcattccccaggtggctgacccagtccctgggggaagccctggatttcagaaagagcaagtctggatctgggaccctttccttccttccctggcttgtaactccaccaacccatcagaaggagaaggaaggagactcacctctgcctcaatgtgaatcagaccctaccccaccacgatgtggccctggcctgctgggctctccacctcagccttggataatgctgttgcctcatctataacatgcatttgtctttgtaatgtcaccaccttcccagctctccctctggccctgccttcttcggggaactcctggaaatatcagttactcagccctgggccccaccacctaggccactcctccaaaggaagtctaggagctgggaggaaaagaaaagaggggaaaatgagtttttatggggctgaacggggagaaaaggtcatcatcgattctactttagaatgagagtgtgaaatagacatttgtaaatgtaaaacttttaaggtatatcattataactgaaggagaaggtgccccaaaatgcaagattttccacaagattcccagagacaggaaaatcctctggctggctaactggaagcatgtaggagaatccaagcgaggtcaacagagaaggcaggaatgtgtggcagatttagtgaaagctagagatatggcagcgaaaggatgtaaacagtgcctgctgaatgatttccaaagagaaaaaaagtttgccagaagtttgtcaagtcaaccaatgtagaaagctttgcttatggtaataaaaatggctcatacttatatagcacttactttgttgcaagtactgctgtaaataaatgctttatgcaaaccaa

SEQ ID NO: 86995 - DNA, 4255 bp, Homo sapiens
cggagccgtgtgcgccgggagcgcggaacagcttgtccacccgccggccggaccagggctcctgaacctagcccagctggacggagaaatggactctagcctcctctgatagcctcatgccaggccccgtgcacattgctttgcttgcctccctcaatcctcatagcttctctttgggaagcctttgggtctgaagtgtctgtgagacctcacagaagagcacccctgggctccacttacctgccccctgctccttcagggatggaggcaatggcggccagcacttccctgcctgaccctggagactttgaccggaacgtgccccggatctgtggggtgtgtggagaccgagccactggctttcacttcaatgctatgacctgtgaaggctgcaaaggcttcttcaggcgaagcatgaagcggaaggcactattcacctgccccttcaacggggactgccgcatcaccaaggacaaccgacgccactgccaggcctgccggctcaaacgctgtgtggacatcggcatgatgaaggagttcattctgacagatgaggaagtgcagaggaagcgggagatgatcctgaagcggaaggaggaggaggccttgaaggacagtctgcggcccaagctgtctgaggagcagcagcgcatcattgccatactgctggacgcccaccataagacctacgaccccacctactccgacttctgccagttccggcctccagttcgtgtgaatgatggtggagggagccatccttccaggcccaactccagacacactcccagcttctctggggactcctcctcctcctgctcagatcactgtatcacctcttcagacatgatggactcgtccagcttctccaatctggatctgagtgaagaagattcagatgacccttctgtgaccctagagctgtcccagctctccatgctgccccacctggctgacctggtcagttacagcatccaaaaggtcattggctttgctaagatgataccaggattcagagacctcacctctgaggaccagatcgtactgctgaagtcaagtgccattgaggtcatcatgttgcgctccaatgagtccttcaccatggacgacatgtcctggacctgtggcaaccaagactacaagtaccgcgtcagtgacgtgaccaaagccggacacagcctggagctgattgagcccctcatcaagttccaggtgggactgaagaagctgaacttgcatgaggaggagcatgtcctgctcatggccatctgcatcgtctccccagatcgtcctggggtgcaggacgccgcgctgattgaggccatccaggaccgcctgtccaacacactgcagacgtacatccgctgccgccacccgcccccgggcagccacctgctctatgccaagatgatccagaagctagccgacctgcgcagcctcaatgaggagcactccaagcagtaccgctgcctctccttccagcctgagtgcagcatgaagctaacgccccttgtgctcgaagtgtttggcaatgagatctcctgactaggacagcctgtggcggtgcctgggtggggctgctcctccagggccacgtgccaggcccggggctggcggctactcagcagccctcctcaccccgtctggggttcagcccctcctctgccacctcccctatccacccagcccattctctctcctgtccaacctaacccctttcctgcgggcttttccccggtcccttgagacctcagccatgaggagttgctgtttgtttgacaaagaaacccaagtgggggcagagggcagaggctggaggcagggccttgcccagagatgcctccaccgctgcctaagtggctgctgactgatgttgagggaacagacaggagaaatgcatccattcctcagggacagagacacctgcacctccccccactgcaggccccgcttgtccagcgcctagtggggtctccctctcctgcctactcacgataaataatcggcccacagctcccaccccacccccttcagtgcccaccaacatcccattgccctggttatattctcacgggcagtagctgtggtgaggtgggttttcttcccatcactggagcaccaggcacgaacccacctgctgagagacccaaggaggaaaaacagacaaaaacagcctcacagaagaatatgacagctgtccctgtcaccaagctcacagttcctcgccctgggtctaaggggggcggagtgatacaacttcaagtgcatgctctctgcagccagcccagcccagctggtgggaagcgtctgtccgtttactccaaggtggggtctttgtgagagtgagctgtaggtgtgcgggaccggtacagaaaggcgttcttcgaggtggatcacagaggcttcttcagatcagtgcttgagtttggggaatgcggccgcattccctgagtcaccaggaatgttaaagtcagtgggaacgtgactgccccaactcctggaagctgtgtccttgcacctgcatccgtagttccctgaaaacccagagaggaatcagacttcacactgcaagagccttggtgtccacctggccccatgtctctcagaattcttcaggtggaaaaacatctgaaagccacgttccttactgcagaatagcatatatatcgcttaatcttaaatttattagatatgagttgttttcagactcagactccatttgtattatagtctaatatacagggtagcaggtaccactgatttggagatatttatggggggagaacttacattgtgaaacttctgtacattaattattattgctgttgttattttacaagggtctagggagagacccttgtttgattttagctgcagaacgtattggtccagcttgctcttcagtgggagaaaacacttgtaagttgctaaacgagtcaatcccctcattaaggaaaactgacagaggagggcgtgactcacccaagcatatataactagctagaagtgggccaggacaggccgggcgcggtggctcacgcctgtaatcccagcagtttgggaggtcgaggtaggtggatcacctgaggtcgggagttcgagaccaacctgaccaacatggagaaaccctgtctctattaaaaatacaaaaaaaaaaaaaaaaaaaaatagccgggcatggtggcgcaagcctgtaatcccagctactcaggaggctgaggcagaagaattgaacccaggaggtggaggttgcagtgagctgagatcgtgccgttactctccaacctggacaacaagagcgaaactccgtcttagaagtggaccaggacaggaccagattttggagtcatggtccggtgtccttttcactacaccatgtttgagctcagacccccactctcattccccaggtggctgacccagtccctgggggaagccctggatttcagaaagagcaagtctggatctgggaccctttccttccttccctggcttgtaactccaccaacccatcagaaggagaaggaaggagactcacctctgcctcaatgtgaatcagaccctaccccaccacgatgtggccctggcctgctgggctctccacctcagccttggataatgctgttgcctcatctataacatgcatttgtctttgtaatgtcaccaccttcccagctctccctctggccctgccttcttcggggaactcctggaaatatcagttactcagccctgggccccaccacctaggccactcctccaaaggaagtctaggagctgggaggaaaagaaaagaggggaaaatgagtttttatggggctgaacggggagaaaaggtcatcatcgattctactttagaatgagagtgtgaaatagacatttgtaaatgtaaaacttttaaggtatatcattataactgaaggagaaggtgccccaaaatgcaagattttccacaagattcccagagacaggaaaatcctctggctggctaactggaagcatgtaggagaatccaagcgaggtcaacagagaaggcaggaatgtgtggcagatttagtgaaagctagagatatggcagcgaaaggatgtaaacagtgcctgctgaatgatttccaaagagaaaaaaagtttgccagaagtttgtcaagtcaaccaatgtagaaagctttgcttatggtaataaaaatggctcatacttatatagcacttactttgttgcaagtactgctgtaaataaatgctttatgcaaaccaa

SEQ ID NO: 86996 - DNA, 577 bp, Homo sapiens
cggagccgtgtgcgccgggagcgcggaacagcttgtccacccgccggccggaccagggctcctgaacctagcccagctggacggagaaatggactctagcctcctctgatagcctcatgccaggccccgtgcacattgctttgcttgcctccctcaatcctcatagcttctctttgggaagcctttgggtctgaagtgtctgtgagacctcacagaagagcacccctgggctccacttacctgccccctgctccttcagggatggaggcaatggcggccagcacttccctgcctgaccctggagactttgaccggaacgtgccccggatctgtggggtgtgtggagaccgagccactggctttcacttcaatgctatgacctgtgaaggctgcaaaggcttcttcaggcgaagcatgaagcggaaggcactattcacctgccccttcaacggggactgccgcatcaccaaggcacattcaacgcgctccgggccattcaacagcgctccgggccacccaacggctccggcacagtcaacgctaccggccgtccacgccgccgccaagtgcatcgcgc

SEQ ID NO: 86997 - DNA, 440 bp, Homo sapiens
caataataatgataaggctctttctcattgttgtcagtgtaatttatctatttaattatagaacctagttccaggatgcttaatctgaagtatatacttggggcaaaatgaattatatcttaataataatctggaatttttctctctaacttgacatattttaattcttgctagattttcaaaatgtcatacctcgaaccaccaccagatggctatgagaatgttacaaatattgtgccaccatataatgctttctcagcccaaggcatgccagaggtaaaataaaatacatttgtaacccaagtctttaaatggttcttttgctatataaaacctgtatagaggactaaaaccagggaaattaggtgaatcattcatgcggattcattgtttgatattcagtactatgaaaacctcatccctcaaatttaaaaaattat

SEQ ID NO: 86998 - DNA, 300 bp, Homo sapiens
gacattagttccatgagccataaaaaagtgacattcctttggggatttactgcccctgaatcatgtgagagccccagaaacaaagcatttctcaaatatgcatcattttaggtagatgagaaagaagccacagtcacctccgccctctggactgcagagagcttagctcacatcggcatttgcatccaacagcacaacatggaaagcagtacacaacaagaacaggcagaagtgtcttcataaacacattttgcctaaatattctgtattaaccacagccatccacttacagggtgttag

SEQ ID NO: 86999 - DNA, 209 bp, Homo sapiens
caatatgaatgtctttaaagtcagtatcagcagcaaagaaggtactgcacatacgatgtgcaggggaaaacctttttaccaggcacagaccaccaccaaagcccctctgcctaaatctgtatttgaaaagctaattaaagattttttttttctttggggtcttgaaatactttgcctttgaaagctctttgttaaaatgaaaatgcctt

SEQ ID NO: 87000 - DNA, 184 bp, Homo sapiens
aaatctaaatattattcctcatagcacagtttctggtctccttaaattaaggatcctactcatcaggattgaataaaaagggggaaattcctaaaattggtatattgtataatattgtgggttaagtaaaatttaggggggcattatggaaatgtacctattttaaagggcagtggcaattact

SEQ ID NO: 87001 - DNA, 658 bp, Homo sapiens
  misc_feature (32)..(32): n is a, c, g, or t
gtcctgcttctgagaccagacagcctttcccnatttttgaatcttcctgccgttaagtctaggttagaatttttattaccttatgtctagacaattgcagtggtttcctaactggtctctagtataagaggtcttcaaaaagttcatggaaaatgtgtattatgaaaaaaacttgcatggatttcaaaatttttttgcaccaaaataaactctgtactaactgagcaggatctagtgtgaggcactgagaaggataagacatcagtttgaaaagagcccctatcagagcaacatgaactctgctaaaattcaagtaagaacaaacatccaatttatggtgaaacctggttggaagaatggtgaaatcattgatgctttacaaaaagtttatggagtcacacctgtaatcccagcactttgggaggccaaggcaggcggatcatgaggtcaggagatcgagaccatcctggctaacatggtgaaaccccacatctactaaaaatacaaaaaactagccgggcgtagtgcgggcgcctgtagtcccagccactcgggaggctgaggcaggagaatggcgtgaacccgggaggcggagcttgcagtgagccgagatcgcgccactgcactccagccttggcgactgagcagactccgtctc

SEQ ID NO: 87002 - DNA, 950 bp, Homo sapiens
ctataaggggaaaagaatcacattggtctcagacttgtcatctgttcgttggagtgctacaacatactgctatttttgaagttctgagggagaactgttttgaatttagacttctatcttgagtgaaactgtcaagagtaagggcacagcaaggacattctaccaattttagaacatgcaaggatttcagaaattaactcataaaacacaacctgcacggcatggtatcaaattatgtaaagaaaaacttggtaaacaagaaattgtcaaatttataatcatagctacgtatttgaacacagcgcttagaaattgtcagataaagagttcaaaatagaggaaacattttgaattatatagtgcacaaattttaatagctatagaatatttgttttcaaatgccatgaaaaaatgaccatgaagcaaaaaccacaatatttttttgtttgttgataggtaggaattcagggtccatcctgtcatcacaatgcaatgaaacaaaaaattagcaagtggatagcaataaatcaatttttaaaaatcagacaaaagaaaacactgtccttgtaatgcttgcatttaaaaggaaataaaaacttatgaaagagaatctttattttatttaagcagttctagattatacaaaatgttgaaacatctcaatttggtctctgaggctagcataatccttattccagaaaattgttcatcaaagatagctatagaccagtctcacttacgaacaaatgtaatttgttgaaactggtcatgttgaaaaaacatgaccaattaatatcccaaaataatgtgtcatggtagagtagggtttatctgaaaactgcaacatgacgattatgtaactcaatcctttaggaaatttattactttaacttaaaaaaaaataccataagcttgatagatgctcgaaaaacatttcctaagattgaaca

SEQ ID NO: 87003 - DNA, 229 bp, Homo sapiens
gaggacacagggagaggacggccatctacaagtgaaggagagaggatgcagaatgaactagtcctgttgatactctgatctctaacttctaacccccagaactgtgagaacataaatttctattgtttaagccacctagtctgttgcactttgttatggcagcccaagaaaattaacacagcaaaggttgtagagtgtctctcttggggctttctcaatacctagcaat

SEQ ID NO: 87004 - DNA, 287 bp, Homo sapiens
ggtcagctcaccccttaactataataaccctgtgggagtgagactaatgctatagaaacccagagtaaagcagaatgtatagttacatcttttaaaaaaaaaagcattggcaatctgtagtgggactggatactaagatagaatttaaaacctgtgagttatattttccacgcatttaattaccttgttttactgcctaggcactttacttggtacgatcatctttattttaatcatcattttcctctattggataattttcaagcacagaaaaaggtaagtatagc

SEQ ID NO: 87005 - DNA, 527 bp, Homo sapiens
ttttttttgtgtaatggtatgcttttaagaagtgacagccaatcttgaacgtggcaggggtaggggaagtcccagctccttgaatactggctgtacttgtaattgagaacgtgttctgcctgatgcttacagtttggcagcataattgcggattcttatctgaaacactgaaggttaaaataaatagaagaattgtttctttcacttaacatgcttgtgagattcattcatatgatgtgcacatcagtagtcatccaggctcccatgacttctctaaagaagaaagaaactagtctctttcgcattggacaggggggtcgcttgactggaaaaaacctgcaaggaaaccctctggcatcccaatctgattccaatctgcagaactgtaagaaaaaattgttggtagtgccgtgctcacctgtaatcccacatttgggaggccaaggtgggtggttcgcttgagccatggagttcaaaaccagcctgggcaacatggtaaaactcctctctacagtaccgagtcgatg

SEQ ID NO: 87006 - DNA, 518 bp, Homo sapiens
agcgatttaagagcctcggaaatttcctttaaggtcaggagagaagctggtaacagatggggcgaaggaggaaaagttctttttgcggcaccctcacgccttcccagccctttcgcggtttactcgctccccggaaagcagggcattcaagcagccctgaggagaggtccacatggtgagccactgagggccttgccaagagccagcaccaacggtccaggtttggagtgtaccaccttggaagtgaatcttccagtccagtcaagccttcagatgacttcagaaccgtccatgtaagccactcttggattcctgacccacagaaactgttggagtaagtgatgtttctgaagcaccaatgaaaatgaagtcctgaagtcctgtgctcaatatgaaatgttggaagttagaagaaaaaaacaaaacttggatccaatctcaaggcactttttgtttaatgggaagaagtggattattttaaaagctacaaataaagttacataaaagtagcaaagttg

SEQ ID NO: 87007 - DNA, 699 bp, Homo sapiens
agcgatttaagagcctcggaaatttcctttaaggtcaggagagaagctggtaacagatggggcgaaggaggaaaagttctttttgcggcaccctcacgccttcccagccctttcgcggtttactcgctccccggaaagcagggcattcaagcagccctgaggagaggtccacatggtgagccactgagggccttgccaagagccagcaccaacggtccaggtttggagtgtaccaccttggaagtgaatcttccagtccagtcaagccttcagatgacttcagaaccgtccatgtaagccactcttggattcctgacccacagaaactgttggagaacatcacctgtagtcttgccagtgagatcaaactgaagtccaattaacctctggatccagctgccaatttgcaggaaatagaggagagaagcatctgttgaactgcaccatgagtatacactcagcaaaggccaaactgtggaaaatgatacaggtcaaacagcctggattctttaacagtaagtgatgtttctgaagcaccaatgaaaatgaagtcctgaagtcctgtgctcaatatgaaatgttggaagttagaagaaaaaaacaaaacttggatccaatctcaaggcactttttgtttaatgggaagaagtggattattttaaaagctacaaataaagttacataaaagtagcaaagttg

SEQ ID NO: 87008 - DNA, 638 bp, Homo sapiens
agcgatttaagagcctcggaaatttcctttaaggtcaggagagaagctggtaacagatggggcgaaggaggaaaagttctttttgcggcaccctcacgccttcccagccctttcgcggtttactcgctccccggaaagcagggcattcaagcagccctgaggagaggtccacatggtgagccactgagggccttgccaagagccagcaccaacggtccaggtttggagtgtaccaccttggaagtgaatcttccagtccagtcaagccttcagatgacttcagaaccgtccatgtaagccactcttggattcctgacccacagaaactgttggagctgccaatttgcaggaaatagaggagagaagcatctgttgaactgcaccatgagtatacactcagcaaaggccaaactgtggaaaatgatacaggtcaaacagcctggattctttaacagtaagtgatgtttctgaagcaccaatgaaaatgaagtcctgaagtcctgtgctcaatatgaaatgttggaagttagaagaaaaaaacaaaacttggatccaatctcaaggcactttttgtttaatgggaagaagtggattattttaaaagctacaaataaagttacataaaagtagcaaagttg

SEQ ID NO: 87009 - DNA, 576 bp, Homo sapiens
ggctggtcttgaactcctgacctcaggtgatccacccacctcagcctcccaaagtgctgggattacaggcatgagccaccgtgcctggccttttgtatctgttttattttttaaataataagattaaaaataaatattctgcatgattaaacaaatacagatttaaatttttacagtccaattgagtgatttcctcatgttccaaaaccaggaagtaggtgtgggacatctatctccgtattgcatacacagtctggattctagttgtagactccatatgggctgtcatacacgctactacagaaatgagagaaatccttgggaaatggaaccatctcacacatgagagacatctctgacaacttattcataactgaatacttctcatttatctttaccagtaagtgatgtttctgaagcaccaatgaaaatgaagtcctgaagtcctgtgctcaatatgaaatgttggaagttagaagaaaaaaacaaaacttggatccaatctcaaggcactttttgtttaatgggaagaagtggattattttaaaagctacaaataaagttacataaaagtag

SEQ ID NO: 87010 - DNA, 117 bp, Homo sapiens
gatctgatattgaaccctatgccaaatagcgtggcatgaggccagagaacagtgcttgccttccccgtctccacccaaattgtcccttgctctggatattatgccagttccatattt

SEQ ID NO: 87011 - DNA, 362 bp, Homo sapiens
atattgatactcataagtaaaattggtccataattttttgttttatctttatcaggcatacgtcatcaaagttattctctcttcataggaagttttccttcatgttacatattctccaacagcagaagttcaaagcatgtgaattgtatcagctgtaaagtgtgtattagaaatacatgaatgttactggtatcctctgtaagtccaaggtgccacatatcactcagtgacaaaaggggtttctctgggcggttggaataagttgtcactttgaggagttccatacagctttctgcctgtgcagggaaatctttgctgttgtctaattctgacatggtttggatctgtgtccccacccaaat

SEQ ID NO: 87012 - DNA, 357 bp, Homo sapiens
gcacggcgaagtaagaaaagatcaacaaattaatgacctaaatgtatgataaacagtaggcatacttctgaaatccagaactggcctaacaaatacattcttgtcaaaatcagagttattatcttcagagtgtaatgatctcttacattcaattattaaaactatctataaaatattatagtctttctttacaatgaagtttttagagccataagtaaggagtaaaagtttccctactaataaactctgaataccttaccaactgtaagttaaaagccatcataagatgctaacctaagaaagaaaacacagtgaatgtgagaccagtcactatgttataaatgcaaaccccaaagt

SEQ ID NO: 87013 - DNA, 252 bp, Homo sapiens
ctgtggaagggactcactgggccagcccatcctcaagtgtgcatgagggactaagctctacctcccacttacagtcttttgaagctttgcaagtcttgtttctttttcctttttttgatggagtgttgttttgtcatccaggctggagtgtagtggcatgatcttgggtcactgcaaccttcctcttctgggttcaagtgattcttgtgcaccagcctcctgagtagctggggctacaggcatgcaccacca

SEQ ID NO: 87014 - DNA, 292 bp, Homo sapiens
gtccagcagagtaactagtcgtttgtggtcaagtgtaaaaatgaatgattgagttgtctatctggatgagcctttcgtttatttcatagttaacatgttaatgaacatgcaattaaaacatccatatcagctcgaatggctcctctttttcatcaggtatggtttagcagttgtttgaatctttagcaccttaatttttgtttcattcaagtgattttcctgaagtcattgaagaatctaccttgacaccaattttaactagagaaattcaattatttgctgaaagttagta

SEQ ID NO: 87015 - DNA, 453 bp, Homo sapiens
acattcatggtcctatgggcacactccacagaatacacaccacagaagatgccatgtaaacactgtccctggagttgtgcagtgccattaccctgggctgcttcctctcctaagagctgactgtgctgcaaatagtcagttccactataagatgacttatgtgttcctgaaaatcattgtgctatataaaattgtgtgattaaaaatcacagggtaggccaggtgtggtggctcatgcctgccatcccagcactttgggaggctgaggcaggtggatcagctcaggtcagcagttcaagaccaacctggacaacaagatgaatccccatctgtactaaaaatacgaaatcaaccaggcattgtgcacacctgtagtcccagctacttgggaggctgagacacaagaatctcttgaacccaggaggcggaggctgtagtgagccaagattgtgc

SEQ ID NO: 87016 - DNA, 397 bp, Homo sapiens
aagtaataattgtaaagaatagaatagcataatttcaaaccaatacatataacggctgacatctggaatctgaaattgcttgtcattggtggttttataatcatatatatcaaaagtcactgcttttcataaagcaaaattacacaagtattaagatttaagtaaaatacccagttttccaacaatcagtgtaaatgtatttaaaagtggtgaaaataggataaattttcttaaaattttcattttaatggtgcttaatattcacttgcctaaaattttctctcaggtttaaaaaatgttatgtattctttggaatcaatccaacttgcatttactgcatttactcaacattctcactcaaggaaccaaggcaagaaatattctcttctactggcag

SEQ ID NO: 87017 - DNA, 556 bp, Homo sapiens
ttggtacagtcttgctctgtttcccaggctagagtgcagtggcttgatctcggcttactgcaacctctgcctcctgagttcaagcaattctcctgcctcagcctcccaagtggctgggattacaggcgcccaccaccactcccagctaatttttgtatttttagtagagacgggttttcgcgatgttggccaggctggtttcgaactcctgacctcaggtgatccacccgcctcggcctcccaaagctctgggattacagatgtaagccaccacacatggcccaggaatgccttttccagtatacctatccaaaactattcagtaggacctgaatgaagttccatctcctttgtaaaatagttcttataaacacagatcttttcaagtcttaaaattccataactcctattttctgtgcctcacaatggaagatttaccatatattgtcttacgttgttctctgatgtttcattgtctttattttttcatttcaactatctacataaaaaaaagccttctctagggtctgtatctcatgcttttgtgtctcctctg

SEQ ID NO: 87018 - DNA, 438 bp, Homo sapiens
cctctagtccacgggcctctggctttaccccaaagccggcccatagagctgtggctcaccttcccaggcccccacatggctaacctccgaggaccttttctgtcctcctgtgccctgccctgtctgcccttggtttttgccctgcccgatgtccctcctgcccctatctgggcctcagcattcctggtcttctctgtgttttgagccactactcgcttcctctgcatcatttgctcttgttgggggatgagtccccagtactctggcccagccctcactttcccggggaggggttccctctgcctggaatggtcttctcccatcacccactgctgcactctgccctggcctctgagcagctacgtgcccccctccaagagggctgtggcccccgtgcccgcagtgcctcgggcttccatggctttttgtttgggaccc

SEQ ID NO: 87019 - DNA, 571 bp, Homo sapiens
  misc_feature (482)..(482): n is a, c, g, or t
ctcctctgcaaggggcctttgggattgttctggacatggctgaagattgacttagagattgaccctccacctcgacattactgacatttggggccaggtgattctttttgaggggactgtcccctgcattgtaggatgctgagcagcatcccgggcctcaccagatgccagtagtgccatcccccaaccatacccctggttgtgacagcccccaaaaatgtctctagacattgcgaaatgttccctgcagggcaaaattgcccccatttgagaaccactggcttggagaagggactacaaatgtacttcctcccccattcttttgacgctaagccaccctggtcctgacgcctcccctcacttagaaaaggcatacaggaggccgggcatggtggctcacacctgtaatcccagcactttggggaggctaaggtgggcggatcacaaggtcaggagtttttgagaccagcctggccaacatnggtgaaaccccatctctactaaaaatacaaaaattagctgggtgtggtggcgggtgcctgtaatcccagctacttgggaggctgaggca

SEQ ID NO: 87020 - DNA, 206 bp, Homo sapiens
ggtcaccccaattttgagccctttggggattttaaattgtaaatgagggtgcttaagattcaacttctttagttgtctttttagcttccaaattttatttttgccttgtttggttttaagagtttatacttttaaaataatctctttactgttgtttttctggtttttcaggagggagaatttgtgttgaattgggtttgttctga

SEQ ID NO: 87021 - DNA, 427 bp, Homo sapiens
tcagcagtgtcaactcattgacaattatactaagttctgatctttttacatttggattttgagaatgcttgtgtattatttttagggaattatataaattagatatcagaaattaattactattttgaatatgtggcacatgattttttcactataagataatatataaataagtaaaagaaactaatttgtattttggatctgtttgctacattaaatatttaatttcgttccatgtttagaaggggaaaaatgatctccattcagaaagattttgtttttaagctgcaagtgttaagaatatcattcttgctaatctagtagatttttcattattgagatcatagtacaaagtaatattaaaaatgaaaaatttttctagatcccgcaaatgttggtacactaactcctagttttacgtccctat

SEQ ID NO: 87022 - DNA, 311 bp, Homo sapiens
ggtatttcagaaaagccaaaggcattacagaagcctttcctgagttgacaggcaagagtggcaccaggaatcaagggctgacacatgtcatcagcctggaaaaagtggagcttggacattaatgatggctcttgtgaacactcagtgtgataaagccaagaggacttggcttggggtttagtttgcataggcagggagttagagcttagagaacacctgccaagagttttcactgtcccggctgttggtgatgcatccttcatccttgacttctgtcactcctttttagtgggtgatggtagaaatgctgg

SEQ ID NO: 87023 - DNA, 944 bp, Homo sapiens
ctacaggtgcctaccactacgtccagctaatttttttgtatttttaatagagacagggtttcaccatgttagccaggatggtctcgatctcctgaccttgtgatccacccgccttggcctcccaaagtgctgggattacaggcgtgagccactgcgcccggcctctggatactaatcttcaggttacatatattgtcgacattattgcctcatttgtggtatgccttttcacattctctgtgatgtcctttgttagttttgtttttttgagacggagtcttgctctgtcgcccaggctggagtgcagtggcaccatcttggctcactgcaacctctgcctcctgagttcaaatgattcttcgtgcctcagcctcccaagtggctgggaccacaggcatgtgccaccaggcctggctaattgtgatatcctttgaacagaagttcttaactttaatgtagtcaaatttatgaatatatacatatatatgtatatatattttttttaatgagacggagtttcattttttttaatgagacggagtttcactccagccttgttgcccaggctggagtgcagtggcgtaatcttggctcaccgcaacctccacctcccaggttcaagtgattctcctgcctcagcctcccgagtagctgggattacaggcatgcaccaccatgcctggctaattttgtatttttagtagagacggggtttctccatattggtcaggctggtctcgaactcccgacctcagatgatctgcccgcctcggtctctcagagtgctgggattacaggcgtgaactactatgcccagcctatatattctttatagttagcaattcttgggtttaagacatcttttattacctcaatgtcatcaagagagtttcctataatttcttctaaaatattgatttttttggttgaacatttatatcttt

SEQ ID NO: 87024 - DNA, 670 bp, Homo sapiens
aaccaaagcactttagtaaaactctctactactagaaatgtgtttaacattattggtgtgttttcaacaatacacatcaaactttgagagccactcttgtgagtgaaattgctgtggagtatggagtgagaagttattctttgatctattttaggctacttgcaaagaaatataatagaatggctagaagagccatctctggagtcaggacagagtatctgtggccaagaattagcaggatgaccctgtagaagttattcacataactgaatttttaatgagataatgcatgtaaactactaagttttagatggtatagtatctgatcagtatacggtagctacttattatttgaatatgttctctaattcctcattgatttgtatttattaaagattattctacagattcaacttgtgctgatgtctttccactggctacagaagattcccagtttacttcacgtatctgaaaaaaagaatttcttatttaaatttacccctacacaactggaggcaggggggcagtgtgtgggaaaggtgaatttttatagaagtataaactggttgggcggggcaacaagctggtcggggagggttgccttaccattgcccctgttgggaaccagatttggaaacccccctttaaatgggcaggaaccctcggggga

SEQ ID NO: 87025 - DNA, 407 bp, Homo sapiens
aatagaataaaattggggtctgagagctggtaccatgttactcgatttccgatgatgaatcctctcaccagctcaagggcaccaacttgatggatttaatgtaatgtctaaaatgactaagctttgatattgtaagtagcctgaccatatcatgagattctgagtaacttgatttgtctggcattgttctgaagtggatccactttatcaaagccacagatatatggcaaagttgaaaagataatgtgaaagttcctttagcacacagacgtcccaggccctggtttcaatcacaccagtaggacggaattttaggcagttgatcataaaagtttgtccaaacttaggaaatgtacaattaactagaaagaaggatccactatgattgactataaaatgtgccacct

SEQ ID NO: 87026 - DNA, 373 bp, Homo sapiens
tctttagccgagggtgttggggtttgccttcttcctcagaaaatagttcaggggaagagatgcatggttaatttggttcctaactggtcctctatttactggtttttgattttttttttttttttgagacggagtctcgctctgtcgtccaggctggagcgcaatggctcgatctcagctcactgcaacttccgctttctgggttcaagcgattctcctgcctcagcctctcaagtagctgggattacagtcgctcaccgccatgcccggctaatttttgtatttttgtggagaccgggtttcaccatgttggccaggctggtatttgaactcgaccttcgcagcctagtgctatttttaactagggggttct

SEQ ID NO: 87027 - DNA, 396 bp, Homo sapiens
tctcatgcccttgcacctgccgctcttcctctgactaactcctattgatccttcaggtttctggacatcacctcctccaggaagcccttccttgaccctgcccagcctgagccaggcgcccttgctatgtgctctagagctccctgagtgtcctgtccaagtgttcaccccatgataacataattttctatttgaggtctgcatcccctgctagatctttctgtgtgtcttgttattttagcccctgaagctaggatagtagccacaaaaatattcacaaacacctctgaatgaacaaacaaaagtagatttgcaaatctataaaattcaactcaaaactgctatcagtctaaaagaacaactttcaaacaacaattttgagctctgttttcaaat

SEQ ID NO: 87028 - DNA, 440 bp, Homo sapiens
tctgggagtactgaagttcaagctacaccatggaacacatatggaatataacttattcattacttaattaattcacttatttgataaatatttgttgtgtgacattatgtcccaagcactatcctaggcagtgaacaaaaagacaaagtctctttctcatggagcttacatgcagatagacaaaaaatagtaggcacgaccaataaactatacactgtgttcaaaggtggtaagtgctatggagaaaatataaagcagggaaagggaatgagtgacagggtggagaaaagtactgctatttcttatagagtgcttagggaagaccaaactcgctataataaataatctaatatatttgaatcatagttaattcagtccatagtcaaaccttccgttcaatctgttaatatgcaatacctgccgggcgcggtggctcacgc

SEQ ID NO: 87029 - DNA, 516 bp, Homo sapiens
agtgctgtccatgcagtatcatacagattgaagggctctgagccttccaaagattcctggcccttctgtttttgaatggcattaaaaatcacctagcaattgagttcctactaatcacttatcatgagtaccttatggtctcaacagtgaactgcaccattgctttgtatgggagaaagttaaattggaagcttaaagagattctaggggttatctcattcaaacattcattcatttgaaaatttaggggattgtggtaaattattgttatggctccttctagccttagcattggatgataactgtgaagaatcatagaaatatttattattaatttcatttatttaacaaagttaatcactccttcctttgtgctgtcttgctgtatcctttatcttctgttaccataattatcactctgacttacaattacctgtttgtgtgttttatttatttatttatttttaatttttgtcagtaacataggtatgtatatttatggggccatgaaataca

SEQ ID NO: 87030 - DNA, 369 bp, Homo sapiens
caagtctcttaagacttctatgcttagttattctgtgagtcccttgtttgtcttctctctagcaaatattagttgggatagttctaacctgttagagatgttcagatagtgttgcaggaagatatcaaagttttttcttctttgttaccagattttttaccccaagcccctttatatcttatgtagcagcttttcttagatagaggagggtcccatgttgtccgcagtgggctccaacttgtggttggcccctcgagtgatctgttttccataataataaaaatctcccagcccacttgcttctccacctcaagtttttaaaatatcttcaaatattacctcataggaagccattagtcagaattatct

SEQ ID NO: 87031 - DNA, 366 bp, Homo sapiens
ttcacaaggcagatggttagccaagattcactcaacttctacaggataaggtcagttcatggatgactggaaaaatgtttcattccagattttaaaaccaattaaaaattggttttgttccaatttcagaagcaatgccaatgtatctctggcctccatgcgaaaaagaaagctttttcccagatgtctgctgccttttgatagctgttttcagctacggatacatcaacacatcttagtcctttagtctttctcttcctgcctcagatccttgcaggtcttgatataatatgtagttctaaaaatgatgttatgttatctataatcttacttgcctttggatgtatcaatagtgaccttaaaaat

SEQ ID NO: 87032 - DNA, 297 bp, Homo sapiens
atttctcggctcattttttttttctgttaagatgttgaaataacacctacttcacaggcttaatttaagaatgaaatgtgataatatatacaaaacacttagcatagtgatccattatgatctctgttattactatcaataatttggaaaaaatagatacctacttttaagaaataccttcatttttgttttttattagccatgtaaataaaactatcaggtattaaatattacatactgacatatattgaacatatatgtctgttttaatacatatatatttctttaatatatatg

SEQ ID NO: 87033 - DNA, 592 bp, Homo sapiens
tagattgcagtgggcctcataattgataccttgtctaggagctaccaatgtttcctgtgtcctcattagggagctggtgccctttgtctcatatgatgtagcagcttgaggacagtacaaacttttgaggtggctcctggagtttcagtcacaatcccttagaatcacgcttcagcatacggctagcttggatcttagagtaactggctcctagaagttccttggatctggagctggcgtaggagaggcaggtgtgatggtgtgttttatctgcattggtaaaactgaacaagagctgccactagggtgtgtgtgtttatgtgtctttgaggggtaggtgaaaatatgcattgtaggacccctgcctatataaataattggaatcattgaacatccatccctgttttggagaaccagtgacaacaactactctccaggcaggtgtcatggaacttaagacaaccgcagaacaaacccaactctgtagaaacaagtcccagtgcttttcagggcatctggtctaccccatgttctggggaagggaaccttgattgggcgcaaccaacacagggtgcatgtgggccagggctgg

SEQ ID NO: 87034 - DNA, 280 bp, Homo sapiens
caagttacccagtaatttgaatgtaagtagttgaaccgagagtctgacgtgctggcagacaccccatgctcgtattgttttctggctccttccctcttttctttccctttgctaagtaggtattctgaatgttattaaggatctcttagtgtagtggagtaaacggttctgcaaggaagtaatgacaaggctatttggtaatttcttataggagtaagaaaaaagttcttttggaacacagaggagtgggaggccaattttactttactgcttggtgctg

SEQ ID NO: 87035 - DNA, 429 bp, Homo sapiens
cagttattgggctaaccatttgagatagtggtggaaaagtaacatgatcttcctgtcctgaaacagtttagaggggatgagaggcaaacaaatggataaatataattattgattatgattaagaactacagaggtaatgaagaggaatgctcctttatataaggtgatcaggaaaaaactctgtaaatgtgacatctgaactgagatccactgttgagactgaggcagaattgcagagggctggcaaaagattgtcacagaaagaagtacagctggctagagcttagtgagtaatggggataaagttgtgaagtaagcaagaactggattatgcagtaccttctaggccttgataaggaactggttcttaagggtaaattgggaccggagggtattacatgatctgatttacatttttaaaaaggtcac

SEQ ID NO: 87036 - DNA, 440 bp, Homo sapiens
cgtctttattcttcaacaagttctatgccttcatcatttacttctccattatcctagccttcttcattctcctcatccaaaaaacctgaacccaactccactgctggatgcctgaccacgtgcaccagcagtcccatatctgagctccaaacagtaaatctttacatttagaccagtctgagaaggactcttctgtgattgccaccataggcttccaatgggaaacactgaggtcaggggtgaacgaagagaaaatgtgcagcgcccaggatcagcaggtgatggttcaatgggagtttctccccatcagcacttttgctgattctgatcccctctgagggcatgccctttccttttccctttccttatccaaatcccaactattcttcaaatgtcaagctcaggtcccacctcctatggggcacattcacacctctgca

SEQ ID NO: 87037 - DNA, 275 bp, Homo sapiens
tttaattagtgatttataattttcagcacacagctcatgcacatattttgttagctctacaccaaaatattttaatgatatttttgtggtatagttaaatatggtacctttaaaatttgaatatctgattattcgttgcccatatatggaaatactggttttctaccttgttaaattaacttttaaattgtgtctgctttttaataaactttctttggagtttatatgtagataatgatgtcctttaggatttcaaaaaagagtacactttattt

SEQ ID NO: 87038 - DNA, 394 bp, Homo sapiens
ccccctcccctccttcaggatctcctgaggacacactgcttcctctgcgcagatcctctgagccgcagccagcaagccttgatccaaaggtggtacttttaccccaggaaagctggagaagggacacacactcactggtgcacctcagggctggaaagggcatgctggcaggtgtggagcaaaatatcttctcagccccagaaacgtagacaacaagatgatacttcaggctagaatgactgggactctgaaatgtgcacctatgagggtatggtgtaaggctttttaacaaagtgtatgtgtgtgtgtgtgtgtgtacacacacatatataactttgtataactttatagcaatatgtatttaatataatattctccaaggtaaaaatacaaa

SEQ ID NO: 87039 - DNA, 1459 bp, Homo sapiens
atgaccagtttgaacaagaattcacccaactttcaagatgccttttcaaaaggatcttgtagtcagttggtatgtacagacaattggcatggaagtggtaggatataaatcggatgacgcctggctgctgaggtgccagctggatcagctggtgcacttcttgtttcttgtaagaggtttctttaaaatgactagtttgatgtatctggtaacatataggcctgactatacattttacattatttcgctatttgtaaactgggattttagaaagcacgtttgccatttgttaaagtacatgccccttaaattttggagtagtttttaaaagtttaaaatggtaatagaggagccagaaactttttaagcattgtaaaatgttttgaattgatattgactttgtttggaagagagtagaggcagggggctttaaagaaacaaagaaatgcattgtaaaaatgtagttttagagcaaattaataatgatggtggggaaagtgttgctaatttgtttatttccctggaagaaatgggaagtgtgataagcagtttaatttttaaggagctggtctcaattttagtactttttaattatgcaaataaatcaatgtttccttaaattttgtcattgctttgtcacagttgtctagggttcatatccaaccttctgtggcaattcaattttatatagtcttttaagaggtaattgtaatgtatttctgacagtataaacaaaaagaatataaggcatagaagaattgtcctctaaaaatatcaatgatgtatcctggaatgtgaagatgtccctttatagttaaaaattgaattattttaatattgtaccattgttagaccttgaatgagtccatgttaccgtgtgtgtctgtatatctatctgtagagaaagaaaaatgacaactgaaatgttacttttaaaaatcagaataaattgggcactgtctgtgttgcaccactactgtatcttttcgaaagaattaacagtatttgcctattgtaaaggttaattctgatgacgttttcacattcaccagactttttttcctgtattatttgcatccccaaatatttaatacaagtagattctgcatggcttgggcattcagagattaatagaatgatgactcaattttaattctaaagccatgaaaagttactttgagactgaacaattctgaattatttatgatacccaatgtccatgtttctttccctactgtaaaagaattgatcagtttcttcattaaagcagcaaaaacttattaaatcttgtaaataccatgtctcttttagatttctgtgtatgctgtgaatgaaatcattttgagatgaaattgtacaaaggcattttaaaaggctctgcatgcatcgtacctccaaacagtacatattcggaaagtcaaagattcctgcaaaataaataaactaaaagcaaacacta

SEQ ID NO: 87040 - DNA, 957 bp, Homo sapiens
aaagaatataaggcatagaagaattgtcctctaaaaatatcaatgatgtatcctggaatgtgaagatgtccctttatagtactttttaattatgcaaataaatcaatgtttccttaaattttgtcattgctttgtcacagttgtctagggttcatatccaaccttctgtggcaattcaattttatatagtcttttaagaggtaattgtaatgtatttctgacagtataaacaaaaagaatataaggcatagaagaattgtcctctaaaaatatcaatgatgtatcctggaatgtgaagatgtccctttatagttaaaaattgaattattttaatattgtaccattgttagaccttgaatgagtccatgttaccgtgtgtgtctgtatatctatctgtagagaaagaaaaatgacaactgaaatgttacttttaaaaatcagaataaattgggcactgtctgtgttgcaccactactgtatcttttcgaaagaattaacagtatttgcctattgtaaaggttaattctgatgacgttttcacattcaccagactttttttcctgtattatttgcatccccaaatatttaatacaagtagattctgcatggcttgggcattcagagattaatagaatgatgactcaattttaattctaaagccatgaaaagttactttgagactgaacaattctgaattatttatgatacccaatgtccatgtttctttccctactgtaaaagaattgatcagtttcttcattaaagcagcaaaaacttattaaatcttgtaaataccatgtctcttttagatttctgtgtatgctgtgaatgaaatcattttgagatgaaattgtacaaaggcattttaaaaggctctgcatgcatcgtacctccaaacagtacatattcggaaagtcaaagattcctgcaaaataaataaactaaaagcaaacacta

SEQ ID NO: 87041 - DNA, 390 bp, Homo sapiens
agttttgagaggattccaatgggttttttatatctagttgcagacttttcttgtggccctactgtggttgtgcactgcttaatgatggggatatgtatgaaaatgtgtcattaggcaattttgttgtattgcaaacattatagagtgtacttccgcaaatctaaatggtacagcctcctatacacctaggctatatggtatacctattactcctaggcaacaaacctgtacaccatgtcagcatactgaatactgtacgcaatcataacatgatggtgtttgtgtatctaaacatttctaaacatagaaaaggtatagtaagaatacaatactataatcttagggaccgtagttgtatatgcagttattgactaaaatatcatcacatgg

SEQ ID NO: 87042 - DNA, 366 bp, Homo sapiens
aacaatggtacaggttgggcgttgtggctcatgcctgtaatcccagcactttgggaggctgagacaggcagattgcttgagcccaggagtttgaggcttatttgagcaacatagggatactttctctctacaagaaatacaaaaattagccaggtgtggtggtgcctttgtacctggaggctgaggtgggagaatcacttgaggttgaggctatagtgagttgtgatcataccactatactcctgcctgggctataagagtgagaccctgccaaaaaaagaaagagaaggagagagagaacccatatttccatatcttgtatctaaaaagaatggctaacatttacatatattaatctcaaaggat

SEQ ID NO: 87043 - DNA, 746 bp, Homo sapiens
agtaaacccttcattatatctttcacagtacccagcaccaggactttcacatcgtgggtcttcaataagtaattgctgaattagagagtcattattgcatatcctacaagcaactagtcatgaggaattaatcctttatgacaagaaaacaccaccaaactcctgtcccagccgggctggttaaaggcagcagcactgaaaacttacaaacacagccaaaaaagtagaaaaagaaataataagagaacaaatctctgtgagcagatatatgtaggcaacgtttattcatctggacactaattctgccagaagggtggggtgatctcaagtatcatagatgcaaaaaggaactaagcaaaagaaaaatggtttagtcaccaaaggagaagatcagaggcattattatatgacagaagttataacaatcaaaattatgaaaggcttttgttttatgttgtgtctaagaaagcacagtcagagtaacttaaaaaaaaggaaaacagaaaaaaagagaagacacattaaaagggatatcattatgcagggtataaatttttaaagaacagcactaaattatttgaagtgaaagaaagactgaggagaaaggctgaaaatatgaagagaataaggcacataagtgagtagaatcaaagacaagatgaattaatgtaaagtgtaaactcaatggatgagaagtaaaggctaagataaattataggaggtgaaaggagcagcaggagcacagg

SEQ ID NO: 87044 - DNA, 426 bp, Homo sapiens
tgaactgcaatctcattgtttatctcagagcagtcttccctcaccccacctggagggggaattaaattccaggatcctttgcactaattcggatggccctggaaacccattaccatgcactgctgtgatgctgtgaatggccattcactagaagctcattggccacaactggccctgtcttttccaatgtcagcattgatgtggatcaaaatggagtttgttaattctcagatgggtcatttagatttcagggcctttcttcaagaggtccaatgcccacctcctctctggagctgctccgttacacttgccacactctctccctactcctgggagcctgcagtgtcctgaatggtcaagggtgttacttttttaaaaaactggaagaaatcatagtttgaattggaggcaaataaagaataattc

SEQ ID NO: 87045 - DNA, 116 bp, Homo sapiens
gatctaaaaataattcttaatcatgaatttaattcacgacttccttgttttcagtcttattcagcttactgtaggagattttaataaactaaagcttttgttgatttatgagttag

SEQ ID NO: 87046 - DNA, 341 bp, Homo sapiens
gaggggctagggaagcttattcccctgtttatctttttggggaaagataaaaagtggacttgagggtttaaatctggggttcccttcaaggaattagatgctggttgccgaaaggtctttgatagtgttcattcaatgctccctccctttgtagtgaggctgtttcagccaaggcaggggccgtcctgccagtacttgggcctggaggccctcaaggctacagacaatgagctgactttccttaggaaagtcaggagacctgaggaacacggcttaatggctctagaagacctatcccttatttcacctctaaataagggtgtcagcaatctgggtcattt

SEQ ID NO: 87047 - DNA, 264 bp, Homo sapiens
tttcatttgggtgagaactgctcctgtgaattgcattttacacgcctgtctctgacttatcagtggatgaagtgatgagctctgttcctaccttgtacatgggtttttgcagcataaaagtgcttaattctggactaagccttgttagaagaccaggagcttaattgagcttttagaagagaagaaaaggaaaagtgttttaacaagtccatgtttatgctaggtgggattgcatgtctacaatttacctgtcaaaaaagggaa

SEQ ID NO: 87048 - DNA, 172 bp, Homo sapiens
aggccctcctttcatctgcaggaacccacctccaggtccagagagcctcgttctggctccacaggcgcgagggggaaacacggtagtggcatttgctctcagcctctttgttttttggttgtgtgtgtgtgttttgtttttgttttgagatggagaccttgctctgtcgccc

SEQ ID NO: 87049 - DNA, 89 bp, Homo sapiens
gatctcttcccttaggaaatatcaacatctttatgtacatgtcagagtcatggtgtgatgacgtactttgaagcatggagtcagttttc

SEQ ID NO: 87050 - DNA, 630 bp, Homo sapiens
tacctaatgcctgtaccatcattgcatcttggaagtaaataacgtgttattggtcttacaggctcataggcggaagggacttgccttgagtctcagatgagactttggactttggacttttgagttgatgctagaatgacttaagactttgggggactattaaggaggggtgattatattttgcagcatgagaaggacatgagatctggggggccagggtggaattatatggtttggatatctgtcccctccaaatctcatgtcgaaatgtgatttccactgttggaggtggggcctagtaagaggtgtttgggtcatggggcagacccttcatgaatgccttggtgtcctcctatggcaatgagtgagttatcattcataagagagctggttgtttacaggagtctggcatctctcatttgcttccttttcttgccatgtaacacacctgctccccctttaccttccatcatgaatgaaagcttcctgaggcctcaccagaagccaagtggatgctggtgccatgcttggacagcctgcagaaccgtgagccaaataaacctcttctgtctgtaaattacccagccttggatattcctttgtagcaacacaaaatggactaatacagat

SEQ ID NO: 87051 - DNA, 406 bp, Homo sapiens
agtcctcattattatctaagatgtaatatgtggtcctgaacatggtttggtctgtgtctctaacaagaatccagatcatgacctggaccttctgggcatgagtctagagctgtgttgtccagtaaggtagtcacttgccatacagtcatttatacttcattttaatgcaatgaaaacttcagttttcaatagccacatttcaattggtccatagtcacatatgattagtggctcaggtagagatttccatcatcaccggaagttctgcggactgtgctggatccctgggaccagtatttgtgaaccagcagcaggaacatcacctgggagcttggaagaaatgtggaatctcagctgtgtccagacctactgagagagaatctgctttttacacaatcctgggtaa

SEQ ID NO: 87052 - DNA, 495 bp, Homo sapiens
tattttttgagacaaggtctcactcttttggtccaggctggagtgcagtggcatgatcaaggctcagtgcagcctcaacctcccggactcaggctcccccgactccacccctgcaccaagtagccgggattacaggcacaaattcatgccccggctaaggtatttttattaaagatggggtttcgccatgttgcctcggctggtctaggctggtctggacctaggctggtctcaacatggactctgaactcaagcaatccgctcgccgtggtctcccaaaatgctaggattacaggcatgagccaccgtgaccggcttgccagtggttctcaaagtgtggtctctgtaccaatagcattgttaccatcagtgaacatgttcgaaatgtaaattctagggccctaccccagacctaatgaatcatacactgggaatggtggtcagcaatctgtattttgttttatttctgtatttttgcattactgaattactgta

SEQ ID NO: 87053 - DNA, 339 bp, Homo sapiens
tagtagctactctatgcacaccgtatcttatgtaaagtgctgatttactgagtgtgagatgaatgcataactattttcctacctgctccttttctcttgtcacaggtggattaccacacctttcctctttcccctccagcctacttttcctttttaaacaatgaggctctcaaactcatctttggggaaagccactggcctctttctgtggcatgtcctcaactgtggcaaaataaacatctaaattggtacttgactctgatactttttggtttacatgtagttggagaagaaaaacagtgaaatttcttcctctgacggcagttgaaaggtgattta

SEQ ID NO: 87054 - DNA, 462 bp, Homo sapiens
  misc_feature (419)..(419): n is a, c, g, or t
  misc_feature (426)..(426): n is a, c, g, or t
ttgtgtggcgttctagaggatccctggcgggtgggtgcatgtatctgcatgtccttcctgcacacacagtgctcccctccgatgctgccagcctgtggtgacttcctcttctgaccccttcttcccccccggcctgttttatcagtgaaaggacttaactaagcagatctccaggtcacctttggaactcagctcaggtagcacagcaggtggtcttcctggaccttgtgcagagaactgggcccttctgggactccccttagttagtgctgttcactggattgggcatcacctcttgcctgtccccgcagctggactgagagcaggacagtccttacgtgcacaaacccggaaggatgcacaaacccggaaggatgcacaaacccggaaggatgcacaaacccggaaggatgcacaancccgganggatgcacaaacccggaaggatgcacaaacccggaa

SEQ ID NO: 87055 - DNA, 412 bp, Homo sapiens
ccgcagctggactgagagcaggacagtccttacgtgcatctccctcatctcagaggatggctcagtctaggctcgggctgtgtctgcccacaagcaaggcatcttcgtggcctgtgtagagcctccgttaattcgtggactcgttccacctgactcgtaacgagctcttgctgtgcactgaagactagttggagacttcgcacgtgttaactcgtggaacctacagcagccctgtgagtggctctgttatttccactcttctggataaggacacaagccatgttgcttgctgagccccacaaagcctgtgtgtggcagaggctggatttgaacccagggcccctgctcccaaggcctggctcttagctgctgccctcctttgagctgctcagttgcagcaagaaaacaaaag

SEQ ID NO: 87056 - DNA, 316 bp, Homo sapiens
gtgggacgccctctgccttgtcctgagagcaatgtcttctccatggggcagcatgggccctggatgggcctgagcatagcagaccacgtggtcacatgtgcatgtgtggacatgtgtgcatgtgtggatatgtatgctcctgagtgtatctgcatgtccttcctgcacacacagtgctcccctccgatgctgccagcctgtggtgacttcctcttctgaccccttcttcccccccggcctgttttatcagtgaaaggacttaactaagcagatctccaggtcacctttggaactcagctcaggtagcacagcaggt

SEQ ID NO: 87057 - DNA, 377 bp, Homo sapiens
gacatcgagtccctcctctccttctcccatgccttcctgcctgccatggcaaatctgagtggcttctataagcttctgctggtacaaatcaatgtggcaccatgagcttcatggtggcagaagagacaatagtccttagctctcctcccagtacaccccctacttggtcagtctgtaggccaacaagaaggttcctttacccccatgcaagacacttatgagaacacattacaagatggctgaccgtggaggatgagtggatcctgaaaggttgtcccaaactgttgatttggaaaagaaataagcacatagataaccttattgtgtgctgcatggaaaggaactgaatacatttgcctttaagcatgaaaaaaaaa

SEQ ID NO: 87058 - DNA, 384 bp, Homo sapiens
gtccctcctctccttctcccatgccttcctgcctgccatggcaaatctgagtggcttctataagcttctgctggtacaaatcaatgtggcaccatgagcttcatggtggcagaagagacaatagtccttagctctcctcccagtacaccccctacttggtcagtctgtaggtcaacaagaaggtcagtctgtaggccaacaagaaggttcctttacccccatgcaagacacttatgagaacacattacaagatggctgaccgtggaggatgagtggatcctgaaaggttgtcccaaactgttgatttggaaaagaaataagcacatagataaccttattgtgtgctgcatggaaaggaactgaatacatttgcctttaagcatg

SEQ ID NO: 87059 - DNA, 462 bp, Homo sapiens
gattaggtaagacaggatgttggtacatttgaggtcattaaaccaagaagggaagggtgggggttgcggggggggcaaagaaatcttgctaaatatattgtggagctgaactaaatgctgaatagctaagggacattctttgtgttctgtgccaagactttaaaaccctgtttagaaacagactagaatgatggagacagctccatctagatgcagtgcattggtaaatgcctgtctttccaagaaatactattttacttgtccttttatggaggaggcgtggaaggctgtgatgtactgggttgtataacatttttgtaagcggatacagctagtatagaacctagagaaacaataaaagccgccttttcacatggtgtctcacagttcccgtttcattactaggaaaataatgaatatgtcacagagaagctaattcgtatgaaaggtttttgtcagctg

SEQ ID NO: 87060 - DNA, 110 bp, Homo sapiens
cagagatgggctaccaaataaaatattaataaaatgggaagtattattttttctagagatcctcattatacatgcaaattaagtatattgcttaagtaaacaaagcaaat

SEQ ID NO: 87061 - DNA, 282 bp, Homo sapiens
tctctctccagtgtcacctctgactacattctgcctccaactttgcactccagaaacaagaaaacaattctaatgtcttgcatgtggcatatgaattattgcttgtgctctcccctaatcctctaatgtatgttcaaaagcaatctctgcttaaagtttctctcccatcgcactaagtctgggccatttttacaaaatttatcactatcaaaactatcagattgcttttttttttctagcatgtgtttaagctacccagtgttagtaatagtgggcatcttt

SEQ ID NO: 87062 - DNA, 143 bp, Homo sapiens
gatctagacaagtctgatgttgcacatacaaataagaatatgttactaattgtgtttaatttcatatgtatttagccaaagaagtgccctttctagtacaaataataatttatgttgtggataataaaaatattttttcacct

SEQ ID NO: 87063 - DNA, 331 bp, Homo sapiens
ccattctgggctatagccctcactcgggtaaggtggctaatgcattacagggttttaaagcgatgagcggtcatttaagaggaagagtggtaaatgcttcctttccacactggccaatcttccccatggcagcagaaagcaaaactctgaaacctggccagcaactcttgctctctccttggtccttccccagataaactttcctttttgactaaacttaatagtttccttgcaagaaagaatggctgtttgagaacttacattcatacctctaagctccttaactctctactaatacaattttctaaaactagccaagaatggtttagaa

SEQ ID NO: 87064 - DNA, 429 bp, Homo sapiens
aaaccaagaaagaggaagaagcaaagaggaagatgtaggagatgacaaacaacggaactgatacagacaagaggttactagaatccccagaatgatggagcagagaggccccaaagtaacatttgtacatcaggtcctagagggcaaccagttcagtccaggctggtcagaagtgtctggcggaaacttctgcaagacaataaaaggaacagaacctcatgcacttaaatggtttgagaagaaatgaagacactggtggaaagcttagggttctattaaggaaaaatacacagaaaactaagcaaaccgaagaacaaggcagtcatttattacaataaaaacaaaaagtcacacaggaaaggaaactgaaacatagtatatgacactattcacaaagccataataaaacactcaatatcgatcggacta

SEQ ID NO: 87065 - DNA, 259 bp, Homo sapiens
tagcatcaaccaaacagggaggtgggagcactcaccaggcagagaagtccctgcccccactgctgcagcccaacagtgtggccccatatgggtctccctggactaatggctgcggccttggaggtggtgtgctctggccaggcctggatcacttgtccatcctgagtgggagtgggggcagcccccagagacagactcaggagagggggagtgcaaggatgtcccccagatgccctgtgctgcccaggggacagctcac

SEQ ID NO: 87066 - DNA, 228 bp, Homo sapiens
cattaaaaaaaataacttctgagattaccatgacatttggaaaagagtatctctaaatttgaacttttaaagttatttttctttacaggtaagtatttttaattctagcagcctatttcccttctttcataaatgtattgttcatcatgctattaggcagccaattctctgtaattttcgtttggctttatacatcttttgattggttagttcttgatatatacattt

SEQ ID NO: 87067 - DNA, 414 bp, Homo sapiens
atgttgtagagactgagtctcgctctgtcacccaggctggagtacagggatgtaatcataactcactgcagcctcgaactcttgggttcaagtggttccccccacctcagccttctgagtagctgggactacagacacacaccactatgccaagctaatatttttatttttggtagagatggggtctcactacgttgcccaggctggtctccagtctggcctcaagcaatcctctcaccttagcctcctgagtagccaagatttcaggggtgagctatcatgcttggcccctcaatgtctttaggtgtagaaactaaggacaagagagttcaactatcttggctgaaggtcagcctactaatgaccagtgaaggcaggaccagagccaggtcttcaggaccccagctggtaccc

SEQ ID NO: 87068 - DNA, 385 bp, Homo sapiens
agaaaagaaaattccaaagagccctcatagtgattccaggtgctgagttctgacgtgtccttcactgaaggtcattgactgcctgggcacggtggctcatgcctgtcatcctgcaacttcaggaaggcaatgtgggaggatcgcctcagctcagaagtttgagctcactctgggcaacatactgagacctcgtgtctacaaacaatttttgaaaattagccaggtgtggtggtgtgcgcctctcagctacttgggaggctgaggtgggaggatcgcttgggccggagaggctgaggctgcagtgaaccatgattacactattgccctccagcttgggcctgacaccctgtttcaaaaataaattaataaatacaaattaaaaagt

SEQ ID NO: 87069 - DNA, 425 bp, Homo sapiens
gtgatggcttctcacggggctctgtttcctctggatcctgggagacattgcgaatgtcaaagtcattcattctgaacctcctagaagactatgggccgactctagcaatagtcatgcatgtttactgagcacttactatctgacaagcacatgatgtggaatggctcaatggcttgggcaggcatgcagcctctgctctgtgaatgaggaaaccaaggctcagaggcattgagcctcaccttccccaacgagcacctcatcgccagtgatgagcaggctgaccctggccgagcttttcctgtgtgcctgcttggagagatagtggcgctgccattaaccccatttacagctgaggaaactgaggctcggagaagctgagtggctttttcaaggttgcattgctcttcaggaggctgagacgaatg

SEQ ID NO: 87070 - DNA, 900 bp, Homo sapiens
gggccgcttccaccctcagcggatgataatctcaagacaccttccgagcgtcagctcactccccttccaccctcagctccaccctcagcagatgataatatcaagacacctgccgagcgtctgcgggggccgcttccaccctcagcggatgataatctcaagacaccttccgagcgtcagctcactccccttccacccctcagcagatgataatatcaagacacctgccgagcgtctgcgggggccgcttccaccctcagcggatgataatctcaagacaccttccgagcgtcagctcactccccttccaccctcagctccaccctcagcagatgataatatcaagacacctgccgagcgtctgcgggggccgcttccaccctcagcggatgataatctcaagacacctcccttagctactcaggaggctgaggcagaaaaaccacgcaaacccaagaggcagagggcggctgagatggaaccacctcccgaacccaagaggcggagggtcggtgacgtggaaccgtcacgcaaacccaagaggcggagggccgctgacgtggaaccatcatcacccgaacccaagaggcggagggtcggtgatgtggaaccgtcacgcaaacccaagaggcggagggccgctgacgtggaaccatcatcacccgaacccaagaggcggagggtcggtgacgtggaaccgtcacgcaaacccaagaggcggagggccgctgacgtggaaccatcattacccgaacccaagaggcggaggttgagctgagaagaggccagtgcactcaagcctgagcaataagaataaaaccgagtagaacaaaataaaaaattcaaaaaacaaaacaaaacccacactccaaaaactaacaaagaataaataaataatat

SEQ ID NO: 87071 - DNA, 815 bp, Homo sapiens
gggccgcttccaccctcagcggatgataatctcaagacaccttccgagcgtcagctcactccccttccaccctcagctccaccctcagcagatgataatatcaagacacctgccgagcgtctgcgggggccgcttccaccctcagcggatgataatctcaagacaccttccgagcgtcagctcactccccttccaccctcagctccaccctcagcagatgataatatcaagacacctgccgagcgtctgcgggggccgcttccaccctcagcggatgataatctcaagacaccttccgagcgtcagctcactccccttccacactcagctccaccctcagcagatgataatatcaagacacctgccgagcgtctgcggggagcgtctgcgggggccgcttccaccctcagcggatgataatctcaagacaccttccgagcgtcagctcactccccttccaccctcagctccaccctcagcagatgataatatcaagacacctgccgagcgtctgcgggggccgcttccaccctcagcggatgataatctcaagacaccttccgagcgtcagctcactccccttccaccctcagctccaccctcagcagatgataatatcaagacacctgccgagcgtctgcgggggccgcttccaccctcagcggatgataatctcaagacaccttccgagcgtcagctcactccccttccaccctcagctccaccctcagcagatgataatatcaagacacctgccgagcgtctgcgggggccgcttccaccctcagcggatgataatctcaagacaccttccg

SEQ ID NO: 87072 - DNA, 386 bp, Homo sapiens
ttcttcacagtttatttgctcattcaacacacaggtactatgccctgacaacacgccaggccctgtgctagacaatgaagcacagagatgaaaactgtctgtccttcaagaagtccatagcctcctcaaggagacaaagatattaaaagacaaataaaacagagataattaatgcaactagcactgtttgctttctggttttctcctattaggtggtaccaaattggcatatgaatacagactattctcttagtattggtttaaatggtggtatgaagtacatctactgcattaagaagtgccactctaggccgggcgcagtggctcacccctgtaatcccaactcctttgggaggtcaaggcaggtggatcatctgaggtcagga

SEQ ID NO: 87073 - DNA, 2190 bp, Homo sapiens
aacattttaaatctgaattgaaccacccattttcctttcttagccaaatcaccaaaatgtccagttagaacaagaatttagcattctgcaaaagaagttaacagctgagataacgaggaaatattctgaaatggatcccaaatatttcatcttaattttgttttgtggacacctgaacaatacatttttttcaaagacagagacaattacaacagagaagcagtcacagcctaccttattcacatcatcaatgtcacaggtattggctaattctcaaaacacaacagggaatcctttgggtcaaccaacacaattcagcgacactttttctggacaatcaatatcacctgccaaagtcactgctggacaaccaacaccagctgtctatacctcttctgaaaaaccagaagcacatacttctgctggacaaccacttgcctacaacaccaaacaaccaacaccaatagccaacacctcctcccagcaagccgtgttcacctctgccagacaactaccatctgcccgtacttctaccacacaaccaccaaagtcatttgtctatacttttactcaacaatcatcatctgtccagatcccttctagaaaacaaataactgttcataatccatccacacaaccaacatcaactgtcaaaaattcacctaggagtacaccaggatttatcttagatactaccagtaacaaacaaaccccacaaaaaaacaattataattcaatagctgccatactaattggtgtacttctgacttctatgttggtagctataatcatcattgtactttggaaatgcttaaggaaaccagttttaaatgatcaaaattgggcaggtagatctccatttgctgatggagaaacccctgacatttgtatggataacatcagagaaaatgaaatatccacaaaacgtacatcaatcatttcacttacaccctggaaaccaagcaaaagcacacttttagcagatgacttagaaattaagttgtttgaatcaagtgaaaacattgaagactccaacaaccccaaaacagagaaaataaaagatcaagtaaatggtacatcagaagatagtgctgatggttcaacagttggaactgctgtttcttcttcagatgatgcagatctgcctccaccacctccccttctggatttggaaggacaggaaagtaaccaatctgacaaacccacaatgacaattgtatctcctcttccaaatgattctactagtctccctccatctctggactgtctcaatcaagactgtggagatcataaatctgagataatacaatcatttccaccgcttgactcacttaacttgcccctgccaccagtagattttatgaaaaaccaagaagattccaaccttgagatccagtgtcaggagttctctattcctcccaactctgatcaagatcttaatgaatccctgccacctccacctgcagaactgttataaatattacaacttgctttttagctgatcttccatcctcaaatgactcttttttctttatatgttaacatatataaaatggcaactgatagtcaattttgatttttattcaggaactatctgaaatctgctcagagcctatgtgcatagatgaaacttttttttaaaaaaagttatttaacagtaatctatttactaattatagtacctatctttaaagtatagtacattttacatatgtaaatggtatgtttcaataatttaagaactctgaaacaatctacatatacttattacccagtacagttttttttcccctgaaaagctgtgtataaaattatggtgaataaacttttatgtttccatttcaaagaccagggtggagaggaataagagactaagtatatgcttcaagttttaaattaatacctcaagtattaaataaatattccaagtttgtgggaatgggagattaaaatgcatgtttgagaatagagaaattttcttcttggtttcattgcaaagagtaaaacaaacatgttaaaacatcaactgaagggttgggttaggaacatttaccctgaaaaaaatatgaggatgcatcataaaatgtaaatattttcctaccatgttgggggggcacaaattttaaaactggcatctttacaagtttcttctttataaacacccaaacaaaatcaagttttataaagcaa

SEQ ID NO: 87074 - DNA, 1968 bp, Homo sapiens
aacattttaaatctgaattgaaccacccattttcctttcttagccaaatcaccaaaatgtccagttagaacaagaatttagcattctgcaaaagaagttaacagctgagataacgaggaaatattctgaaatggatcccaaatatttcatcttaattttgttttgtggacacctgaacaatacatttttttcaaagacagagacaattacaacagagaagcagtcacagcctaccttattcacatcatcaatgtcacaggtattggctaattctcaaaacacaacagggaatcctttgggtcaaccaacacaattcagcgacactttttctggacaatcaatatcacctgccaaagtcactgctggacaaccaacaccagctgtctatacctcttctgaaaaaccagaagcacatacttctgctggacaaccacttgcctacaacaccaaacaaccaacaccaatagccaacacctcctcccagcaagccgtgttcacctctgccagacaactaccatctgcccgtacttctaccacacaaccaccaaagtcatttgtctatacttttactcaacaatcatcatctgtccagatcccttctagaaaacaaataactgttcataatccatccacacaaccaacatcaactgtcaaaaattcacctaggagtacaccaggatttatcttagatactaccagtaacaaacaaaccccacaaaaaaacaattataattcaatagctgccatactaattggtgtacttctgacttctatgttggtagctataatcatcattgtactttggaaatgcttaaggaaaccagttttaaatgatcaaaattgggcaggtagatctccatttgctgatggagaaacccctgacatttgtatggataacatcagagaaaatgaaatatccacaaaacgtacatcaatcatttcacttacaccctggaaaccaagcaaaagcacacttttagcagatgacttagaaattaagttgtttgaatcaagtgaaaacattgaagactccaacaaccccaaaacagagaaaataaaagatcaagtaaatggtacatcagaagatagtgctgatggttcaacagttggaactgctgtttcttcttcagatgatgcagatctgcctccaccacctccccttctggatttggaaggacaggaaagtaaccaatctgacaaacccacaatgacaattgtatctcctcttccaaatgattctactagtctccctccatctctggactgtctcaatcaagactgtggagatcataaatctgagataatacaatcatttccaccgcttgactcacttaacttgcccctgccaccagtagattttatgaaaaaccaagaagattccaaccttgagatccagtgtcaggagttctctattcctcccaactctgatcaagatcttaatgaatccctgccacctccacctgcagaactgttataaatattacaacttgctttttagctgatcttccatcctcaaatgactcttttttctttatatgttaacatatataaaatggcaactgatagtcaattttgatttttattcaggaactatctgaaatctgctcagagcctatgtgcatagatgaaacttttttttaaaaaaagttatttaacagtaatctatttactaattatagtacctatctttaaagtatagtacattttacatatgtaaatggtatgtttcaataatttaagaactctgaaacaatctacatatacttattacccagtacagttttttttcccctgaaaagctgtgtataaaattatggtgaataaacttttatgtttccatttcaaagaccagggtggagaggaataagagactaagtatatgcttcaagttttaaattaatacctcaagtattaaataaatattccaagtttgtgggaatgggagattaaaatgcatgtttgagaata

SEQ ID NO: 87075 - DNA, 1888 bp, Homo sapiens
atgatatgctgtttagatatgctgaaaagataacgaggaaatattctgaaatggatcccaaatatttcatcttaattttgttttgtggacacctgaacaatacatttttttcaaagacagagacaattacaacagagaagcagtcacagcctaccttattcacatcatcaatgtcacaggtattggctaattctcaaaacacaacagggaatcctttgggtcaaccaacacaattcagcgacactttttctggacaatcaatatcacctgccaaagtcactgctggacaaccaacaccagctgtctatacctcttctgaaaaaccagaagcacatacttctgctggacaaccacttgcctacaacaccaaacaaccaacaccaatagccaacacctcctcccagcaagccgtgttcacctctgccagacaactaccatctgcccgtacttctaccacacaaccaccaaagtcatttgtctatacttttactcaacaatcatcatctgtccagatcccttctagaaaacaaataactgttcataatccatccacacaaccaacatcaactgtcaaaaattcacctaggagtacaccaggatttatcttagatactaccagtaacaaacaaaccccacaaaaaaacaattataattcaatagctgccatactaattggtgtacttctgacttctatgttggtagctataatcatcattgtactttggaaatgcttaaggaaaccagttttaaatgatcaaaattgggcaggtagatctccatttgctgatggagaaacccctgacatttgtatggataacatcagagaaaatgaaatatccacaaaacgtacatcaatcatttcacttacaccctggaaaccaagcaaaagcacacttttagcagatgacttagaaattaagttgtttgaatcaagtgaaaacattgaagactccaacaaccccaaaacagagaaaataaaagatcaagtaaatggtacatcagaagatagtgctgatggttcaacagttggaactgctgtttcttcttcagatgatgcagatctgcctccaccacctccccttctggatttggaaggacaggaaagtaaccaatctgacaaacccacaatgacaattgtatctcctcttccaaatgattctactagtctccctccatctctggactgtctcaatcaagactgtggagatcataaatctgagataatacaatcatttccaccgcttgactcacttaacttgcccctgccaccagtagattttatgaaaaaccaagaagattccaaccttgagatccagtgtcaggagttctctattcctcccaactctgatcaagatcttaatgaatccctgccacctccacctgcagaactgttataaatattacaacttgctttttagctgatcttccatcctcaaatgactcttttttctttatatgttaacatatataaaatggcaactgatagtcaattttgatttttattcaggaactatctgaaatctgctcagagcctatgtgcatagatgaaacttttttttaaaaaaagttatttaacagtaatctatttactaattatagtacctatctttaaagtatagtacattttacatatgtaaatggtatgtttcaataatttaagaactctgaaacaatctacatatacttattacccagtacagttttttttcccctgaaaagctgtgtataaaattatggtgaataaacttttatgtttccatttcaaagaccagggtggagaggaataagagactaagtatatgcttcaagttttaaattaatacctcaagtattaaataaatattccaagtttgtgggaatgggagattaaaatgcatgtttgagaata

SEQ ID NO: 87076 - DNA, 1747 bp, Homo sapiens
gctgctcctcctgcggcgagggcttcgccaacacctacggcctcaagaaacaccgcctggcgcacaaggccgagaacctcggggggcctggagcaggggcgggcaccttggccgggaaggatgcctgaccgaggggttcccatcccactcccatcaaaagcccccttctggactcccacctcccaggactgatcagactcttcccccctcctcgctgttgccccatccttcagaacttcacacggactggcgaccttcagggcgcacgcccgacaggctcaagactgaatcactcccatcctcgacctctctgccctcccctcatcccatcagacactgaaccctatcctccgtccaaccctcgtttgtgacccgcatcagcccccgccccagcagcactctgcccccagtaagttttggcggagatgggtctgaaccgcccctccccctcctttggaatctggctggacagtggagtatgagcagagttgggagggcacaagggagtgctgggtgctttttggggtgggggggtggggggcggggtggcagacgcggcttgtacagagcggagaataataaatcttaccatgagggccgctggagtccatccttgcatcccacccagggagagtggggatcacatggtggcaaagcacaaagttaaaacttgtttcctctgcagttttgatgccgggcgcctctgtctctcactcactctcattcaacagggacttactgaggatttgctgtattcccagcgttagtctgagctgggcaaatggagatggacaagacaggtaagtgtctgctctcaggaactgacttaacatgccccgactcttccccttccggatgctttcagcctttgttcactccaccaccacttccggagacctcctgcctgccaggccctgagctgggcactggggaaacagatgaattggacgtgccccttggcctcaagtaacacaaaagagaactcccatccggctgccgtggctgcctcacaaccatgtgcagactgatggtcatgatacagctccctcttagcacttgtcctccagggtaatgattgggagattcaaaagcccgttcacagctctcatgttggcttgggattacaggcatgagccactgcgcctggtctatttcttattgagaagctctttattaaaagagatcattcatagcacccagaactcatcctccagtttcccttttttgagagctggaagtatgtcatctctgtatcccctctgtacatccctatagagaaggcatgtatatggctcagtgagtgtttggtgaatgaatgagtgagaaattgaattcatgcagatagaagaactttgtaccagagcttaaggctattgagtattttttcccttttttttcctccccacccccactaaagctattaaatatttgcagaggagagcactgtttagtggaattaccataagctttcaaatcaggcaaacctgggtccagatccgtttatctgcttgctgtgcaactctgggcaagcaatgtctcctctaagtgtctagctgacatctacaaagtgggcaccataatgtcatttggcagggttgtagttagaatgccactgattgagaatgccaaaggtctgtgtgatgcctggaaccaactggtgctcaataaatgtgggttctgcctgggcttggtattctctactaagaatacaaaaattaacatgcacagtggagcacgcctgtagtcc

SEQ ID NO: 87077 - DNA, 498 bp, Homo sapiens
tgagacagggtctcactctgtcagccaggctggagtgcagtggcgtgatcttggctcaatgcaacctccgcctcccaggttccagcaattttcctgcctcagccacctgagtagctgggattacaggtgcgtgccaccacgcctggcttatttttgtattttttagtaaagatggggtttcgccatgttggccaggctggtctcaaactcctggtctcaagcgatccacccgcctcagcctcccaaagtgctgggattacaggtgtgagccactgcacccggccaatcctatattttaatattttacagtactctgctagcacacaaaggtgatcacagctttccaggttgctgtcccctccctccaccatcagtcactcgggaatgaccagctctgactcacagcaccggcctctgcgataaacatagacaagcacaagccattcctgtgagccctggcactgggctaggccaccaaggcaacacccaaccaggaca

SEQ ID NO: 87078 - DNA, 159 bp, Homo sapiens
  misc_feature (152)..(152): n is a, c, g, or t
  misc_feature (158)..(159): n is a, c, g, or t
tttttttttttcaacatcttcagaatatgaaaaaatcttcgaaatgcttgaaggagtgcaaggacctactgcagtcaggaagcgattttttgaatccatcatcaaggaagcagcaaggtgggtagaaataggaactgtccaatttctttaancacttnn

SEQ ID NO: 87079 - DNA, 979 bp, Homo sapiens
gggcaggtttctagaaagtgccaccagtggggaggcgccacaacttcactgccattttgtgaggtgccgctgtctctcctccagcaaggtcaggacgaaacaatgaccgataaaacagagaaggtggctgtagatcctgaaactgtgtttaaacgtcccagggaatgtgacagtccttcgtatcagaaaaggcagaggatggcccttgttggcaaggaaacaaggagcaggagacagccttattgcaggctctgccatgtccaaagcaaagaagcttatgacaggacatgctattccacccagccaattggattctcagattgatgacttcactggtttcagcaaagataggatgatgcagaaacctggtagcaatgcacctgtgggaggaaacgttaccagcagtttctctggagatgacctagaatgcagagaaacagcctcctctcccaaaagccaacgagaaattaatgctgatataaaacgtaaattagtgaaggaactccgatgcgttggacaaaaatatgaaaaaatcttcgaaatgcttgaaggagtgcaaggacctactgcagtcaggaagcgattttttgaatccatcatcaaggaagcagcaagatgtatgagacgagactttgttaagcaccttaagaagaaactgaaacgtatgatttgagaatacttgtccctggaggattatcacaccccaaatgcataatctcgttaatgattgaggagagaaaaggatcagattgctgttttctacaatggagcaggatattgctgaagtctcctggcatatgttaccgaatcaaatagccttccagaggctaagaaatttctgttagtaaaagatgttctttttcccaaagcattttatttgaaaggataacttgtgttttggttattttgtattcccacctgtgctggtagatattattaacccattaggtaaatactattacagtcgtggtttctgcag

SEQ ID NO: 87080 - DNA, 924 bp, Homo sapiens
gggcaggtttctagaaagtgccaccagtggggaggcgccacaacttcactgccattttgtgaggtgccgctgtctctcctccagcaaggtcaggacgaaacaatgaccgataaaacagagaaggtggctgtagatcctgaaactgtgtttaaacgtcccagggaatgtgacagtccttcgtatcagattgcaggctctgccatgtccaaagcaaagaagcttatgacaggacatgctattccacccagccaattggattctcagattgatgacttcactggtttcagcaaagataggatgatgcagaaacctggtagcaatgcacctgtgggaggaaacgttaccagcagtttctctggagatgacctagaatgcagagaaacagcctcctctcccaaaagccaacgagaaattaatgctgatataaaacgtaaattagtgaaggaactccgatgcgttggacaaaaatatgaaaaaatcttcgaaatgcttgaaggagtgcaaggacctactgcagtcaggaagcgattttttgaatccatcatcaaggaagcagcaagatgtatgagacgagactttgttaagcaccttaagaagaaactgaaacgtatgatttgagaatacttgtccctggaggattatcacaccccaaatgcataatctcgttaatgattgaggagagaaaaggatcagattgctgttttctacaatggagcaggatattgctgaagtctcctggcatatgttaccgaatcaaatagccttccagaggctaagaaatttctgttagtaaaagatgttctttttcccaaagcattttatttgaaaggataacttgtgttttggttattttgtattcccacctgtgctggtagatattattaacccattaggtaaatactattacagtcgtggtttctgcag

SEQ ID NO: 87081 - DNA, 249 bp, Homo sapiens
agcttgtgcttgagtgcagggaagacaatggaagcagaagtgaagggatcctccagctgacttgtggaagagccagtggggaattttttttttttttgtgagacagagtgttgctctgtcgccaggctggagtgcagagcaggactctgtgtctaaaaaaaggaaaaagaaaaggaaaaaaaaattacgagagacgaaagagaaagagaaaagctgtggctcacatacttttgggggtaacagaccata

SEQ ID NO: 87082 - DNA, 312 bp, Homo sapiens
  misc_feature (173)..(173): n is a, c, g, or t
cccgggctccagaagcagaccagcaaaccagcagaccagcaggtggacagccaaacgatgcggcagagaaagaaggaagaggaggaacatctgaacaccgagaggagttcagctgggggtggttggagaggagtccagccactgggcagcccaactccaggggaagatcatcntcccattccatccccagcttctgggttcccatccatctgactgaaagccagctccaccactctataaaacctcacattcatccttcaagactgtgtgtgacccaatttttctgggacactgggcaagagcttgggctac

SEQ ID NO: 87083 - DNA, 202 bp, Homo sapiens
ggaaactgggatgaacatgggtattctttgggattttgctgtggaggcaaagagatgagtgagatgtagggagaggagaaccgaggagctgaggagtgatggtgtgtagtttgtgttctgcagatgtgagtctgagataggacaacacatttttctgctgagggaaaaaaggaaaggttggagagaacagttgataggcatg

SEQ ID NO: 87084 - DNA, 187 bp, Homo sapiens
tctgcattggcctcccaaagggctgggattgcaggcctgaaccaccgtgaccagccccagtagttttccacctatatatttgtgtccagaaatggtcactgatcatccttgatgcaaaagagtctagaaaaatgaatatttttaactgggcccatgggtgccccaaacccaattgaaattccattag

SEQ ID NO: 87085 - DNA, 512 bp, Homo sapiens
aaaaagtcactgctcttcctatttgtacctctgtttcctactggctttgatgttttctttgaaaaagttattcagtctgtgctctgtgctcagaccttggtcaggaagaatattggaacagtggaggaatcagtccccacagggaaacagggtcttatgggtttgataagttacagatgattgaccacacttgggaacactttgaaactttacagactagagctttccaggtagctaaggtagaattccatagtgagtagcctcagtctgcaagtgtgacaaggtgatctgctttatgaggcttttaggaaaatgataggtgaggacagtgggcagtagcagggagaagataattcagggcatgaatgataggtgattacagattctctggctggacatggtggctcacgcgtgcaatcccagcactttgggaggccgaggtgggtggtggatcacttgaggtcaggagtttgagaccagcctggccaacatggtgaaaccccatctcttct

SEQ ID NO: 87086 - DNA, 669 bp, Homo sapiens
gggactacaggtgcctgccaccatgcctagctaattttttgtatttttagtagagacagggtttcaccgtggtctcgatctcctgacctcgtgatctgccagcctcggcctccagaagtgctgggattacaagcgtgagccactgtgcccggcctgattttgaatttttgtagttgctatcaatagctgtaccaatcagtatatacagcttctgacagtgcaccttatacctgtaaacatctttgagagtgaaaatgcttatctgtgccaaataacacatttaaatgccagagtatttacattttaataagctttttcatgtttgtcattacattgcaattcagttgtttttgactataagccactagaagattgagatagtattttatgaaaaaaatgaaaaacatggaagtttgtgtttcttttgcatctagtagacactatacatgttcactgatgacatgaattgggtatgcactgcaagtcgaatattaaacaagtgcatgagtaggcatatagtatttatgagtaggtcagaagtgattcaagggatcagaagacatataattgaggtgaagttcagaaaagtagctttgttagtaccatgtttagacagagtaaggtgctacagtaaactagggatattttaggaaagcttaatgagtgagg

SEQ ID NO: 87087 - DNA, 414 bp, Homo sapiens
cttttttaggcactgagaaaaatatcagtaaacaaaacaaataaaaattcttattctcatgtagtttaccttataagggaggaggagggttgaaagagatagtttcataagctcttttattgctaatattctgtaatctaaattcctgattgtgggaatcagagagttttaaaaagtgtggggggaggtatattcagactcttctagtctagggaatgcagtcctctttatagatcgtctagttcagaaaacattataaaagcagtaacaccaaagcattcatagttacttttggttcagttaggttaaagacgtttaaaaggcaagttctctatattctggaagattattctcaaatggcaagacagattacagtctggcctgtctcagagatgtttgattaagagccaatgg

SEQ ID NO: 87088 - DNA, 727 bp, Homo sapiens
agccccctgagtagctgggattacaggcgtgtgccaccacgcccagctaattttgtatttttagtagagacgggatgtcactatgtttgtcgggctggtgttgaactcctgagctcatgatctgcctgtcttggcttccctaagtgctgagattacaggcctgagccaccgctagcctatttattttttattttaaattttaattttctatatagagacgaggtcactatcctgcccaggctggtcttaatctcctgggttcagtcaatcttcccaccttggcctcccgaagtgtcagaattatagatgtgagccactgtgcccagcccagaactgatgttttctaaatgctgggtgctgagaaggatgtgtggctggcagtcttgactgtgttatctgtctttaccaggccagtaacttctttggtctggtcatcaagataatctagcatcaccagcaagcatgcatggagaaggatgggcccaatgtggccaagatggtaacgggaccagtagagagccctgtagaagacatctagatattctgccctaagagcccggagggccgggctgtctcatgaccctctgacgtgctgacctggactctggcagaatgtgcacacacacagtcacacagcttcgtggcttgcgcaagtcccaggagggcggtgccagccacaggcttttcccattcgagggttggaagcgtatcatcaaaccacatcaga

SEQ ID NO: 87089 - DNA, 442 bp, Homo sapiens
ggcacctgtagtcccagctacttgggaggctgaggcaggagaacggcgtgaacccaggaggcggagcttgcagtgagccaagatctcgccaccgcactccagcctgggggacagagtgaggctccgtttcaaaaaaaagaagaagaaaaaaaaagctataaggacaaaattgtaacaattggtgaaatttttctatgaactctggattagacaattattacatctctgctacatttcattttaataaatgaactatagttatagtcccctgtgctcagaaaatacactaatataattatagataaaggaaaatgatgtctgaaaattactatcaggtagttcagaagtatatatgtagagagaattagcaaacaaaaaagcaaaatgttaaaaactggtaaatatgtaaggacataggacagttttttctattatttttgca

SEQ ID NO: 87090 - DNA, 437 bp, Homo sapiens
agatcagtaagaaaaagttaacaaccaaaaaagcagacaaggccaaggaccagctcttcacagaggaggtgatattggcagtgaaaagatgcccaagttcactagaaattggagggatgggatttaaaacaagactcaattcaggccagacgtggtagctcacacctgtaatcccagcactctgggaggtggaagcaggaggatgacttgaggccaggagtttgaaaccagcctggtcaccgcagcaagaccccctccctacaaaagaaaagttaaaaaattagctagacatagtggtgcatgcctgtagtttcagctagttgggaggctgaggtgggaggattgcttgagcgtgggaggttgacactgcagtgggccatgatggcgccactgccctccagcctgggcaacagtgagacccggtctcagaaaaataa

SEQ ID NO: 87091 - DNA, 127 bp, Homo sapiens
atttatctgcatccccaaaatgttacatatgctcaagagattaaaagaaaagacatcggaataattagagaaaccatggccttgaggaggacgtgcatggagaggttccacaaaggaaagcaaacag

SEQ ID NO: 87092 - DNA, 426 bp, Homo sapiens
ctggtgtggtggcagcagatgacagggaagcagagctcctaaatctctattttgcttttgtctttacacaaagaagggccacctgactaggaggacaggacgcatgatggaaaaggacctgaagcccgagttggtgagagagaacctcactgttaaaactagttcacaatttcaggtctggatgaattacatctcatgatgttggaggaatttttagatgtgtgtgtgtggagtgagtagagatcatcttggaggtgccctgaagtatgaggaagagagaagaagaaaggaaagaggtagtcacctttattttcaaactggaagccaatgtagatgctggaaaccatggatcagggagctgaagaccatccatcagaaaaattttagcagcgtgtggtatctagttggaaaagaagtagctgatct

SEQ ID NO: 87093 - DNA, 316 bp, Homo sapiens
accactttctttatgcattttttcttctcagctttcatctggaatcatcagcctaaagtacatcttttagattcttcctgatagcagactctctcagtattcgttagtctgcacatgtctttggtttattcttgtttttgaaagatatttctactggatatgcaaattccagtttggcaattattttcttttggcacagtgatgatatcattacactaccttatgctttaatcatcaccactgagaatccagtcatcagactatcatccttttgaagtgaatctgtcttattttctctaatagctttaaacttttt

SEQ ID NO: 87094 - DNA, 388 bp, Homo sapiens
aaggttttgtcatgtgggctagctggtcttgatctcctagcctcaagtgatccgcgtgtctcaacctcccaaagtgtggggattcgggtgtaaaccacaggtgcccggcctttttctttttccccctaaatacttacgatccatagttggttgaatccatgaatgcagaactcatgggtacaatggaccaactatatatacgatcttttttccccctaaatacttacgatccatagttggttgaatccatgaatgcagaactcatgggtacaatggaccaactatatatacgatcttttttccccctaaatacttacgatccatagttggttgaatccatgaatgcagaactcatgggtacaatggaccaactatatatacgatccca

SEQ ID NO: 87095 - DNA, 475 bp, Homo sapiens
cacttgtttgactctgttccatgggtaagaatgtaacactgcaggagccagcagtttttcctgctgagcctcttgctaatgctactgctgatctaaggcttgactgataccttatcattttggcatgttttaactgaccaccacgacacctggcagctcagttctttctgcatcagcttagttcttaacaccaccttcttctcctacttcataagtgtcttggctgttcctggttctttgcatttacatataaattttaggatcagctgtcaaatttgacccactcccttctaaaaaattattgggattttgattgagagtgtattgaatctatagattattggggagaatcaacattcttacatgaattttctaattcatgaacatggtatagcattccatttctttagggtcttaatttttcccaataatattttatggttttctgtgtcggtcttgatcatctttattagat

SEQ ID NO: 87096 - DNA, 192 bp, Homo sapiens
aacacttttacctcccactctcaacgacaggacaaaacaaagaccagctgtattcatcaatgggcccttgttctgcacataaaggctaattacattttgcttcaagcctacacatggaaaactttactgccgttgtctgccacagtcagcccgtgctgtcccagctgacgcatggcgatgactgctcacgat

SEQ ID NO: 87097 - DNA, 366 bp, Homo sapiens
aacaattccaggggccctcaaactaggtaccacagaaccctagaggttccatggagggaggggaggcagcactttggagtggaatttgtttgaagaaaaaaattcgactttaaagaaaaaaagatggatagccacagagaggccagtctgttcattttgtatttgagagtggaggtttagggaggttaagcaacctaccctatgcctcactgagcagtagcggtgagtcgagcagggatctaaaaccaaggcatttattcatttaaccgacatttctcgaacacagcgggaagagggaaatgggctgcatcctggaatctcagagaagacagacgaccagcccaccctcctgaagccgcctgatgc

SEQ ID NO: 87098 - DNA, 447 bp, Homo sapiens
gacacagtgcttatctccatgacagagttgaggggctataagcttacagatgtttagtgatgtgatcgagttgctgagctaacactcagtggagtttgaacccaggcagtatgatttcagagaccacgctgaagtatctgtactgctcatggactgttgccctgaaatgcagtttatttgtctgaagtgtaatgtctggagttttttgcatcttcatcattataaacctcttacaaatattaattgagttccttaggccattccttaaggttttatagcagataagagaagataatgtggttccaactgaagaccaccaaatagtgctcactggtagctgaaattcaggaaatgatttacatatccagcaggagtgattttctttatatatagaaaaatatatttaaattgagttaaatcattatctgtagtaattatagctgaatg

SEQ ID NO: 87099 - DNA, 503 bp, Homo sapiens
gtgcagcttcccccggtagtggtgaggggccaaggaggcagcttttacacccatttaccttcctgcttgcatccaaccttgtgcccatcacaatcaactgtgaactaaactgttgtgcatgctttctttctttctttccttctttttctttccttccttcctttttctttctccttccttccttccttcctcttttagtgtgtgtgagacaaggtttcactctatcacccaggctggagtgtagtggtatgatctttggtcactgcagccttaacctcctggactcaagggatcctcctgcctcagccacttaagtagctgggactatgagtatgtgccaccatgcccatctaatttttgtattttttagtagagataaggtttcaccatgttgcccaagcttcgttttttacctgccgttttttttggtttggtttttagttggtcttaagatacccattgttagcaagagctcagtaaataggagtcgattgaatttccag

SEQ ID NO: 87100 - DNA, 298 bp, Homo sapiens
ataataataataaaaattcttttatattttaattatcttttaaataaaaagatttattatcttattatctttttattattattcaacaaagaatatctttgtggaatttctcatcaaattatgaattattttcccaattcctttgtattggctgtgttctcttgtattttactgagtttccttaagatcattaccttgaattgtttttcaggtatttcatggattctcatttctctggggtctgttactagagaattattgtgttcctttgtggaggtgtcatatttccttgcttttt

SEQ ID NO: 87101 - DNA, 328 bp, Homo sapiens
ttcatgttatgtgctttttactacaattaaaaaaaatttaaccatttaacaaaaaagaaagttataaaagttttttgttatttaaaaaaatatatagccgattcttaaatacttttgattataatagaaatataaatggcctggagaaagttaaggaacagatgccaaacctcagtatatccactagtgacaacttctttttttgctgtgtcgcccagattggagtgcagtggtgcgatctcagctcactgcaacctccacctcttgggttcaagcgattgtcttgcctcggtctcctaagtagctgggattgcaggtctgcaccacc

SEQ ID NO: 87102 - DNA, 819 bp, Homo sapiens
aatccttggagcaactctaggagggaggtgttatcctctaattgcagatgaggttgatgaagcttaaagagtaatgatgccttgagtccatcctctggctccaaagcccttgtatttaactgttctcccttttgcatccctgtgctaaagtgactttgctataatatccacaaggaagaatttctgtgtaaaaattagacttccttgcaggcagtctatcagtgatatccaataaagactcaataatggctaacaatacaaaccacacacacaagaaaaacttctccttttgtgccaggtacttagattaggtgtagtggttttcttaaactgattatcaaggtaaacaccacctcatacatttcagcagagagcagtggtttctctctccagcagtgggagccattgaatcaggacaatgccacacagttgggctttcatgttagatagatcactcttgtggttttgggggatggcattataagagaggagactggagacaggggggctattgtcatgcagatttgttggatgtccacccagcattcactttttccatcttttgccaggggtacactacacaacatcaccagtcatttcatagaatggcaattagattaggcttaggtctgcactgccttccttcactccgctctgtcacttgccatcattgtaaatgctgacaacttagtgcctttcatgcttcaagtatcaataagataggaatagtaatagtatcacattgaattattgtggagttttgaacagatgatacttgtgttatcagtgctcaataaatattagctgtcctcttcctta

SEQ ID NO: 87103 - DNA, 491 bp, Homo sapiens
aactagaaaagaaccaaggagttaggtactttttatacagattccaaatatgccattttagtattccacaattatgccaccatttggaaagaaaggattgttgacagcaaaagatacccctactaaatatgggtcacagatattttaccctaccctaggctatccacctaccacagaaagctgcagttcattgctggggctaccagaaatgccaagatgagattacctagagaaacaggagggtcggccaagcagcaacggccaccaccctttccggggaactccttatggcccttatcccaactttgcctaacaacctgcccaccctgcaatggggtatcaaatgtgaatatactctaggactgaaagattgtataaattgggagaggttctttatttcccccaggttctccagcagaaagcaataagggcactccataattcttgtttctgtaggagaggccatctccatcagctataaccaaaaaaaa

SEQ ID NO: 87104 - DNA, 346 bp, Homo sapiens
tctgttcaatatccattattttcttagtaacagaaccacaattttattacaacaggcaatattcctagttaaagattatagttttatggctctattgtaggtaagtttggcaaaatatatattagaaatgttacctgcaaattccaattgccatttggagaacaactctttgcttgaagatggaagtcagttaaatatattgtgcctaaaagataaaagtgtccaaggtctcaacaagtagctgtcatactatccctggagaactgataacttgagataaatttggtacaattattctgaatatagtaacttaaaacaaatatttatttactgctcacaggttggc

SEQ ID NO: 87105 - DNA, 364 bp, Homo sapiens
ttacacaggtctcaggaagcatgtgtgtgacatgcacaggctgctctgctatgcacaggccttgggaaacacacatgtgacatgcacaggctgtcctgcacatgcctgcctctgtcctgctccttgggcttcctggtacctgccagctgccttggttcctcagcctccttgtctatcatcaccgaggcctttgggcttctggggaaagttctcaacatgcagaactaactctgaaaccacatgtgtgctggccttgcccatttgccaccatctccagtgtccccagacacagcaaactgtcccaacaatgccttcctgtcctttcagcctgactcatcaactgtcattcaacacctagtgattg

SEQ ID NO: 87106 - DNA, 759 bp, Homo sapiens
tgagacagaggttctctcaatgttgcccaggctggtctcaaactcttgggctcaagcgatcctccctcctctgcctctggagtagctgggattacaagcacgtgcctactatgcctgtcttcaaaatcacattgttaatttttatagccacaattattaatttgataaaacaaataattttatagaagcattaaagtattatcagaacaaaatcagagttccaaaatttggggagtattttaagattgtgaaatgttaccttttggatgcaaaccaatgatacaaatctttaagaaagaattacagtgggactcctttgaaactctgattttgaaaatagaacaaatacacatttcatagccaaactttgtgtgggacttctattgttactaattgtaaggctgtaactttggttgacttcatccaaatccaagaaacagagtcacagtagtgagactattctcattgcttctttggagcattagctgaagctttaccatatcacataccttacaaaatccctatacatattgccagttttaaaagaatgtaattatgcatgttacaaactatatatatctttttggctagagaagtgactattttagaataacagtatgaatgtaaaaggcaataattttttttaaatacacaaaacattgccattgcccttttttgtcacttccttttttcttctaaaaattttcatttggtgtatctaactttgtatcacttaaattattcagacttactaagata

SEQ ID NO: 87107 - DNA, 462 bp, Homo sapiens
ggggtgactaagactccgtctgaaaaaaataaggaaatgaagactcctcttttcacttagaggagatccagcgaggacttagccctaaaccaaaggacacagaaaccacaaatccccactcccatagtgtcagggctggaccaggggacgtcatgggcctggggatgccagggtggggtggcagggattccgcctggagtgggacagtagaatccattcaggggcaggtgcggtggctcacgtctgtaatcccagcactttgagaggctgaggcgggtggatcacaaggtcaggagttcaagaccagcctggctaagatggtgaaaccccatctctactaaaaataataatacaaaaaattagccaggcgtgggtatccgcctgtagtcccagctactcgggaggctgaggcagaagaattgcttgaacccaggaggtggaggttgcagtgagccaagatcg

SEQ ID NO: 87108 - DNA, 355 bp, Homo sapiens
agctattctcatgcctcagactcccgagtagctgggattacaggcacctgccaccacacccagctaatttttgtatttttagtagacaaggggttttgccatgttggccaggctggtcttgaacttccgaccctaggttatctgcttgcctcggcctcccaaagtgctgggattacaggcatgagccactgcacccaacctgccacgactaacctttaagaaattattacctatgagttttggcagagtatcaaagaagactacctacaaggatctctcaaaagactattaaactctcttcccttttccaacaacatatctgtctaaggtcaggttttcttcatatacttcaatc

SEQ ID NO: 87109 - DNA, 282 bp, Homo sapiens
gatcatcaaagaaagacagggtgacctgaggattatatgttcagccaagctcccctccaagcataaaggctacagataaccatttgtacatattcaggaactggagtaatgtgattccaatgagcctgtcttgaaggaactcctaggggattaacttcagctaacctgggaagttatctggagaaaccacaacagaaggactggttgtagttcgaggctgtagtcagctatgattgcaccactgcactctagcctggataatagagcaagactttgtctcca

SEQ ID NO: 87110 - DNA, 602 bp, Homo sapiens
ggttaagttttaggcttccccagaatagaaacaagaaagtgaagtgtggaaaggagggtgtggtaaattcagatggcagatctaagaagagatggctccttcccactaacagattaatcatagagactcatcactgatgattgtaaaacatagttcagtgccatggacccatttctacatctttagttgatatcctctttacatatattctcccatttacaatcaatattctatgaagaattctcaatactcaactcacttccctctgcacttccctacacctcagtcttcatttctcatctactgggacttggttcccccacccttccactgaaatgaactctcccaagtctacagccacctctttgtcacatttatagatcaagagtgttgaaataaatgttcaaatggagataaacaggtactttcccagggggaaaaggtttccctcccccaagacagaattcatttccttgtgtctatagacaaagatagcatgcaatgctatcagttacctaaaaggtagagttgtaaaacagctttcagagtcagataaccagaaggctaagctgcagacgacatgctttcaaatgaagcacaca

SEQ ID NO: 87111 - DNA, 237 bp, Homo sapiens
attgtatatcagtttctatatatttttcaggcaaatatgggagaaaatgggtttaaaaacacaatccgagatgcaaatgcagtcacagaacatgccccattggctcaggccagaagaaactggagtcaggaaaagaggccggcagactcagagtcccaggaagccaatggcgccttggaggctcttgggaggatggagcgagagagctggtgctttgaggcaacgggaagcaggatc

SEQ ID NO: 87112 - DNA, 303 bp, Homo sapiens
aaacaaaaggtaaatatcacaaggaaagactgatgatttaaatgttttattaacatcaaatcctaagagcacagcaaaataaaattcagttgtctcacatgaagtaaggataagaatcccaatataaaaaccaccatatggtattaaaaaaaagggaaacagtacctgcacaatcaaaaacttatctaaaatttaaaactaaatcatgatagagaatagcagctctggagacatattggtgaactgctctaaatacaaaaatcaattcaagtgtttagataaaaatttttctggaaagtgatc

SEQ ID NO: 87113 - DNA, 858 bp, Homo sapiens
ctgcattttatttatttcagccttctctctctttttttcttagtctagataaaggcttgtggattttgttttttaaaccagctcttcatttcattgatctttattttagtctttttttgtttatttcttctctgagctttattatttcctttttagattgccaattttgccaattttgagtttggtttgttcctgcttatctctcgcctaagtcttaaagattaagagcttgtgaacagaatattggcagaaatatggacaatgaaggcctttctgatgaggtctcagatggaaatgaggaatatcttattagaaactgaaggcttgagaaaaatgtccttaagtgtcgtaaacttgcatcaaacccacttactcatcaaaccccacttatgacttcccttagaggacaagcgacatttcagctcagttatacactgcttttctcaattcctgccatttttttctcttcctttgccccctggcctacgtctccagctcactgaaaacagcctcccctgatgagcacaccattgttatgtaatagcctaacccttacccctcgcctatcagggggtgccaagcctgcagactcactctgccttcctcaaaactgccctgaggagaaggctgaagactgaggaatcctctttctgcctcccatttgactgcattttctttggtcaaaggcttccttattcatgggacctgcctgggtccaggaccccttgacaggtgctctctggctgcctgtcctctgggcactcttgtcccaggtctattgttttcatgacccaccaggatggcgcttcacttcctcagaaattgtgatccccaggaaagtgccccacaagaggggtg

SEQ ID NO: 87114 - DNA, 635 bp, Homo sapiens
tgtgttgagtgtgagtgtgtctctgtgtgtgtaggggtcgaggtggggggggtccgtgtttgcgatctgaacctttggtacctacaaggagggtgtctcaccgaacggtagctaaaacctcaccagaaccgcgcggaagtgagaagtcgcggccaaaggcgcccgcagaagcctcctctctgggccggaccccagcccgagcggccgaaaggagccccccgcccggatcacaggtgtgttgctggcaatatgtggccccaggggagaggcaaaagtggaggttcccgagtcatctgagatttgttgcctcggaacaggatccacagctcaataatagtcactgtactgtcattgtttatttgaaatctaaaggtgtaatgcaagaatatgcaagaccacagggactggagacacaaagagcatctgaagagagcttgaatgactcccaacagttccagtctcaaagttaccatgtgcagcacagtcagggcagcatgtgagaagaacaacaagaaagctggggtctgccagagaagacggaagccctcacattaaactgagtcagctggcatcttgatcttggactttcaaatctccagaactgtgagaaataaatgttagttgtttaaaccacc

SEQ ID NO: 87115 - DNA, 1721 bp, Homo sapiens
tgtgttgagtgtgagtgtgtctctgtgtgtgtaggggtcgaggtggggggggtccgtgtttgcgatctgaacctttggtacctacaaggagggtgtctcaccgaacggtagctaaaacctcaccagaaccgcgcggaagtgagaagtcgcggccaaaggcgcccgcagaagcctcctctctgggccggaccccagcccgagcggccgaaaggagccccccgcccggatcacagctgctgcagctgccgctgaaattcgctgtggccgctgcctcttcccgctttaatcccagacctccagtcattgggcagctcctcagaggcaagaagtcaacaccatggcaacccgacaagcctatcaaatcaccggctggcgtgacagcagcaacactgcaggcaggagtgggctgggcggaagagcagagtggccactgcgctcagaagtttacaaggaaaggggaaatgtctgaaatggagattgcacaatcctgtcttgaagcagaagactcagctagagcacatctggaaacacctggcactcctcaatagaattcaaatgctattttaaaagagtccatttctaagaagatgtggttcgaacatacagagctacataatatgagtaaaataggacctaacagtagtgttctccagcattgctctgcctttccttttctggatgtaacaacattactaagaaaggaagaaaaagcaaaaatctgctctcggggagattccagaatgttggaaagccccaaatggaagtctctgctttggttacaggacataaggtttaataaataaaaagatgctcatctgggatgctgcaccaattatcatgtactaaataaggttacctacttcactctccaggtagaaatgtctatcataagcatgtgccacagaaggtctctcaagtatcattattggctgtgttgaattttgtttttagttctcttttataaggtctgtagtcttactttcagtgaggaagtgttttctcaggttctcaagaaagtaacaaaatgccagcattgtcaaggtcaccattgccactgaattatcttactgtctgattaattccatcttcctctgcatcatattagcctgatgactacattctaattatttaaagcgttatgtaaatcaaagccagtaaatgtaatttctagtcttactagatatcatgtacattaggtcgaataactctagaaatgtcgtcataatcatgtcatgcctaatgatgacctactcagcccctgccaacatcattcaattactcatttcagtattgatttttctcatgcctctcttcatggcatttaaacagccctcacatctccccttttactgaggtgtaatgttgtataatgacagagatgctttgcttcccagattcataatgttacactctgtttcaaatccttttggagacaaattggggaatcaatatataaataatgacacacttatttttaattaaaatcactgctttcacagaaatggtatattaaaattatttttgctaaaaaaattttaaatacctatgtacgataaaaagactgccaatccttgggatcaagaatataatttgccccaaataacttttctgtaaaagtagaattcttaatggaaaatagattaatacatataatttcaagatctaaccttaaaaatggaaataatgtgtccatttttaaaaataaatcatatttacataca

SEQ ID NO: 87116 - DNA, 1888 bp, Homo sapiens
tgtgttgagtgtgagtgtgtctctgtgtgtgtaggggtcgaggtggggggggtccgtgtttgcgatctgaacctttggtacctacaaggagggtgtctcaccgaacggtagctaaaacctcaccagaaccgcgcggaagtgagaagtcgcggccaaaggcgcccgcagaagcctcctctctgggccggaccccagcccgagcggccgaaaggagccccccgcccggatcacagctgctgcagctgccgctgaaattcgctgtggccgctgcctcttcccgctttaatcccagacctccagtcattgggcagctcctcagaggcaagaagtcaacaccatggcaacccgacaagcctatcaaatcaccggctggcgtgacagcagcaacactgcaggcaggagtgggctgggcggaagagcagagtggccactgcgctcagaagtttacaaggaaaggggaaatgtctgaaatggagattgcacaatcctgtcttgaagcagaagactcagctagagcacatctggaaacacctggcactcctcaatagaattcaaatgctattttaaaagatgtaaaatctgagctgcaacactgaacaaaagctgtacttgccagccagcaaagatgctaccactctgcacaacagataaaacccatacatatagggaagtcaaaagagtctttaagctacagtgtttgagaggctgtttgtctctgatggaaaattaagaaaatgagtccatttctaagaagatgtggttcgaacatacagagctacataatatgagtaaaataggacctaacagtagtgttctccagcattgctctgcctttccttttctggatgtaacaacattactaagaaaggaagaaaaagcaaaaatctgctctcggggagattccagaatgttggaaagccccaaatggaagtctctgctttggttacaggacataaggtttaataaataaaaagatgctcatctgggatgctgcaccaattatcatgtactaaataaggttacctacttcactctccaggtagaaatgtctatcataagcatgtgccacagaaggtctctcaagtatcattattggctgtgttgaattttgtttttagttctcttttataaggtctgtagtcttactttcagtgaggaagtgttttctcaggttctcaagaaagtaacaaaatgccagcattgtcaaggtcaccattgccactgaattatcttactgtctgattaattccatcttcctctgcatcatattagcctgatgactacattctaattatttaaagcgttatgtaaatcaaagccagtaaatgtaatttctagtcttactagatatcatgtacattaggtcgaataactctagaaatgtcgtcataatcatgtcatgcctaatgatgacctactcagcccctgccaacatcattcaattactcatttcagtattgatttttctcatgcctctcttcatggcatttaaacagccctcacatctccccttttactgaggtgtaatgttgtataatgacagagatgctttgcttcccagattcataatgttacactctgtttcaaatccttttggagacaaattggggaatcaatatataaataatgacacacttatttttaattaaaatcactgctttcacagaaatggtatattaaaattatttttgctaaaaaaattttaaatacctatgtacgataaaaagactgccaatccttgggatcaagaatataatttgccccaaataacttttctgtaaaagtagaattcttaatggaaaatagattaatacatataatttcaagatctaaccttaaaaatggaaataatgtgtccatttttaaaaataaatcatatttacataca

SEQ ID NO: 87117 - DNA, 1160 bp, Homo sapiens
tgtgttgagtgtgagtgtgtctctgtgtgtgtaggggtcgaggtggggggggtccgtgtttgcgatctgaacctttggtacctacaaggagggtgtctcaccgaacggtagctaaaacctcaccagaaccgcgcggaagtgagaagtcgcggccaaaggcgcccgcagaagcctcctctctgggccggaccccagcccgagcggccgaaaggagccccccgcccggatcacaggtgtgttgctggcaatatgtggccccaggggagaggcaaaagtggaggttcccgagtcatctgagatttgttgcctcggaacaggatccacagctcaataatagtcactgtactgtcattgtttatttgaaatctaaaggtgtaatgcaagaatatgcaagaccacagggactggagacacaaagagcatctgaagagagcttgaatgactcccaacagttccagtctcaaagttaccatgtgcagcacagtcagggcaggtctgtctaactgggcttccttgaattaacttccacatagaatacattgtttattaaagaataagtatttctagcttaaatcttgcgtgtatataatattattaaatctcaatgggaaccccaggaattgttttgaaattagatctaccaaagatgtttctcaaggaggagtattttatttttgaattgtttagaattgctggaacacagtgataatagtagggcaaatcatagccaatttgttattgttattaaattctctgtagacaatgcacactcttgtctgtactggggaagactgcaccgtctgctccactctttgtacactatgtgtcagctttgacttaaccatttttactacatttctgtattagattccaagttccaaagagaaggtatattgtatactgtcttcttccctaaccttatatccttttgctccacattttattacagccatgatgacccattttacgtcaaattgatcagatcatgaaatatccaaatatttggtgaaaaattatcctaggtgtttctgtgagagtatttttggatgaaattaaccttttaatcagtagagaaaattgccctccataatgtgtgcgggcctcatccaatcagttgaagaccccaaaagaataaaaatattgactgtcacttccctgag

SEQ ID NO: 87118 - DNA, 403 bp, Homo sapiens
aagagactaagcacattccctgtagtgctttaagaatgcaatcagaacaacaggcgagggttgtagagaggtatatttcgctaccatacaggacagttttccccccctcaatcactattgctattcatcaaggcgctagttgtcttaagggagaatatgagttttgcattactagaaatattcaatataacctttataatttttcttttctttttattttcaaatagagtccatttctaagaagatgtggttcgaacatacagagctacataatatgagtaaaataggacctaacagtagtgttctccagcattgctctgcctttccttttctggatgtaacaacattactaagaaaggaagaaaaagcaaaaatctgctctcggggagattccagaatgttg

SEQ ID NO: 87119 - DNA, 781 bp, Homo sapiens
tccctcccaattcctaactgctccctatggtgtgtggtttcgcttgctacaatcagcgaataaacgtaattttgtttcacttgtaggtgtgttgctggcaatatgtggccccaggggagaggcaaaagtggaggttcccgagtcatctgagatttgttgcctcggaacaggatccacagctcaataatagtaaatatatctgagattccttgtgtctctagctgtctgaggcattaccctaccaatggctgagagttaagttcctctggatttagactttgtttgcaggtcactgttaacagagaatatgaaacactatgctgtctcacacaagccatttccatcatgcttctgctgggtggtcgttaggtcaaagctgacctccttgataaatgcttcaaatcatgatatgttttaggatatgttaaggaaagatactatatattaaaatcaatgcaaacaggtgtaaagatgacattaggtatgaacattacagagcctagcacattcagcttgagacagaggccattgtagagtaatatagactgtaggtatatgtgcagacagagcccaaactgaggtattataattttattatctactgggatacatatgtaaatgaaatgctaatgtactagtatacaaaaatgcatggaagagtttatcttggcttttaaaaaggtggttattattaattgacaatcttgaccatgagatgatttaattatgaaatatataaaacattggatttgcaatatatatcctcaatggtcaaggaaac

SEQ ID NO: 87120 - DNA, 1453 bp, Homo sapiens
ccttaggcaacttaagcctgccttgtggagtgcccctgtgggggactccagccagcctgagtgacatgatccaaagagccctcctgggtaggaaattgccccggtggaatccctcaccagagaagcaggtagcaggccctcgcagaggattaacacagtggctgaacaccaggaaggaactggcacttggagtccagacatctaaaatttggaaatgaaagcatttgtccagatctctggcaaagatggcactgtggtgttttctctggggccagttgtgcaaaaccttatagaagagaaggctgatctcattgcttcagacttggcccagattccacagaaggaagacccactacattatctgagacaatggggaaagctgacgtatggcttattcgaaactcctggaattttcagtttcctcatccactcttaccaaatgttgattttgttggaggactccactgcaaacctgccaaacccctgcctaaggaaatggaagactttgtacagagctctggagaaaatggtgttgtggtgttttctctggggtcaatggtcagtaacatgacagaagaaagggccaacgtaattgcatcagccctggcccagatcccacaaaaggttctttggagatttgatgggaataaaccagatgccttaggtctcaatactcggctgtacaagtggataccccagaatgaccttctaggtcatccaaagaccagagcttttataactcatggtggagccaatggcatctacgaggcaatctaccatgggatccctatggtgggcattccattgttttttgatcaacctgataatattgctcacatgaaggccaagggagcagctgttagagtggacttcaacacaatgtcgagtacagacctgctgaatgcactgaagacagtaattaatgatccttcatataaagagaatattatgaaattatcaagaattcaacatgatcaaccagtgaagcccctggatcgagcagtcttctggattgaatttgtcatgcgccacaaaggagccaaacatcttcgagttgcagcccacaacctcacctggttccagtaccactctttggatgtgattgggttcctgctggcttgtgtggcaaccgtgctatttatcatcacaaagtgttgtctgttttgtttctggaagtttgctagaaaaggaaagaagggaaaaagggattagttatatctgagatttgaagctggaaaacctgatagatagagaatacttcagttgattccagcaataaatattgtgatgcaagatttctttcttcctgtgacaaaaaaaaatcctttcgaagtctaccttgtcaagtaaaaatttgtttttcagagatttaccacccagttaatggttagaaatattctgtggcaatgaagaaaacactaggggaaataaaaaataatataaagccatatga

SEQ ID NO: 87121 - DNA, 1788 bp, Homo sapiens
ctgcacaaggatggctctgaaatggactacagttctgctgatacaactcagtttttactttagctctgggagttgtggaaaggtgctggtatgggccgcagaatacagcctttggatgaatatgaagacaatcctgaaagaacttgttcagagaggtcatgaggtgactgtactggcatcttcagcttccattctttttgatcccaacgactcatccactcttaaacttgaagtttatcctacatctttaactaaaactgaatttgagaatatcatcatgcaattggttaagagattgtcagaaattcaaaaagatacattttggttacctttttcacaagaacaagaaatcctgtgggcaattaatgacataattagaaacttctgtaaagatgtagtttcaaataagaaacttatgaaaaaactacaagagtcaagatttgacatcgtttttgcagatgcttatttaccctgtggtgagctgctggctgagctatttaacataccctttgtgtacagtcacagcttcagtcctggctactcatttgaaaggcacagtggaggatttattttccctccttcctacgtacctgttgttatgtcaaaattaagtgatcaaatgactttcatggagagggtaaaaaatatgctctatgtgctttattttgacttttggttccaaatatttaatatgaagaagtgggatcagttttacagtgaagttttaggaagacccactacattatctgagacaatggggaaagctgacgtatggcttattcgaaactcctggaattttcagtttcctcatccactcttaccaaatgttgattttgttggaggactccactgcaaacctgccaaacccctgcctaaggaaatggaagactttgtacagagctctggagaaaatggtgttgtggtgttttctctggggtcaatggtcagtaacatgacagaagaaagggccaacgtaattgcatcagccctggcccagatcccacaaaagtcggctgtacaagtggataccccagaatgaccttctaggtcatccaaagaccagagcttttataactcatggtggagccaatggcatctacgaggcaatctaccatgggatccctatggtgggcattccattgttttttgatcaacctgataatattgctcacatgaaggccaagggagcagctgttagagtggacttcaacacaatgtcgagtacagacctgctgaatgcactgaagacagtaattaatgatccttcatataaagagaatattatgaaattatcaagaattcaacatgatcaaccagtgaagcccctggatcgagcagtcttctggattgaatttgtcatgcgccacaaaggagccaaacatcttcgagttgcagcccacaacctcacctggttccagtaccactctttggatgtgattgggttcctgctggcttgtgtggcaaccgtgctatttatcatcacaaagtgttgtctgttttgtttctggaagtttgctagaaaaggaaagaagggaaaaagggattagttatatctgagatttgaagctggaaaacctgatagatagagaatacttcagttgattccagcaataaatattgtgatgcaagatttctttcttcctgtgacaaaaaaaaatcctttcgaagtctaccttgtcaagtaaaaatttgtttttcagagatttaccacccagttaatggttagaaatattctgtggcaatgaagaaaacactaggggaaataaaaaataatataaagccatatga

SEQ ID NO: 87122 - DNA, 1217 bp, Homo sapiens
ctgcacaaggatggctctgaaatggactacagttctgctgatacaactcagtttttactttagctctgggagttgtggaaaggtgctggtatgggccgcagaatacagcctttggatgaatatgaagacaatcctgaaagaacttgttcagagaggtcatgaggaagacccactacattatctgagacaatggggaaagctgacgtatggcttattcgaaactcctggaattttcagtttcctcatccactcttaccaaatgttgattttgttggaggactccactgcaaacctgccaaacccctgcctaaggaaatggaagactttgtacagagctctggagaaaatggtgttgtggtgttttctctggggtcaatggtcagtaacatgacagaagaaagggccaacgtaattgcatcagccctggcccagatcccacaaaaggttctttggagatttgatgggaataaaccagatgccttaggtctcaatactcggctgtacaagtggataccccagaatgaccttctaggcaatctaccatgggatccctatggtgggcattccattgttttttgatcaacctgataatattgctcacatgaaggccaagggagcagctgttagagtggacttcaacacaatgtcgagtacagacctgctgaatgcactgaagacagtaattaatgatccttcatataaagagaatattatgaaattatcaagaattcaacatgatcaaccagtgaagcccctggatcgagcagtcttctggattgaatttgtcatgcgccacaaaggagccaaacatcttcgagttgcagcccacaacctcacctggttccagtaccactctttggatgtgattgggttcctgctggcttgtgtggcaaccgtgctatttatcatcacaaagtgttgtctgttttgtttctggaagtttgctagaaaaggaaagaagggaaaaagggattagttatatctgagatttgaagctggaaaacctgatagatagagaatacttcagttgattccagcaataaatattgtgatgcaagatttctttcttcctgtgacaaaaaaaaatcctttcgaagtctaccttgtcaagtaaaaatttgtttttcagagatttaccacccagttaatggttagaaatattctgtggcaatgaagaaaacactaggggaaataaaaaataatataaagccatatga

SEQ ID NO: 87123 - DNA, 564 bp, Homo sapiens
aacttactttcagtgtcggtatctttatttttatccttcagatatataaagagaatattatgaaattatcaagaattcaacatgatcaaccagtgaagcccctggatcgagcagtcttctggattgaatttgtcatgcgccacaaaggagccaaacatcttcgagttgcagcccacaacctcacctggttccagtaccactctttggatgtgattgggttcctgctggcttgtgtggcaaccgtgctatttatcatcacaaagtgttgtctgttttgtttctggaagtttgctagaaaaggaaagaagggaaaaagggattagttatatctgagatttgaagctggaaaacctgatagatagagaatacttcagttgattccagcaataaatattgtgatgcaagatttctttcttcctgtgacaaaaaaaaatcctttcgaagtctaccttgtcaagtaaaaatttgtttttcagagatttaccacccagttaatggttagaaatattctgtggcaatgaagaaaacactaggggaaataaaaaataatataaagccatatga

SEQ ID NO: 87124 - DNA, 2799 bp, Homo sapiens
ctgcacaaggatggctctgaaatggactacagttctgctgatacaactcagtttttactttagctctgggagttgtggaaaggtgctggtatgggccgcagaatacagcctttggatgaatatgaagacaatcctgaaagaacttgttcagagaggtcatgaggtgactgtactggcatcttcagcttccattctttttgatcccaacgactcatccactcttaaacttgaagtttatcctacatctttaactaaaactgaatttgagaatatcatcatgcaattggttaagagattgtcagaaattcaaaaagatacattttggttacctttttcacaagaacaagaaatcctgtgggcaattaatgacataattagaaacttctgtaaagatgtagtttcaaataagaaacttatgaaaaaactacaagagtcaagatttgacatcgtttttgcagatgcttatttaccctgtggtgagctgctggctgagctatttaacataccctttgtgtacagtcacagcttcagtcctggctactcatttgaaaggcacagtggaggatttattttccctccttcctacgtacctgttgttatgtcaaaattaagtgatcaaatgactttcatggagagggtaaaaaatatgctctatgtgctttattttgacttttggttccaaatatttaatatgaagaagtgggatcagttttacagtgaagttttaggaagacccactacattatctgagacaatggggaaagctgacgtatggcttattcgaaactcctggaattttcagtttcctcatccactcttaccaaatgttgattttgttggaggactccactgcaaacctgccaaacccctgcctaaggaaatggaagactttgtacagagctctggagaaaatggtgttgtggtgttttctctggggtcaatggtcagtaacatgacagaagaaagggccaacgtaattgcatcagccctggcccagatcccacaaaaggttctttggagatttgatgggaataaaccagatgccttaggtctcaatactcggctgtacaagtggataccccagaatgaccttctaggtcatccaaagaccagagcttttataactcatggtggagccaatggcatctacgaggcaatctaccatgggatccctatggtgggcattccattgttttttgatcaacctgataatattgctcacatgaaggccaagggagcagctgttagagtggacttcaacacaatgtcgagtacagacctgctgaatgcactgaagacagtaattaatgatccttcatataaagagaatattatgaaattatcaagaattcaacatgatcaaccagtgaagcccctggatcgagcagtcttctggattgaatttgtcatgcgccacaaaggagccaaacatcttcgagttgcagcccacaacctcacctggttccagtaccactctttggatgtgattgggttcctgctggcttgtgtggcaaccgtgctatttatcatcacaaagtgttgtctgttttgtttctggaagtttgctagaaaaggaaagaagggaaaaagggattagttatatctgagatttgaagctggggaattccgtttattgaagattcaggttaacctgaatcaagttaacccagtctcaaatgctcacttatcctatctccttggcacaaatctctcctctcctggattgccaaagaaaattcaaattattcttcaattagtcaggatgatttgactatcagcagttcatagtacccatcttcataactaagccacctagggatccggcagaaaaaaaagggatgcaggggagtcatcatacagggggtggatcatttaccaggatccacacttcctacaaagcggttgtaatattaaataacaaaactgttttttattccaatcttcacataaaacaggaataattgtatactttcttactaatgtgttccatggagtttttcctccaagaagtggcttaggggaaaatgagccccagtaatgctctgtggcatccaatccttctaccccgaccctttgactttctgccccagcccctcttagttctcctagaattaggactaaggttaagtgccctcttgggatatgacttccttcccttcctcttgatacaaaaagagcctattaccaaccctcatacacacaagagttcccttcctagttgcagactcttctgctccagctggactcccctagctctggactcccactagatcacacaggggtccctgcatgtcagtaaactttggatgaccttgggagaccaaaaaatggaatatcattttttgatctaaacaaaatagtttcctgatttaacactggccaggaaggtgggctgcaccctcagtctctctctcccatcatggttttcacatgatatcaaaggactctcataacagtctgattcttatgagttgggcatcctgtgtttccctttagggcctgcttccttcaaatagaggagatgggtgctatgaaacctattcactctggacttgggatggctcttctccatcttcccaagtctgagctggagcctccatgcccaactctgctctgctcttctatttcctgacagcagctaaggcatgttcctgttctgcccccaaattgaccttactaacagtgagaacttggaggagtcttcgggtcttgggaaatccaagttttcccggaaacgttttgttgtaaacagtgtccacactctttgctccaataaagctcggttccttaagggaattc

SEQ ID NO: 87125 - DNA, 1340 bp, Homo sapiens
ccttaggcaacttaagcctgccttgtggagtgcccctgtgggggactccagccagcctgagtgacatgatccaaagagccctcctgggtaggaaattgccccggtggaatccctcaccagagaagcaggtagcaggccctcgcagaggattaacacagtggctgaacaccaggaaggaactggcacttggagtccagacatctaaaatttggaaatgaaagcatttgtccagatctctggcaaagatggcactgtggtgttttctctggggccagttgtgcaaaaccttatagaagagaaggctgatctcattgcttcagacttggcccagattccacagaaggaagacccactacattatctgagacaatggggaaagctgacgtatggcttattcgaaactcctggaattttcagtttcctcatccactcttaccaaatgttgattttgttggaggactccactgcaaacctgccaaacccctgcctaaggaaatggaagactttgtacagagctctggagaaaatggtgttgtggtgttttctctggggtcaatggtcagtaacatgacagaagaaagggccaacgtaattgcatcagccctggcccagatcccacaaaaggttctttggagatttgatgggaataaaccagatgccttaggtctcaatactcggctgtacaagtggataccccagaatgaccttctaggtcatccaaagaccagagcttttataactcatggtggagccaatggcatctacgaggcaatctaccatgggatccctatggtgggcattccattgttttttgatcaacctgataatattgctcacatgaaggccaagggagcagctgttagagtggacttcaacacaatgtcgagtacagacctgctgaatgcactgaagacagtaattaatgatccttcatataaagagaatattatgaaattatcaagaattcaacatgatcaaccagtgaagcccctggatcgagcagtcttctggattgaatttgtcatgcgccacaaaggagccaaacatcttcgagttgcagcccacaacctcacctggttccagtaccactctttggatgtgattgggttcctgctggcttgtgtggcaaccgtgctatttatcatcacaaagtgttgtctgttttgtttctggaagtttgctagaaaaggaaagaagggaaaaagggattagttatatctgagatttgaagctggaaaacctgatagatagagaatacttcagttgattccagcaataaatcgtgatgcggccgtgcaccacactaaatattactaatactctaacgggagcggggcggc

SEQ ID NO: 87126 - DNA, 1233 bp, Homo sapiens
ccttaggcaacttaagcctgccttgtggagtgcccctgtgggggactccagccagcctgagtgacatgatccaaagagccctcctgggtaggaaattgccccggtggaatccctcaccagagaagcaggtagcaggccctcgcagaggattaacacagtggctgaacaccaggaaggaactggcacttggagtccagacatctaaaatttggaaatgaaagcatttgtccagatctctggcaaagatggcactgtggtgttttctctggggccagttgtgcaaaaccttatagaagagaaggctgatctcattgcttcagacttggcccagattccacagaaggaagacccactacattatctgagacaatggggaaagctgacgtatggcttattcgaaactcctggaattttcagtttcctcatccactcttaccaaatgttgattttgttggaggactccactgcaaacctgccaaacccctgcctaaggaaatggaagactttgtacagagctctggagaaaatggtgttgtggtgttttctctggggtcaatggtcagtaacatgacagaagaaagggccaacgtaattgcatcagccctggcccagatcccacaaaaggttctttggagatttgatgggaataaaccagatgccttaggtctcaatactcggctgtacaagtggataccccagaatgaccttctagatataaagagaatattatgaaattatcaagaattcaacatgatcaaccagtgaagcccctggatcgagcagtcttctggattgaatttgtcatgcgccacaaaggagccaaacatcttcgagttgcagcccacaacctcacctggttccagtaccactctttggatgtgattgggttcctgctggcttgtgtggcaaccgtgctatttatcatcacaaagtgttgtctgttttgtttctggaagtttgctagaaaaggaaagaagggaaaaagggattagttatatctgagatttgaagctggaaaacctgatagatagagaatacttcagttgattccagcaataaatattgtgatgcaagatttctttcttcctgtgacaaaaaaaaatcctttcgaagtctaccttgtcaagtaaaaatttgtttttcagagatttaccacccagttaatggttagaaatattctgtggcaatgaagaaaacactaggggaaataaaaaataatataaagccatatga

SEQ ID NO: 87127 - DNA, 581 bp, Homo sapiens
cccccatcttccttatacggatatgcttgtacggagcagggtcgtttttttatcaagcacatataaagagaatattatgaaattatcaagaattcaacatgatcaaccagtgaagcccctggatcgagcagtcttctggattgaatttgtcatgcgccacaaaggagccaaacatcttcgagttgcagcccacaacctcacctggttccagtaccactctttggatgtgattgggttcctgctggcttgtgtggcaaccgtgctatttatcatcacaaagtgttgtctgttttgtttctggaagtttgctagaaaaggaaagaagggaaaaagggattagttatatctgagatttgaagctggaaaacctgatagatagagaatacttcagttgattccagcaataaatattgtgatgcaagatttctttcttcctgtgacaaaaaaaaatcctttcgaagtctaccttgtcaagtaaaaatttgtttttcagagatttaccacccagttaatggttagaaatattctgtggcaatgaagaaaacactaggggaaataaaaaataatataaagccatatga

SEQ ID NO: 87128 - DNA, 360 bp, Homo sapiens
atgtcttacatggctggtgcaggaggaagagagagaagtgggaggtgctacacacttttatttatatttatttattattttgagacaaagtctggttctaccaccaggctggagtgcagcggtgcaattttggttcactgcaatctctgcctcctgggctcaagccatcctcccacctcagcctcccgagtagtagggactacagggatgcaccacaatgcccagctaatttttgaattttttgtggagacagggttttgccatgtttcccgggctggtctcaaactcctgtgtgcaagcaatccacacaccttggcttcccaaagtactgagattacaggtgtgagcctctgcgcctgg

SEQ ID NO: 87129 - DNA, 492 bp, Homo sapiens
gagggtatatcattctgacacacatcaagaggctgaactaaattgatttttttaaagataaggtgttctcattttaaacacgctaacagattaaatataacagtattagaaagctcaagttttaagttgatggacacaaaaagaaattcagtcccttgtgctacttttctagtgcgccttattaaatccaaatctgaacaatgtaactgagaatgaacaaatgctccttttgatggttgcaaacaaagcacctgttgaatgtcaaagcaaaccatatgcatgcgcacttaatctttgaaatttaagataaggtctgatgttcccaacccagctttttctactgcaatttatcaaacctcagtactgctaggtttacaagctttttcttccgaattttgttctatgaagaggaaaatagtgctcttgagatattataatagctactgatttaataggtctgaatttaatatgatggtacagaaaatgtcttgc

SEQ ID NO: 87130 - DNA, 441 bp, Homo sapiens
tacaggagcgcaccactacacccagctaatttttgtattttagtagagatggggtttcaccatgttggtcaggctggtctcaaattcttgacctcgtgatccgcctgcctcggcctcccaaagtgctgggattcaggcgtgagccatggcgcccagcctacttggtcatttttaaagagagtcaggacaatgcagctgaaagcaaaggacttttctttagttcagttcatcatttcattattttgcttgcagtattgcaaagaaaatttctcataatctaatgagaactttggagagaatcttttaagtaaatgaaagtttattgttggaaactaagtatgttagcaaaatcttagttatgtttcattgttgatattttccaaactgagtcaggttatcattaaacctaactctttgaaaggacctcttggtgtacctctc

SEQ ID NO: 87131 - DNA, 394 bp, Homo sapiens
tataatcctttagactaaaatcctttcctttgtgaccaactaaatttgattatttggaaaaataatcaagacaaaattgtagaacctactctttctttgcacgaatgaaggcctaacaagcaaatcaaagttcacctaaatgcagatggttatttctggagcttatcttgtcttaaaaaaataaaaaataaaaagtccatcctggccaacatggtgaaacctcgtctctactaaaatacaaaaaattagccaggcgtggtggtgggcacctgtagtcccagctacatgggaggctgaggcaggggaatcgctttaacctgggagacggagattacagtcagccaagactgtgccactgcactccagcctggcgacaaagcaagactgcatctta

SEQ ID NO: 87132 - DNA, 668 bp, Homo sapiens
tgggcccttaattctaatcttggtatcaagcaccttgcggaggtccattataaagagcctcatgaaatgaaagaaagattggtgttattcaagaaatggaagatgatacatgtagagacattgattcctggattttttttctttaaaagttggagcaccttcagaaataaaacatttggcctttgaattacattgtttaaactttcaaagttttacagaagttaaaatgatctagaggatactagagaggtcttaattgatagtattcttgttaatgtagggaataagaaagggtaaactactgttgataaatgttgatacctgctttattggatataaggcataggttatctgtgtttggctattgtgagtaatttttttaaaaagaaggagcagagtccttgctctgggaacataatccattgcagagagagcacaagaactagtacatattttaacctttgattattgtgttaattaacaaggaaaatattaattctgggatattagtgttgagtcagtgtgtctgtgatgtgaacttaatctaagcaaaacacttaggtacatttgctttaaaaaaaaaaatcccgtgatggatgaaaggccaaatactttgggttatctgtatttataaacctatgaagattataatgtttccaatatactgc

SEQ ID NO: 87133 - DNA, 417 bp, Homo sapiens
gctcatcatgtcaacatggctctctccgtctttccatttttcctcaggtgcagcatgttgtcctatttcctcatacctactgcccatgtcacggggcagcagctttaggagtcatgtccatgttaaggagggaataagagtaagaggctaggccacgtgcagtggctcacgcctgtaatcccagcactttgggaggccgaggcgggtggatcacctgaggtcaggagttcgaggccagcctggccaacatggcgaaaccccatctctactaaaaatacaaaaattagctgggtgtggtggtgtgcgcctgtaatcctagacacttgggaggctgaggcaggagaattgctagaacccaggcggtggaggttgcggtgagctgagatcatgccactgcactccagcctggatgacaga

SEQ ID NO: 87134 - DNA, 375 bp, Homo sapiens
ggcacgagaactggatgcaaaattataaaattctggaatcaattaaaaaaagaggggggaagcagaacagaatgtaaaagtggcattcatttccctggttacaaagttagttattttccagattcatcaataacttgagtatcaaaaatggcttatccaattacattttagaaacgtttaaaaaaaaaaatcacaattttttttattaatagagacagggttttgccatgttgcccaggctgatcctgaacacctgagctcaagcaacccacccacctcagcctcccaaagtgctggcattacaggcgtgacaccattatccagcctaaattttttgagtttgaaatactattctgtcattcaaatcattaaagt

SEQ ID NO: 87135 - DNA, 348 bp, Homo sapiens
ggccagttcccaggcagctaattggagcatttatctgaagcaaagcggggccagctcttcttccggtcgttcccagggagggtgatgcttaaacggtttaaagcggtggtgcacaggaaaatcacccagggagctttaacaacgcgacattcaggggtccacaggcagaccaattgaagcagagtctctggggttggagcctgaccactgctagggccagtatttttcataagcttaacgtgcaatcaaggttgagaatctttgctctatgggctcccagagacagacaagaggaagtggggacacactcaccaaacccaaagattccatttcagctgtaaagctgac

SEQ ID NO: 87136 - DNA, 452 bp, Homo sapiens
aggcatttagacaggcttaagcaaaaagcagagtgatttaatttttatactaaggaaaagtatgttagtaaaagctaatgagtcctaggatcaaaagtttttatgtcaaggcatggggccattggagaagagtgaagtaacattctaaattcctacaagcctaaaacaaggagtctttttgtttttatgcttgagattgattactattacttctgtaatactgttttcacagttctaaatgattcagtcctcagttacattagtaaaaggcagaggtcggatatgaaaggaaaatttataataaaagaatcagaattagttgtataaggggtaccaaaatttctaatcatcttttatctattccagttttagaatgtattttatagtgaaggattaacccattgtccaccctagcatctggtacatactacattgtttatttcacatttttt

SEQ ID NO: 87137 - DNA, 423 bp, Homo sapiens
atagaaaaagaggaaacgaaccaaactctttttatgaggctggtataactgtgatatgaaaaccagaaaagtactacaaggaaaattacagtgcaaatctgttcatgaatgctagtacaaaaatctcacaataccagcaaactaaaccagcaatatacacacacacacgtgcacgtatgcgtgtaaaaaacatatcatgatatcatgactgcttggtttagcgtaatattacaaaaactaattcgtttaatacatcccattaatgtatttttaaaactgtgattacaaacttattaaacacctctgatcactcccatagataatgaaaaagggttcactgaaatttaacatgaatttattgttagaaaatacttagcaaactattatacagtggaagtttactaatccaagaaaggatggctt

SEQ ID NO: 87138 - DNA, 245 bp, Homo sapiens
ccatgctcctgaaataagtggagaaaacactttctgcatctcagcagcccttcgggattctcttgcatgcatattacacagggtttgaaggtagccctccaaaatattagctgaaagcttcctcggaaagcaaatctttcccacatccttccctgcagttcctctttaagaggtgtcagcatggctgaaagaatgaagtggctgcacattgtttggctgtgctattatgtgcttaacatttccat

SEQ ID NO: 87139 - DNA, 307 bp, Homo sapiens
gggtgtcccaacttacacttccccctaaaaagtgggacagtgcccttttgtagaactctcaacatttctttcttttatactttttggtttgtttttgaggctttttttcttttacttttatttttcaattttttggggacagggtctccctctgtcacccactgcagccttgacctcgcgggctcaagcgatcctcccatctcagtctcctgagtagctgggcccacaggcacgtgccaccacattgggctaatttttgtggtttttttttttttttttttgtagagatggggtctccctatgttac

SEQ ID NO: 87140 - DNA, 646 bp, Homo sapiens
ctaaggctgtttagtgaatagagtattccagtttacctagagtacaagttatgtgtgtaagtaaggccttgtcctaaaaaaaaaaaaaaaaaatcagtctagtgaggaaaaaatgtaaataaacaaatgaatgagtacattttgcattctgagttatgcagaaagtgctttgcaacatagaggaaaaagccctaactgttgtggtggttgagagttgattggaaagcctcatggcaggctgagtcttgatggagcagtactttgcccagtggaaataagaagaaagcatatagaagttctccttatcctttggacttgcaatacacacaaaactttctggggctttctaaggaaattttatttcaagattctgctaggcaataactctccttccttaaattgaagggtaaggactctaagttctgctttttcttttctcactgaatttgcttaggtttttttttcgtttttgtttgtttttttttttttcacctttctcactggtattgatcactttctcttccttagtaaagctccatttgcttctctcctaacctggacattataggaagcactgatgctgtattaaaatttagagaaagctcccagtctgtctttcccaacatcccttcagtttcaataagca

SEQ ID NO: 87141 - DNA, 632 bp, Homo sapiens
aacacttgatttttatttatttatttatttttttgggacaagagtctcgctctgtcacccaggctgaagtcgcccaggctggagtgcagtggcctgatctcggctcactgctagctccgcctcccgcgttcggccattctcctgcctcagcctcccaaagtgctgggattactggcataagccaccgcgcccggccaggaaacacttgattttaacttgctacttggactactctgaaagtcctgtgtaatgattctgaacatatatttcagaatatgacacattaattcatgcataataatatatagtttgaattatgaacttacctttcatgaagtcagagatgcctctgacattcctgcatttatccattcagatggaagcttgatataaaagattataaaacttttaacaggcttaacttcttctaatttgaaatgcatgcactacctctttgtagcttctaaatgaactggcccaaaaccagtcagattttacagttggatggtaggtttctttactgaactatgaaaacagcagtgccaatggggaaaatgtgattgctgcattaagaaaaaataaataaataaaagaaagaaactccaacaccagcagccttaaagtatattttt

SEQ ID NO: 87142 - DNA, 291 bp, Homo sapiens
ggagtaatactttgaaaatatgtttaatgttgtgaaccactctgtggccgagaagcaactccggctaaaatatatttaatgcttagagtcatttggcggtttcgaaaaaaagaaacttcttgttaatttttaacatttattgctgatcagtggctgctaaagtaactatcagtacagcatgatttatatttagggacacgctgtgctgctactaaaacaattcatactcttctctcaaggctacacaaaaagtgtcaatagcattacctttgcaattgcaccactaataaa

SEQ ID NO: 87143 - DNA, 2151 bp, Homo sapiens
caagggtcaggtctccagcagaccctgaaagctgagctgccctgacccccaaagtgaggagaagctgcaagggaaaagggagggacagatcagggagaccggggaagaaggaggagcagccaaggaggctgctgtccccccacagagcagctcggactcagctcccggagcaacccagctgcggaggcaacggcagtgctgctcctccagcgaaggacagcaggcaggcagacagacagaggtcctgggactggaaggcctcagcccccagccactgggctgggcctggcccaatggcctttaatgacctcctgcagcaggtggggggtgtcggccgcttccagcagatccaggtcaccctggtggtcctccccctgctcctgatggcttctcacaacaccctgcagaacttcactgctgccatccctacccaccactgccgcccgcctgccgatgccaacctcagcaagaacggggggctggaggtctggctgccccgggacaggcaggggcagcctgagtcctgcctccgcttcacctccccgcagtggggactgccctttctcaatggcacagaagccaatggcacaggggccacagagccctgcaccgatggctggatctatgacaacagcaccttcccatctaccatcgtgactgagtgggaccttgtgtgctctcacagggccctacgccagctggcccagtccttgtacatggtgggggtgctgctcggagccatggtgttcggctaccttgcagacaggctaggccgccggaaggtactcatcttgaactacctgcagacagctgtgtcagggacctgcgcagccttcgcacccaacttccccatctactgcgccttccggctcctctcgggcatggctctggctggcatctccctcaactgcatgacactgaatgtggagtggatgcccattcacacacgggcctgcgtgggcaccttgattggctatgtctacagcctgggccagttcctcctggctggtgtggcctacgctgtgccccactggcgccacctgcagctactggtctctgcgcctttttttgccttcttcatctactcctggttcttcattgagtcggcccgctggcactcctcctccgggaggctggacctcaccctgagggccctgcagagagtcgcccggatcaatgggaagcgggaagaaggagccaaattgagtatggaggtactccgggccagtctgcagaaggagctgaccatgggcaaaggccaggcatcggccatggagctgctgcgctgccccaccctccgccacctcttcctctgcctctccatgctgtggtttgccactagctttgcatactatgggctggtcatggacctgcagggctttggagtcagcatctacctaatccaggtgatctttggtgctgtggacctgcctgccaagcttgtgggcttccttgtcatcaactccctgggtcgccggcctgcccagatggctgcactgctgctggcaggcatctgcatcctgctcaatggggtgataccccaggaccagtccattgtccgaacctctcttgctgtgctggggaagggttgtctggctgcctccttcaactgcatcttcctgtatactggggaactgtatcccacaatgatccggcagacaggcatgggaatgggcagcaccatggcccgagtgggcagcatcgtgagcccactggtgagcatgactgccgagctctacccctccatgcctctcttcatctacggtgctgttcctgtggccgccagcgctgtcactgtcctcctgccagagaccctgggccagccactgccagacacggtgcaggacctggagagcaggaaagggaaacagacgcgacagcaacaagagcaccagaagtatatggtcccactgcaggcctcagcacaagagaagaatggactctgaggactgagaaggggccttacagaaccctaaagggagggaaggtcctacaggtctccggccacccacacaaggaggaggaagaggaaatggtgacccaagtgtgggggttgtggttcaggaaagcatcttcccaggggtccacctccctttataaaccccaccagaaccacatcattaaaaggtttgactgcgcaccaaaaaaaaa

SEQ ID NO: 87144 - DNA, 2190 bp, Homo sapiens
caagggtcaggtctccagcagaccctgaaagctgagctgccctgacccccaaagtgaggagaagctgcaagggaaaagggagggacagatcagggagaccggggaagaaggaggagcagccaaggaggctgctgtccccccacagagcagctcggactcagctcccggagcaacccagctgcggaggcaacggcagtgctgctcctccagcgaaggacagcaggcaggcagacagacagaggtcctgggactggaaggcctcagcccccagccactgggctgggcctggcccaatggcctttaatgacctcctgcagcaggtggggggtgtcggccgcttccagcagatccaggtcaccctggtggtcctccccctgctcctgatggcttctcacaacaccctgcagaacttcactgctgccatccctacccaccactgccgcccgcctgccgatgccaacctcagcaagaacggggggctggaggtctggctgccccgggacaggcaggggcagcctgagtcctgcctccgcttcacctccccgcagtggggactgccctttctcaatggcacagaagccaatggcacaggggccacagagccctgcaccgatggctggatctatgacaacagcaccttcccatctaccatcgtgactgagtgggaccttgtgtgctctcacagggccctacgccagctggcccagtccttgtacatggtgggggtgctgctcggagccatggtgttcggctaccttgcagacaggctaggccgccggaaggtactcatcttgaactacctgcagacagctgtgtcagggacctgcgcagccttcgcacccaacttccccatctactgcgccttccggctcctctcgggcatggctctggctggcatctccctcaactgcatgacactgaatgtggagtggatgcccattcacacacgggcctgcgtgggcaccttgattggctatgtctacagcctgggccagttcctcctggctggtgtggcctacgctgtgccccactggcgccacctgcagctactggtctctgcgcctttttttgccttcttcatctactcctggttcttcattgagtcggcccgctggcactcctcctccgggaggctggacctcaccctgagggccctgcagagagtcgcccggatcaatgggaagcgggaagaaggagccaaattgagtatggaggtactccgggccagtctgcagaaggagctgaccatgggcaaaggccaggcatcggccatggagctgctgcgctgccccaccctccgccacctcttcctctgcctctccatgctgtggtttgccactagctttgcatactatgggctggtcatggacctgcagggctttggagtcagcatctacctaatccaggtgatctttggtgctgtggacctgcctgccaagcttgtgggcttccttgtcatcaactccctgggtcgccggcctgcccagatggctgcactgctgctggcaggcatctgcatcctgctcaatggggtgataccccaggaccagtccattgtccgaacctctcttgctgtgctggggaagggttgtctggctgcctccttcaactgcatcttcctgtatactggggaactgtatcccacaatgatccggcagacaggcatgggaatgggcagcaccatggcccgagtgggcagcatcgtgagcccactggtgagcatgactgccgagctctacccctccatgcctctcttcatctacggtgctgttcctgtggccgccagcgctgtcactgtcctcctgccagagaccctgggccagccactgccagacacggtgcaggacctggagagcaggtgggcccccactcagaaagaagcagggatatatcccaggaaagggaaacagacgcgacagcaacaagagcaccagaagtatatggtcccactgcaggcctcagcacaagagaagaatggactctgaggactgagaaggggccttacagaaccctaaagggagggaaggtcctacaggtctccggccacccacacaaggaggaggaagaggaaatggtgacccaagtgtgggggttgtggttcaggaaagcatcttcccaggggtccacctccctttataaaccccaccagaaccacatcattaaaaggtttgactgcgcaccaaaaaaaaa

SEQ ID NO: 87145 - DNA, 2058 bp, Homo sapiens
caagggtcaggtctccagcagaccctgaaagctgagctgccctgacccccaaagtgaggagaagctgcaagggaaaagggagggacagatcagggagaccggggaagaaggaggagcagccaaggaggctgctgtccccccacagagcagctcggactcagctcccggagcaacccagctgcggaggcaacggcagtgctgctcctccagcgaaggacagcaggcaggcagacagacagaggtcctgggactggaaggcctcagcccccagccactgggctgggcctggcccaatggcctttaatgacctcctgcagcaggtggggggtgtcggccgcttccagcagatccaggtcaccctggtggtcctccccctgctcctgatggcttctcacaacaccctgcagaacttcactgctgccatccctacccaccactgccgcccgcctgccgatgccaacctcagcaagaacggggggctggaggtctggctgccccgggacaggcaggggcagcctgagtcctgcctccgcttcacctccccgcagtggggactgccctttctcaatggcacagaagccaatggcacaggggccacagagccctgcaccgatggctggatctatgacaacagcaccttcccatctaccatcgtgactgagtgggaccttgtgtgctctcacagggccctacgccagctggcccagtccttgtacatggtgggggtgctgctcggagccatggtgttcggctaccttgcagacaggctaggccgccggaaggtactcatcttgaactacctgcagacagctgtgtcagggacctgcgcagccttcgcacccaacttccccatctactgcgccttccggctcctctcgggcatggctctggctggcatctccctcaactgcatgacactgaatgtggagtggatgcccattcacacacgggcctgcgtgggcaccttgattggctatgtctacagcctgggccagttcctcctggctggtgtggcctacgctgtgccccactggcgccacctgcagctactggtctctgcgcctttttttgccttcttcatctactcctggttcttcattgagtcggcccgctggcactcctcctccgggaggctggacctcaccctgagggccctgcagagagtcgcccggatcaatgggaagcgggaagaaggagccaaattgagtatggaggtactccgggccagtctgcagaaggagctgaccatgggcaaaggccaggcatcggccatggagctgctgcgctgccccaccctccgccacctcttcctctgcctctccatgctgtggtttgccactagctttgcatactatgggctggtcatggacctgcagggctttggagtcagcatctacctaatccaggtgatctttggtgctgtggacctgcctgccaagcttgtgggcttccttgtcatcaactccctgggtcgccggcctgcccagatggctgcactgctgctggcaggcatctgcatcctgctcaatggggtgataccccaggaccagtccattgtccgaacctctcttgctgtgctggggaagggttgtctggctgcctccttcaactgcatcttcctgtatactggggaactgtatcccacaatgatccgcgctgtcactgtcctcctgccagagaccctgggccagccactgccagacacggtgcaggacctggagagcaggtgggcccccactcagaaagaagcagggatatatcccaggaaagggaaacagacgcgacagcaacaagagcaccagaagtatatggtcccactgcaggcctcagcacaagagaagaatggactctgaggactgagaaggggccttacagaaccctaaagggagggaaggtcctacaggtctccggccacccacacaaggaggaggaagaggaaatggtgacccaagtgtgggggttgtggttcaggaaagcatcttcccaggggtccacctccctttataaaccccaccagaaccacatcattaaaaggtttgactgcgcaccaaaaaaaaa

SEQ ID NO: 87146 - DNA, 2019 bp, Homo sapiens
caagggtcaggtctccagcagaccctgaaagctgagctgccctgacccccaaagtgaggagaagctgcaagggaaaagggagggacagatcagggagaccggggaagaaggaggagcagccaaggaggctgctgtccccccacagagcagctcggactcagctcccggagcaacccagctgcggaggcaacggcagtgctgctcctccagcgaaggacagcaggcaggcagacagacagaggtcctgggactggaaggcctcagcccccagccactgggctgggcctggcccaatggcctttaatgacctcctgcagcaggtggggggtgtcggccgcttccagcagatccaggtcaccctggtggtcctccccctgctcctgatggcttctcacaacaccctgcagaacttcactgctgccatccctacccaccactgccgcccgcctgccgatgccaacctcagcaagaacggggggctggaggtctggctgccccgggacaggcaggggcagcctgagtcctgcctccgcttcacctccccgcagtggggactgccctttctcaatggcacagaagccaatggcacaggggccacagagccctgcaccgatggctggatctatgacaacagcaccttcccatctaccatcgtgactgagtgggaccttgtgtgctctcacagggccctacgccagctggcccagtccttgtacatggtgggggtgctgctcggagccatggtgttcggctaccttgcagacaggctaggccgccggaaggtactcatcttgaactacctgcagacagctgtgtcagggacctgcgcagccttcgcacccaacttccccatctactgcgccttccggctcctctcgggcatggctctggctggcatctccctcaactgcatgacactgaatgtggagtggatgcccattcacacacgggcctgcgtgggcaccttgattggctatgtctacagcctgggccagttcctcctggctggtgtggcctacgctgtgccccactggcgccacctgcagctactggtctctgcgcctttttttgccttcttcatctactcctggttcttcattgagtcggcccgctggcactcctcctccgggaggctggacctcaccctgagggccctgcagagagtcgcccggatcaatgggaagcgggaagaaggagccaaattgagtatggaggtactccgggccagtctgcagaaggagctgaccatgggcaaaggccaggcatcggccatggagctgctgcgctgccccaccctccgccacctcttcctctgcctctccatgctgtggtttgccactagctttgcatactatgggctggtcatggacctgcagggctttggagtcagcatctacctaatccaggtgatctttggtgctgtggacctgcctgccaagcttgtgggcttccttgtcatcaactccctgggtcgccggcctgcccagatggctgcactgctgctggcaggcatctgcatcctgctcaatggggtgataccccaggaccagtccattgtccgaacctctcttgctgtgctggggaagggttgtctggctgcctccttcaactgcatcttcctgtatactggggaactgtatcccacaatgatccgcgctgtcactgtcctcctgccagagaccctgggccagccactgccagacacggtgcaggacctggagagcaggaaagggaaacagacgcgacagcaacaagagcaccagaagtatatggtcccactgcaggcctcagcacaagagaagaatggactctgaggactgagaaggggccttacagaaccctaaagggagggaaggtcctacaggtctccggccacccacacaaggaggaggaagaggaaatggtgacccaagtgtgggggttgtggttcaggaaagcatcttcccaggggtccacctccctttataaaccccaccagaaccacatcattaaaaggtttgactgcgcaccaaaaaaaaa

SEQ ID NO: 87147 - DNA, 1509 bp, Homo sapiens
cagctgggctcagggtgtctaggtgggagcttggcattgccagccggcgctggtttgaggatctacagcaccagcctcatacttcagaggtcctcaaaaggccccagcccaggcatcatccagggctaggccgccggaaggtactcatcttgaactacctgcagacagctgtgtcagggacctgcgcagccttcgcacccaacttccccatctactgcgccttccggctcctctcgggcatggctctggctggcatctccctcaactgcatgacactgaatgtggagtggatgcccattcacacacgggcctgcgtgggcaccttgattggctatgtctacagcctgggccagttcctcctggctggtgtggcctacgctgtgccccactggcgccacctgcagctactggtctctgcgcctttttttgccttcttcatctactcctggttcttcattgagtcggcccgctggcactcctcctccgggaggctggacctcaccctgagggccctgcagagagtcgcccggatcaatgggaagcgggaagaaggagccaaattgagtatggaggtactccgggccagtctgcagaaggagctgaccatgggcaaaggccaggcatcggccatggagctgctgcgctgccccaccctccgccacctcttcctctgcctctccatgctgtggtttgccactagctttgcatactatgggctggtcatggacctgcagggctttggagtcagcatctacctaatccaggtgatctttggtgctgtggacctgcctgccaagcttgtgggcttccttgtcatcaactccctgggtcgccggcctgcccagatggctgcactgctgctggcaggcatctgcatcctgctcaatggggtgataccccaggaccagtccattgtccgaacctctcttgctgtgctggggaagggttgtctggctgcctccttcaactgcatcttcctgtatactggggaactgtatcccacaatgatccggcagacaggcatgggaatgggcagcaccatggcccgagtgggcagcatcgtgagcccactggtgagcatgactgccgagctctacccctccatgcctctcttcatctacggtgctgttcctgtggccgccagcgctgtcactgtcctcctgccagagaccctgggccagccactgccagacacggtgcaggacctggagagcaggaaagggaaacagacgcgacagcaacaagagcaccagaagtatatggtcccactgcaggcctcagcacaagagaagaatggactctgaggactgagaaggggccttacagaaccctaaagggagggaaggtcctacaggtctccggccacccacacaaggaggaggaagaggaaatggtgacccaagtgtgggggttgtggttcaggaaagcatcttcccaggggtccacctccctttataaaccccaccagaaccacatcattaaaaggtttgactgcgcaccaaaaaaaaa

SEQ ID NO: 87148 - DNA, 362 bp, Homo sapiens
tttaaaaatctctttccatacaactttgctttctattgagtttgaaggaaatatggtgatggcatctaagcccaaatttcggtgttttattttggctttcctgttctgtttaagcctctgtaaccccttgaacctttctctactcttcagaaggaacaagttatattttttttccatctcaacatcgtccaaatgaaccgtactattttaacaatctgtgtaaacagatataaaaggaggaagactactttctttaattttcctcccagcgagctgcaaagctgtttcagtcatcctagtgattagcagaatgtgagtaataaacaacattaaaatgaagaaacgtctttctgagtaggacc

SEQ ID NO: 87149 - DNA, 427 bp, Homo sapiens
gaaagggaccaagacagacggacagacagacaacctgactgagacgggctcagggccgatgagagggtgacagggatagagcaagagggaggaatagatggaggagaaggagagaaggggcctgggggtcccgagggaggcaagattgtgaggggggagactcaggagggggttgaggccagaggaggtggacggggaccagaggcggagggggaggaccgagaggggcagagagagagttaagggggctggggtcggtgggtggagagaaaggaggctgcggtcgggggagagtcgaggtagaggtgggagagggggtggaaggagaccggaggaggcgagcggggaggggagcagagaactgctgcagtggccaaaggacagccccccccaggggtgggaagggcgacaggccagtggggggggc

SEQ ID NO: 87150 - DNA, 389 bp, Homo sapiens
catttgaaagacataaattattaatattaacaatttgctcacctcctttccctattaaaatattcaatctacaagcatttgagacttgaatatcttcaaggaaaaaataccatctgaataagtaattaaattatttgaactgtttcttcacatcagagcatgtgccctaacctcagtactgcagtgtggcagcatagacccaaatacaagaccaagggcacatttccagccctctagacacaatgagaaaagcactcagtctataaacgtttatgaacatgattttcagtcagatttctgaagttgactgctctgctcttatactgtgaaaatgacagcaataagagctacttccatggaagggtggagtgaattgggaacactaaaac

SEQ ID NO: 87151 - DNA, 429 bp, Homo sapiens
atttgtttatgaactctcctgattgttaaatgttggcatttaattgaaacagaaatcgtggggactacacaaagtttttggctgcaggtgacagttttggcagcaaagctcccatggtgccaggctctgtgctagggtggctggggacaaaggcaagtcagtcggtcctccctgggaggctgcgatccaggagagcagccttccatggaaaaggggcactataataggatttagtgaaatgggatttgacccacattatccttgagctccttaggcgtggacctgcagaacactttttgtagctgaaattgaaaaagtaaaacaatttgcagcaggcagagcgaatgtcttgggaaacgtttctagggctttcatgtttcctgagggcttcccctatctcatttgagttattccattaaatgagcaata

SEQ ID NO: 87152 - DNA, 350 bp, Homo sapiens
tcttgcctgccaatgagcataaccaagaatctttagagtctacaaagtagggtgtacctacttcattgggatgttaggagaacaactacacgaagtaagtaagtaaacaaactaccaggtgctttaagtgccttaagaaataattaccagacatgatgtggtccaagctgaaatccaataggtcaatgagccagaggaccagcaggaaattgttttattcaattatgaaaaattttctggcatattcctaagaagagcaaaatgggctatactactaggatgaggacaagaagcaaaatgtcaagtggacttctaaaaaataacagctttcataccaaaggtatcgaaag

SEQ ID NO: 87153 - DNA, 245 bp, Homo sapiens
ttaagagatttacagtgatctttccatataggtttttctcgaaacatatatatttttaatttctcaccatctcaggggtaaataaatatattaaaataagctatgggatgtacagcagagtataacaatgataaatgatgttgtgtgtaatttttctactattaacataaagtaatataaactgaaggacactggtctattgagagacttagaagctaatgttccatatcagatgcggccaatgt

SEQ ID NO: 87154 - DNA, 477 bp, Homo sapiens
cggaagtcaaagactggattgggtggaaactgcaagtaaagcctccagcaaagaccattaaactcatctagttttattctcatccaggcccagtcagacatgggctatctctgaccctccccagccccacagccctcctgccctgtgctgtggggccatgggtctgcagcactgctgcctagatggagctcagcactgggagtactcatctctccccttcctccctcacctttcagctcttactaggaattgtcccatttggcctttctttatctggcagtcttcccccatggactcagaccccagaactcctgatgagttctttccttttaaaaataaacctgcctccaaatgcaccacaatcattttgagttatttgccattttaaacaaacctgtagtgaacttacagtgttttcttatgggcagaagccatacctaatggagttttctagggaaattcatcttttttaagaca

SEQ ID NO: 87155 - DNA, 556 bp, Homo sapiens
gaaaaattgttagaaacataatagcaatgggatgctttaacatgctaccttgaacctttaccaaatcaagagagtaaaaattaagcacaaaagagggatctaatactataaacaaggtagatttaatacatatgtatcaaacatagtaacctagaagcaatgaatatacattttctggtgctcatttaacattaacgaccttcaagaaggctttaaacagcaacagatagagttgagttgctttggcctattgctaaaggcatctaacccacctgctttgtgggaggtcatctgctttgaatctcaactgtatccaagtcagatttaaactctatggggcattggaattgtcctctgaatcatctccaactctgcaggatacataatagcaccactttgttgttctggaatttaaagacagggtcttattcaactttggctatttttgtgcagtccatggatccttgaaacaggacattctactttaccaatatctgactcatagaagacctatctatatacctaccaggtggctactacccagtaactcctaccg

SEQ ID NO: 87156 - DNA, 566 bp, Homo sapiens
cgatgtctttcagtggatttcttagacttacttgggctgattcagcctgactcagctttctctgccctacattaattctattttagcttttgttgtaaattgctctcagactttaggggaggttaacgttctcctcaacactttaaaaaagccttgtgaatgtaatctgatttgggcctcttattacaaacagaaaaatgttctactacttgagatcagtttcccagctcatcaaggtgacctaaatgattctcttttcctttgctcctggagaactgaaaacttggggatttttgaggatgttattgtttcagcattttgaagggaacagtacctattatgacttgagtctgtaatacctgatagtattaaggcttcagtatgtctactagtggagaataaaagaaatatttcaatagtacactgtagagctaaaataaatagtaaaatggtggttttgtagtaacacaatagttgcttatctggatggcctggaagggataaatttacttaaaataatcattccactgctcatgagacattgatgtaatcagtgtctagggtaa

SEQ ID NO: 87157 - DNA, 348 bp, Homo sapiens
cactagtggggtggggaaaaacggggcaggggggacatgaaggcaaatcacaaagcagaaatcctgctgtgaaggtaaaagaacaaattctttttgatttatattctgaacttggctgtgtgaaatgttttatatttgtgcagtggaataacagtagcagaaatcttatcagtcaaatcatatatatcttttttgacagcccagacatgcctcccaccactctagccccagcattatcatcatagacagatttttgcatattcctttgtttctaaacacagaaatatacttttaatcttacagatatatccttttcttttttttttgggggggacaggttctgactct

SEQ ID NO: 87158 - DNA, 248 bp, Homo sapiens
tgaggtttgaggaaggagaggtgaggcacctgtggcagaaaaaaaaactgcaccacgaagaagcagagcctgggtccccaacggacgaaagtgtcttcccatcagcacttgcgctgggcccaggggaccctggcattcctggttcgagaccagggtgtgcttcaggccgctagggatacccaaaagcaagcagaaggcccatgaggggaaggtgatgcacgtggggcagagaaaaaaacaacaaccgt

SEQ ID NO: 87159 - DNA, 683 bp, Homo sapiens
ggaaatagttgaccctgttttgttcccacctatgcattgatcagacatttgctgtttgattattctgtgtcaagcaccgtggagatattgaagaataatacataatctttgcttccaggagctgatgtcttataggaaaacaagaaataaattaaaaacatgattagggcttgccacttgtaaataaggggctgggaggggactaaacccaaatgaaggctttctgaagtaaaagacatcccagtgtttttccatggtgagcaggatttccagctaacgaggaaatgacttaaagaggttatttgaaaaacaagtactgggtcctagaactctagacatggaaaggacatttaaaaatatccagtcctgtaaagttaaaattgtgcaggtgctatggaaaaaaaaaagtataatggttcctctaaaaattaaaaatagaattatgacacaagccagcaattctgcttctgggaatataccccaaagaattgaaagctgagactcaaacggatacttgcacacccatgttcatagcagcattattcacaatagccaaaatgtggatgcagcccaagtgcctatcaatggatgaagaaaatgtgatgtatacattccatggaacattattcagttttaaaaatgaaggaaattctgacacatactgcaacatggaggaaccctga

SEQ ID NO: 87160 - DNA, 598 bp, Homo sapiens
attaccagtaggggaaatttggttaagagcatgtgatgtttctattatttcttacaactgctcatgaatctacagttacctcaaattaagtgtaatttaaaaaatactggaaaagaacaacccccttaccccatgcagatattttcatctattttggttgtatttatttggtattgacttccacaatgtatatagtatgttttgattgctaatctatgatttattaattgaagacgattttagatagatctgtatctttatggtagagtttatttattgtagctgcattttaatttaaaacttaattactggttaaaacaaagaaaaaagaaaaaaaaaaaaaaaataaaaaagaagaaaaaagaaacagaaaagaaacaaagagagagagagacagaacagcgacaaaacaaaaagaatacacacaaaaaagaggagcacaacaaatcaaataaaaagagaaacacaacagaataatgatgatgagacaaaagagggagaccccaacaaatagaggaggagcgagaagattaaatagcaacaagaaaccagcgacgcgcagacgataaacaaaaggaagcaatcaagagtggaaaac

SEQ ID NO: 87161 - DNA, 526 bp, Homo sapiens
cataaaactgcctttttttttttaatgattgattgggagagtattcagtggtagtggcattggcattaagcctgtgattaaaagcccctaagtcaagagtgccatatcagacacaattgagttttctgtgtttattttaaatttctatcttcattttttgaggaaaatacaaaaggagaaaaagtaaatttgggagctgggcatggtggctataattctagctacttggaagcttgaggcaggaggatcatttgagcccaagagtttgagatcagtctaggcaacatagtgacacccccctgcctcacaaaaaataaagtaaaatttggtatatgttgaagaaaatacaagggtaaattttaatcattgtgcccaagagactgacatgtatgttgcagagagacataaataattttattatagtgtttaattgcacataaataattttattatagtgtaaaatatgcattaatagaagtggaatagaagtggttacttctgatggggtcactgtagtctttttcta

SEQ ID NO: 87162 - DNA, 425 bp, Homo sapiens
aagtcagaagtaaaaagaattggggaatacagtgaacacaatgtgtatgccagcagtttagagaatttgatgaaataggcaaattcctagaaagttacaaacttaccaatactgatgtaaggcgaaacagaaaatctgaataaatctatgatgcagattgaattgtgtccccctaaaacatgaatccacccctggtacctgtgaatgtgaccttatttggaaatacagtagtcttcccccttataagggggatgcctgaaactacagatcgtaccaaactctatatatactatgtttttttcctgtacacacatacctatgataaagcttaatttgtaaattagtcacaataagagattaaaactaataataaaattgaacaattataacaatatactataacaaaagttatgtgaatattctct

SEQ ID NO: 87163 - DNA, 302 bp, Homo sapiens
ttttttcctatatgtacatatctatgataaggtttaacttataaattaggcataaaaagagtttaacagtataataaaatagaaaaattataacaatactcagaaccaagcacaactgaaaacttgtgaaatgtttatttaggcatgagccactgcacctggccaaatgttgatttttttaataccattttataataaaaggaacaaggactccctggagaaacagctgatactaaggcaggagtagaaaatatacaagataatcctggaaaatcttgtagggccagaaagtaaacaagtgc

SEQ ID NO: 87164 - DNA, 683 bp, Homo sapiens
caataattcactgggttagcttttaggccaacccttcatataataaaataatcggcttctttgtaaataccagtcattcctctgtgcttggcctttaagatattcttcatatagggtttaggagaaggaagcccactggttactgaactgaagcagccatcagctacagagacagtagtgctcacagtcatttgtaggaaactataagtgttgatgaaaaactgcaagatttcactggaaaacacagtagttctgtgttgagtaaaatggaggtgcagtaaggaaagtgaggcttcaaggtggtaatggcgtgcaagtcagtgtttttgagcagagaagtgatacgcacaaggctgttagtatgaggaactcttctctcaatgacctggaagagatgactagaggcagggaggccagttaggaaacagacagaatagcggaaaagttggccctaaactaggtgatagtactgaatatggaaagtacatttctcttagttgaaaggagttgattagagacaagtgtagtttctagactgggttctgcatatatagtttcattcaacaagtatttattgtatgttactatattagatataaaagctttatctgagcagcacatactcttgtgaatgtcatagctaatatgacgcaaaatgctcatcaattgagacatttcactaa

SEQ ID NO: 87165 - DNA, 410 bp, Homo sapiens
taagaaaataaacaatataaatgtcattgcattatttatttattttcaaaaatgataaaaaagcaggagtgaaaagagtagactttggagggtaaataaaatagttgtttactatgtacacacatacatatatttgcatagaaatacaggaggaatatggacttctagtatgaaccactggttgacagaccccagattaagaatttttatgtttatgtaccttttttaagagacagagttcataggttttgtcagattttgatagtaatcagtaatctcaacagcattaaaatgatttctaaagttctttctatatttaaaattgtgtaattcactttacatcctaatatattcctgttgaaacatatttgcttttctccagagaaacagaaatatatcttattttctaa

SEQ ID NO: 87166 - DNA, 488 bp, Homo sapiens
tgctctagaggatcctctggagactgggtttcgccatattggccaggctggtctcgaacacctgacctcaggtgatccgcccactgtggcctcccaaagtgctgggattataggcgtgactgaccgcgctcagccggtcttgaactttagagctcaagtaatctgtctgccttggcctctgaaagtcttgggattacaggcgtgagcctccgtgcccagccaatttttaaatttcaatgtgactactaggaaatagaaaaccacatgtggctctcattatgtttctgtgagacagcactggtctgactcgaccataagtttgtacagtggtagggactatatccattttatttactgtggtatcttcagcgcataacagacgttcaaaagatttggtgaatgaataaactaactctgttaacttttgaatgttattgcatagtttacagagaatgttacctattcagcttttgcttttcagaattgtt

SEQ ID NO: 87167 - DNA, 337 bp, Homo sapiens
tcatagaggatcttatcccgtacgccaacctgcttgacctacgctcttctgggatgactagcaagttttgaacttgaaaacagggtggtgtcatttatgaaactacagagcaaaggagaagcaggttggggttggtgctgcggatagaggagatgttgagttcagtgttggacttggaacatttcagacagctgcaatgagatgtctggagaaaatacgcagctggcagctgtgtctatgggtctggatctctcactagtgattcaggccaaagataacacagttgggagataacagtagacaggtagtcattaaagacttgggccgggcgtggtga

SEQ ID NO: 87168 - DNA, 487 bp, Homo sapiens
ctctttctctctcttttgttctttcttatctctctattggcttttaaatgctcctctttgtattaaaatttttgtggttgctcaagagattacaatatgcatttttattctacttaatattgagtcacttaatgtaaaatataagaaatttggctttgtgcaatttcaaattctttttcatttttgccgttgttttcaaatacttcgcacccatgtacttacaaaccccacaatataatgttttagttttttgctttaattagttagttgtactcagtctaacattgggtgtccacgtttcctctgcctattatggtcaattccgggtggcagccacgcatcttaaactttaattctcaatggagtccctaaacccgagattagcaaacttttgctgtgaggggatgtatggtaaatattttaggctttgagatggtttctattcacctctgccattgtggtgtacaagcagctatagcacctaaat

SEQ ID NO: 87169 - DNA, 113 bp, Homo sapiens
ggtctaaatgatgtacttgttagtgtattcattcatattgattgtaaaggattatttttcactcagtactgatgtccttggaaatcttacctggaaacatgtttgcaaaaaac

SEQ ID NO: 87170 - DNA, 175 bp, Homo sapiens
cgcgctcgaggcctccgcggactcccgcccctcgcggccctctccttcgctggcccggccgtcgggcctcgggaaacaaaggagccgccgccgctcccgcacgcgcccgcctcatcgcgtaccctccccagcccgccgggcccggctcgccctcgcccctccccgagtccgcgcg

SEQ ID NO: 87171 - DNA, 425 bp, Homo sapiens
ctgacatataagtattcaacatacatttcttatcataacaattagcattattattaactgtctaattagtggtggacttcgctgtggctcagagttcctgtgacttcctggtaggtcccatgggaccctaagtcatatcaaagttgattcttttacaagtttagagctcaagctggtattgtacataaacagtatttcatggagctttagacttctggcccaatacctggagaggtgaaagtcctaaggatggggtcctatcccactgctcaaagaatgccttctagaagcaaaatcaggaaagcactacctctagttgacctagctgataatgagataagccatactagaaaatacacttaaatacaatatgcttttctttttttttgcaatagagtcttgctccatcacccaggctggagtgc

SEQ ID NO: 87172 - DNA, 354 bp, Homo sapiens
cagaagacaaaaggcatgacttacatggtggcaggcaagagagaatgagagccaagtgaaaggggtttcccctgataaaaccgtcagatctcgtgggacttattcactaccatgagaacagtatgggggaaaccgcccccagtattcagttatctcccagcaggtccatcccacagcatgtaagaattatgggagctacaattcaagatgacttttcggtgtggacacagccaaaccacatcactgtgttggacaaaaggaagataagcatgttgctaactatttaagttattgcttagagaaaagttatattagaatggctatttaaaatttagtattatgaattcatacata

SEQ ID NO: 87173 - DNA, 290 bp, Homo sapiens
gctaaatcaggcctagtgtctttcctttcacctataagcacagatatggtaataactggaatttggaaaatctactttggaatttggaaatacagtcccttcttcaaaaccagaaaacagcggtatccccgtgttttgacacacaacatttaaaaatcattcttggatctcacttacatccttacttatatatccttatagatacaatagttaagttgtggatctggtgtttttttaaaaaaataacacaagtaactggtcagttctagctgaggcatactttaaaactg

SEQ ID NO: 87174 - DNA, 411 bp, Homo sapiens
aaaaaataaaaaaaaagaatatttgatgagcactggcttataggattctccctgtggccttcattccattgcacagcctctaccgttttcccgtctggctctctgttttgcctttcagtaataatacaagaaggtgcaccattcttttggttgaaaggggaattaagaatgaactcaagttctttcgcattatttaccgtgtaatgtgaaaagaaatctacttttgtagggatgtcttttaaagatgtttttactttgaatttttagttttctcctttctgggtgtatacttcagtcactttcaagttttatgatcttaccagtagataatgtatggatatttgttagaatttatccccatttcttcacatctttataataaatattgagtgaatgaatcctttacatgaa

SEQ ID NO: 87175 - DNA, 485 bp, Homo sapiens
aaggcatggattgtaggcctggttataccacagttacttgtgggactttaggaaacatgcttcatctggtcctgcttctgtttctgctatcttacaatgaagataattttccccctactttttaaacttatttgcagtgaagactagataaaaaaggatatgactaacacattaaattctgaagtaccacataaatatgacttatttttgcaaaatttaagagcacagaatgttggttatcaaagagtgtttaaaatgacctttctctgttttttgtaagtgttgtttgagagcacagtgatgaccacttaattcctttcctggagcaagacatgtttcttgtgggtttgatttgtacattatcactgaaaaacttcatcagtgacaacaacaaaaaagcccaaaaggaacctaatgaaaatagtagtgaagttttacacattacatagttacccccctgccacacacacacacaaagaacgaaa

SEQ ID NO: 87176 - DNA, 286 bp, Homo sapiens
gaaataaagatatacattcttatattttagacaacaaattacaaataaaataagtgaaaagaaagtcatattgaaataaagccgggtatataacagaatatcaaagacagaaggaagaccctgattcaaccaaatgttcaggccagaattgcaatactaatattgagttctcaactgcaacagcaaaagccaagagatactgaaattatatgttcaacgtgcttatagaatgaaaactaaaaacctagcaacctctccagtgtcattacacttcaaaaagttaata

SEQ ID NO: 87177 - DNA, 296 bp, Homo sapiens
taaaatgagagatttggacatgacccaccatgattgaatacattgaatacacagatttgcattttcagaggtaatgatggataccacatttaatctgcccagcatggtccaagaagcaacctggaaaatttgaaggatctaaaatagcatgagctacccttctgcagaaagctctcggagtagtgttatttcaaatgggtaaaatgcctcatgaatggaaagatgttcatctctctctctctcctttatgctcaggactcaaatcaagttctgtttctgcccatactgatgccgcc

SEQ ID NO: 87178 - DNA, 401 bp, Homo sapiens
actggcaatggcctcttcagaattctgtttaaaattagaattgtcagctttccactcctgtcatgacagagaaactgacaccacatgaacgctccaaaaatacgtgaaaatatatttacagacattggacaacaacacacaattggaagactcaaaatattttttgaggcagggtcttgctctgttgcccaggttggagtacagtaacatgatcatagctcactgcagcctcaatctttgagctcaagcgatcctcccatctcagcctaagtacctaggactacaggcatgtgccaccatacctggctaatttttttaatttttagtaaggaagaggtcttggtatgttgcccaggctggtctccaactcctgagctcaagtgatgttcacacctcagctt

SEQ ID NO: 87179 - DNA, 388 bp, Homo sapiens
ggaggcggagcttgcggtgagccaagattgtgccaccgcactccaggctgggcaacagagcgagactctgtctcaaaaagaaaaaaaaaagggtctattgaatgtattttttgtctctgaattgttcacttttttctaaacacatacatcatttttttttgtaatgaaatgaagttgttagaaggccacttcacaaacaagtcctcagtgaatgaaatgagtaaatgaatgaaatctgataatcctaccatttgcaattcactcttttgagacaggaggtgttttcctgttccagattctctaccaatatgcaaatacccctgagtggagctgataaagccgaaattgtcactgatcactaatctggggcttgtcagcctcaggccga

SEQ ID NO: 87180 - DNA, 275 bp, Homo sapiens
tcaataactggctcccctactagtccatcaagaaacaggatccacccagtaaaaacatttgttgctttagtctaagtgggtctgattgtcaatggatgcttataagtttatgataaaacaataaaaataaataggataaaaaagacatgcaacctatgatgacaactgtgtattttatagttaaagatgggaaataaatttccagtcaatgaattcacaggatattgagctgagagggaaagatggggagtgagaagctcttatcaagttagtta

SEQ ID NO: 87181 - DNA, 459 bp, Homo sapiens
  misc_feature (399)..(399): n is a, c, g, or t
  misc_feature (417)..(417): n is a, c, g, or t
acctcagattgtgaagggctctgtaggctatgttaaggacactagaaatctattgaaaggttttaagcagagaattgacttgctcatatttttgcttcaaaaagctcaatagctacaaaacggtcaatagatggtagctttgtggggctggggtgaatgcaatgatattgcaaaacaagatatagggagacaagaacttttaataacctaaaccagtggttctcaaactttccatgcatcagaatcacctggatgacttgcgaaaacacaaataatcagacttaatccctacattttctgatttagcaggtatagaatgaggtttaagaatttctaacaagttcccagatggcgtaaggtgtctctcaggttttttacttgagcaactgggtggatccngtggatcttatgtccctncgagtaaggggtcaggtacagcattctccggtcagattgttt

SEQ ID NO: 87182 - DNA, 458 bp, Homo sapiens
agtacaaattgctgatgtgtggaattgtaaaaaaaaaaaaactcaataatttagtatcaatgtagatgcaaccacccatttcagtcacaatgcctacccaagtgtttcacctagttaaatccttcagttgagttttctaatagaggcatgtaatgcgcaaacacgtgggaacctaccatgacttttgagtatgaagcccagtggtacacaaatggtgcatatgtagaaaatctgctgagctgagccaaagatacaaggatatttcagaaattacctatcatttaaaaaggagattagtttgtaggtttgatgacagcaattcctgaaagttttccaaataacagttcttaaaacaacattgttgaaaaatgaagaaattctttccagacataacagtaaaactttctctgaagttatcttcttgtgcacgtgtaataattcagagggatagtggaaac

SEQ ID NO: 87183 - DNA, 1003 bp, Homo sapiens
aagacccagggaagaggtctgagaggctggccacctgatgccaccctaaaggctcaacacctcttttcctccaccccagcggggtgcactctggccctcacctgtctagcatatccatttggactgtcactggctgggctccagcatcaataccatgtttttgtttgttttgttttgttttggatatgttttgttttgttttggaaactgggcctcagtttcctcatcttaaaataaggagattgggttagagatatagatggcttctaaggtctcctgaacccaaggctttctgattctttcattgctttttaatgcctgctctagggaggaaggagcacatctcccccttggtcgtgacttgtcacagttccagacttatagctgttgggttctaataccccccagctctcaggggaccaataaaaaccacatccagtcagcctgggcctgccccagcacatggagacaactggtctcaaagcagcccttcccagtccccctccccacacggcctcctacccacttccgactctttttgtttgtttgtttgttttttggagacggagttttgctcttgtagcccaggctggagtgcaatggtgcaatcccagctcactgcaacctccactccccgggttcaagtgattctcctgcctcagctgggattacaggtgcccgccaccacacccagctaaattttgtatttttagtagagacgggctttcaccatgttggccaggctggtctcgaactccagacctcaggtgatccacccgcctcagcctcccaaagtgttgggattacaggcgtgagccaccgcacccggcccactcctgacttttaaaaagagacaggaagcaaaaacaaaaccaagcacccaaggtaggtcagatgaagagccagggttagataacaagagcaacatcctttgagactaaaggtttggttgactcccttggagggccctgtgtggaagcggaggagggcgggatggccatac

SEQ ID NO: 87184 - DNA, 630 bp, Homo sapiens
tgacctcaagtaactcactcacctcagcctcccaaagtgccaagtgaaatattttagtgggaaaatgtccacagaataaggggtgtgggcttggtcagtggagagtggttgaagaggtgagagggaaccaaggctcttcctgctatttctttgctagggctggcccctttaggggcttcccttcccttagagatgactgccagggtcttccatccctactttctgccccttctctgaggggcctgagccccctcagcctcccaggttcatccaaacaaacaacttatggccttcataaaactgtctgattaaatgtgtattattatattttccttttttattatacaggatataaatgcttaactcttttcatgtatttttaaaccaactgacaaataattttgagcttgtcattagcatccttgggctaatataataaaactttgttacttaaacaaaaaaaaaaaaagggcggccgcccttttctttcttcatataggcggggggacagtctgccggctcattcacgtttcctcaacaccccggcacctttctcagctggccacccccttgccccaagacttttgtccacccattttcggacgacccccctttaacaccgcttccctg

SEQ ID NO: 87185 - DNA, 407 bp, Homo sapiens
gaggctctgcagctggcgccggggcgctgggccgattcctcagcctctgaggcctcacctttggcgtggggaaataaacgcgtgcgctctgcaggagtattgtgagggtggtcatgtactcgggacagtgcccagcatgcagtgttagctggaagagtgttagctgttgcgattattatagtcctttctccactcttataattcccaggagtctctttctctctgggaatgtaagttctaggaggatgaggaccgctagtcgttccagtgagccccctgcatgtcccaggcactggccatgccctccagggcttccgtttggccagggagcagtggcccgagccgccccatgcccagcatattcacacagtgctgtggggaggccaccgctacccaggaagaggggt

SEQ ID NO: 87186 - DNA, 225 bp, Homo sapiens
gagatcgtgccattgcactccagcctgggcgacaagagtgaaacttcatctcaaaaaaaaaaacaaaataagagctgaactctgctaacacctgaaggagcaggaaatggatcctctagagaggatcccagcccagtgagactcagacctgatttctgagccctagagcctaagatgataaatgtgtgctgtgtaagatgctaagtttacaatcatgtgttacgg

SEQ ID NO: 87187 - DNA, 2180 bp, Homo sapiens
agcggatctttccgtcccgggcagccagcgccagtcggagccagcgcgagccgccgccgccatcactgccgctgccaagtcctccacccgctgcccccgccatgtctgctaccgctgccacggccccccctgctgccccggctggggagggtggtccccctgcaccccctccaaacctcaccagtaacaggagactgcagcagacccaggcccaggtggatgaggtggtggacatcatgagggtgaacgtggacaaggtcctggagcgagaccagaagctgtcggagctggacgaccgtgcagatgcactccaggcgggggcctcccagtttgaaacaagcgcagccaagctcaagcgcaaatactggtggaaaaacctcaagatgatgatcatcttgggagtgatttgcgccatcatcctcatcatcatcatagtttacttcagcacttaaatccccgaggagtctgccctgcctagagaagggcctctcccccaaccctcagccgttcctccacctctcagccatatctttcagccccccctcccctggatccgtgtgtgtgtgtgtccgtgtgtgtgtccccctgtaaatagccagctgttatttatacatatataatattatatatatttggtctgtttgtagttttattactagatgatttttccggttgtccttaacaccccttcctgaggttcccttcacccctctctcttgccttccttccctttccctttcttcctgactagccccaagtcccttcatttgcatctgctatgcaatagtccctctcctttccttcttcttccctcagatttagctgatccttcctcccaccctggccttcctttcctctttcctcctcactctccccgtcatgctccctctgccccgccctcaaaaaaaaaaaaaaaaaaaaaaaaaaaaaaaaacaacagcacctgtccaggcttccttaggtacatcttctttgtatccattgggaggctctgagactggccccacttggtcctaagaatcccaaggtctttgggagcgtccagcatgttaattagcgtatcattacatactgctatccctttccatttctttttgttccatcactcttctctcaacctgtgtttctttttttactgaggagttagtccccattagttcttgtatcacattttcatttgcacgacattactcgcaggtggtggggagcctgggcttttggggaaccaggctgctctggtccccagcattgcctcctcctagcccctctagtccagtttgcctcccttaccctcattttccaaacctcttgtaccctcctctccctcccccagctggtatgtaagtgtcttgaagttcagtatgttatgatggaccaataattctgccacttcgggtttctccctacattcctgctccccagttttcatgtggggtactcaactgacattcccatggggtttccctcccatctgcctgatccacctcctcctcccaccaggagagttgggggttggccacaattgatctcttgtgagaggggtggctaccagtgtgtgtgtgggggtcatcactgccttggggaggagtggggcagggcagagaatccccccaattcctgcctgaaatctctggcctcacccctgctgggggttggactgaaaaccctcctccccaatttggggggtgttgccccatcactgcccagctcctctgactgccccccctgaatttagggtgggggtactagtcactgccaatgtgtgtatgggacttgctggaaaacggggatgcttgcccctctccaggactattgagcccagagagagctgtcctctcattgggtgaactgattgaggaagggtctattgtctttttaaatggcacaattttaagggtttgagggtacagtcccttaacctgccacgggagggggcccccaaactttcttccccccacacttctggttttctgtgtggagggggagcagggatatctaagctgtggtgtgaaagggtaggagagatgctggaggtgggggtgctgtgttctagaccccccatattatcccagtgtcccctgcccccctcttcccccaccccatgcccccaattctgtggcgcatccagattgtgaaaatgtacaataaatgtgtaatgagtaaccaagtgttgtctaaga

SEQ ID NO: 87188 - DNA, 715 bp, Homo sapiens
  misc_feature (43)..(44): n is a, c, g, or t
  misc_feature (143)..(143): n is a, c, g, or t
  misc_feature (149)..(149): n is a, c, g, or t
  misc_feature (160)..(160): n is a, c, g, or t
  misc_feature (175)..(175): n is a, c, g, or t
gtgactctaaggattactgctgctccctcttcaggactattgnnccagagagagctgtctctcattgggtgaactgattgaggaagggtctattgtctttttaaatggcacaatttaagggtttgagggtacagtcccttaanctgccncgggagggggnccccaaactttcttncccccacacttctggttttctgtgtggagggggagcagggatatctaagccttgaagttcagtatgttatgatggaccaataattctgccacttcgggtttctccctacattcctgctccccagttttcatgtggggtactcaactgacattcccatggggtttccctcccatctgcctgatccacctcctcctcccaccaggagagttgggggttggccacaattgatctcttgtgagaggggtggctaccagtgtgtgtgtgggggtcatcactgccttggggaggagtggggcagggcagagaatccccccaattcctgcctgaaatctctggcctcacccctgctgggggttggactgaaaaccctcctccccaatttggggggtgttgccccatcactgcccagctcctctgactgccccccctgaatttagggtgggggtactagtcactgccacatgcccccaattctgtggcgcatccagattgtgaaaatgtacaataaatgtgtaatgagtaaccaagtgttgtctaaga

SEQ ID NO: 87189 - DNA, 274 bp, Homo sapiens
  misc_feature (241)..(241): n is a, c, g, or t
  misc_feature (254)..(254): n is a, c, g, or t
  misc_feature (260)..(260): n is a, c, g, or t
agagagagagagagagagagagagagagagagagagagagagagagagagagagagagagagagagagagagagagagagagagagagagctcaggtctgctaccgctgccacggccccccctgctgccccggctggggagggtggtccccctgcaccccctccaaacctcaccagtaacaggagactgcagcagacccaggcccaggtggatgaggtgctgaaatcagccagcccatggnccccaataaaggnagctgnctctgctccctctg

SEQ ID NO: 87190 - DNA, 2612 bp, Homo sapiens
agcggatctttccgtcccgggcagccagcgccagtcggagccagcgcgagccgccgccgccatcactgccgctgccaagtcctccacccgctgcccccgccatgtgagtcggccgcccgccaccctcaccgcgcttccctgcgccggccgccgcccttggcaaccggccgtcgggagtgcccggggtctcttctgcgttccccgcgccccggggccaggcccaagccggtgactgcgcgcgggcggccgaggagccccgcgtcccgggctggccggctcgggcgatggccgcgggaaggagcggacccagtgtcctcctgcccctccccgcccctgtcaccgcggcgcctgtcttttcgggtcgacccggatcgcatctgtgaggtcgccctcagttgacaggcggggaaactgaggccgggggggctcgctcaaggtcacgcagctcatcggcggcagggctggaccgagaccagggcttacatcgggtggccttcctcccgaaaaggaggactggagggacgaggatggacaggtctgctaccgctgccacggccccccctgctgccccggctggggagggtggtccccctgcaccccctccaaacctcaccagtaacaggagactgcagcagacccaggcccaggtggatgaggtggtggacatcatgagggtgaacgtggacaaggtcctggagcgagaccagaagctgtcggagctggacgaccgtgcagatgcactccaggcgggggcctcccagtttgaaacaagcgcagccaagctcaagcgcaaatactggtggaaaaacctcaagatgatgatcatcttgggagtgatttgcgccatcatcctcatcatcatcatagtttacttcagcacttaaatccccgaggagtctgccctgcctagagaagggcctctcccccaaccctcagccgttcctccacctctcagccatatctttcagccccccctcccctggatccgtgtgtgtgtgtgtccgtgtgtgtgtccccctgtaaatagccagctgttatttatacatatataatattatatatatttggtctgtttgtagttttattactagatgatttttccggttgtccttaacaccccttcctgaggttcccttcacccctctctcttgccttccttccctttccctttcttcctgactagccccaagtcccttcatttgcatctgctatgcaatagtccctctcctttccttcttcttccctcagatttagctgatccttcctcccaccctggccttcctttcctctttcctcctcactctccccgtcatgctccctctgccccgccctcaaaaaaaaaaaaaaaaaaaaaaaaaaaaaaaaacaacagcacctgtccaggcttccttaggtacatcttctttgtatccattgggaggctctgagactggccccacttggtcctaagaatcccaaggtctttgggagcgtccagcatgttaattagcgtatcattacatactgctatccctttccatttctttttgttccatcactcttctctcaacctgtgtttctttttttactgaggagttagtccccattagttcttgtatcacattttcatttgcacgacattactcgcaggtggtggggagcctgggcttttggggaaccaggctgctctggtccccagcattgcctcctcctagcccctctagtccagtttgcctcccttaccctcattttccaaacctcttgtaccctcctctccctcccccagctggtatgtaagtgtcttgaagttcagtatgttatgatggaccaataattctgccacttcgggtttctccctacattcctgctccccagttttcatgtggggtactcaactgacattcccatggggtttccctcccatctgcctgatccacctcctcctcccaccaggagagttgggggttggccacaattgatctcttgtgagaggggtggctaccagtgtgtgtgtgggggtcatcactgccttggggaggagtggggcagggcagagaatccccccaattcctgcctgaaatctctggcctcacccctgctgggggttggactgaaaaccctcctccccaatttggggggtgttgccccatcactgcccagctcctctgactgccccccctgaatttagggtgggggtactagtcactgccaatgtgtgtatgggacttgctggaaaacggggatgcttgcccctctccaggactattgagcccagagagagctgtcctctcattgggtgaactgattgaggaagggtctattgtctttttaaatggcacaattttaagggtttgagggtacagtcccttaacctgccacgggagggggcccccaaactttcttccccccacacttctggttttctgtgtggagggggagcagggatatctaagctgtggtgtgaaagggtaggagagatgctggaggtgggggtgctgtgttctagaccccccatattatcccagtgtcccctgcccccctcttcccccaccccatgcccccaattctgtggcgcatccagattgtgaaaatgtacaataaatgtgtaatgagtaaccaagtgttgtctaaga

SEQ ID NO: 87191 - DNA, 2755 bp, Homo sapiens
gggaccccaggcttcctctgagacatccaccagcggtgatgggttgggaccaatctcccccactcctctccaccctagcagtctgctaccgctgccacggccccccctgctgccccggctggggagggtggtccccctgcaccccctccaaacctcaccagtaacaggagactgcagcagacccaggcccaggtggatgaggtggtggacatcatgagggtgaacgtggacaaggtcctggagcgagaccagaagctgtcggagctggacgaccgtgcagatgcactccaggcgggggcctcccagtttgaaacaagcgcagccaagctcaagcgcaaatactggtggaaaaacctcaagatgatgatcatcttgggagtgatttgcgccatcatcctcatcatcatcatagtgagtagggtgagaatggccggggccctttccctggagaggtttccccagtggattctaggttttgaaggtcattaatctagtttttactcttcagccaaaaacacatatagctgctaatggcaattctgattcatctagagccaaaaactttgatgttatttagcctgcattttgcctagttcttggcagtcttgttaacatttggaaataggaaagctggtgtatccattgaggaccctttaggcctaagagcccagtctgagaaccctggaattgaggagtgggagaaaggaaaggaccaggggcttgagacatgaccaggaagccaaccaccccattatttgagagcttgcggtctcagaggctcagaggattagggtctgtggcttcaaggccataccatggagcggaagggacctcagaacctacctgtctagccccttgctttgtagatggaaaaactgagtccaagagagggtgtcagccagctggggagtggggaggattggagcagggccaggcctgacacactgctttcttgttctctctctttctctcccctctccctcttcctcatcttcttcccctctctccactttacttcagcacttaaatccccgaggagtctgccctgcctagagaagggcctctcccccaaccctcagccgttcctccacctctcagccatatctttcagccccccctcccctggatccgtgtgtgtgtgtgtccgtgtgtgtgtccccctgtaaatagccagctgttatttatacatatataatattatatatatttggtctgtttgtagttttattactagatgatttttccggttgtccttaacaccccttcctgaggttcccttcacccctctctcttgccttccttccctttccctttcttcctgactagccccaagtcccttcatttgcatctgctatgcaatagtccctctcctttccttcttcttccctcagatttagctgatccttcctcccaccctggccttcctttcctctttcctcctcactctccccgtcatgctccctctgccccgccctcaaaaaaaaaaaaaaaaaaaaaaaaaaaaaaaaacaacagcacctgtccaggcttccttaggtacatcttctttgtatccattgggaggctctgagactggccccacttggtcctaagaatcccaaggtctttgggagcgtccagcatgttaattagcgtatcattacatactgctatccctttccatttctttttgttccatcactcttctctcaacctgtgtttctttttttactgaggagttagtccccattagttcttgtatcacattttcatttgcacgacattactcgcaggtggtggggagcctgggcttttggggaaccaggctgctctggtccccagcattgcctcctcctagcccctctagtccagtttgcctcccttaccctcattttccaaacctcttgtaccctcctctccctcccccagctggtatgtaagtgtcttgaagttcagtatgttatgatggaccaataattctgccacttcgggtttctccctacattcctgctccccagttttcatgtggggtactcaactgacattcccatggggtttccctcccatctgcctgatccacctcctcctcccaccaggagagttgggggttggccacaattgatctcttgtgagaggggtggctaccagtgtgtgtgtgggggtcatcactgccttggggaggagtggggcagggcagagaatccccccaattcctgcctgaaatctctggcctcacccctgctgggggttggactgaaaaccctcctccccaatttggggggtgttgccccatcactgcccagctcctctgactgccccccctgaatttagggtgggggtactagtcactgccaatgtgtgtatgggacttgctggaaaacggggatgcttgcccctctccaggactattgagcccagagagagctgtcctctcattgggtgaactgattgaggaagggtctattgtctttttaaatggcacaattttaagggtttgagggtacagtcccttaacctgccacgggagggggcccccaaactttcttccccccacacttctggttttctgtgtggagggggagcagggatatctaagctgtggtgtgaaagggtaggagagatgctggaggtgggggtgctgtgttctagaccccccatattatcccagtgtcccctgcccccctcttcccccaccccatgcccccaattctgtggcgcatccagattgtgaaaatgtacaataaatgtgtaatgagtaaccaagtgttgtctaaga

SEQ ID NO: 87192 - DNA, 2154 bp, Homo sapiens
agcggatctttccgtcccgggcagccagcgccagtcggagccagcgcgagccgccgccgccatcactgccgctgccaagtcctccacccgctgcccccgccatgtctgctaccgctgccacggccccccctgctgccccggctggggagggtggtccccctgcaccccctccaaacctcaccagtaacaggagactgcagcagacccaggcccaggtggatgaggtggtggacatcatgagggtgaacgtggacaaggtcctggagcgagaccagaagctgtcggagctggacgaccgtgcagatgcactccaggcgggggcctcccagtttgaaacaagcgcagccaagctcaagcgcaaatactggtggaaaaacctcaagatgatgatcatcttgggagtgatttgcgccatcatcctcatcatcatcatagtttacttcagcacttaaatccccgaggagtctgccctgcctagagaagggcctctcccccaaccctcagccgttcctccacctctcagccatatctttcagccccccctcccctggatccgtgtgtgtgtgtgtccgtgtgtgtgtccccctgtaaatagccagctgttatttatacatatataatattatatatatttggtctgtttgtagttttattactagatgatttttccggttgtccttaacaccccttcctgaggttcccttcacccctctctcttgccttccttccctttccctttcttcctgactagccccaagtcccttcatttgcatctgctatgcaatagtccctctcctttccttcttcttccctcagatttagctgatccttcctcccaccctggccttcctttcctctttcctcctcactctccccgtcatgctccctctgccccgccctcaaaaaaaaaaaaaaaaaaaaaaaaaaaaaaaaacaacagcacctgtccaggcttccttaggtacatcttctttgtatccattgggaggctctgagactggccccacttggtcctaagaatcccaaggtctttgggagcgtccagcatgttaattagcgtatcattacatactgctatccctttccatttctttttgttccatcactcttctctcaacctgtgtttctttttttactgaggagttagtccccattagttcttgtatcacattttcatttgcacgacattactcgcaggtggtggggagcctggtccccagcattgcctcctcctagcccctctagtccagtttgcctcccttaccctcattttccaaacctcttgtaccctcctctccctcccccagctggtatgtaagtgtcttgaagttcagtatgttatgatggaccaataattctgccacttcgggtttctccctacattcctgctccccagttttcatgtggggtactcaactgacattcccatggggtttccctcccatctgcctgatccacctcctcctcccaccaggagagttgggggttggccacaattgatctcttgtgagaggggtggctaccagtgtgtgtgtgggggtcatcactgccttggggaggagtggggcagggcagagaatccccccaattcctgcctgaaatctctggcctcacccctgctgggggttggactgaaaaccctcctccccaatttggggggtgttgccccatcactgcccagctcctctgactgccccccctgaatttagggtgggggtactagtcactgccaatgtgtgtatgggacttgctggaaaacggggatgcttgcccctctccaggactattgagcccagagagagctgtcctctcattgggtgaactgattgaggaagggtctattgtctttttaaatggcacaattttaagggtttgagggtacagtcccttaacctgccacgggagggggcccccaaactttcttccccccacacttctggttttctgtgtggagggggagcagggatatctaagctgtggtgtgaaagggtaggagagatgctggaggtgggggtgctgtgttctagaccccccatattatcccagtgtcccctgcccccctcttcccccaccccatgcccccaattctgtggcgcatccagattgtgaaaatgtacaataaatgtgtaatgagtaaccaagtgttgtctaaga

SEQ ID NO: 87193 - DNA, 2778 bp, Homo sapiens
agcggatctttccgtcccgggcagccagcgccagtcggagccagcgcgagccgccgccgccatcactgccgctgccaagtcctccacccgctgcccccgccatgtctgctaccgctgccacggccccccctgctgccccggctggggagggtggtccccctgcaccccctccaaacctcaccagtaacaggagactgcagcagacccaggcccaggtggatgaggtggtggacatcatgagggtgaacgtggacaaggtcctggagcgagaccagaagctgtcggagctggacgaccgtgcagatgcactccaggcgggggcctcccagtttgaaacaagcgcagccaagctcaagcgcaaatactggtggaaaaacctcaagatgatgatcatcttgggagtgatttgcgccatcatcctcatcatcatcatagtgagtagggtgagaatggccggggccctttccctggagaggtttccccagtggattctaggttttgaaggtcattaatctagtttttactcttcagccaaaaacacatatagctgctaatggcaattctgattcatctagagccaaaaactttgatgttatttagcctgcattttgcctagttcttggcagtcttgttaacatttggaaataggaaagctggtgtatccattgaggaccctttaggcctaagagcccagtctgagaaccctggaattgaggagtgggagaaaggaaaggaccaggggcttgagacatgaccaggaagccaaccaccccattatttgagagcttgcggtctcagaggctcagaggattagggtctgtggcttcaaggccataccatggagcggaagggacctcagaacctacctgtctagccccttgctttgtagatggaaaaactgagtccaagagagggtgtcagccagctggggagtggggaggattggagcagggccaggcctgacacactgctttcttgttctctctctttctctcccctctccctcttcctcatcttcttcccctctctccactttacttcagcacttaaatccccgaggagtctgccctgcctagagaagggcctctcccccaaccctcagccgttcctccacctctcagccatatctttcagccccccctcccctggatccgtgtgtgtgtgtgtccgtgtgtgtgtccccctgtaaatagccagctgttatttatacatatataatattatatatatttggtctgtttgtagttttattactagatgatttttccggttgtccttaacaccccttcctgaggttcccttcacccctctctcttgccttccttccctttccctttcttcctgactagccccaagtcccttcatttgcatctgctatgcaatagtccctctcctttccttcttcttccctcagatttagctgatccttcctcccaccctggccttcctttcctctttcctcctcactctccccgtcatgctccctctgccccgccctcaaaaaaaaaaaaaaaaaaaaaaaaaaaaaaaaacaacagcacctgtccaggcttccttaggtacatcttctttgtatccattgggaggctctgagactggccccacttggtcctaagaatcccaaggtctttgggagcgtccagcatgttaattagcgtatcattacatactgctatccctttccatttctttttgttccatcactcttctctcaacctgtgtttctttttttactgaggagttagtccccattagttcttgtatcacattttcatttgcacgacattactcgcaggtggtggggagcctgggcttttggggaaccaggctgctctggtccccagcattgcctcctcctagcccctctagtccagtttgcctcccttaccctcattttccaaacctcttgtaccctcctctccctcccccagctggtatgtaagtgtcttgaagttcagtatgttatgatggaccaataattctgccacttcgggtttctccctacattcctgctccccagttttcatgtggggtactcaactgacattcccatggggtttccctcccatctgcctgatccacctcctcctcccaccaggagagttgggggttggccacaattgatctcttgtgagaggggtggctaccagtgtgtgtgtgggggtcatcactgccttggggaggagtggggcagggcagagaatccccccaattcctgcctgaaatctctggcctcacccctgctgggggttggactgaaaaccctcctccccaatttggggggtgttgccccatcactgcccagctcctctgactgccccccctgaatttagggtgggggtactagtcactgccaatgtgtgtatgggacttgctggaaaacggggatgcttgcccctctccaggactattgagcccagagagagctgtcctctcattgggtgaactgattgaggaagggtctattgtctttttaaatggcacaattttaagggtttgagggtacagtcccttaacctgccacgggagggggcccccaaactttcttccccccacacttctggttttctgtgtggagggggagcagggatatctaagctgtggtgtgaaagggtaggagagatgctggaggtgggggtgctgtgttctagaccccccatattatcccagtgtcccctgcccccctcttcccccaccccatgcccccaattctgtggcgcatccagattgtgaaaatgtacaataaatgtgtaatgagtaaccaagtgttgtctaaga

SEQ ID NO: 87194 - DNA, 2261 bp, Homo sapiens
atggagacccaggactgaggagtaaagggctaaggaacagggagatggctggagaaggagacaggcagataggctgataggtcttagatggtctagggatgttggaagccaggggcattaggatgtagaggcaggggtggcctgaggacaggagagtctgggtctccatgagcccagtctgagaaccctggaattgaggagtgggagaaaggaaaggaccaggggcttgagacatgaccaggaagccaaccaccccattatttgagagcttgcggtctcagaggctcagaggattagggtctgtggcttcaaggccataccatggagcggaagggacctcagaacctacctgtctagccccttgctttgtagatggaaaaactgagtccaagagagggtgtcagccagctggggagtggggaggattggagcagggccaggcctgacacactgctttcttgttctctctctttctctcccctctccctcttcctcatcttcttcccctctctccactttacttcagcacttaaatccccgaggagtctgccctgcctagagaagggcctctcccccaaccctcagccgttcctccacctctcagccatatctttcagccccccctcccctggatccgtgtgtgtgtgtgtccgtgtgtgtgtccccctgtaaatagccagctgttatttatacatatataatattatatatatttggtctgtttgtagttttattactagatgatttttccggttgtccttaacaccccttcctgaggttcccttcacccctctctcttgccttccttccctttccctttcttcctgactagccccaagtcccttcatttgcatctgctatgcaatagtccctctcctttccttcttcttccctcagatttagctgatccttcctcccaccctggccttcctttcctctttcctcctcactctccccgtcatgctccctctgccccgccctcaaaaaaaaaaaaaaaaaaaaaaaaaaaaaaaaacaacagcacctgtccaggcttccttaggtacatcttctttgtatccattgggaggctctgagactggccccacttggtcctaagaatcccaaggtctttgggagcgtccagcatgttaattagcgtatcattacatactgctatccctttccatttctttttgttccatcactcttctctcaacctgtgtttctttttttactgaggagttagtccccattagttcttgtatcacattttcatttgcacgacattactcgcaggtggtggggagcctgggcttttggggaaccaggctgctctggtccccagcattgcctcctcctagcccctctagtccagtttgcctcccttaccctcattttccaaacctcttgtaccctcctctccctcccccagctggtatgtaagtgtcttgaagttcagtatgttatgatggaccaataattctgccacttcgggtttctccctacattcctgctccccagttttcatgtggggtactcaactgacattcccatggggtttccctcccatctgcctgatccacctcctcctcccaccaggagagttgggggttggccacaattgatctcttgtgagaggggtggctaccagtgtgtgtgtgggggtcatcactgccttggggaggagtggggcagggcagagaatccccccaattcctgcctgaaatctctggcctcacccctgctgggggttggactgaaaaccctcctccccaatttggggggtgttgccccatcactgcccagctcctctgactgccccccctgaatttagggtgggggtactagtcactgccaatgtgtgtatgggacttgctggaaaacggggatgcttgcccctctccaggactattgagcccagagagagctgtcctctcattgggtgaactgattgaggaagggtctattgtctttttaaatggcacaattttaagggtttgagggtacagtcccttaacctgccacgggagggggcccccaaactttcttccccccacacttctggttttctgtgtggagggggagcagggatatctaagctgtggtgtgaaagggtaggagagatgctggaggtgggggtgctgtgttctagaccccccatattatcccagtgtcccctgcccccctcttcccccaccccatgcccccaattctgtggcgcatccagattgtgaaaatgtacaataaatgtgtaatgagtaaccaagtgttgtctaaga

SEQ ID NO: 87195 - DNA, 2120 bp, Homo sapiens
tgatgctaggtcgatctaaggatcccatgggcccagtctgagaaccctggaattgaggagtgggagaaaggaaaggaccaggggcttgagacatgaccaggaagccaaccaccccattatttgagagcttgcggtctcagaggctcagaggattagggtctgtggcttcaaggccataccatggagcggaagggacctcagaacctacctgtctagccccttgctttgtagatggaaaaactgagtccaagagagggtgtcagccagctggggagtggggaggattggagcagggccaggcctgacacactgctttcttgttctctctctttctctcccctctccctcttcctcatcttcttcccctctctccactttacttcagcacttaaatccccgaggagtctgccctgcctagagaagggcctctcccccaaccctcagccgttcctccacctctcagccatatctttcagccccccctcccctggatccgtgtgtgtgtgtgtccgtgtgtgtgtccccctgtaaatagccagctgttatttatacatatataatattatatatatttggtctgtttgtagttttattactagatgatttttccggttgtccttaacaccccttcctgaggttcccttcacccctctctcttgccttccttccctttccctttcttcctgactagccccaagtcccttcatttgcatctgctatgcaatagtccctctcctttccttcttcttccctcagatttagctgatccttcctcccaccctggccttcctttcctctttcctcctcactctccccgtcatgctccctctgccccgccctcaaaaaaaaaaaaaaaaaaaaaaaaaaaaaaaaacaacagcacctgtccaggcttccttaggtacatcttctttgtatccattgggaggctctgagactggccccacttggtcctaagaatcccaaggtctttgggagcgtccagcatgttaattagcgtatcattacatactgctatccctttccatttctttttgttccatcactcttctctcaacctgtgtttctttttttactgaggagttagtccccattagttcttgtatcacattttcatttgcacgacattactcgcaggtggtggggagcctgggcttttggggaaccaggctgctctggtccccagcattgcctcctcctagcccctctagtccagtttgcctcccttaccctcattttccaaacctcttgtaccctcctctccctcccccagctggtatgtaagtgtcttgaagttcagtatgttatgatggaccaataattctgccacttcgggtttctccctacattcctgctccccagttttcatgtggggtactcaactgacattcccatggggtttccctcccatctgcctgatccacctcctcctcccaccaggagagttgggggttggccacaattgatctcttgtgagaggggtggctaccagtgtgtgtgtgggggtcatcactgccttggggaggagtggggcagggcagagaatccccccaattcctgcctgaaatctctggcctcacccctgctgggggttggactgaaaaccctcctccccaatttggggggtgttgccccatcactgcccagctcctctgactgccccccctgaatttagggtgggggtactagtcactgccaatgtgtgtatgggacttgctggaaaacggggatgcttgcccctctccaggactattgagcccagagagagctgtcctctcattgggtgaactgattgaggaagggtctattgtctttttaaatggcacaattttaagggtttgagggtacagtcccttaacctgccacgggagggggcccccaaactttcttccccccacacttctggttttctgtgtggagggggagcagggatatctaagctgtggtgtgaaagggtaggagagatgctggaggtgggggtgctgtgttctagaccccccatattatcccagtgtcccctgcccccctcttcccccaccccatgcccccaattctgtggcgcatccagattgtgaaaatgtacaataaatgtgtaatgagtaaccaagtgttgtctaaga

SEQ ID NO: 87196 - DNA, 2549 bp, Homo sapiens
agcggatctttccgtcccgggcagccagcgccagtcggagccagcgcgagccgccgccgccatcactgccgctgccaagtcctccacccgctgcccccgccatgtgagtcggccgcccgccaccctcaccgcgcttccctgcgccggccgccgcccttggcaaccggccgtcgggagtgcccggggtctcttctgcgttccccgcgccccggggccaggcccaagccggtgactgcgcgcgggcggccgaggagccccgcgtcccgggctggccggctcgggcgatggccgcgggaaggagcggacccagtgtcctcctgcccctccccgcccctgtcaccgcggcgcctgtcttttcgggtcgacccggatcgcatctgtgaggtcgccctcagttgacaggcggggaaactgaggccgggggggctcgctcaaggtcacgcagctcatcggcggcagggctggaccgagaccagggcttacatcgggtggccttcctcccgaaaaggaggactggagggacgaggatggacaggtctgctaccgctgccacggccccccctgctgccccggctggggagggtggtccccctgcaccccctccaaacctcaccagtaacaggagactgcagcagacccaggcccaggtggatgaggtggtggacatcatgagggtgaacgtggacaaggtcctggagcgagaccagaagctgtcggagctggacgaccgtgcagatgcactccaggcgggggcctcccagtttgaaacaagcgcagccaagctcaagcgcaaatactggtggaaaaacctcaagatgatgatcatcttgggagtgatttgcgccatcatcctcatcatcatcatagcctcagccgttcctccacctctcagccatatctttcagccccccctcccctggatccgtgtgtgtgtgtgtccgtgtgtgtgtccccctgtaaatagccagctgttatttatacatatataatattatatatatttggtctgtttgtagttttattactagatgatttttccggttgtccttaacaccccttcctgaggttcccttcacccctctctcttgccttccttccctttccctttcttcctgactagccccaagtcccttcatttgcatctgctatgcaatagtccctctcctttccttcttcttccctcagatttagctgatccttcctcccaccctggccttcctttcctctttcctcctcactctccccgtcatgctccctctgccccgccctcaaaaaaaaaaaaaaaaaaaaaaaaaaaaaaaaacaacagcacctgtccaggcttccttaggtacatcttctttgtatccattgggaggctctgagactggccccacttggtcctaagaatcccaaggtctttgggagcgtccagcatgttaattagcgtatcattacatactgctatccctttccatttctttttgttccatcactcttctctcaacctgtgtttctttttttactgaggagttagtccccattagttcttgtatcacattttcatttgcacgacattactcgcaggtggtggggagcctgggcttttggggaaccaggctgctctggtccccagcattgcctcctcctagcccctctagtccagtttgcctcccttaccctcattttccaaacctcttgtaccctcctctccctcccccagctggtatgtaagtgtcttgaagttcagtatgttatgatggaccaataattctgccacttcgggtttctccctacattcctgctccccagttttcatgtggggtactcaactgacattcccatggggtttccctcccatctgcctgatccacctcctcctcccaccaggagagttgggggttggccacaattgatctcttgtgagaggggtggctaccagtgtgtgtgtgggggtcatcactgccttggggaggagtggggcagggcagagaatccccccaattcctgcctgaaatctctggcctcacccctgctgggggttggactgaaaaccctcctccccaatttggggggtgttgccccatcactgcccagctcctctgactgccccccctgaatttagggtgggggtactagtcactgccaatgtgtgtatgggacttgctggaaaacggggatgcttgcccctctccaggactattgagcccagagagagctgtcctctcattgggtgaactgattgaggaagggtctattgtctttttaaatggcacaattttaagggtttgagggtacagtcccttaacctgccacgggagggggcccccaaactttcttccccccacacttctggttttctgtgtggagggggagcagggatatctaagctgtggtgtgaaagggtaggagagatgctggaggtgggggtgctgtgttctagaccccccatattatcccagtgtcccctgcccccctcttcccccaccccatgcccccaattctgtggcgcatccagattgtgaaaatgtacaataaatgtgtaatgagtaaccaagtgttgtctaaga

SEQ ID NO: 87197 - DNA, 1812 bp, Homo sapiens
tggcacgaggccttggctgggtgtggtggctcacacctgaaaacccagcgcattgggaggctgaggcaggcagatcacctgaggtcaggagttcgagaacaccctgaccaatatgatgaaaccctgtctcatctaaaaatacaaaacttagtcagccatatctttcagccccccctcccctggatccgtgtgtgtgtgtgtccgtgtgtgtgtccccctgtaaatagccagctgttatttatacatatataatattatatatatttggtctgtttgtagttttattactagatgatttttccggttgtccttaacaccccttcctgaggttcccttcacccctctctcttgccttccttccctttccctttcttcctgactagccccaagtcccttcatttgcatctgctatgcaatagtccctctcctttccttcttcttccctcagatttagctgatccttcctcccaccctggccttcctttcctctttcctcctcactctccccgtcatgctccctctgccccgccctcaaaaaaaaaaaaaaaaaaaaaaaaaaaaaaaaacaacagcacctgtccaggcttccttaggtacatcttctttgtatccattgggaggctctgagactggccccacttggtcctaagaatcccaaggtctttgggagcgtccagcatgttaattagcgtatcattacatactgctatccctttccatttctttttgttccatcactcttctctcaacctgtgtttctttttttactgaggagttagtccccattagttcttgtatcacattttcatttgcacgacattactcgcaggtggtggggagcctgggcttttggggaaccaggctgctctggtccccagcattgcctcctcctagcccctctagtccagtttgcctcccttaccctcattttccaaacctcttgtaccctcctctccctcccccagctggtatgtaagtgtcttgaagttcagtatgttatgatggaccaataattctgccacttcgggtttctccctacattcctgctccccagttttcatgtggggtactcaactgacattcccatggggtttccctcccatctgcctgatccacctcctcctcccaccaggagagttgggggttggccacaattgatctcttgtgagaggggtggctaccagtgtgtgtgtgggggtcatcactgccttggggaggagtggggcagggcagagaatccccccaattcctgcctgaaatctctggcctcacccctgctgggggttggactgaaaaccctcctccccaatttggggggtgttgccccatcactgcccagctcctctgactgccccccctgaatttagggtgggggtactagtcactgccaatgtgtgtatgggacttgctggaaaacggggatgcttgcccctctccaggactattgagcccagagagagctgtcctctcattgggtgaactgattgaggaagggtctattgtctttttaaatggcacaattttaagggtttgagggtacagtcccttaacctgccacgggagggggcccccaaactttcttccccccacacttctggttttctgtgtggagggggagcagggatatctaagctgtggtgtgaaagggtaggagagatgctggaggtgggggtgctgtgttctagaccccccatattatcccagtgtcccctgcccccctcttcccccaccccatgcccccaattctgtggcgcatccagattgtgaaaatgtacaataaatgtgtaatgagtaaccaagtgttgtctaaga

SEQ ID NO: 87198 - DNA, 2144 bp, Homo sapiens
agcggatctttccgtcccgggcagccagcgccagtcggagccagcgcgagccgccgccgccatcactgccgctgccaagtcctccacccgctgcccccgccatgtctgctaccgctgccacggccccccctgctgccccggctggggagggtggtccccctgcaccccctccaaacctcaccagtaacaggagactgcagcagacccaggcccaggtggatgaggtggtggacatcatgagggtgaacgtggacaaggtcctggagcgagaccagaagctgtcggagctggacgaccgtgcagatgcactccaggcgggggcctcccagtttgaaacaagcgcagccaagctcaagcgcaaatactggtggaaaaacctcaagatgatgatcatcttgggagtgatttgcgccatcatcctcatcatcatcatagtttacttcagcacttaaatccccgaggagtctgccctgcctagagaagggcctctcccccaaccctcagccgttcctccacctctcagccatatctttcagccccccctcccctggatccgtgtgtgtgtgtgtccgtgtgtgtgtccccctgtaaatagccagctgttatttatacatatataatattatatatatttggtctgtttgtagttttattactagatgatttttccggttgtccttaacaccccttcctgaggttcccttcacccctctctcttgccttccttccctttccctttcttcctgactagccccaagtcccttcatttgcatctgctatgcaatagtccctctcctttccttcttcttccctcagatttagctgatccttcctcccaccctggccttcctttcctctttcctcctcactctccccgtcatgctccctctgccccgccctcaaaaaaaaaaaaaaaaaaaaaaaaaaaaaaaaacaacagcacctgtccaggcttccttaggtacatcttctttgtatccattgggaggctctgagactggccccacttggtcctaagaatcccaaggtctttgggagcgtccagcatgttaattagcgtatcattacatactgctatccctttccatttctttttgttccatcactcttctctcaacctgtgtttctttttttactgaggagttagtccccattagttcttgtatcacattttcatttgcacgacattactcgcaggtggtggggagcctgggcttttggggaaccaggctgctctggtccccagcattgcctcctcctagcccctctagtccagtttgcctcccttaccctcattttccaaacctcttgtaccctcctctccctcccccagctggtatgtaagtgtcttgaagttcagtatgttatgatggaccaataattctgccacttcgggtttctccctacattcctgctccccagttttcatgtggggtactcaactgacattcccatggggtttccctcccatctgcctgatccacctcctcctcccaccaggagagttgggggttggccacaattgatctcttgtgagaggggtggctaccagtgtgtgtgtgggggtcatcactgccttggggaggagtggggcagggcagagaatccccccaattcctgcctgaaatctctggcctcacccctgctgggggttggactgaaaaccctcctccccaatttggggggtgttgccccatcactgcccagctcctctgactgccccccctgaatttagggtgggggtactagtcactgccaatgtgtgtatgggacttgctggaaaacggggatgcttgcccctctccaggactattgagcccagagagagctgtcctctcattgggtgaactgattgaggaagggtctattgtctttttaaatggcacaattttaagggtttgagggtacagtcccttaacctgccacgggagggggcccccaaactttcttccccccacacttctggttttctgtgtggagggggagcagggatatctaagctgtggtgtgaaagggtaggagagatgctggaggtgggggtgctgtgttctagaccccccatatcatgcccccaattctgtggcgcatccagattgtgaaaatgtacaataaatgtgtaatgagtaaccaagtgttgtctaaga

SEQ ID NO: 87199 - DNA, 1792 bp, Homo sapiens
agcggatctttccgtcccgggcagccagcgccagtcggagccagcgcgagccgccgccgccatcactgccgctgccaagtcctccacccgctgcccccgccatgtctgctaccgctgccacggccccccctgctgccccggctggggagggtggtccccctgcaccccctccaaacctcaccagtaacaggagactgcagcagacccaggcccaggtggatgaggtggtggacatcatgagggtgaacgtggacaaggtcctggagcgagaccagaagctgtcggagctggacgaccgtgcagatgcactccaggcgggggcctcccagtttgaaacaagcgcagccaagctcaagcgcaaatactggtggaaaaacctcaagatgatgatcatcttgggagtgatttgcgccatcatcctcatcatcatcatagtttacttcagcacttaaatccccgaggagtctgccctgcctagagaagggcctctcccccaaccctcagccgttcctccacctctcagccatatctttcagccccccctcccctggatccgtgtgtgtgtgtgtccgtgtgtgtgtccccctgtaaatagccagctgttatttatacatatataatattatatatatttggtctgtttgtagttttattactagatgatttttccggttgtccttaacaccccttcctgaggttcccttcacccctctctcttgccttccttccctttccctttcttcctgactagccccaagtcccttcatttgcatctgctatgcaatagtccctctcctttccttcttcttccctcagatttagctgatccttcctcccaccctggccttcctttcctctttcctcctcactctccccgtcatgctccctctgccccgccctcaaaaaaaaaaaaaaaaaaaaaaaaaaaaaaaaacaacagcacctgtccaggcttccttaggtacatcttctttgtatccattgggaggctctgagactggccccacttggtcctaagaatcccaaggtctttgggagcgtccagcatgttaattagcgtatcattacatactgctatccctttccatttctttttgttccatcactcttctctcaacctgtgtttctttttttactgaggagttagtccccattagttcttgtatcacattttcatttgcacgacattactcgcaggtggtggggagcctgggcttttggggaaccaggctgctctggtccccagcattgcctcctcctagcccctctagtccagtttgcctcccttaccctcattttccaaacctcttgtaccctcctctccctcccccagctggtatgtaagtgtcttgaagttcagtatgttatgatggaccaataattctgccacttcgggtttctccctacattcctgctccccagttttcatgtggggtactcaactgacattcccatggggtttccctcccatctgcctgatccacctcctcctcccaccaggagagttgggggttggccacaattgatctcttgtgagaggggtggctaccagtgtgtgtgtgggggtcatcactgccttggggaggagtggggcagggcagagaatccccccaattcctgcctgaaatctctggcctcacccctgctgggggttggactgaaaaccctcctccccaatttggggggtgttgccccatcactgcccagctcctctgactgccccccctgaatttagggtgggggtactagtcactgccagagactctctccacactgggagagtgatgcgttt

SEQ ID NO: 87200 - DNA, 1624 bp, Homo sapiens
catggctgggaaggcctcaggagacttacaatcatggtggaagaaaaggggaagcagacatgtcttacgttgcccgagaaggaggaagatagagagaagggggaagtgccacacacttttaaacaaccagatcttgtgaggttcccttcacccctctctcttgccttccttccctttccctttcttcctgactagccccaagtcccttcatttgcatctgctatgcaatagtccctctcctttccttcttcttccctcagatttagctgatccttcctcccaccctggccttcctttcctctttcctcctcactctccccgtcatgctccctctgccccgccctcaaaaaaaaaaaaaaaaaaaaaaaaaaaaaaaaacaacagcacctgtccaggcttccttaggtacatcttctttgtatccattgggaggctctgagactggccccacttggtcctaagaatcccaaggtctttgggagcgtccagcatgttaattagcgtatcattacatactgctatccctttccatttctttttgttccatcactcttctctcaacctgtgtttctttttttactgaggagttagtccccattagttcttgtatcacattttcatttgcacgacattactcgcaggtggtggggagcctgggcttttggggaaccaggctgctctggtccccagcattgcctcctcctagcccctctagtccagtttgcctcccttaccctcattttccaaacctcttgtaccctcctctccctcccccagctggtatgtaagtgtcttgaagttcagtatgttatgatggaccaataattctgccacttcgggtttctccctacattcctgctccccagttttcatgtggggtactcaactgacattcccatggggtttccctcccatctgcctgatccacctcctcctcccaccaggagagttgggggttggccacaattgatctcttgtgagaggggtggctaccagtgtgtgtgtgggggtcatcactgccttggggaggagtggggcagggcagagaatccccccaattcctgcctgaaatctctggcctcacccctgctgggggttggactgaaaaccctcctccccaatttggggggtgttgccccatcactgcccagctcctctgactgccccccctgaatttagggtgggggtactagtcactgccaatgtgtgtatgggacttgctggaaaacggggatgcttgcccctctccaggactattgagcccagagagagctgtcctctcattgggtgaactgattgaggaagggtctattgtctttttaaatggcacaattttaagggtttgagggtacagtcccttaacctgccacgggagggggcccccaaactttcttccccccacacttctggttttctgtgtggagggggagcagggatatctaagctgtggtgtgaaagggtaggagagatgctggaggtgggggtgctgtgttctagaccccccatattatcccagtgtcccctgcccccctcttcccccaccccatgcccccaattctgtggcgcatccagattgtgaaaatgtacaataaatgtgtaatgagtaaccaagtgttgtctaaga

SEQ ID NO: 87201 - DNA, 1600 bp, Homo sapiens
agcggatctttccgtcccgggcagccagcgccagtcggagccagcgcgagccgccgccgccatcactgccgctgccaagtcctccacccgctgcccccgccatgtctgctaccgctgccacggccccccctgctgccccggctggggagggtggtccccctgcaccccctccaaacctcaccagtaacaggagactgcagcagacccaggcccaggtggatgaggtggtggacatcatgagggtgaacgtggacaaggtcctggagcgagaccagaagctgtcggagctggacgaccgtgcagatgcactccaggcgggggcctcccagtttgaaacaagcgcagccaagctcaagcgcaaatactggtggaaaaacctcaagatgatgatcatcttgggagtgatttgcgccatcatcctcatcatcatcatagtttacttcagcacttaaatccccgaggagtctgccctgcctagagaagggcctctcccccaaccctcagccgttcctccacctctcagccatatctttcagccccccctcccctggatccgtgtgtgtgtgtgtccgtgtgtgtgtccccctgtaaatagccagctgttatttatacatatataatattatatatatttggtctgtttgtagttttattactagatgatttttccggttgtccttaacaccccttcctgaggttcccttcacccctctctcttgccttccttccctttccctttcttcctgactagccccaagtcccttcatttgcatctgctatgcaatagtccctctcctttccttcttcttccctcagatttagctgatccttcctcccaccctggccttcctttcctctttcctcctcactctccccgtcatgctccctctgccccgccctcaaaaaaaaaaaaaaaaaaaaaaaaaaaaaaaaacaacagcacctgtccaggcttccttaggtacatcttctttgtatccattgggaggctctgagactggccccacttggtcctaagaatcccaaggtctttgggagcgtccagcatgttaattagcgtatcattacatactgctatccctttccatttctttttgttccatcactcttctctcaacctgtgtttctttttttactgaggagttagtccccattagttcttgtatcacattttcatttgcacgacattactcgcaggtggtggggagcctgggcttttggggaaccaggctgctctggtccccagcattgcctcctcctagcccctctagtccagtttgcctcccttaccctcattttccaaacctcttgtaccctcctctccctcccccagctggtatgtaagtgtcttgaagttcagtatgttatgatggaccaataattctgccacttcgggtttctccctacattcctgctccccagttttcatgtggggtactcaactgacattcccaaactttcttccccccacacttctggttttctgtgtggagggggagcagggatatctaagctgtggtgtgaaagggtaggagagatgctggaggtgggggtgctgtgttctagaccccccatatgtctgcagagaggggatcctctg

SEQ ID NO: 87202 - DNA, 1440 bp, Homo sapiens
aaaaaatcaaaagaatttttaggctggtctcgaactcttgacctcaagtgatctgcccgcctcagcctctcagagtgctgggattacaggcatgagtcacccatgcctgggcataggcttttaaaaaataatttcagtcttcagaaatccatgaagatggaaatagaaattgataacaaaagcagaaattgctttaggacattttgaagctaactctgcttgggcatcttctttgtatccattgggaggctctgagactggccccacttggtcctaagaatcccaaggtctttgggagcgtccagcatgttaattagcgtatcattacatactgctatccctttccatttctttttgttccatcactcttctctcaacctgtgtttctttttttactgaggagttagtccccattagttcttgtatcacattttcatttgcacgacattactcgcaggtggtggggagcctgggcttttggggaaccaggctgctctggtccccagcattgcctcctcctagcccctctagtccagtttgcctcccttaccctcattttccaaacctcttgtaccctcctctccctcccccagctggtatgtaagtgtcttgaagttcagtatgttatgatggaccaataattctgccacttcgggtttctccctacattcctgctccccagttttcatgtggggtactcaactgacattcccatggggtttccctcccatctgcctgatccacctcctcctcccaccaggagagttgggggttggccacaattgatctcttgtgagaggggtggctaccagtgtgtgtgtgggggtcatcactgccttggggaggagtggggcagggcagagaatccccccaattcctgcctgaaatctctggcctcacccctgctgggggttggactgaaaaccctcctccccaatttggggggtgttgccccatcactgcccagctcctctgactgccccccctgaatttagggtgggggtactagtcactgccaatgtgtgtatgggacttgctggaaaacggggatgcttgcccctctccaggactattgagcccagagagagctgtcctctcattgggtgaactgattgaggaagggtctattgtctttttaaatggcacaattttaagggtttgagggtacagtcccttaacctgccacgggagggggcccccaaactttcttccccccacacttctggttttctgtgtggagggggagcagggatatctaagctgtggtgtgaaagggtaggagagatgctggaggtgggggtgctgtgttctagaccccccatattatcccagtgtcccctgcccccctcttcccccaccccatgcccccaattctgtggcgcatccagattgtgaaaatgtacaataaatgtgtaatgagtaaccaagtgttgtctaaga

SEQ ID NO: 87203 - DNA, 910 bp, Homo sapiens
  misc_feature (25)..(25): n is a, c, g, or t
  misc_feature (42)..(42): n is a, c, g, or t
  misc_feature (50)..(50): n is a, c, g, or t
  misc_feature (52)..(52): n is a, c, g, or t
  misc_feature (54)..(54): n is a, c, g, or t
aggcaattcatgtagcgacaccatnattgaaaaacgcttggnatgtttanananagcagcgtacggtcgattcggatacttgaagttcagtatgttatgatggaccaataattctgccacttcgggtttctccctacattcctgctccccagttttcatgtggggtactcaactgacattcccatggggtttccctcccatctgcctgatccacctcctcctcccaccaggagagttgggggttggccacaattgatctcttgtgagaggggtggctaccagtgtgtgtgtgggggtcatcactgccttggggaggagtggggcagggcagagaatccccccaattcctgcctgaaatctctggcctcacccctgctgggggttggactgaaaaccctcctccccaatttggggggtgttgccccatcactgcccagctcctctgactgccccccctgaatttagggtgggggtactagtcactgccaatgtgtgtatgggacttgctggaaaacggggatgcttgcccctctccaggactattgagcccagagagagctgtcctctcattgggtgaactgattgaggaagggtctattgtctttttaaatggcacaattttaagggtttgagggtacagtcccttaacctgccacgggagggggcccccaaactttcttccccccacacttctggttttctgtgtggagggggagcagggatatctaagctgtggtgtgaaagggtaggagagatgctggaggtgggggtgctgtgttctagaccccccatattatcccagtgtcccctgcccccctcttcccccaccccatgcccccaattctgtggcgcatccagattgtgaaaatgtacaataaatgtgtaatgagtaaccaagtgttgtctaaga

SEQ ID NO: 87204 - DNA, 1057 bp, Homo sapiens
  misc_feature (43)..(44): n is a, c, g, or t
  misc_feature (143)..(143): n is a, c, g, or t
  misc_feature (149)..(149): n is a, c, g, or t
  misc_feature (160)..(160): n is a, c, g, or t
  misc_feature (175)..(175): n is a, c, g, or t
gtgactctaaggattactgctgctccctcttcaggactattgnnccagagagagctgtctctcattgggtgaactgattgaggaagggtctattgtctttttaaatggcacaatttaagggtttgagggtacagtcccttaanctgccncgggagggggnccccaaactttcttncccccacacttctggttttctgtgtggagggggagcagggatatctaagccttgaagttcagtatgttatgatggaccaataattctgccacttcgggtttctccctacattcctgctccccagttttcatgtggggtactcaactgacattcccatggggtttccctcccatctgcctgatccacctcctcctcccaccaggagagttgggggttggccacaattgatctcttgtgagaggggtggctaccagtgtgtgtgtgggggtcatcactgccttggggaggagtggggcagggcagagaatccccccaattcctgcctgaaatctctggcctcacccctgctgggggttggactgaaaaccctcctccccaatttggggggtgttgccccatcactgcccagctcctctgactgccccccctgaatttagggtgggggtactagtcactgccaatgtgtgtatgggacttgctggaaaacggggatgcttgcccctctccaggactattgagcccagagagagctgtcctctcattgggtgaactgattgaggaagggtctattgtctttttaaatggcacaattttaagggtttgagggtacagtcccttaacctgccacgggagggggcccccaaactttcttccccccacacttctggttttctgtgtggagggggagcagggatatctaagctgtggtgtgaaagggtaggagagatgctggaggtgggggtgctgtgttctagaccccccatattatcccagtgtcccctgcccccctcttcccccaccccatgcccccaattctgtggcgcatccagattgtgaaaatgtacaataaatgtgtaatgagtaaccaagtgttgtctaaga

SEQ ID NO: 87205 - DNA, 717 bp, Homo sapiens
ggcgactctaggagtatcccgacagcatcctaaccaggagagttgggggttggccacaattgatctcttgtgagaggggtggctaccagtgtgtgtgtgggggtcatcactgccttggggaggagtggggcagggcagagaatccccccaattcctgcctgaaatctctggcctcacccctgctgggggttggactgaaaaccctcctccccaatttggggggtgttgccccatcactgcccagctcctctgactgccccccctgaatttagggtgggggtactagtcactgccaatgtgtgtatgggacttgctggaaaacggggatgcttgcccctctccaggactattgagcccagagagagctgtcctctcattgggtgaactgattgaggaagggtctattgtctttttaaatggcacaattttaagggtttgagggtacagtcccttaacctgccacgggagggggcccccaaactttcttccccccacacttctggttttctgtgtggagggggagcagggatatctaagctgtggtgtgaaagggtaggagagatgctggaggtgggggtgctgtgttctagaccccccatattatcccagtgtcccctgcccccctcttcccccaccccatgcccccaattctgtggcgcatccagattgtgaaaatgtacaataaatgtgtaatgagtaaccaagtgttgtctaaga

SEQ ID NO: 87206 - DNA, 720 bp, Homo sapiens
gcggccgctccaacatcagaatggtaaccacccctctcacaagagatcaattgtggccaacccccaactctcctggtgggaggaggaggtggatcaggcagatgggagggaaaccccttggggaggagtggggcagggcagagaatccccccaattcctgcctgaaatctctggcctcacccctgctgggggttggactgaaaaccctcctccccaatttggggggtgttgccccatcactgcccagctcctctgactgccccccctgaatttagggtgggggtactagtcactgccaatgtgtgtatgggacttgctggaaaacggggatgcttgcccctctccaggactattgagcccagagagagctgtcctctcattgggtgaactgattgaggaagggtctattgtctttttaaatggcacaattttaagggtttgagggtacagtcccttaacctgccacgggagggggcccccaaactttcttccccccacacttctggttttctgtgtggagggggagcagggatatctaagctgtggtgtgaaagggtaggagagatgctggaggtgggggtgctgtgttctagaccccccatattatcccagtgtcccctgcccccctcttcccccaccccatgcccccaattctgtggcgcatccagattgtgaaaatgtacaataaatgtgtaatgagtaaccaagtgttgtctaaga

SEQ ID NO: 87207 - DNA, 1002 bp, Homo sapiens
  misc_feature (43)..(44): n is a, c, g, or t
  misc_feature (143)..(143): n is a, c, g, or t
  misc_feature (149)..(149): n is a, c, g, or t
  misc_feature (160)..(160): n is a, c, g, or t
  misc_feature (175)..(175): n is a, c, g, or t
gtgactctaaggattactgctgctccctcttcaggactattgnnccagagagagctgtctctcattgggtgaactgattgaggaagggtctattgtctttttaaatggcacaatttaagggtttgagggtacagtcccttaanctgccncgggagggggnccccaaactttcttncccccacacttctggttttctgtgtggagggggagcagggatatctaagccttgaagttcagtatgttatgatggaccaataattctgccacttcgggtttctccctacattcctgctccccagttttcatgtggggtactcaactgacattcccatggggtttccctcccatctgcctgatccacctcctcctcccaccaggagagttgggggttggccacaattgatctcttgtgagaggggtggctaccagtgtgtgtgtgggggtcatcactgccttggggaggagtggggcagggcagagaatccccccaattcctgcctgaaatctctggcctcacccctgctgggggttggactgactgccccccctgaatttagggtgggggtactagtcactgccaatgtgtgtatgggacttgctggaaaacggggatgcttgcccctctccaggactattgagcccagagagagctgtcctctcattgggtgaactgattgaggaagggtctattgtctttttaaatggcacaattttaagggtttgagggtacagtcccttaacctgccacgggagggggcccccaaactttcttccccccacacttctggttttctgtgtggagggggagcagggatatctaagctgtggtgtgaaagggtaggagagatgctggaggtgggggtgctgtgttctagaccccccatattatcccagtgtcccctgcccccctcttcccccaccccatgcccccaattctgtggcgcatccagattgtgaaaatgtacaataaatgtgtaatgagtaaccaagtgttgtctaaga

SEQ ID NO: 87208 - DNA, 937 bp, Homo sapiens
agcggatctttccgtcccgggcagccagcgccagtcggagccagcgcgagccgccgccgccatcactgccgctgccaagtcctccacccgctgcccccgccatgtctgctaccgctgccacggccccccctgctgccccggctggggagggtggtccccctgcaccccctccaaacctcaccagtaacaggagactgcagcagacccaggcccaggtggatgaggtggtggacatcatgagggtgaacgtggacaaggtcctggagcgagaccagaagctgtcggagctggacgaccgtgcagatgcactccaggcgggggcctcccagtttgaaacaagcgcagccaagctcaagcgcaaatactggtggaaaaacctcaagatgatgatcatcttgggagtgatttgcgccatcatcctcatcatcatcatagtttacttcagcacttaaatccccgaggagtctgccctgcctagagaagggcctctcccccaaccctcagccgttcctccacctctcagccatatctttcagccccccctcccctggatccgtgtgtgtgtgtgtccgtgtgtgtgtccccctgtaaatagccagctgttatttatacatatataatattatatatatttggtctgtttgtagttttattactagatgatttttccggttgtccttaacaccccttcctgaggttcccttcacccctctctcttgccttccttccctttccctttcttcctgactagccccaagtcccttcatttgcatctgctatgcaatagtccctctcctttccttcttcttccctcagatttagctgatccttcctcccaccctggccttcctttcctctttcctcctcactctccccgtcattgtttccttctgcttcgcccgttttttttttttttttttttttttttagtcgacgc

SEQ ID NO: 87209 - DNA, 495 bp, Homo sapiens
ccaacgagcgcaggtgatacaggtactctccgccattcctccccactgcctcagcattaaccttggaagcatggaattcacagcatcccttagtgtccccaacccaatttgcccctctccaggactattgagcccagagagagctgtcctctcattgggtgaactgattgaggaagggtctattgtctttttaaatggcacaattttaagggtttgagggtacagtcccttaacctgccacgggagggggcccccaaactttcttccccccacacttctggttttctgtgtggagggggagcagggatatctaagctgtggtgtgaaagggtaggagagatgctggaggtgggggtgctgtgttctagaccccccatattatcccagtgtcccctgcccccctcttcccccaccccatgcccccaattctgtggcgcatccagattgtgaaaatgtacaataaatgtgtaatgagtaaccaagtgttgtctaaga

SEQ ID NO: 87210 - DNA, 1429 bp, Homo sapiens
agcggatctttccgtcccgggcagccagcgccagtcggagccagcgcgagccgccgccgccatcactgccgctgccaagtcctccacccgctgcccccgccatgtgagtcggccgcccgccaccctcaccgcgcttccctgcgccggccgccgcccttggcaaccggccgtcgggagtgcccggggtctcttctgcgttccccgcgccccggggccaggcccaagccggtgactgcgcgcgggcggccgaggagccccgcgtcccgggctggccggctcgggcgatggccgcgggaaggagcggacccagtgtcctcctgcccctccccgcccctgtcaccgcggcgcctgtcttttcgggtcgacccggatcgcatctgtgaggtcgccctcagttgacaggcggggaaactgaggccgggggggctcgctcaaggtcacgcagctcatcggcggcagggctggaccgagaccagggcttacatcgggtggccttcctcccgaaaaggaggactggagggacgaggatggacaggtctgctaccgctgccacggccccccctgctgccccggctggggagggtggtccccctgcaccccctccaaacctcaccagtaacaggagactgcagcagacccaggcccaggtggatgaggtggtggacatcatgagggtgaacgtggacaaggtcctggagcgagaccagaagctgtcggagctggacgaccgtgcagatgcactccaggcgggggcctcccagtttgaaacaagcgcagccaagctcaagcgcaaatactggtggaaaaacctcaagatgatgatcatcttgggagtgatttgcgccatcatcctcatcatcatcatagtgagtagggtgagaatggccggggccctttccctggagaggtttccccagtggattctaggttttgaaggtcattaatctagtttttactcttcagccaaaaacacatatagctgctaatggcaattctgattcatctagagccaaaaactttgatgttatttagcctgcattttgcctagttcttggcagtcttgttaacatttggaaataggaaagctggtgtatccattgaggaccctttaggcctaagagcccagtctgagaaccctggaattgaggagtgggagaaaggaaaggaccaggggcttgagacatgaccaggaagccaaccaccccattatttgagagcttgcggtctcagaggctcagaggattagggtctgtggcttcaaggccataccatggagcggaagggacctcagaacctacctgtctagccccttgctttgtagatggaaaaactgagtccaagagagggtgtcagccagctggggagtggggaggaaagaggaaaggaaggccagggtgggaggaaggatcagctaaatctgaggtcgacg

SEQ ID NO: 87211 - DNA, 511 bp, Homo sapiens
gataagatccccaccttccaagggctgaaaaccctcctccccaatttggggggtgttgccccatcactgcccagctcctctgactgccccccctgaatttagggtgggggtactagtcactgccaatgtgtgtatgggacttgctggaaaacggggatgcttgcccctctccaggactattgagcccagagagagctgtcctctcattgggtgaactgattgaggaagggtctattgtctttttaaatggcacaattttaagggtttgagggtacagtcccttaacctgccacgggagggggcccccaaactttcttccccccacacttctggttttctgtgtggagggggagcagggatatctaagctgtggtgtgaaagggtaggagagatgctggaggtgggggtgctgtgttctagaccccccatatcatgcccccaattctgtggcgcatccagattgtgaaaatgtacaataaatgtgtaatgagtaaccaagtgttgtctaaga

SEQ ID NO: 87212 - DNA, 1953 bp, Homo sapiens
ggattcgtacgagaacggttactgagcagacccatttcaggtggatgaggtggtggacatcatgagggtgaacgtggacaaggtcctggagcgagaccagaagctgtcggagctggacgaccgtgcagatgcactccaggcgggggcctcccagtttgaaacaagcgcagccaagctcaagcgcaaatactggtggaaaaacctcaagtttacttcagcacttaaatccccgaggagtctgccctgcctagagaagggcctctcccccaaccctcagccgttcctccacctctcagccatatctttcagccccccctcccctggatccgtgtgtgtgtgtgtccgtgtgtgtgtccccctgtaaatagccagctgttatttatacatatataatattatatatatttggtctgtttgtagttttattactagatgatttttccggttgtccttaacaccccttcctgaggttcccttcacccctctctcttgccttccttccctttccctttcttcctgactagccccaagtcccttcatttgcatctgctatgcaatagtccctctcctttccttcttcttccctcagatttagctgatccttcctcccaccctggccttcctttcctctttcctcctcactctccccgtcatgctccctctgccccgccctcaaaaaaaaaaaaaaaaaaaaaaaaaaaaaaaaacaacagcacctgtccaggcttccttaggtacatcttctttgtatccattgggaggctctgagactggccccacttggtcctaagaatcccaaggtctttgggagcgtccagcatgttaattagcgtatcattacatactgctatccctttccatttctttttgttccatcactcttctctcaacctgtgtttctttttttactgaggagttagtccccattagttcttgtatcacattttcatttgcacgacattactcgcaggtggtggggagcctgggcttttggggaaccaggctgctctggtccccagcattgcctcctcctagcccctctagtccagtttgcctcccttaccctcattttccaaacctcttgtaccctcctctccctcccccagctggtatgtaagtgtcttgaagttcagtatgttatgatggaccaataattctgccacttcgggtttctccctacattcctgctccccagttttcatgtggggtactcaactgacattcccatggggtttccctcccatctgcctgatccacctcctcctcccaccaggagagttgggggttggccacaattgatctcttgtgagaggggtggctaccagtgtgtgtgtgggggtcatcactgccttggggaggagtggggcagggcagagaatccccccaattcctgcctgaaatctctggcctcacccctgctgggggttggactgaaaaccctcctccccaatttggggggtgttgccccatcactgcccagctcctctgactgccccccctgaatttagggtgggggtactagtcactgccaatgtgtgtatgggacttgctggaaaacggggatgcttgcccctctccaggactattgagcccagagagagctgtcctctcattgggtgaactgattgaggaagggtctattgtctttttaaatggcacaattttaagggtttgagggtacagtcccttaacctgccacgggagggggcccccaaactttcttccccccacacttctggttttctgtgtggagggggagcagggatatctaagctgtggtgtgaaagggtaggagagatgctggaggtgggggtgctgtgttctagaccccccatattatcccagtgtcccctgcccccctcttcccccaccccatgcccccaattctgtggcgcatccagattgtgaaaatgtacaataaatgtgtaatgagtaaccaagtgttgtctaaga

SEQ ID NO: 87213 - DNA, 2181 bp, Homo sapiens
  misc_feature (1849)..(1849): n is a, c, g, or t
agcggatctttccgtcccgggcagccagcgccagtcggagccagcgcgagccgccgccgccatcactgccgctgccaagtcctccacccgctgcccccgccatgtctgctaccgctgccacggccccccctgctgccccggctggggagggtggtccccctgcaccccctccaaacctcaccagtaacaggagactgcagcagacccaggcccaggtggatgaggtggtggacatcatgagggtgaacgtggacaaggtcctggagcgagaccagaagctgtcggagctggacgaccgtgcagatgcactccaggcgggggcctcccagtttgaaacaagcgcagccaagctcaagcgcaaatactggtggaaaaacctcaagatgatgatcatcttgggagtgatttgcgccatcatcctcatcatcatcatagtttacttcagcacttaaatccccgaggagtctgccctgcctagagaagggcctctcccccaaccctcagccgttcctccacctctcagccatatctttcagccccccctcccctggatccgtgtgtgtgtgtgtccgtgtgtgtgtccccctgtaaatagccagctgttatttatacatatataatattatatatatttggtctgtttgtagttttattactagatgatttttccggttgtccttaacaccccttcctgaggttcccttcacccctctctcttgccttccttccctttccctttcttcctgactagccccaagtcccttcatttgcatctgctatgcaatagtccctctcctttccttcttcttccctcagatttagctgatccttcctcccaccctggccttcctttcctctttcctcctcactctccccgtcatgctccctctgccccgccctcaaaaaaaaaaaaaaaaaaaaaaaaaaaaaaaaacaacagcacctgtccaggcttccttaggtacatcttctttgtatccattgggaggctctgagactggccccacttggtcctaagaatcccaaggtctttgggagcgtccagcatgttaattagcgtatcattacatactgctatccctttccatttctttttgttccatcactcttctctcaacctgtgtttctttttttactgaggagttagtccccattagttcttgtatcacattttcatttgcacgacattactcgcaggtggtggggagcctgggcttttggggaaccaggctgctctggtccccagcattgcctcctcctagcccctctagtccagtttgcctcccttaccctcattttccaaacctcttgtaccctcctctccctcccccagctggtatgtaagtgtcttgaagttcagtatgttatgatggaccaataattctgccacttcgggtttctccctacattcctgctccccagttttcatgtggggtactcaactgacattcccatggggtttccctcccatctgcctgatccacctcctcctcccaccaggagagttgggggttggccacaattgatctcttgtgagaggggtggctaccagtgtgtgtgtgggggtcatcactgccttggggaggagtggggcagggcagagaatccccccaattcctgcctgaaatctctggcctcacccctgctgggggttggactgaaaaccctcctccccaatttggggggtgttgccccatcactgcccagctcctctgactgccccccctgaatttagggtgggggtactagtcactgccaatgtgtgtatgggacttgctggaaaacggggatgcttgcccctctccaggactattgagcccagagagagctgtcctcccagagggggggnaagagaggggggggggggggaggggtgggtttgaggggggagaagagggggggggggggaagagtcccgacctgccacgggagggggcccccaaactttcttccccccacacttctggttttctgtgtggagggggagcagggatatctaagctgtggtgtgaaagggtaggagagatgctggaggtgggggtgctgtgttctagaccccccatattatcccagtgtcccctgcccccctcttcccccaccccatgcccccaattctgtggcgcatccagattgtgaaaatgtacaataaatgtgtaatgagtaaccaagtgttgtctaaga

SEQ ID NO: 87214 - DNA, 1218 bp, Homo sapiens
agcggatctttccgtcccgggcagccagcgccagtcggagccagcgcgagccgccgccgccatcactgccgctgccaagtcctccacccgctgcccccgccatgtctgctaccgctgccacggccccccctgctgccccggctggggagggtggtccccctgcaccccctccaaacctcaccagtaacaggagactgcagcagacccaggcccaggtggatgaggtggtggacatcatgagggtgaacgtggacaaggtcctggagcgagaccagaagctgtcggagctggacgaccgtgcagatgcactccaggcgggggcctcccagtttgaaacaagcgcagccaagctcaagcgcaaatactggtggaaaaacctcaagatgatgatcatcttgggagtgatttgcgccatcatcctcatcatcatcatagtttacttcagcacttaaatccccgaggagtctgccctgcctagagaagggcctctcccccaaccctcagccgttcctccacctctcagccatatctttcagccccccctcccctggatccgtgtgtgtgtgtgtccgtgtgtgtgtccccctgtaaatagccagctgttatttatacatatataatattatatatatttggtctgtttgtagttttattactagatgatttttccggttgtccttaacaccccttcctgaggttcccttcacccctctctcttgccttccttccctttccctttcttcctgactagccccaagtcccttcatttgcatctgctatgcaatagtccctctcctttccttcttcttccctcagatttagctgatccttcctcccaccctggccttcctttcctctttcctcctcactctccccgtcatgctccctctgccccgccctcaaaaaaaaaaaaaaaaaaaaaaaaaaaaaaaaacaacagcacctgtccaggcttccttaggtacatcttctttgtatccattgggaggctctgagactggccccacttggtcctaagaatcccaaggtctttgggagcgtccagcatgttaattagcgtatcattacatactgctatccctttccatttctttttgttccatcactcttctctcaacctgtgtttctttttttactgaggagttagtccccattagttcttgtatcacattttcatttgcacgacatatagctatggtggatccactagagtcggcc

SEQ ID NO: 87215 - DNA, 1462 bp, Homo sapiens
agcggatctttccgtcccgggcagccagcgccagtcggagccagcgcgagccgccgccgccatcactgccgctgccaagtcctccacccgctgcccccgccatgtgagtcggccgcccgccaccctcaccgcgcttccctgcgccggccgccgcccttggcaaccggccgtcgggagtgcccggggtctcttctgcgttccccgcgccccggggccaggcccaagccggtgactgcgcgcgggcggccgaggagccccgcgtcccgggctggccggctcgggcgatggccgcgggaaggagcggacccagtgtcctcctgcccctccccgcccctgtcaccgcggcgcctgtcttttcgggtcgacccggatcgcatctgtgaggtcgccctcagttgacaggcggggaaactgaggccgggggggctcgctcaaggtcacgcagctcatcggcggcagggctggaccgagaccagggcttacatcgggtggccttcctcccgaaaaggaggactggagggacgaggatggacaggtctgctaccgctgccacggccccccctgctgccccggctggggagggtggtccccctgcaccccctccaaacctcaccagtaacaggagactgcagcagacccaggcccaggtggatgaggtggtggacatcatgagggtgaacgtggacaaggtcctggagcgagaccagaagctgtcggagctggacgaccgtgcagatgcactccaggcgggggcctcccagtttgaaacaagcgcagccaagctcaagcgcaaatactggtggaaaaacctcaagtttacttcagcacttaaatccccgaggagtctgccctgcctagagaagggcctctcccccaaccctcagccgttcctccacctctcagccatatctttcagccccccctcccctggatccgtgtgtgtgtgtgtccgtgtgtgtgtccccctgtaaatagccagctgttatttatacatatataatattatatatatttggtctgtttgtagttttattactagatgatttttccggttgtccttaacaccccttcctgaggttcccttcacccctctctcttgccttccttccctttccctttcttcctgactagccccaagtcccttcatttgcatctgctatgcaatagtccctctcctttccttcttcttccctcagatttagctgatccttcctcccaccctggccttcctttcctctttcctcctcactctccccgtcatgctccctctgccccgccctcaaaaaaaaaaaaaaaaaaaaaaaaaatgacactactctccccttttaatcaaatataaccctggggggggcccggtacccaatattgcctatttggggcccgattacacattcatggcccgcctttacaccgtcggatcgggaacaccttggttcccaccttaatcgtttgcgccaatcct

SEQ ID NO: 87216 - DNA, 401 bp, Homo sapiens
caaggtcacgcagctcatcggcggcagggctggaccgagaccagggcttacatcgggtggccttcctcccgaaaaggaggactggagggacgaggatggacaggtggatgggcggagccctggctgcggggccgggaggctgcaggccctgggtcttaatccgtccctgctcctcaggtctgctaccgctgccacggccccccctgctgccccggctggggagggtggtccccctgcaccccctccaaacctcaccagtaacaggagactgcagcagacccaggcccaggtggatgaggtgagtgtggggggagtcaaaagcagtaggagggaccctgggggttggcgtataggtgtaggggcccatgttggtttgggagtgatgacagttcacgcctgtg

SEQ ID NO: 87217 - DNA, 348 bp, Homo sapiens
ctaaggcttaagcaagacttttgggggctaaccatggactctaaaactacttatattctttatttagagaaaaatgttccaaatgcctccaaactgattttttagcacagtcttaaaatacaaatgtctttgtaaactggcaggtggagggttgggagagggactgcatatttcctagttcctaatacacaacaatttgcacagtaagtcagtgcttgttaaatgaattgatgaccttgcatgacttggagattagcataaatataatttctgtgtacagattgaatattcctaatcaaaaaatcccaattccacaatgcttcaaaatctgaaactttctgagcaccg

SEQ ID NO: 87218 - DNA, 407 bp, Homo sapiens
gctaaggcaaaaggatcacttgagcctgggggttcaagactagcctggtcaacatagtgagatcctgtctctataaaaataaatttaaaagaaaataaaaataaatctcatggcctcttcttagatcttttaattttacatcccaaatcctcagttccgctctgctctttgtttttcttcagagggagaagagagggatctcttgggtctcctctgattatttaattggcctttggtcaaggatcataacaggttagtggaaaggagacggaaagtggaaggctgtggccctcctttaagaagcatggtgctggtcaggcgcagtggctcatgcctgaaatcccagcactttggaaggccgatgcaggcagatcacttgagctcagaagttcaagaccagcctgggc

SEQ ID NO: 87219 - DNA, 373 bp, Homo sapiens
gcgttagattctcagcctctctgggcggctatctccaaagaggcaggtgtggctcttcccccggggtatcccgacccttctgtaatgatcatcttggctaaagactagtcagtgaatactcagaaagaagataacatcaagaaaatttaattattgaatgctggcaaagttccccttctttccttaagcaaaggatcttttttccctatctcctttagcagggttgtcagagctcatgagggagaggacgggcaggctatgaatggcaagcatgcagtaaatcccagtctggactcagtgacaaaggagtaataaaaagattataggtaatttttcctcctgaattatagagagggtgtggattcagcctggc

SEQ ID NO: 87220 - DNA, 261 bp, Homo sapiens
ggtttttttctgtatgtgtggttgaaatcttcgaaagtactgtttgtcacatacctgaggacctgtgtatttcttctgggtagaaaaatgtgtggttttgttgttgttgttcttgtttttgagatagggacttgctcctttgcccaggctggagtgcagtggcatgatcatagctcggtgcagccttggcctccatgacttaagtgatcatctcacctcagcctcccaagtagctgggactacaggtgcaagccaccatac

SEQ ID NO: 87221 - DNA, 455 bp, Homo sapiens
ttttttttggagacagaatcttgctctgtcacccaggctggagtgcaggggcacagtctcggctcactgcaacctccgcctcctgggttcaagcaattctcccacctcggcctcccgagtagctgggattacaggcgtgcaccaccacacctggctaatttttgtattttcagtatagatggggtttcaccatgttggccaggctggtctcaaactcctggcctcaattgatctgcctgccctgacctcccaaaaaggtgggattacaggtatgagccaccacacccagtccctaaaaacatttttttaaaaaaactttccagccatccttctctcagcatccagtctatccatcacatgcatccattcctggagacaccatcagagcattcagctcgacgtggacactcagcacccaatttgcctgggtcacagaggaggtacctgctgtggta

SEQ ID NO: 87222 - DNA, 766 bp, Homo sapiens
ggttaagggaaggcggacgcctgatgggttaatgagcaaactgaagtgttttccatgatcttttttgagtcgcaattgaagtaccacctcccgagggtgattgcttccccatgcggggtagaacctttgctgtcctgttcaccactctacctccagcacagaatttggcttatgcctactcaatgtgaagatgatgaggatgaaaacctttgtgatgatccacttccacttaatgaatggtggcaaagcaaagctatattcaagaccacatgcaaagctactccctgagcaaagagtcacagataaaacgggggcaccagtagaatggccaggacaaacgcagtgcagcacagcagactcagaccctggcagccatgcctgcgcaggcagtgatgagagtgacatgtactgttgtggacatgcacaaaagtagagtgtgcaccggcacagacatgaagctgcggctccctgccagtcccgagacccacctggacatgctccgccacctctaccagggctagcaggtggtgcagggaaacctggaactcacctacctgcccaccaatgccagcctgtccttcctgcaggatatccaggaggtgcagggctacgtgctcatcgctcacaaccaagtgaggcaggtcccactgcagaggctgcggattgtcgcgaggcacccagctctttgaggacaactatgccctgagcgtgctacacaatggagacccgctgaaccataccacacctgtcacaggggcctccacag

SEQ ID NO: 87223 - DNA, 322 bp, Homo sapiens
tttaaaataaagcctttcagggatttcaatagacacatttctttagctgaaatctattctctcagaaacttacccaaacttcttaataatgttcaaattctaagaaagatatcatggctacacagcaccaggaagagcacattatttctcttcacaattcccttgcatagcatcatggcttcctaagggcttttaagtttattgcttcaactgattctcataaaatctctgagatgctatctggaaagtattattatccccagtttgcagataagacaactgaggtctagacttgctaaaaatcacacaacaagtaagtggc

SEQ ID NO: 87224 - DNA, 454 bp, Homo sapiens
tgttctcctatctcttacctggcctggcccgtatgctggtggtttagacctggctgggactttcaggttgtttccattaaaagtcatcttattaaatgaacatgccaatctccgaggggcactagcagaggggtggaggaatggatgccattctgggaccaggagcagctgcactgttgccattcctgaagcctggtcaccaccagagcctccttaccttgctctcctcaagcctgtttgggaatcaccagtgtgcagaagaggaagctagggaattggggcaatagtggaggtggtagtaagaaggtctgctctggaatccagtggcaggtccagaagaatccacatgcaggaagattagggtactagagttcacatggggacggatgacacaaatctgagacagaattctccctagaagttccaatcactgaataaatattgtacctactta

SEQ ID NO: 87225 - DNA, 499 bp, Homo sapiens
ttctgaggctgtttctcacacattgtagggcctgcccagagaagctgggcataccgcttcagaggtatgctgaggccgaaggaacacaggccctaggcctgatccctgagcctccaggaccacagccatctcttccttctcaggtcctctcctgagcaccttccctgcctcagatccccccatggcctcctgctgtcccactgtcggatcaggttctcacccctgcagacctgacctcagcacaggatccctaaccattcagccgagaagcaactaaccagagagaggtttgcttgttatctgttccaggaaagtaactggggcaaagacaatgtgatgattctctagttcagggcacagaatgtttgctggtgactcagagagggcatggagggcacggagggccggcaaacactgtaagtcattttgtctgtgtaagtttaggggaacccatgctcagcctcactctgaagcatgtggtatcacccatatgatctga

SEQ ID NO: 87226 - DNA, 90 bp, Homo sapiens
gatcattgtggcgtccacaatgtatatataaaacaagttgtacacattaccatgtataaatttgtgtttgtcgattatatgtcaagaaag

SEQ ID NO: 87227 - DNA, 460 bp, Homo sapiens
aactataaaaacagaaatcataactttgaattttcaaaattaaaaactcttgtcctttgaaagcacttaagaaggtgagaaggaaagactcagaaggggaagaaatagttgcaataaatttctgacaaaagatttgtttcctgaaaatgtaaagaaatttataacccaattgtaaaaggacaactcaataaaaatgacaatatacttcaatagagataattcataaaataagatatgaaatggtcaatggggacaagaaaggatttcaacataagccaccagggaaatacaaatcaaaaccataatgagacacttttacacactcattaaaattaatgaaattaaaatgatcaacagtaccaagtgttggaagatgttgagcaactggaactcatgcgtggcaggtagggatgtaaaatggcacaaagactttgtaaaatactttggcaaattcttaaaa

SEQ ID NO: 87228 - DNA, 416 bp, Homo sapiens
atcctcccccttgtcactgcttctggatccctgtgagtaagggtgtcctcagctcagccctggagcaccttaggctctttgagtgttggaagaggatcaggtctgggtacataacttcccagctggagggtcagatccttgctatgctaagcagtgatgacaggctggtgacaacagaccaaactaagactgtctttgtatgttggcaatggcccccccagggggaccttgcaaatatgcagattttaacatccctcatttcagatctgtcagggtgggacaagttcttctggcctgtgagctcctgccatacacagtcctggagcctgctggctctgagttgctcatttgcatttggccacagggttctggtcaggggaactcccctctcccccacccttcctccatgacttggc

SEQ ID NO: 87229 - DNA, 373 bp, Homo sapiens
caacacaaacacatacacaaggatgcaaatatgtaaatgagcctataatttttcaagtggctctgcacgcaggtaaacatgctctgccctcaaccctcctcttcctggccccctaaggcgatctgactagaaggcatattcacaccccacaaaatcagaaacaagggggactacagtgcactttttcctttttgctctcaattactgtgagaccagagttgcaaaacaacttgtggcttttcacccatttccctatctaatctggactgttacaggaagatatgaccttacctttccttagctacacaccactaatctaagataaaataagtattcacctataataggccctatagttctctctcaaccccaa

SEQ ID NO: 87230 - DNA, 447 bp, Homo sapiens
ttcacacaatctgttgctttaagtttatataaaagatcaagttcctttcaataaaagaacaacaacaataaaaagattatgaccttacaaaaagcccttgaaatgtctaaaatagattaaataaaatatagaccagcacctcaacagggaataagaaacagctagcatttcacagacttacacaaagccaatgaacacatgaacatgtactcattagcatgaataatcaaataagtagaaatttaaaatgaggttttctttttcacctctcagattggtaggtaaagagactggtattatggtttggtgaggctgtagggaaataaacagagtaggaatggaattaagcacaaccattttgttttttaaattcattttattatttttatatattttgagacaagatctcactctgtctcccaggctggagtgcagtggcgtgatctc

SEQ ID NO: 87231 - DNA, 690 bp, Homo sapiens
gtaggcagtctgatggtaggatgcgtcataagtcctagagacacacgcatgtagaagctcaagaaattgaagggccaatggcgcccactaggtttatttatttgctcatctttatcacctaatggtagtttgttttctttggtagagtatatggcagtcccacatcgatgataattggtgctcccttcatccaactggatcactttgagattcagttttacatcattttagcattttgtttgtatatcagttgtgatgagccactgataaaattttgttctaaaatgaaacatattactttgttagtacattttttagtgtcacactgacttttaaaatttgaatgatatatagactttgtttttttaatgcaatatgaatatttgctcatgttttctaaattccttataaaataaaattaattcgaattcaatctgcactttcttaaaattatctttcctcaatgctttttctttcttctgtttctctaattttgtttatgttggtgagagaagtattatactctctatttttatttaaaaaattctagcaacttattacccaaaatatttataattctgttccaaaaatgtcttcctgaagaaggctcttaagtcttttatgttcattgtatttagcataagagaaacataggtgaaataataggttcatttaccagttggggttttg

SEQ ID NO: 87232 - DNA, 1111 bp, Homo sapiens
tgtttatcgatgccccctcctgtatacaggcggttaaagtatacaggaggatgtgcatcggttatatgcatatagcaagccatttcatataagaggcttgaacatccatggatttggtatagaggaggggtttaaggggtgtcctgcaatcagtccccctctcataccaaaggatgactgtatatttcttaaatgaagagactttcattctttaaatattattgacttacagtttaaaaataaataaataaaagcatactatagttgtaaaaacaaataattttaatagtatattcagtggctgaagtgatagggagtattaatcattatttcttcagtataaagttattcttcctgaaaaagtaagatatacctgggaaatattcttggatccttcacacatccacttaatttcttgaaggaagaaaacagacaaaagacatgtaacaacagaaacaaataaaccacttactgtaaaatttcagaaattgtgggctcattccctccctctagtttatttatttgctcatctttatcacctaatggtagtttgttttctttggtagagtatatggcagtcccacatcgatgataattggtgctcccttcatccaactggatcactttgagattcagttttacatcattttagcattttgtttgtatatcagttgtgatgagccactgataaaattttgttctaaaatgaaacatattactttgttagtacattttttagtgtcacactgacttttaaaatttgaatgatatatagactttgtttttttaatgcaatatgaatatttgctcatgttttctaaattccttataaaataaaattaattcgaattcaatctgcactttcttaaaattatctttcctcaatgctttttctttcttctgtttctctaattttgtttatgttggtgagagaagtattatactctctatttttatttaaaaaattctagcaacttattacccaaaatatttataattctgttccaaaaatgtcttcctgaagaaggctcttaagtcttttatgttcattgtatttagcataagagaaacataggtgaaataataggttcatttaccagttggggttttg

SEQ ID NO: 87233 - DNA, 668 bp, Homo sapiens
  misc_feature (668)..(668): n is a, c, g, or t
acctgcggaagccctttggacctctaaaggaagatgaatctggagtaaaagtgtttcaagaatcaggaaggctgcctcctgacttgggcactgtgttagtcccttgttgcactgctctgaagaaatacctgaaactgggtaatttactaaaaaaaaaaaaaaaaaaaaaaaaaaaaaaaaaaaaaaaaaaaaaaaaggggggggctaaaattcccccggggggccccacgactagcggcgccgcaccccggggtttttgtggacacaagaggggccccccacagtaggaggagccgtacttttataataacgaccgaggcaacggagcccgacgctttataacaaaagccggggttatgggggaaaaacgggcaacacggggactccttgggggaaggagaacccctataatcttgcggggggagcgatgagaaatattatgtggggagaacagctatcacctatagcagagagagtttataaagcgcctgtcgagggaagaattttattaaaactattttacagaggttgtattatggggtggtagaaacgccagagctggggtatattggctgtagtaggctgtaagaaaatgtttggtctctaagagggattgttttttttaagaaaatatttttaccagggggctggtgtaaataaggggaggn

SEQ ID NO: 87234 - DNA, 2351 bp, Homo sapiens
accatatgggaattgttaaaagtgcccattcccaatatttatattgggaaaaattatttggatactttataattttaaccggcatttttaataatgacacttgcatttattgtattgtaataaatttcacttttaactttaaaagtttaactttaaaatttttttgtgatgttgccttgcctgaaaagataacaaaaatgagagaatttcttgatgttttaaaatgggcagttttgagcaataatctgtcctaacagaacagtagcaataagttttaggataccatcttgaatgtctagttggtgtgcaatagcttttctttctaagatggcaataatgattcatttctactacattttgcaaaagtgtttttgttgcttatacacattttcaataaccaaggtagccttcatatgtagccttaaagcattacctcttgattgtatctttagattgatataaagtacttgcatatagagtatttgaagtgatagattattagatttgctctatgtctgaaaagagagctattctgcagtgcctaaatatcatttaaacagtaaatattaataggaaatattgctatatctgaatatataatacaaaagtttgatcatggtgacacaaatgttggacatttttttccttataaaaggctctttttttatatattgtacaatatatttggagattcagagcatagtgactatagtcgaaaactgagattgcacttccaaaattggccacaagtaaataatcttatgaagggattctttatcatgtttcaaacaagtgggttacaagcagactttgagacacttttccacagaaacaatactatgaattggtgattgagttcccaggccaagcctccctcaacaggttcaactctaatatacctaacctgtgatactgaaggtgcctgcctgagttttgggtctctgagacagggtagtgtgagtagtttggaggaaggacagtgcaactttccaccccttttcctaagaacaaggtctttctccttttaatttttccactcattttcacctcctaatgcccttgagatccaggtacactcctgggagttttgttcacctctcccaactgagaaccttcccactgggctccatcctccctcctgaggttcttcatattccagagtcacccacccttctcctcccattagtcagttctctaagtacagctgatgtcatgtggtgctgagaagaaagcagatcacacttcatcacagaaagaatgccttgtgattatcttctccacatctgaaattccttttgacacctgcattgggccgactgccattcccatgactgctgcacctgcgtttttagagaatgcctcataacccactgattctcattcacagagaatgggagaacggaatgaagaaagattccagcagcttatagaaggatagcaatattttgggacagggaaaatcctgtcatacctcatctcttcctcaggaggagttctgagctggtcctgcttttcatagttgtttcttttcttccacttaagaactcatagatttttcttactgtcctaaggaagtccttacctctgaggtatctcctcaatgaatactgttttcaaggctgaaatagttcattatgttaataaccttctttatgttctcagggaaatgcttaggtggtgtcacaaaatgtgccttttcttttcttttttttttttttttttgaggcagagtctcgctctgttgcccaggctggagtgcagtggtgcgatcttggctcactgcaagctccgcctcccgggttcacgccattctcctgcctcagcctcccaaggagctgggactacaggctcccgccaccacgcctggctaatttttttgtatttttagtaaagacgggtttcatcgtgttagccaggatggtctcgatctcctgacctcatgatccgcccgcctctgcctcccaaagtgctgggattacaggcctgagccactgtgcccagccaaaatgtgcctttgcaaagtttgcgaaatcagattttgtatcccaatagaaccaaaatatttatgaggatgctagcattttccaagcatagtaattagttcacaactgagaaatattatgtctgtagtagataaatattagttgtgcattttaatttaattctcctttttccattttgtctcatgaagtaccttattgcaaaaatcccactgagtaatagctcataaattataatctttcaaatagccatgctaccagcgtacaacagtgatacatgtaaccccaaatgtgatgtgagaggacgattactttgtaaataaaacttgttattgacattttaaaaaaaac

SEQ ID NO: 87235 - DNA, 479 bp, Homo sapiens
accaacaggttttgttcatcgatgtcaggattcaacaaggagggagagttcttagatgtctcccaggtgattggcttgaacaactagatagaagatgatgggattacaggcctgagccactgtgcccagccaaaatgtgcctttgcaaagtttgcgaaatcagattttgtatcccaatagaaccaaaatatttatgaggatgctagcattttccaagcatagtaattagttcacaactgagaaatattatgtctgtagtagataaatattagttgtgcattttaatttaattctcctttttccattttgtctcatgaagtaccttattgcaaaaatcccactgagtaatagctcataaattataatctttcaaatagccatgctaccagcgtacaacagtgatacatgtaaccccaaatgtgatgtgagaggacgattactttgtaaataaaacttgttattgacattttaaaaaaaac

SEQ ID NO: 87236 - DNA, 1220 bp, Homo sapiens
gaaagttgcactgtccttcctccaaactactcacccacccttctcctcccattagtcagttctctaagtacagctgatgtcatgtggtgctgagaagaaagcagatcacacttcatcacagaaagaatgccttgtgattatcttctccacatctgaaattccttttgacacctgcattgggccgactgccattcccatgactgctgcacctgcgtttttagagaatgcctcataacccactgattctcattcacagagaatgggagaacggaatgaagaaagattccagcagcttatagaaggatagcaatattttgggacagggaaaatcctgtcatacctcatctcttcctcaggaggagttctgagctggtcctgcttttcatagttgtttcttttcttccacttaagaactcatagatttttcttactgtcctaaggaagtccttacctctgaggtatctcctcaatgaatactgttttcaaggctgaaatagttcattatgttaataaccttctttatgttctcagggaaatgcttaggtggtgtcacaaaatgtgccttttcttttcttttttttttttttttttgaggcagagtctcgctctgttgcccaggctggagtgcagtggtgcgatcttggctcactgcaagctccgcctcccgggttcacgccattctcctgcctcagcctcccaaggagctgggactacaggctcccgccaccacgcctggctaatttttttgtatttttagtaaagacgggtttcatcgtgttagccaggatggtctcgatctcctgacctcatgatccgcccgcctctgcctcccaaagtgctgggattacaggcctgagccactgtgcccagccaaaatgtgcctttgcaaagtttgcgaaatcagattttgtatcccaatagaaccaaaatatttatgaggatgctagcattttccaagcatagtaattagttcacaactgagaaatattatgtctgtagtagataaatattagttgtgcattttaatttaattctcctttttccattttgtctcatgaagtaccttattgcaaaaatcccactgagtaatagctcataaattataatctttcaaatagccatgctaccagcgtacaacagtgatacatgtaaccccaaatgtgatgtgagaggacgattactttgtaaataaaacttgttattgacattttaaaaaaaac

SEQ ID NO: 87237 - DNA, 1870 bp, Homo sapiens
accatatgggaattgttaaaagtgcccattcccaatatttatattgggaaaaattatttggatactttataattttaaccggcatttttaataatgacacttgcatttattgtattgtaataaatttcacttttaactttaaaagtttaactttaaaatttttttgtgatgttgccttgcctgaaaagataacaaaaatgagagaatttcttgatgttttaaaatgggcagttttgagcaataatctgtcctaacagaacagtagcaataagttttaggataccatcttgaatgtctagttggtgtgcaatagcttttctttctaagatggcaataatgattcatttctactacattttgcaaaagtgtttttgttgcttatacacattttcaataaccaaggtagccttcatatgtagccttaaagcattacctcttgattgtatctttagattgatataaagtacttgcatatagagtatttgaagtgatagattattagatttgctctatgtctgaaaagagagctattctgcagtgcctaaatatcatttaaacagtaaatattaataggaaatattgctatatctgaatatataatacaaaagtttgatcatggtgacacaaatgttggacatttttttccttataaaaggctctttttttatatattgtacaatatatttggagattcagagcatagtgactatagtcgaaaactgagattgcacttccaaaattggccacaagtaaataatcttatgaagggattctttatcatgtttcaaacaagtgggttacaagcagactttgagacacttttccacagaaacaatactatgaattggtgattgagttcccaggccaagcctccctcaacaggttcaactctaatatacctaacctgtgatactgaaggtgcctgcctgagttttgggtctctgagacagggtagtgtgagtagtttggaggaaggacagtgcaactttccaccccttttcctaagaacaaggtctttctccttttaatttttccactcattttcacctcctaatgcccttgagatccaggtacactcctgggagttttgttcacctctcccaactgagaaccttcccactgggctccatcctccctcctgaggttcttcatattccagagtcacccacccttctcctcccattagtcagttctctaagtacagctgatgtcatgtggtgctgagaagaaagcagatcacacttcatcacagaaagaatgccttgtgattatcttctccacatctgaaattccttttgacacctgcattgggccgactgccattcccatgactgctgcacctgcgtttttagagaatgcctcataacccactgattctcattcacagagaatgggagaacggaatgaagaaagattccagcagcttatagaaggatagcaatattttgggacagggaaaatcctgtcatacctcatctcttcctcaggaggagttctgagctggtcctgcttttcatagttgtttcttttcttccacttaagaactcatagatttttcttactgtcctaaggaagtccttacctctgaggtatctcctcaatgaatactgttttcaaggctgaaatagttcattatgttaataaccttctttatgttctcagggaaatgcttaggtggtgtcacaaaatgtgcggaattcagcacattaagtgcaatttttttttttaaagaccgaaagcgtaggcttgcttatattacattttcaagtcaccatgatgcatttctccagcataagttggggctttaacaacgggtctccatcaaaggttttccatcggctcgccaatgtgggatgtgtcctattgactc

SEQ ID NO: 87238 - DNA, 811 bp, Homo sapiens
cagggctatatgaggataaatagcatgaaggggaaggcaaatacagaagcagggacacaaattcagagtcaatcccaacaatctaggcaagaaatgatggtagcttgaaagcagtgaagtggagagaaagcatctttctattatatttttggggtagagttgacaggattagtggaagttgacctctatgaaaacgcagaagattgtatgcagagaaagttgggtgggagagggctgtatcaggagcacagagtggaattgggagggttgaggtacctactagatatcaaattgacggaggtgaacgaaaatagatgatcaagagtttggatctcataaggagaggtccaacccggagatataaatttcagagtcatcagtgtatcaatggtatttaaagccatgaggctggatgagatcactgagggtctgacctcctagggcactacaacatttaaaggataaatttttaataaaattgacttcctgtctctcttcaagtctctctgcagtcctaaaacttgctttgagacatgcttaatacaaacctatgtttatatttccatagcaatagactctgatgtcaactaaaactctgtgttatctttttacatgctgccaattaaaagtgatggcttgagagataagactcgtgttcacccaagcatctaagcttaatcctgccaaatcaggaaatgagtgcctaattttcaaaaggtttaattggatagtggaataagtgaatttagaagcttttagatccaaagcggatgaagcattggacctagattacttaaaaaaaaaaagttat

SEQ ID NO: 87239 - DNA, 2573 bp, Homo sapiens
attaataaacctctaagccgaggagaaaactctggctggggcagtgcgctgagcgccggaggagcgtaggcagggcagcgctggcgccagtggcgacaggagccgcgcgaccggcaaaaatacacgggaggccgtcgccgaaaagagtccgcggtcctctctcgtaaacacactctcctccaccggcgcctccccctccgctctgcgcgccgcccggctgggcgcccgaggccgctccgactgctatgtgaccgcgaggctgcgggaggaaggggacagggaagaagaggctctcccgcgggagcccttgaggaccaagtttgcggccacttctgcaggcgtcccttcttagctctcgcctgcccctttctgcagcctaggcggcccaggttctcttctcttcctcgcgcgcccagccgcctcggttcccggcgaccatggtgacgatggaggagctgcgggagatggactgcagtgtgctcaaaaggctgatgaaccgggacgagaatggcggcggcgcgggcggcagcggcagccacggcaccctggggctgccgagcggcggcaagtgcctgctgctggactgcagaccgttcctggcgcacagcgcgggctacatcctaggttcggtcaacgtgcgctgtaacaccatcgtgcggcggcgggctaagggctccgtgagcctggagcagatcctgcccgccgaggaggaggtacgcgcccgcttgcgctccggcctctactcggcggtcatcgtctacgacgagcgcagcccgcgcgccgagagcctccgcgaggacagcaccgtgtcgctggtggtgcaggcgctgcgccgcaacgccgagcgcaccgacatctgcctgctcaaaggcggctatgagaggttttcctccgagtacccagaattctgttctaaaaccaaggccctggcagccatcccacccccggttccccccagcgccacagagcccttggacctgggctgcagctcctgtgggaccccactacacgaccaggggggtcctgtggagatccttcccttcctctacctcggcagtgcctaccatgctgcccggagagacatgctggacgccctgggcatcacggctctgttgaatgtctcctcggactgcccaaaccactttgaaggacactatcagtacaagtgcatcccagtggaagataaccacaaggccgacatcagctcctggttcatggaagccatagagtacatcgatgccgtgaaggactgccgtgggcgcgtgctggtgcactgccaggcgggcatctcgcggtcggccaccatctgcctggcctacctgatgatgaagaaacgggtgaggctggaggaggccttcgagttcgttaagcagcgccgcagcatcatctcgcccaacttcagcttcatggggcagctgctgcagttcgagtcccaggtgctggccacgtcctgtgctgcggaggctgctagcccctcgggacccctgcgggagcggggcaagacccccgccacccccacctcgcagttcgtcttcagctttccggtctccgtgggcgtgcactcggcccccagcagcctgccctacctgcacagccccatcaccacctctcccagctgttagagccgccctgggggccccagaaccagagctggctcccagcaagggtaggacgggccgcatgcgggcagaaagttgggactgagcagctgggagcaggcgaccgagctccttccccatcatttctccttggccaacgacgaggccagccagaatggcaataaggactccgaatacataataaaagcaaacagaacactccaacttagagcaataacggctgccgcagcagccagggaagaccttggtttggtttatgtgtcagtttcacttttccgatagaaatttcttacctcatttttttaagcagtaaggcttgaagtgatgaaacccacagatcctagcaaatgtgcccaaccagctttactaaagggggaggaagggagggcaaagggatgagaagacaagtttcccagaagtgcctggttctgtgtacttgtccctttgttgtcgttgttgtagttaaaggaatttcattttttaaaagaaatcttcgaaggtgtggttttcatttctcagtcaccaacagatgaataattatgcttaataataaagtatttattaagactttcttcagagtatgaaagtacaaaaagtctagttacagtggatttagaatatatttatgttgatgtcaaacagctgagcaccgtagcatgcagatgtcaaggcagttaggaagtaaatggtgtcttgtagatatgtgcaaggtagcatgatgagcaacttgagtttgttgccactgagaagcaggcgggttgggtgggaggaggaagaaagggaagaattaggtttgaattgctttttaaaaaaaaaagaaaagaaaaagacagcatctcactatgttgccaaggctcatcttgagaagcaggcgggttgggtgggaggaggaagaaagggaagaattaggtttgaattgcttttttaaaaaaaaagaaaagaaaaaaaaagaca

SEQ ID NO: 87240 - DNA, 1068 bp, Homo sapiens
  misc_feature (1045)..(1045): n is a, c, g, or t
attaataaacctctaagccgaggagaaaactctggctggggcagtgcgctgagcgccggaggagcgtaggcagggcagcgctggcgccagtggcgacaggagccgcgcgaccggcaaaaatacacgggaggccgtcgccgaaaagagtccgcggtcctctctcgtaaacacactctcctccaccggcgcctccccctccgctctgcgcgccgcccggctgggcgcccgaggccgctccgactgctatgtgaccgcgaggctgcgggaggaaggggacagggaagaagaggctctcccgcgggagcccttgaggaccaagtttgcggccacttctgcaggcgtcccttcttagctctcgcctgcccctttctgcagcctaggcggcccaggttctcttctcttcctcgcgcgcccagccgcctcggttcccggcgaccatggtgacgatggaggagctgcgggagatggactgcagtgtgctcaaaaggctgatgaaccgggacgagaatggcggcggcgcgggcggcagcggcagccacggcaccctggggctgccgagcggcggcaagtgcctgctgctggactgcagaccgttcctggcgcacagcgcgggctacatcctaggttcggtcaacgtgcgctgtaacaccatcgtgcggcggcgggctaagggctccgtgagcctggagcagatcctgcccgccgaggaggaggtacgcgcccgcttgcgctccggcctctactcggcggtcatcgtctacgacgagcgcagcccgcgcgccgagagcctccgcgaggacagcaccgtgtcgctggtggtgcaggcgctgcgccgcaacgccgagcgcaccgacatctgcctgctcaaaggcggctatgagaggttttcctccgagtacccagaattctgttctaaaaccaaggccctggcagccatcccacccccggttccccccagcgccacagagcccttggacctgggctgcagctcctgtgggaccccactacacgaccagggggtctgtggaatcttccttctctactngcatgctacatgtgccggaaaaa

SEQ ID NO: 87241 - DNA, 2505 bp, Homo sapiens
attaataaacctctaagccgaggagaaaactctggctggggcagtgcgctgagcgccggaggagcgtaggcagggcagcgctggcgccagtggcgacaggagccgcgcgaccggcaaaaatacacgggaggccgtcgccgaaaagagtccgcggtcctctctcgtaaacacactctcctccaccggcgcctccccctccgctctgcgcgccgcccggctgggcgcccgaggccgctccgactgctatgtgaccgcgaggctgcgggaggaaggggacagggaagaagaggctctcccgcgggagcccttgaggaccaagtttgcggccacttctgcaggcgtcccttcttagctctcgcctgcccctttctgcagcctaggcggcccaggttctcttctcttcctcgcgcgcccagccgcctcggttcccggcgaccatggtgacgatggaggagctgcgggagatggactgcagtgtgctcaaaaggctgatgaaccgggacgagaatggcggcggcgcgggcggcagcggcagccacggcaccctggggctgccgagcggcggcaagtgcctgctgctggactgcagaccgttcctggcgcacagcgcgggctacatcctaggttcggtcaacgtgcgctgtaacaccatcgtgcggcggcgggctaagggctccgtgagcctggagcagatcctgcccgccgaggaggaggtacgcgcccgcttgcgctccggcctctactcggcggtcatcgtctacgacgagcgcagcccgcgcgccgacttctttctcctttacaggcggctatgagaggttttcctccgagtacccagaattctgttctaaaaccaaggccctggcagccatcccacccccggttccccccagcgccacagagcccttggacctgggctgcagctcctgtgggaccccactacacgaccaggggggtcctgtggagatccttcccttcctctacctcggcagtgcctaccatgctgcccggagagacatgctggacgccctgggcatcacggctctgttgaatgtctcctcggactgcccaaaccactttgaaggacactatcagtacaagtgcatcccagtggaagataaccacaaggccgacatcagctcctggttcatggaagccatagagtacatcgatgccgtgaaggactgccgtgggcgcgtgctggtgcactgccaggcgggcatctcgcggtcggccaccatctgcctggcctacctgatgatgaagaaacgggtgaggctggaggaggccttcgagttcgttaagcagcgccgcagcatcatctcgcccaacttcagcttcatggggcagctgctgcagttcgagtcccaggtgctggccacgtcctgtgctgcggaggctgctagcccctcgggacccctgcgggagcggggcaagacccccgccacccccacctcgcagttcgtcttcagctttccggtctccgtgggcgtgcactcggcccccagcagcctgccctacctgcacagccccatcaccacctctcccagctgttagagccgccctgggggccccagaaccagagctggctcccagcaagggtaggacgggccgcatgcgggcagaaagttgggactgagcagctgggagcaggcgaccgagctccttccccatcatttctccttggccaacgacgaggccagccagaatggcaataaggactccgaatacataataaaagcaaacagaacactccaacttagagcaataacggctgccgcagcagccagggaagaccttggtttggtttatgtgtcagtttcacttttccgatagaaatttcttacctcatttttttaagcagtaaggcttgaagtgatgaaacccacagatcctagcaaatgtgcccaaccagctttactaaagggggaggaagggagggcaaagggatgagaagacaagtttcccagaagtgcctggttctgtgtacttgtccctttgttgtcgttgttgtagttaaaggaatttcattttttaaaagaaatcttcgaaggtgtggttttcatttctcagtcaccaacagatgaataattatgcttaataataaagtatttattaagactttcttcagagtatgaaagtacaaaaagtctagttacagtggatttagaatatatttatgttgatgtcaaacagctgagcaccgtagcatgcagatgtcaaggcagttaggaagtaaatggtgtcttgtagatatgtgcaaggtagcatgatgagcaacttgagtttgttgccactgagaagcaggcgggttgggtgggaggaggaagaaagggaagaattaggtttgaattgctttttaaaaaaaaaagaaaagaaaaagacagcatctcactatgttgccaaggctcatcttgagaagcaggcgggttgggtgggaggaggaagaaagggaagaattaggtttgaattgcttttttaaaaaaaaagaaaagaaaaaaaaagaca

SEQ ID NO: 87242 - DNA, 2366 bp, Homo sapiens
attaataaacctctaagccgaggagaaaactctggctggggcagtgcgctgagcgccggaggagcgtaggcagggcagcgctggcgccagtggcgacaggagccgcgcgaccggcaaaaatacacgggaggccgtcgccgaaaagagtccgcggtcctctctcgtaaacacactctcctccaccggcgcctccccctccgctctgccagccgcctcggttcccggcgaccatggtgacgatggaggagctgcgggagatggactgcagtgtgctcaaaaggctgatgaaccgggacgagaatggcggcggcgcgggcggcagcggcagccacggcaccctggggctgccgagcggcggcaagtgcctgctgctggactgcagaccgttcctggcgcacagcgcgggctacatcctaggttcggtcaacgtgcgctgtaacaccatcgtgcggcggcgggctaagggctccgtgagcctggagcagatcctgcccgccgaggaggaggtacgcgcccgcttgcgctccggcctctactcggcggtcatcgtctacgacgagcgcagcccgcgcgccgagagcctccgcgaggacagcaccgtgtcgctggtggtgcaggcgctgcgccgcaacgccgagcgcaccgacatctgcctgctcaaaggcggctatgagaggttttcctccgagtacccagaattctgttctaaaaccaaggccctggcagccatcccacccccggttccccccagcgccacagagcccttggacctgggctgcagctcctgtgggaccccactacacgaccaggggggtcctgtggagatccttcccttcctctacctcggcagtgcctaccatgctgcccggagagacatgctggacgccctgggcatcacggctctgttgaatgtctcctcggactgcccaaaccactttgaaggacactatcagtacaagtgcatcccagtggaagataaccacaaggccgacatcagctcctggttcatggaagccatagagtacatcgatgccgtgaaggactgccgtgggcgcgtgctggtgcactgccaggcgggcatctcgcggtcggccaccatctgcctggcctacctgatgatgaagaaacgggtgaggctggaggaggccttcgagttcgttaagcagcgccgcagcatcatctcgcccaacttcagcttcatggggcagctgctgcagttcgagtcccaggtgctggccacgtcctgtgctgcggaggctgctagcccctcgggacccctgcgggagcggggcaagacccccgccacccccacctcgcagttcgtcttcagctttccggtctccgtgggcgtgcactcggcccccagcagcctgccctacctgcacagccccatcaccacctctcccagctgttagagccgccctgggggccccagaaccagagctggctcccagcaagggtaggacgggccgcatgcgggcagaaagttgggactgagcagctgggagcaggcgaccgagctccttccccatcatttctccttggccaacgacgaggccagccagaatggcaataaggactccgaatacataataaaagcaaacagaacactccaacttagagcaataacggctgccgcagcagccagggaagaccttggtttggtttatgtgtcagtttcacttttccgatagaaatttcttacctcatttttttaagcagtaaggcttgaagtgatgaaacccacagatcctagcaaatgtgcccaaccagctttactaaagggggaggaagggagggcaaagggatgagaagacaagtttcccagaagtgcctggttctgtgtacttgtccctttgttgtcgttgttgtagttaaaggaatttcattttttaaaagaaatcttcgaaggtgtggttttcatttctcagtcaccaacagatgaataattatgcttaataataaagtatttattaagactttcttcagagtatgaaagtacaaaaagtctagttacagtggatttagaatatatttatgttgatgtcaaacagctgagcaccgtagcatgcagatgtcaaggcagttaggaagtaaatggtgtcttgtagatatgtgcaaggtagcatgatgagcaacttgagtttgttgccactgagaagcaggcgggttgggtgggaggaggaagaaagggaagaattaggtttgaattgctttttaaaaaaaaaagaaaagaaaaagacagcatctcactatgttgccaaggctcatcttgagaagcaggcgggttgggtgggaggaggaagaaagggaagaattaggtttgaattgcttttttaaaaaaaaagaaaagaaaaaaaaagaca

SEQ ID NO: 87243 - DNA, 3423 bp, Homo sapiens
gcagttcagacccccccacacccatcaaagagccgctcctcccccccgcaggcgccttcgccgcctccctcccttcctttcctttccgctcctcttccgacctgtccacccgggaggaagggagctggaaagggggcggaaacctctcccctccaaaaagcacaacaaaactgttcagtgcggaggagccgggttcgcccctgccggacagcggggggctttgttccccgcagttgtttcctgcccatttgacctgtcagctgctggggaaacgctgctgttgacctttggttgaactgctaaggcgattttgctgatttttctttctttttccgcgagggctgtcttttgctcctccaaatgagcccagtccccctcccttctccccaaagcgctccaagagaaagtgccaggaaggggcttgtcccggaaggcctggcggctgagcggggccaggtcctggttaggccaccagggtgggcgtccgcgccattgtttgagcttgtcggcgctggtgggagagatgagggcaattcctctgggacgcaagtcccctcgaatggccggggctggccgggatgttccccgcacggcgctgccctcgagtccccccgatggagagcgcgggcgcgccttccttcgctggcgtccaaacccgggaccagctagaacacagcagggctgggactgggttccagccccacgtggagtctggatttgttttgttgtgttttgctttccttcctggaagaaatcccgaggggaccgccctagagcggcagctccaggacctcggcccttgggcttccgggggtgcagccacttaggccccgctcccggggagagagggattattttttaagatttatccccagggcgcgcggcatttccctgtccctcgtgaatcccgttgagagtcctccctccccaacctcctccatttccccagccagaccgattcgagagccctggagattctgggcgaggctagtgactgggtagtacaggcctctagccccaccattgctctctctgtcttcagttccccaggagggcaatggcatcaaacagcacagctctgggggatgtcaatattgcataccttttctacctaaagggaaaatgactcgcttttctgcttgcaaatatggtagtttctgcttacaaatgtaatacaatgcccatgacagccaaggactggaagcataagttgctaggtcttacaggtgattttttacaatgaagcaaactcactatgttagacaccatttacattggatgtctccaactaacaaaagtaactaaagacagatgtaggtgtaaattgagagtgaaatttgaccctttagaccgtcacaacttccttgggcttatcctgggtgcttataggagaggtgggctccacccacaaaaatggactgctcagaaaaatgagggagagagaaagggtggccactttcccgagccaagaaattccttgaaaaaaaatcagaacatctgaaaccagagagccgatttccttaccgggaggcagttcctggctaacgaagaggaagcacgatgggaagaaaagttcactccaacggaagccagtttgctgaacatagcagatcgcccaggaggactgggagagactgcaaaccagttcgagcccccagcatggcgttaggtgtcagccagctggcaggaaggtccaggtgtctgtgttcagagtctcaaggcggctatgagaggttttcctccgagtacccagaattctgttctaaaaccaaggccctggcagccatcccacccccggttccccccagcgccacagagcccttggacctgggctgcagctcctgtgggaccccactacacgaccaggggggtcctgtggagatccttcccttcctctacctcggcagtgcctaccatgctgcccggagagacatgctggacgccctgggcatcacggctctgttgaatgtctcctcggactgcccaaaccactttgaaggacactatcagtacaagtgcatcccagtggaagataaccacaaggccgacatcagctcctggttcatggaagccatagagtacatcgatgccgtgaaggactgccgtgggcgcgtgctggtgcactgccaggcgggcatctcgcggtcggccaccatctgcctggcctacctgatgatgaagaaacgggtgaggctggaggaggccttcgagttcgttaagcagcgccgcagcatcatctcgcccaacttcagcttcatggggcagctgctgcagttcgagtcccaggtgctggccacgtcctgtgctgcggaggctgctagcccctcgggacccctgcgggagcggggcaagacccccgccacccccacctcgcagttcgtcttcagctttccggtctccgtgggcgtgcactcggcccccagcagcctgccctacctgcacagccccatcaccacctctcccagctgttagagccgccctgggggccccagaaccagagctggctcccagcaagggtaggacgggccgcatgcgggcagaaagttgggactgagcagctgggagcaggcgaccgagctccttccccatcatttctccttggccaacgacgaggccagccagaatggcaataaggactccgaatacataataaaagcaaacagaacactccaacttagagcaataacggctgccgcagcagccagggaagaccttggtttggtttatgtgtcagtttcacttttccgatagaaatttcttacctcatttttttaagcagtaaggcttgaagtgatgaaacccacagatcctagcaaatgtgcccaaccagctttactaaagggggaggaagggagggcaaagggatgagaagacaagtttcccagaagtgcctggttctgtgtacttgtccctttgttgtcgttgttgtagttaaaggaatttcattttttaaaagaaatcttcgaaggtgtggttttcatttctcagtcaccaacagatgaataattatgcttaataataaagtatttattaagactttcttcagagtatgaaagtacaaaaagtctagttacagtggatttagaatatatttatgttgatgtcaaacagctgagcaccgtagcatgcagatgtcaaggcagttaggaagtaaatggtgtcttgtagatatgtgcaaggtagcatgatgagcaacttgagtttgttgccactgagaagcaggcgggttgggtgggaggaggaagaaagggaagaattaggtttgaattgctttttaaaaaaaaaagaaaagaaaaagacagcatctcactatgttgccaaggctcatcttgagaagcaggcgggttgggtgggaggaggaagaaagggaagaattaggtttgaattgcttttttaaaaaaaaagaaaagaaaaaaaaagaca

SEQ ID NO: 87244 - DNA, 537 bp, Homo sapiens
attaataaacctctaagccgaggagaaaactctggctggggcagtgcgctgagcgccggaggagcgtaggcagggcagcgctggcgccagtggcgacaggagccgcgcgaccggcaaaaatacacgggaggccgtcgccgaaaagagtccgcggtcctctctcgtaaacacactctcctccaccggcgcctccccctccgctctgcgcgccgcccggctgggcgcccgaggccgctccgactgctatgtgaccgcgaggctgcgggaggaaggggacagggaagaagaggctctcccgcgggagcccttgaggaccaagtttgcggccacttctgcaggcgtcccttcttagctctcgcctgcccctttctgcagcctaggcggcccaggttctcttctcttcctcgcgcgcccagccgcctcggttcccggcgaccatggtgacgatggaggagctgcgggagatggactgcagtgtgctcaaaaggctgataatcgccggtcacgagatggtaccgagctcgattcactgcctcc

SEQ ID NO: 87245 - DNA, 2886 bp, Homo sapiens
tcacaatacacttcttgaaatccctttctctctcattcgtaaatccttggattagagtttgagactcccctggtcattagagaaagacaaaaagagctttttcttaccctattctttgcctttattaaccccaaataacaaaataatctgttatgcaaaaagattgcaggtataaaaacattaccttcctttccacctacctaaaacttccctcagcctttgtcagttctaatttaaaagctgtcctgggagctgttggagaaatggggaagatcatctagatattccagtttctccttccacttcaccctatagtaccggatagcatccaatagcccagggcctgaccatacagcccatgatattaccctttctgtagaaaacagtcactaaggccactgatgaatgtggggggagaggaacacaattaacagctctggaaactctggtgacatttttctgttttttctctctctagccccaccattgctctctctgtcttcagttccccaggagggcaatggcatcaaacagcacagctctgggggatgtcaatattgcataccttttctacctaaagggaaaatgactcgcttttctgcttgcaaatatggtagtttctgcttacaaatgtaatacaatgcccatgacagccaaggactggaagcataagttgctaggtcttacaggtgattttttacaatgaagcaaactcactatgttagacaccatttacattggatgtctccaactaacaaaagtaactaaagacagatgtaggtgtaaattgagagtgaaatttgaccctttagaccgtcacaacttccttgggcttatcctgggtgcttataggagaggtgggctccacccacaaaaatggactgctcagaaaaatgagggagagagaaagggtggccactttcccgagccaagaaattccttgaaaaaaaatcagaacatctgaaaccagagagccgatttccttaccgggaggcagttcctggctaacgaagaggaagcacgatgggaagaaaagttcactccaacggaagccagtttgctgaacatagcagatcgcccaggaggactgggagagactgcaaaccagttcgagcccccagcatggcgttaggtgtcagccagctggcaggaaggtccaggtgtctgtgttcagagtctcaaggcggctatgagaggttttcctccgagtacccagaattctgttctaaaaccaaggccctggcagccatcccacccccggttccccccagcgccacagagcccttggacctgggctgcagctcctgtgggaccccactacacgaccaggggggtcctgtggagatccttcccttcctctacctcggcagtgcctaccatgctgcccggagagacatgctggacgccctgggcatcacggctctgttgaatgtctcctcggactgcccaaaccactttgaaggacactatcagtacaagtgcatcccagtggaagataaccacaaggccgacatcagctcctggttcatggaagccatagagtacatcgatgccgtgaaggactgccgtgggcgcgtgctggtgcactgccaggcgggcatctcgcggtcggccaccatctgcctggcctacctgatgatgaagaaacgggtgaggctggaggaggccttcgagttcgttaagcagcgccgcagcatcatctcgcccaacttcagcttcatggggcagctgctgcagttcgagtcccaggtgctggccacgtcctgtgctgcggaggctgctagcccctcgggacccctgcgggagcggggcaagacccccgccacccccacctcgcagttcgtcttcagctttccggtctccgtgggcgtgcactcggcccccagcagcctgccctacctgcacagccccatcaccacctctcccagctgttagagccgccctgggggccccagaaccagagctggctcccagcaagggtaggacgggccgcatgcgggcagaaagttgggactgagcagctgggagcaggcgaccgagctccttccccatcatttctccttggccaacgacgaggccagccagaatggcaataaggactccgaatacataataaaagcaaacagaacactccaacttagagcaataacggctgccgcagcagccagggaagaccttggtttggtttatgtgtcagtttcacttttccgatagaaatttcttacctcatttttttaagcagtaaggcttgaagtgatgaaacccacagatcctagcaaatgtgcccaaccagctttactaaagggggaggaagggagggcaaagggatgagaagacaagtttcccagaagtgcctggttctgtgtacttgtccctttgttgtcgttgttgtagttaaaggaatttcattttttaaaagaaatcttcgaaggtgtggttttcatttctcagtcaccaacagatgaataattatgcttaataataaagtatttattaagactttcttcagagtatgaaagtacaaaaagtctagttacagtggatttagaatatatttatgttgatgtcaaacagctgagcaccgtagcatgcagatgtcaaggcagttaggaagtaaatggtgtcttgtagatatgtgcaaggtagcatgatgagcaacttgagtttgttgccactgagaagcaggcgggttgggtgggaggaggaagaaagggaagaattaggtttgaattgctttttaaaaaaaaaagaaaagaaaaagacagcatctcactatgttgccaaggctcatcttgagaagcaggcgggttgggtgggaggaggaagaaagggaagaattaggtttgaattgcttttttaaaaaaaaagaaaagaaaaaaaaagaca

SEQ ID NO: 87246 - DNA, 1450 bp, Homo sapiens
gaactaggtcacgcgctccgcgggtcgggcacccccgcccgccaggcacggccgcggctccttcctcttcctgcccgcggtagtgggggtggggcaggcctcgggacacctgcctccgccgccggccgccggccgccgtcctcgcgcggcttcccgggcggctctgccccgaccgtagactcccggcccgctcgccgcggcaggagccgtggttccgcggacctgggcgcgctctctccctggccactgggagaccccccgcggcctcgcggggaaaacctcgggactgccccgcgcccccggccgtctctgcgtcgctccttctcgcccgcgaccgtggactcgtcctcgcgagcctgggttggcggaagctgcgggggccggggtcgcactacttggcgcggaagggccggcggtgggcggagggatccccgtccgcggggtgagccgctgggcggagccgggaggagccgcgaggatccgcagtggggagccgggaggaacctggcgccggcacccacccgccgcgcccacgcgtgccgcggtcgcttgtttcccgcgggagcccggccgcgctcggggggaggcgcgcgcgcagctggggctgcctgggtctaggagctccggagccaccgttttgtgcccgtggagccgcggggaaggcgcacgcgctcgggtcttcccggcgggtcgtcctgcactttctccctctccggtacggaccgcggcgttctgtttccaggcaaaggaaaataagtcaaagactcagaaggcagcctgaatccagggcctgggatgcagggtttgctggaacgccagccggtgcgatcgcgcccctgggattccgcttagcccgcgcgtccatttccctgcatggtggactcagtaaagccggatctgtccaacgcctgcagcgtggatgtggaggcggactaatcaactagtgctctgttattatttctacccatcccttttctccatgctaatttgcttagaactttaacattgaatggacagcaaatgtcatgttctgtttaattatcactccttgaccattatgttaatttctttccctaacaaggtgacgcattgttttaagtaacaatgaccaactcatctactcttcttccaaattgtgtaaattgaagggtaaaatgtgggaaaacgctaaatttgaatgctaaatttgaacatttcacacaacaataatttgaaatgcttctttgcaatattatggcgtttcggaacagataaaaatacttcattttcagacatttggtcaacaaatacttcttggacgtttatatgcaaagcaatgcatgtaacattttcattactttgcaagtgtgcttatcagtaaaagaattttgttttaaattctagccttcgtttaaatgtattttagttaccacattgggaagaaaataaaatattactatgtacggaatgt

SEQ ID NO: 87247 - DNA, 435 bp, Homo sapiens
cactggcatttcatgaagcagtagggagcagagttaaccccaccaagagcactgcagtgcggccttccttcccagcccccgttccagcacctctttccatttcccgacttttctttcaccgccagtaaatttaatgtcttcagctgagcactgatttcatgagcgtaaaggacattagcagtacttcgcacatggtatgcacaaatattaggcaagtccaaggacaggatgagctgcaagcagtctatgataagagtcaaaggcaggagttggggttgtagactcctccagccaaccacagcaaccaggaatttggatgcttcggccgccagagtgcttgcaagagttcatctctgaaatcgcttccattccagcgctaacattttatgaaacctgtgcttttcaaacagattgttttattgcttcctgcatcac

SEQ ID NO: 87248 - DNA, 471 bp, Homo sapiens
ccccttctttctctctgtttctccatagcgtcctatccatatcacattgctctgccttttactttacttcttagatatttattggtctctctgtcctgcctgactctgagaggcatctttccatagttacttactgagcgctgtatgctagtgggctaaatggagatacagagattagtgagttatctgtgccttctgtgagacaaacatgtagatacttggtaaactgctgtttgcctgtaagccttgaaatatcacgtgcccaatgcacacaccactgccagaggacacggggcctcggcatctctgggcctctcctgagacagtgctaggggagaacttcctgggagcagctactttagaagcaggagggaaattagaggggagaggggccaggtgagacagtcagaatattctaggaggaagagaagagagtctcattctttatgggtagtgatcattatcaaagaa

SEQ ID NO: 87249 - DNA, 120 bp, Homo sapiens
accttctgacctctaaggacacctacttcttcaaccttcagacttcaagccattgacctttggccttacttaccctgacctccagcttcatatcttcactgatcttcaaaagcaacactg

SEQ ID NO: 87250 - DNA, 420 bp, Homo sapiens
atgcttccggacatgcttcctgatctccttcccctgccccaccctctccttgatcatcttcctctgcagtggtgtttctcaacctcagcactactgacattcggagctggataattctttggggtgaggtctgtcctgtgcattttaggatgttgagtagcaaccctggcctctacccactagaagctggtaggtagcatgtcctcctcccctacttgtgacaaccaaaaatgtctccagagttgtcaaatgcccccaaaggtgcaaaatgggtgcgaaccatggctctagagataacttttaaaaacaacagtgacaacaacaaaatttctgttcttagaatttctgtctctgcttattttacaggatgaggttaccctcccatatttgcccttggttaggcatcttttccccacccct

SEQ ID NO: 87251 - DNA, 392 bp, Homo sapiens
catgttttaactgcttgcttttttagattctgaattcttacagagtgcagtcattttatcccatggttttagctaccatccataaactgtctttacagatttgcatctctaaatctagccctcccctctcctgaactgtagtcttacatagccacctctcttcttgacctctttgatagatgtcatagagtccagtcaaatataacatgtacaaaattgagcttataattcctattctgtcttgctcaatttccttctactgtatttcagagaatagctttctacgaattagtttgtgcaagccagaattccagggtcacattggtcaatatcttctttcccctcaatttcactattctttcaagaattgctgcttttgcttagaaaatctt

SEQ ID NO: 87252 - DNA, 295 bp, Homo sapiens
tccttcagctctcccacaggtgggcatcctgggggaaaggattaaagccagatgaggaggctggggagactgttagtgacaagaggaaatggatcccagcatttggaaagggccaagaaaggaacattgggtatggaggagcggggaagatcttaaatcccaacagaaggtaagaggagaggtcgaccagagcagaaggtcgacgcagagcagaaggtcgacgcagagcagaaggtcgacgcagagcagaaggtcgacgcagagcagaaggtcgacgcagagcacaaggtcgacg

SEQ ID NO: 87253 - DNA, 442 bp, Homo sapiens
agtggcccaaaggagtaagaaagcatccaagctattttttgttgttgttggaatttttacatgctagagacagattttatcttagtatagtttattcatattccaggcctgtgacccttaatcaattttttttttcttttgagatggagtctggctctgttgcactccagcctgagtgacagagcgagactgtctcaaaaaaaaaaaaagggtcaattatatggaattcagaagttgttgttgttgaaatggcctctctccactgccttggtcagagtgcagtgatgccatcacagctcactgcagcctcaacttcttgggctcaaactttcttgaaagtgctaaaatgatgcgccaaagtagtatatttatcccacgttacaggtgcacaattactcctttggtaagaaaaatgcagtaaattacactgatgaaaatgtag

SEQ ID NO: 87254 - DNA, 176 bp, Homo sapiens
taaagaaaaaatagaaattaaatctgtcacattatcacatatgcaaagggtgtaaatacattaaacatattcaatataattaccacaacttgaaaatactttattcactacaaactttatatacatttacttcttatataaacagatttttcatatatatatatatatgtatgaaa

SEQ ID NO: 87255 - DNA, 789 bp, Homo sapiens
  misc_feature (262)..(262): n is a, c, g, or t
cctatgcccaagtttcacagatggaaaattgaacattgccaaaggaattctgctcagcagattaagtatgttcatgttttagaataaaaattgccaaaactttgttgagaaaccacttatgaggaaaccttaaatactaattaggaagctaaaaattgaatattggtatattggtatagaatgaatatatatatatatatatatctttttccaaattatgacattccgtgtaatatgagtgaattactcagctctgctgatngaggacttatgttgattatctaacctactgtatggacagtgcagatacagaacacttctatcatcacagcaagtactactggacaaagctgatatagtaagcatggttttcttttcttaggaaaactaaattttatttttattaaaaaatctttccttagttctaaacagattttttttgtgaaagacaagaagatttattaaagttttattaaactatctcttaactcatcacaaaaatgagccctgtaaattcacacatgcttcttggatgagtaatggtgaggccagtaagcccaagaacttaaatgaacattcttatacttcagtttgcattctcagagctggggaactgtctgtaggcacagaaatggaaaagggattttctggtctgtttctgactttaagttacacatttttaaaaagtactctggaagacactggggtttgttcatccccggcttgctactaaagtagtaatgattgttgttttcacattttcctttttttttttgagatggagtcttg

SEQ ID NO: 87256 - DNA, 419 bp, Homo sapiens
tcaatttaaaaatgggcagaggacatgaatagacatctctccaaagatgatctacaaatggtcaataagcaaatgaagagattcccaacatcatttattactgaggaaatgcaaattaaaactataataggacatcacctcacacccattaagatgactactatcaaaaaaaccccaaaataacaagtattggcaaggatgtggagaatctggaaccctggagaactattgatgggaatataaaatgacacagttcctatgaaaaacacgataagagttcctcaaaaaattaggaaataggaatgactgtatgatcccacattgcaactgtggggtatatacccaaaataatgggaaatcagggtcttgaaaatatatttgtattactccaagtttcttagcagcgttatttcacaaca

SEQ ID NO: 87257 - DNA, 220 bp, Homo sapiens
aggcaccaaatttagattggaggtctcagaggagcagtgttttccctccttcgtaacagttgaacaacttccagatgtagctagctgcaccccctgtaaagatgcaggctctttacaatgaagacacatcttctgatgttccttctctcctgtatggccagatgcacaggaatagtgcccaaaagacctcagcctgctttccctttaaggggaaggagaa

SEQ ID NO: 87258 - DNA, 220 bp, Homo sapiens
agtatgactgaattttggaagatagtgtgcagtgccagcttttatcctagaaagactacctccaaaggaacttcacagagtggcatttttggtgaattaccattgatcagagtccatttttcaacctcaaagatgtagaaaaaagatccgtagatcaagcagacccttagaaacagagtaggaataataaaattggcccaaaactgaggtgtaaactaaa

SEQ ID NO: 87259 - DNA, 277 bp, Homo sapiens
ctcattcccagtgcagctcccaaacctcaacccgatttattcctctttatctctaacattattccagcctcctgtgccctactagtcacctcaaagggtgactgagcgtgctgctcagggcctgcctgaacgggatcccatacagacttagccccaagtgataatctccacctttaaaccaccctaacctctgtttgtttgtttgtttgttttttccatacttgtcacattctcagctccatgttcaacctttttcctttctcccttagctcttgtc

SEQ ID NO: 87260 - DNA, 558 bp, Homo sapiens
  misc_feature (534)..(534): n is a, c, g, or t
ctttcagaccagcttgtgtcaatagggtcctacagagcagctgatatcagcagttttactagtatgcaggacctgaaagaatatctcaaagggaaaacaatgtttcataatgttcaggaagttatctatagagcagctaaggggaaataatcttgtaacagggtctgggtgattctgaggtaataggccccaaacaaccatggggaagcaggtcagagggcaagctggcctagtgtttaacattgaatgggctgaaagtttggtttatttttgtttcttgtttctccccctcccttcttacctgaataattttatgaagtttatagggatggtttcaggacctccattctatctgttcctgaaatattacaaaaagattattattgtagcactcatctaattgtgttttatctcgttgtttgcatgtctgtttcttccccagtgagttgtaaattgcttaagggcaaacagacgcatcctatttatctgtctgtcactaacattaagcacagcatttggtatacagtcatcacntctaataaagtttgaaaaaaaaaa

SEQ ID NO: 87261 - DNA, 402 bp, Homo sapiens
tgactataaaagtaattcatgctcattatagaaaatgtgtgagatacagaaatgttgcaagatgcaagataaatcactttgggtgaagttttaacgcaagactaagtgtcttataaaacgcagagttcagaattttacaacttcccctgagaagggggaagaaatgctgcagacataaagtaataaacacttccttcagagaaggcactgacttacctcttaagaaacagttacatcacatgtgcatttaacctactggaatttactgcatggcttggcaggcaatgagcatgtgccccagggtgggataagatatgggatgtgcatcagcttctcacccagtaggtttctgtgagcctctcatggtacctccaacctgaagctcctgaaggacttttcaag

SEQ ID NO: 87262 - DNA, 960 bp, Homo sapiens
cctaactgggctcagtcggaaggaacttgaccaaagtctgggctcagttgggcatcactcaggctaatggtcgtgtgctggatgccatcagagggaagtaccaatggtaaagtggaaacaatgtgcagctttcaactgggtggaggctgctattctgtggacagtgagatgtttccttggcactgtcaatagacaatctgcgtagagaaattccaagctgaaagccaataatgttataataaaatagagattcttcagaagatgaaaggaattaccagcatggaaattgtgtcataggcttaagggctaaagaagaagccttttcttttctgttcaccctcaccaagagcacaacttaaatagggcattttataacctgaacacaatttatattggacttaattattatgtgtaatatgtttataatcctttagatcttataaatatgtggtataaggaatgccatataatgtgccaaaaatctgagtgcatttaatttaatgcttgcttatagtgctaaagttaaatgatcttaattctttgcaattatatatgaaaaatgactgatttttcttaaaatatgtaacttatataaatatatctgtttgtacagattttaaccataaaaacatttttggaaaaccataaaaaagttcctttgtttgtatttttctcaaagttaaaagtctatagagaaagactgaatttccctaaggagattaagaattgctttaagactagaattaaaacacactttattacatctttttatgtactttttgttactttgttttgtatatctccagtaaaattttttttgtttaaattatagaaacattacacaaagctctgtttttctcccttataagtacttactcatataaggaattttccacttaggtaatatgataggagcttgaatttttttagtcacccaaaatatgatttacttatatacag

SEQ ID NO: 87263 - DNA, 2912 bp, Homo sapiens
gagacatacaggacagagcatggctcgcctacagactgcactcctggttgtcctcgtcctccttgctgtggcgcttcaagcaactgaggcaggcccctacggcgccaacatggaagacagcgtctgctgccgtgattacgtccgttaccgtctgcccctgcgcgtggtgaaacacttctactggacctcagactcctgcccgaggcctggcgtggtgttgctaaccttcagggataaggagatctgtgccgatcccagagtgccctgggtgaagatgattctcaataagctgagccaatgaagagcctactctgatgaccgtggccttggctcctccaggaaggctcaggagccctacctccctgccattatagctgctccccgccagaagcctgtgccaactctctgcattccctgatctccatccctgtggctgtcacccttggtcacctccgtgctgtcactgccatctcccccctgacccctctaacccatcctctgcctccctccctgcagtcagagggtcctgttcccatcagcgattcccctgcttaaacccttccatgactccccactgccctaagctgaggtcagtctcccaagcctggcatgtggccctctggatctgggttccatctctgtctccagcctgcccacttcccttcatgaatgttgggttctagctccctgttctccaaacccatactacacatcccacttctgggtctttgcctgggatgttgctgacactcagaaagtcccaccacctgcacatgtgtagccccaccagccctccaaggcattgctcgcccaagcagctggtaattccatttcatgtattagatgtcccctggccctctgtcccctcttaataaccctagtcacagtctccgcagattcttgggatttgggggttttctcccccacctctccactagttggaccaaggtttctagctaagttactctagtctccaagcctctagcatagagcactgcagacaggccctggctcagaatcagagcccagaaagtggctgcagacaaaatcaataaaactaatgtccctcccctctccctgccaaaaggcagttacatatcaatacagagactcaaggtcactagaaatgggccagctgggtcaatgtgaagccccaaatttgcccagattcacctttcttcccccactcccttttttttttttttttttttgagatggagtttcgctcttgtcacccacgctggagtgcaatggtgtggtcttggcttattgaagcctctgcctcctgggttcaagtgattctcttgcctcagcctcctgagtagctgggattacaggttcctgctaccacgcccagctaatttttgtatttttagtagagacgaggcttcaccatgttggccaggctggtctcgaactcctgtcctcaggtaatccgcccacctcagcctcccaaagtgctgggattacaggcgtgagccacagtgcctggcctcttccctctccccactgccccccccaactttttttttttttttatggcagggtctcactctgtcgcccaggctggagtgcagtggcgtgatctcggctcactacaacctcgacctcctgggttcaagtgattctcccaccccagcctcccaagtagctgggattacaggtgtgtgccactacggctggctaatttttgtatttttagtagagacaggtttcaccatattggccaggctggtcttgaactcctgacctcaagtgatccaccttccttgtgctcccaaagtgctgagattacaggcgtgagctatcacacccagcctccccctttttttcctaataggagactcctgtacctttcttcgttttacctatgtgtcgtgtctgcttacatttccttctcccctcaggctttttttgggtggtcctccaacctccaatacccaggcctggcctcttcagagtaccccccattccactttccctgcctccttccttaaatagctgacaatcaaattcatgctatggtgtgaaagactacctttgacttggtattataagctggagttatatatgtatttgaaaacagagtaaatacttaagaggccaaatagatgaatggaagaattttaggaactgtgagagggggacaaggtgaagctttcctggccctgggaggaagctggctgtggtagcgtagcgctctctctctctgtctgtggcaggaggcaaagagtagggtgtaattgagtgaaggaatcctgggtagagaccattctcaggtggttgggccaggctaaagactgggagttgggtctatctatgcctttctggctgatttttgtagagacggggttttgccatgttacccaggctggtctcaaactcctgggctcaagcgatcctcctggctcagcctcccaaagtgctgggattacaggcgtgaatcactgcgcctggcttcctcttcctcttgagaaatattcttttcatacagcaagtatgggacagcagtgtcccaggtaaaggacataaatgttacaagtgtctggtcctttctgagggaggctggtgccgctctgcagggtatttgaacctgtggaattggaggaggccatttcactccctgaacccagcctgacaaatcacagtgagaatgttcaccttataggcttgctgtggggctcaggttgaaagtgtggggagtgacactgcctaggcatccagctcagtgtcatccagggcctgtgtccctcccgaacccagggtcaacctgcctgccacaggcactagaaggacgaatctgcctactgcccatgaacggggccctcaagcgtcctgggatctccttctccctcctgtcctgtccttgcccctcaggactgctggaaaataaatcctttaaaatagtgtct

SEQ ID NO: 87264 - DNA, 2858 bp, Homo sapiens
gagacatacaggacagagcatggctcgcctacagactgcactcctggttgtcctcgtcctccttgctgtggcgcttcaagcaactgaggcaggcccctacggcgccaacatggaagacagcgtctgctgccgtgattacgtccgttaccgtctgcccctgcgcgtggtgaaacacttctactggacctcagactcctgcccgaggcctggcgtggtgttgctaaccttcagggataaggagatctgtgccgatcccagagtgccctgggtgaagatgattctcaataagctgagccaatgaagagcctactctgatgaccgtggccttggctcctccaggaaggctcaggagccctacctccctgccattatagctgctccccgccagaagcctgtgccaactctctgcattccctgatctccatccctgtggctgtcacccttggtcacctccgtgctgtcactgccatctcccccctgacccctctaacccatcctctgcctccctccctgcagtcagagggtcctgttcccatcagcgattcccctgcttaaacccttccatgactccccactgccctaagctgaggtcagtctcccaagcctggcatgtggccctctggatctgggttccatctctgtctccagcctgcccacttcccttcatgaatgttgggttctagctccctgttctccaaacccatactacacatcccacttctgggtctttgcctgggatgttgctgacactcagaaagtcccaccacctgcacatgtgtagccccaccagccctccaaggcattgctcgcccaagcagctggtaattccatttcatgtattagatgtcccctggccctctgtcccctcttaataaccctagtcacagtctccgcagattcttgggatttgggggttttctcccccacctctccactagttggaccaaggtttctagctaagttactctagtctccaagcctctagcatagagcactgcagacaggccctggctcagaatcagagcccagaaagtggctgcagacaaaatcaataaaactaatgtccctcccctctccctgccaaaaggcagttacatatcaatacagagactcaaggtcactagaaatgggccagctgggtcaatgtgaagccccaaatttgcccagattcacctttcttcccccactcccttttttttttttttttttttgagatggagtttcgctcttgtcacccacgctggagtgcaatggtgtggtcttggcttattgaagcctctgcctcctgggttcaagtgattctcttgcctcagcctcctgagtagctgggattacaggttcctgctaccacgcccagctaatttttgtatttttagtagagacgaggcttcaccatgttggccaggctggtctcgaactcctgtcctcaggtaatccgcccacctcagcctcccaaagtgctgggattacaggcgtgagccacagtgcctggcctcttccctctccccactgccccccccaactttttttttttttttatggcagggtctcactctgtcgcccaggctggagtgcagtggcgtgatctcggctcactacaacctcgacctcctgggttcaagtgattctcccaccccagcctcccaagtagctgggattacaggtgtgtgccactacggctggctaatttttgtatttttagtagagacaggtttcaccatattggccaggctggtcttgaactcctgacctcaagtgatccaccttccttgtgctcccaaagtgctgagattacaggcgtgagctatcacacccagcctccccctttttttcctaataggagactcctgtacctttcttcgttttacctatgtgtcgtgtctgcttacatttccttctcccctcaggctttttttgggtggtcctccaacctccaatacccaggcctggcctcttcagagtaccccccattccactttccctgcctccttccttaaatagctgacaatcaaattcatgctatggtgtgaaagactacctttgacttggtattataagctggagttatatatgtatttgatgtgagagggggacaaggtgaagctttcctggccctgggaggaagctggctgtggtagcgtagcgctctctctctctgtctgtggcaggaggcaaagagtagggtgtaattgagtgaaggaatcctgggtagagaccattctcaggtggttgggccaggctaaagactgggagttgggtctatctatgcctttctggctgatttttgtagagacggggttttgccatgttacccaggctggtctcaaactcctgggctcaagcgatcctcctggctcagcctcccaaagtgctgggattacaggcgtgaatcactgcgcctggcttcctcttcctcttgagaaatattcttttcatacagcaagtatgggacagcagtgtcccaggtaaaggacataaatgttacaagtgtctggtcctttctgagggaggctggtgccgctctgcagggtatttgaacctgtggaattggaggaggccatttcactccctgaacccagcctgacaaatcacagtgagaatgttcaccttataggcttgctgtggggctcaggttgaaagtgtggggagtgacactgcctaggcatccagctcagtgtcatccagggcctgtgtccctcccgaacccagggtcaacctgcctgccacaggcactagaaggacgaatctgcctactgcccatgaacggggccctcaagcgtcctgggatctccttctccctcctgtcctgtccttgcccctcaggactgctggaaaataaatcctttaaaatagtgtct

SEQ ID NO: 87265 - DNA, 534 bp, Homo sapiens
aactagtgaggtgaaagatctctgtaagaactaaaaacaccaaagatatcagagaggatgaaacaaatgaaaaaacattctatgctcatggataggaagaatcaatatcattaaaatggccatattgtccttattttcaagtatgctattgcactctatgactgatccaaactcctgccagatataattctaaaaatctgtttgttaattttattattttatttttggatttttaaatgcttgggaattgggagatatgcacaattgtctttgctttgttcacaaaattaaatgcgtatttgggtacttataggacactatttgtaaaaacatttatttcttcagacattgatggtcttgtcccagttattaacaacatctacatgtttaagaataaattttcttttctatctacttcttattccattgaaaattacctttctatcctcctactctggaagtctttatgattctgtcctaatcattagtatcccattgcttcttcaagagatgtctgtcagtagaatttctcca

SEQ ID NO: 87266 - DNA, 632 bp, Homo sapiens
atctctgatggctgttttaatggatttttgtaaaccttagggtgtcaaaaggatattagacactatattttaaaggtgtcttttaacatcctttttttctaatactttgcttttggcatgttaagtgtcatttttgataatttgaccaacaaaaatataaattgtggattttgctttttcaggcaagataaataactatgagaggaattagtaaaatatcttatgaaggcataaatctgtttctaacaaaactagatttgattttgctgggattttcatgttgaattgaattttgattttgtaatgtgttgatgctgggtttttaaatttatgaactaggttttgttttttgtgtttttttttgagacagggtctcgttctgttgcccaggctagagtgcggtgggctctatgcgctcactgcaacctccacttcctgggttcaacccaagtaactggaattaaaggcatgctccaccgcactcagctaatttttgtatttttagtggagacagggtttcaccatgttggctaggctggtcttgaactcctgacctcaagtgatctgcctgcttcggcctcccaaagactgcactccagcctgggcgacagaatgagactctgtctccaaaa

SEQ ID NO: 87267 - DNA, 486 bp, Homo sapiens
caagggattctgtggcttcttgaaaaaatgtgatcacaataaactactgtaggaactgaaagtttttgtcctttgtgtatcacagctatatttaattacataaagttgcttcaaagatctgcattcattatcacctcatctcttttgtacttctcttcacagttattttcaaatgaatgtattgagttatagacctttgtggcataatgattgcttttatgaatgtttcacgaccatgtaagaaagaacgtatttgctttattttcagagtccagagataaatgtggttttgtatcttatttctgtattcttattttgtctgtttgatctgccatggactaagagatgaataaaagcctcatatgagtacactgctatcttaagtttctttgcaaatgttgatgccatgtttttgttttgttttgttttgtttcagatggagtcttgctctgttgcccaggctggagtgcagtggcgcaatttcgg

SEQ ID NO: 87268 - DNA, 344 bp, Homo sapiens
agaggacctttccccgtacgccaaatgaaatgtgttgcttattcatttgttcataattttgaggctggagggctattacttgcttttttgggtcttgcaaacatttcatttgggagtaaatgtgacagttcttcattggtattgtctgatcttctgcaggccatttactgctctgagtgctttgtcttcatatgtaaagaagtgattagttggtttgggccacagggtatctagacaactaactactgataagccaccacctgctgggaatgggtaatgacttgattgattgattggagatggagtcttgctctgtcacccaggctggagtgcaatggcacgat

SEQ ID NO: 87269 - DNA, 789 bp, Homo sapiens
catgtgctgagccatcgttagtattttctgtcctttctctttgactcgtgtatagtgtgctcaaactcttaaaattatacactttaatgattatacactttcatgcatctcaattgcatgtaagttatatttcaatatatttgttaaaagtttataattaaaaaaactgtcctagcttgattcaagaaatcttttttatatttaagaaaatgtaatgttatgtattatcagggcaaaagagaaaaaccatatgattaccttgtcatacacagtaaaagcatttggcacaattgaaaacttttttcatgatttataaaaacaaaccccagaaaactctcagcatgataagaagagaaggcaacactttcaaccctattaagggtagatttgaaaaaaactcagaggtaacattatattaaatggcataggattgaatgcttttctattaaatcagagaaaaaagtagaatatctgttgttattctttcaattcagcattatactagagatctaaatcaatgcaataaagtaagaaaaataaaagtattgaaaagattgaaaagaaagaattgaagctgtctttattcacagataatgactgtgtatgttaataatcctagaaatctataaaaatctgccaaaagtaattagtgagtttggtaatgttgcagaatataagctcaatagaagtagtcttttgtatttctgtgtattagcaatgagcatttggaaaatgaaataaaaatacaatttcatttcaagtaacatctaaatacatgttgtgcttaga

SEQ ID NO: 87270 - DNA, 1051 bp, Homo sapiens
ctctgaacctcagcaggggaagattgatgtaaaatccacttggtcagagtgatatatgtagacttgatgtttgagatggttctcagtttagagaatgtgggatatggtagaggtctttgtttttttcccatgtcccaaaaggtgctgggcaagtagcttgaactcgagcctgttttaattataaaatagatcaaactgctctttcttggtgcccttactgctccttgatttttagtgcatttattttgagtatgaatgcataaagtctgagggcctaaattttgttaattttttttaacaaatgggagaggggaatcctcgatagtcacccaattttcctttttttttgagacagtctgactgttgcccaggctggagtgtaatggcgccatctcggctcactgcaacatccagctcctgggtttcagcaattctcctgcctcagcctcctgagtagctgggattacaggcgcccgccatcacgcccggctaatttttgtatttttagtagagacaggattttgccatgtttgccaacctggtctcgaactcttgacctcctgatccaccctcctctgcctcccaaagtgctgggattacaggcgtgagccaccgcgcccagccccatagtcccccaattttctaacagcagttttaaattctgtaacttctcctgtctgtaaacaaggctgtcttttcaaatggctctcctacaggatgtgataattatctattctataaagccgaggtttggagaggtaaatagctatttcacattaacacaataatgtcaatgccctatggaaaagataaaatacttggactatattttaaaggggaatctggggtcatgcatattgaagtttaactagatccctccagatttttggttttgatcctacacatttagatactagttttggattttagacagttggtgctgacagtgtgaaactcctattgcctgcagttaaattgaagctttggtttctcatgtgtaacaggcagtgaagctggtattatactttaagtcctcatttcagaaatagtt

SEQ ID NO: 87271 - DNA, 431 bp, Homo sapiens
catttctctagggagtttactgtgaagaaaaatggccgggtcatagagtacgctatttatttattcatttatatgtttatgccaaattgctctgaagtttttactaatttaaactccaaccactattgtgtgaaagtttgtttttctacactcctcagacttgacattaacagagatgcatgttttttcaatctgaaatgttctcttaaggtaatcttttcctatcagtcacattaaataccttttcataggtattattcattgttcaagtttactcttataagttgaagaacattatttgcatatttgtgctgttagatttttgttcattggatattgataggcatagttaataagtaaacatgctttttaacaaactaacacattgcaggcttcttctatattcttttagatatttagatagatgttac

SEQ ID NO: 87272 - DNA, 1004 bp, Homo sapiens
ccagagcagaagagggcgaggaagaagatgcctcggcccggccgcaacacgtacagcgaccagaagccgccctactcgtacatctcgctgaccgctatggccatccagagctctcccgagaagatgctgccgctgagcgagatctacaagttcatcatggaccgcttcccctactacagggagaacacgcagcgctggcagaacagtctgcgccacaacctctccttcaacgactgcttcatcaagatcccgcggcggccggaccagccaggcaagggcagcttctgggcgctgcacccaagctgcggggacatgttcgagaacggtagcttcctgcggcgctgcaagcgcttcaaggtgcttaagtccgaccacctggcgcccagcaagccagccgacgcgcagtacctgcagcagcaggccaagctgcggctcagcgcgctggcggcctcgggcacgcacctgccacagatgcccgccgccgcctacaacttgggcggcgtggcgcagccctcgggcttcaagcaccccttcgccatcgagaacatcatcgcgcgggaatacaagatgcctggggggctggccttctccgccatgcagccggtgcccgctgcctacccgctccccaaccagttgactaccatgggcagctcgctgggcaccggctggccacacgtgtatggctccgccggcatgatcgattcggccacccccatctccatggcgagtggcgactacagcgcctacggcgtgccgttgaagccgctgtgccacgcggcgggccaaacgctgcccgccatccccgtgcccattaagcccacgccggccgccgtgcccgcgctgcctgcgctgccagcgcccatccccaccttgctctcgaactcgccgccctcgctcagccccacgtcctcgcaaacagccaccagccaaagcagccccgccacccccagcgaaacgctcaccagcccggcctccgccttgcactcggtggccgtgcactgacc

SEQ ID NO: 87273 - DNA, 241 bp, Homo sapiens
ggaaaaattggatatccacatgcagaagaatgaaagtagactcccacttctcaccctatacaaaaatcaacttaaaatgaatcaaagacctaaacctaagatctgaaacaataaaactatgagaagaaaacataagggaaacacttcaggacattggtctgggaaatgattttatgaataaaacctcaaaagcaagggcaacaaaagcaaaaataaacaaatgggataacacgttcgcgag

SEQ ID NO: 87274 - DNA, 252 bp, Homo sapiens
aaaacctgacacatagtaggtgctaatatttggttgaatggaagatattgataatgacaagaggcagataaatgcctaggtacataggggcgaatccctgatgaaatgccaccttcaagccaaaaacagcctgaaggctgaaagaccacactgctggttctggatgaaagccgtgattcagagtgagaacctctgttcatgtttgcccaccctttccccattgattctttctgaataatgctttttaaccaa

SEQ ID NO: 87275 - DNA, 444 bp, Homo sapiens
agccagttttcccagcaccatttattaaatagggaatcctttccccattgcttgtttttctcaggtttgtcaaagatcagatagttgtagatatgcgtaagccagcaatttctatggctatgacttggtttttgacattatccataactaccgaacctctgaaatcactaacacaaacatctcactgtctgataacttcctcttcatccaacttgcatgttcaactactttgttcaattttatctaggatttccaaaccactaaactttctatcttctcccagacctttttttttttttgagacagtcttgctctgttgcccaggctggagtgcagtggtgtgatcttggctcactgcaacctctgcctcccaggttcaagtgattctccagcctcagcttctggagtagttgggactacaggcaggcgctgccatgcccagct

SEQ ID NO: 87276 - DNA, 623 bp, Homo sapiens
atctaacttaattatatactaattatatctaacttaattatatactatatacttaatcttaaattgataccagtagaagcaaatgcattaggaatttgagccatgtctaccactaggcacaccaccactatggaatcagaatctaagtgaagcttgagtaccctttcacatactctgtatattgattcaaaactagtggtaagcactgggcaaaaatggaatagagcttaatggacagccagtaggctcagccatcatattcttgaaaacctagaaaatgccagtattctgggtctcttaaattcattattttaaagtctggatgatctggctgggtgcggcacatcacttgggctcaggaagttcaagatcagcctggacaacatggtgaaacctgtctctacgaaaaatccaaaaaaattagccccgtgtggtagcgcacacctgtagtcccagctattctggaggctgaggcaggagaatcacttgaacctgggagttggaggttgcaatgagctatcacgccactgcactccagcgagggcaacagagcaagactctgtctcaaaaaaaaagaaagtctgaatgatccatattgctggactttgttttttgtttattat

SEQ ID NO: 87277 - DNA, 461 bp, Homo sapiens
ctataatcatggccgtcataggttatggcatggctaggtttatagatagttgggtggttggtgtaaatgagtgaggcaggagtccgaggaggttagttgtggcaataaaaatgattaaggacactagtataagagatcaggttcgtcctttagtgttgtgtatggttatcatttgttttgaggttagtttgattagtcattgttgggcgtacggggaccccgtacgcccaactccacagccaaaagtttgtgtatataaccttattactaaacagcaagttttcttggacccaaagaagcaaaaataaaagcaaacgtgaaatggctccatttggaagatccagtttcataattttatctctgtggttgccaaatacacactctcgtctcttgaaattctcctgtatcccaaaaatctgggtgagggaagacagattccattacttgttacttcaccagga

SEQ ID NO: 87278 - DNA, 832 bp, Homo sapiens
attctttacaaataattcccacgtaacagctatccgtcttctaagagcagacattagattgtgccattcccctgcttattaaaaataacaaacaaacaaaactgatgcttgagcacacttagactaaaatccatacttttttcatggccagagcaaggcagtacttgatctggtctctgcttaattcttcaacttcatctcctagtactcgcctttctctcccactgccccttttataatcgggttattctgtcctattcttctagctcgccagtacagcattattctggccacaagactttgtacttgctgttcctttgcttgacactgctcttcctctaggtcctgacgtaggtggtttcttcttaaatttagctcaggtgttcttttcttttttttttttttttttttagatggagtcttgctctgtcacccgggctggagtgcagtggcacgatctctactcactgcaacctccgcctcccgggttcaagtgattctcctgcctcagcctcccgagtagctgggattacaggcgccggcgaccacgcccagctaatttttgtatttttagtagagagggggtttcaccatgttggccaagctggtctcgaactcctgacctcaggtgatcgcccgcctcagcctcccaaagtgctgggattacaggcgtgagccaccgcacccgacctaggtgttcttttcttttcttttctttctttcaagacggagtttcgctcttgttgtgcaatggcacgatctcggctcactgcaacctccgcctcccgggttcaagcgattctcctgcctcagcctcccaagtagctgggat

SEQ ID NO: 87279 - DNA, 455 bp, Homo sapiens
tttaaagatgtttttaaatgtctcaacctatgtcagtattgatttatctggattttgccaacattgctatattttcttctcgtctaccactttttggaagactaaatggatggcttggagcaaagtctttgtaacctcacaggcacatgtgtgatcttcttttgtaattaagtagctaagacacatttttaaaaaccccttcttttgtgtctagctacttaatttttactttaaaaaaattaacatgtgaactagttgatatagatcagaaaaaacagggtggtaactttgatattaagcttaagctttctggcaaaaccaatagggtccttgtaactttgatattaagcttaagctttctggcaaaaccaataggatcctcgtggaaattagattttttttttttttttttttggaaacggggtgtggggtacccgagcccaaattcgaaacca

SEQ ID NO: 87280 - DNA, 286 bp, Homo sapiens
ccagtttcaaccctcttcaaaaccccccagggcccgcaacaagattgggtcctaccggagagatgattttaggcagaacctagagaaacctcttacattttaatagttaagcatttattttaatgtgtactgaaaaaatataactagcacatcaaaactgtgatttcacacatatgattgcttaggatgagactaatgggggtattaaaaaatggtgggttagtttatagaaaaacattaaggacataatagcgcaggcggtgcgtgggcatgtccgtggggatcc

SEQ ID NO: 87281 - DNA, 339 bp, Homo sapiens
ctctgctcactgagataaatgcatatctgactgcctcctttggaaatgctaatcagaaactcagaaggatgcaaccacttgtctcttatctacctataacctataagtcccctccctgctttgagtcttcctgcctttgcttccagttgtcctgcctttccagactgaaccaatgttcatcttgtgtatgttgactgatgtccccctagaatgtataaaaccaaactgtgctctgaccaccttgggcacatgtcatcaggacctcctgaggctgtgtcccaggtgcatgtcctcaattttggcaaaataagctttctaaattaactgagacctgtctca

SEQ ID NO: 87282 - DNA, 4374 bp, Homo sapiens
tcaggaaggggacattgggtgacccaccccaaggcaggtcagaggggcttgccaaggaaggctccctggggagtggtctctggcctcctctgagtcttccaaccctaatggtgcctggcatagatattctctccacttcagctcgagctcccacaacactctgaggcctgcacccagaggcagtgcccaggagagcgctgtccggcctcggagaatggtggagcccctggaggacagaaggcaagagaacttcttctgtggcccccctgagaagagctatgcaaagctggtgttcatgtccacctcctcgggcagcctatggaacctgcatgccatccattccatgtgtcgcatggaacaggaccagatccgctcccataccagcttcggggctctgtgccagcggacagcagccaaccagtgctgccccagctggtccctgggcaactatctggctgtgctctccaaccgctcctcctgcctggacactacccaagctgacgcagcccgcacactggccctgcttcggacctgtgccctctactaccacagtggcgccttggtgccctcttgtctgggacctgggcagaacaagtccccacgctgtgcccaggttcccaccaagtgctcccagagtagtgccatctaccaactcctgcactttctgcttgacagggactttctgagtccccagaccactgactaccaggtgccttccctcaagtacagcctgctcttcctgcccaccccaaagggtgcttccctcatggacatctacctggaccggctggccaccccctgggggcttgctgacaactacacctctgtcactggcatggacctgggcctcaagcaggagctgctgaggcacttcctggtccaggacacggtgtaccccttgctggctctggttgccatcttcttcggcatggccctgtacctgcgctcactcttcctcacgctcatggtgctgctgggggtgctgggctcactgctggtggccttcttcctttaccaggtggccttccgcatggcctacttccccttcgtcaatctggcagccctcctcctgctgagcagcgtctgcgccaaccacacgctcatcttcttcgacctgtggcgccttagcaagagccagctgccgtcgggggggctggcgcagcgcgtgggccgcaccatgcaccacttcggctacctgctgctggtctccggcctcaccacgagcgcggccttctatgccagctacctgagccgcctgccggccgttcgctgcctcgccctcttcatgggcacggctgtgctggtgcacctggcgctcacgctggtctggctgcccgcctccgccgtgctccacgagcgctacctggcgcgcggctgtgcgcgccgggcgcggggccggtgggagggcagcgcgccccggcggctactgctggcgctgcaccggcggctccgcggcctgcggagggcggcggctggcacctcgcgtctgctcttccagcgcctgctgccctgcggcgtcatcaagttccgctacatctggatctgctggttcgcagcactggcggcagggggcgcctacatcgccggagtcagcccccgcctgcggctgcccacgctgccgccgcccggcggccaggtcttccggcccagccaccccttcgagcgcttcgacgcggagtatcgccagctgttcctgttcgagcagctgccgcagggcgagggcggccacatgcccgtggttttggtgtggggcgtcctgcctgtggacactggcgaccctctggaccctcgtagcaacagcagcctggtgagggaccctgccttctcggccagcggccctgaggcccagcgctggctgctggcactctgtcaccgggcccggaatcagagcttcttcgacaccctgcaggaaggctggcccacgctgtgtttcgtggagaccctccagcgctggatggagagccccagctgcgcccgcctggggcctgacctctgctgcggccactcggacttcccctgggccccccagtttttcctgcactgcctgaaaatgatggctctggagcaaggccccgatggcacccaggacctgggactccgctttgatgcccatggcagcctggccgccctggtcctacaattccagaccaacttccggaacagtccggactacaaccagacccagctcttctacaatgaggtcagccactggctggcagcggagctgggcatggcacctccaggcctccgccgtggttggttcactagccgtctagagctgtatagcctgcagcacagcctgagcactgagcctgctgtggtgctgggcctggctttggcgctggcctttgccacactgctcctgggcacctggaatgttcccctcagcctattctccgtggcagctgtggcaggcaccgtgctgctcactgtaggactcctggttctcctcgagtggcagctcaacactgccgaggccctgtttctctctgcctcagtgggcctctcagtagacttcactgtcaactactgcatctcctatcacctgtgcccacaccctgaccgcctgagccgtgtggccttctctctgcgccagaccagctgcgccacagccgtgggggctgcagccctgtttgcggcaggcgtgctcatgctgcctgccacagtgctgctctatcgcaagctgggcatcatcctcatgatggtcaaatgcgtcagttgtggctttgccagcttcttcttccaatctctctgctgtttcttcgggccagagaagaactgtgggcagatcctctggccctgtgcccacctgccatgggatgctggtactggggaccctggtggggagaaggcaggccgcccacgaccagggtcagtgggagggatgcccgggtcctgctcagagcaatatgagctacagcccctggcacggcgtcggagccccagctttgacaccagcacagccaccagcaagctgtcccaccggccctcagtactctctgaggatctgcagctccatgatggtccgtgctgttcccggcccccaccagcccctgcctccccaagggagctgctgctggaccaccaggcagtcttcagccagtgccctgccctgcagacctcctccccctataagcaggctggccccagccccaaaacccgggccaggcaggactcccaaggggaggaggctgagcccctgccagcctcaccagaagccccagcccactctcctaaggccaaggctgcagatcctcctgatggcttctgttcctcagccagcaccctggaggggctcagcgtctctgatgagacctgcctaagcacctctgagcccagtgcccgtgtaccagattccgtgggtgtgtccccagatgacctggatgacactgggcagccagtccttgagcgaggccagctcaatgggaagcgggacaccctgtggctggcgctgagggagacagtgtatgacccatcattgcccgcttcccatcacagcagcttgtcctggaagggccgaggggggccaggggatggcagccctgtggtgctgcccaatagccagccagacctgccagatgtttggctgcgcaggcccagcactcacacgtcaggctatagcagctgagggggacccggggaggctggacagggcgcggaaccctgtcatggatgacaaggcaagggcagcaataggctggagcccgaaggtatttctccagatccacagggagaggtctcaccctccagctgtggatgttaaaccctgccagatgtcccagccttgatctgtctgctcctactcctcacatctggaggattccagcaggaggggttttggaggggacctgcttgcgacctgctgagggcttgtctgctcccacagcaccatctaagacccctcctctagaagtggggaaggccagatgtgtagcttcgggtatcagaggaggctgacctggcccccatcccaagttacaagaacttcagtgagactaagggacccccatcctagggatcttgtcagggttccttactgaccagaggagcccgcagcaatctccacagcctcctgggtctcacccctttcatgggctcttcatcaggacacttccctctcttttgggagcttctctgggcagaattgggctgggacctctctccccaactgccctgctctcctcatactcaccggtttgaccagaaattctccaaatccagccatagatggctgctgggtgtgcagcaggagaaggaggatggtcagccttggagcatctctcaattacgggacagtccctctttggaagcaggctcctgtgctttcctgtgttaataaacagtaataatcctttccatctctgcacattttag

SEQ ID NO: 87283 - DNA, 380 bp, Homo sapiens
ggtctctggcctcctctgagtcttccaaccctaatggtgcctggcatagatattctctccacttcagctcgagctcccacaacactctgaggcctgcacccagaggcagtgcccaggagagcgctgtccggcctcggagaatggtggagcccctggaggacagaaggcaagagaacttcttctgtggcccccctggtaagctgcagcctggccagttcctggttttaatagtggtccccaccccacctagtaggacaggcaggcccagaacaaatctgggcagacagaaagggaaggtggccagctggccacagtcaagccaaggaagccgggttacagctgggataggggagttctcagatgctccagccagacagggt

SEQ ID NO: 87284 - DNA, 4314 bp, Homo sapiens
gttagtggtctggagagcactacaagccctcacaggccccaggaagctgcttttcctttccccagaccttgagctgaacagctcgagctcccacaacactctgaggcctgcacccagaggcagtgcccaggagagcgctgtccggcctcggagaatggtggagcccctggaggacagaaggcaagagaacttcttctgtggcccccctgagaagagctatgcaaagctggtgttcatgtccacctcctcgggcagcctatggaacctgcatgccatccattccatgtgtcgcatggaacaggaccagatccgctcccataccagcttcggggctctgtgccagcggacagcagccaaccagtgctgccccagctggtccctgggcaactatctggctgtgctctccaaccgctcctcctgcctggacactacccaagctgacgcagcccgcacactggccctgcttcggacctgtgccctctactaccacagtggcgccttggtgccctcttgtctgggacctgggcagaacaagtccccacgctgtgcccaggttcccaccaagtgctcccagagtagtgccatctaccaactcctgcactttctgcttgacagggactttctgagtccccagaccactgactaccaggtgccttccctcaagtacagcctgctcttcctgcccaccccaaagggtgcttccctcatggacatctacctggaccggctggccaccccctgggggcttgctgacaactacacctctgtcactggcatggacctgggcctcaagcaggagctgctgaggcacttcctggtccaggacacggtgtaccccttgctggctctggttgccatcttcttcggcatggccctgtacctgcgctcactcttcctcacgctcatggtgctgctgggggtgctgggctcactgctggtggccttcttcctttaccaggtggccttccgcatggcctacttccccttcgtcaatctggcagccctcctcctgctgagcagcgtctgcgccaaccacacgctcatcttcttcgacctgtggcgccttagcaagagccagctgccgtcgggggggctggcgcagcgcgtgggccgcaccatgcaccacttcggctacctgctgctggtctccggcctcaccacgagcgcggccttctatgccagctacctgagccgcctgccggccgttcgctgcctcgccctcttcatgggcacggctgtgctggtgcacctggcgctcacgctggtctggctgcccgcctccgccgtgctccacgagcgctacctggcgcgcggctgtgcgcgccgggcgcggggccggtgggagggcagcgcgccccggcggctactgctggcgctgcaccggcggctccgcggcctgcggagggcggcggctggcacctcgcgtctgctcttccagcgcctgctgccctgcggcgtcatcaagttccgctacatctggatctgctggttcgcagcactggcggcagggggcgcctacatcgccggagtcagcccccgcctgcggctgcccacgctgccgccgcccggcggccaggtcttccggcccagccaccccttcgagcgcttcgacgcggagtatcgccagctgttcctgttcgagcagctgccgcagggcgagggcggccacatgcccgtggttttggtgtggggcgtcctgcctgtggacactggcgaccctctggaccctcgtagcaacagcagcctggtgagggaccctgccttctcggccagcggccctgaggcccagcgctggctgctggcactctgtcaccgggcccggaatcagagcttcttcgacaccctgcaggaaggctggcccacgctgtgtttcgtggagaccctccagcgctggatggagagccccagctgcgcccgcctggggcctgacctctgctgcggccactcggacttcccctgggccccccagtttttcctgcactgcctgaaaatgatggctctggagcaaggccccgatggcacccaggacctgggactccgctttgatgcccatggcagcctggccgccctggtcctacaattccagaccaacttccggaacagtccggactacaaccagacccagctcttctacaatgaggtcagccactggctggcagcggagctgggcatggcacctccaggcctccgccgtggttggttcactagccgtctagagctgtatagcctgcagcacagcctgagcactgagcctgctgtggtgctgggcctggctttggcgctggcctttgccacactgctcctgggcacctggaatgttcccctcagcctattctccgtggcagctgtggcaggcaccgtgctgctcactgtaggactcctggttctcctcgagtggcagctcaacactgccgaggccctgtttctctctgcctcagtgggcctctcagtagacttcactgtcaactactgcatctcctatcacctgtgcccacaccctgaccgcctgagccgtgtggccttctctctgcgccagaccagctgcgccacagccgtgggggctgcagccctgtttgcggcaggcgtgctcatgctgcctgccacagtgctgctctatcgcaagctgggcatcatcctcatgatggtcaaatgcgtcagttgtggctttgccagcttcttcttccaatctctctgctgtttcttcgggccagagaagaactgtgggcagatcctctggccctgtgcccacctgccatgggatgctggtactggggaccctggtggggagaaggcaggccgcccacgaccagggtcagtgggagggatgcccgggtcctgctcagagcaatatgagctacagcccctggcacggcgtcggagccccagctttgacaccagcacagccaccagcaagctgtcccaccggccctcagtactctctgaggatctgcagctccatgatggtccgtgctgttcccggcccccaccagcccctgcctccccaagggagctgctgctggaccaccaggcagtcttcagccagtgccctgccctgcagacctcctccccctataagcaggctggccccagccccaaaacccgggccaggcaggactcccaaggggaggaggctgagcccctgccagcctcaccagaagccccagcccactctcctaaggccaaggctgcagatcctcctgatggcttctgttcctcagccagcaccctggaggggctcagcgtctctgatgagacctgcctaagcacctctgagcccagtgcccgtgtaccagattccgtgggtgtgtccccagatgacctggatgacactgggcagccagtccttgagcgaggccagctcaatgggaagcgggacaccctgtggctggcgctgagggagacagtgtatgacccatcattgcccgcttcccatcacagcagcttgtcctggaagggccgaggggggccaggggatggcagccctgtggtgctgcccaatagccagccagacctgccagatgtttggctgcgcaggcccagcactcacacgtcaggctatagcagctgagggggacccggggaggctggacagggcgcggaaccctgtcatggatgacaaggcaagggcagcaataggctggagcccgaaggtatttctccagatccacagggagaggtctcaccctccagctgtggatgttaaaccctgccagatgtcccagccttgatctgtctgctcctactcctcacatctggaggattccagcaggaggggttttggaggggacctgcttgcgacctgctgagggcttgtctgctcccacagcaccatctaagacccctcctctagaagtggggaaggccagatgtgtagcttcgggtatcagaggaggctgacctggcccccatcccaagttacaagaacttcagtgagactaagggacccccatcctagggatcttgtcagggttccttactgaccagaggagcccgcagcaatctccacagcctcctgggtctcacccctttcatgggctcttcatcaggacacttccctctcttttgggagcttctctgggcagaattgggctgggacctctctccccaactgccctgctctcctcatactcaccggtttgaccagaaattctccaaatccagccatagatggctgctgggtgtgcagcaggagaaggaggatggtcagccttggagcatctctcaattacgggacagtccctctttggaagcaggctcctgtgctttcctgtgttaataaacagtaataatcctttccatctctgcacattttag

SEQ ID NO: 87285 - DNA, 4140 bp, Homo sapiens
tcaggaaggggacattgggtgacccaccccaaggcaggtcagaggggcttgccaaggaaggctccctggggagtggtctctggcctcctctgagtcttccaaccctaatggtgcctggcatagatattctctccacttcagctcgagctcccacaacactctgaggcctgcacccagaggcagtgcccaggagagcgctgtccggcctcggagaatggtggagcccctggaggacagaaggcaagagaacttcttctgtggcccccctgagaagagctatgcaaagctggtgttcatgtccacctcctcgggcagcctatggaacctgcatgccatccattccatgtgtcgcatggaacaggaccagatccgctcccataccagcttcggggctctgtgccagcggacagcagccaaccagtgctgccccagctggtccctgggcaactatctggctgtgctctccaaccgctcctcctgcctggacactacccaagctgacgcagcccgcacactggccctgcttcggacctgtgccctctactaccacagtggcgccttggtgccctcttgtctgggacctgggcagaacaagtccccacgctgtgcccaggttcccaccaagtgctcccagagtagtgccatctaccaactcctgcactttctgcttgacagggactttctgagtccccagaccactgactaccaggtgccttccctcaagtacagcctgctcttcctgcccaccccaaagggtgcttccctcatggacatctacctggaccggctggccaccccctgggggcttgctgacaactacacctctgtcactggcatggacctgggcctcaagcaggagctgctgaggcacttcctggtccaggacacggtgtaccccttgctggctctggttgccatcttcttcggcatggccctgtacctgcgctcactcttcctcacgctcatggtgctgctgggggtgctgggctcactgctggtggccttcttcctttaccaggtggccttccgcatggcctacttccccttcgtcaatctggcagccctcctcctgctgagcagcgtctgcgccaaccacacgctcatcttcttcgacctgtggcgccttagcaagagccagctgccgtcgggggggctggcgcagcgcgtgggccgcaccatgcaccacttcggctacctgctgctggtctccggcctcaccacgagcgcggccttctatgccagctacctgagccgcctgccggccgttcgctgcctcgccctcttcatgggcacggctgtgctggtgcacctggcgctcacgctggtctggctgcccgcctccgccgtgctccacgagcgctacctggcgcgcggctgtgcgcgccgggcgcggggccggtgggagggcagcgcgccccggcggctactgctggcgctgcaccggcggctccgcggcctgcggagggcggcggctggcacctcgcgtctgctcttccagcgcctgctgccctgcggcgtcatcaagttccgctacatctggatctgctggttcgcagcactggcggcagggggcgcctacatcgccggagtcagcccccgcctgcggctgcccacgctgccgccgcccggcggccaggtcttccggcccagccaccccttcgagcgcttcgacgcggagtatcgccagctgttcctgttcgagcagctgccgcagggcgagggcggccacatgcccgtggttttggtgtggggcgtcctgcctgtggacactggcgaccctctggaccctcgtagcaacagcagcctggtgagggaccctgccttctcggccagcggccctgaggcccagcgctggctgctggcactctgtcaccgggcccggaatcagagcttcttcgacaccctgcaggaaggctggcccacgctgtgtttcgtggagaccctccagcgctggatggagagccccagctgcgcccgcctggggcctgacctctgctgcggccactcggacttcccctgggccccccagtttttcctgcactgcctgaaaatgatggctctggagcaaggccccgatggcacccaggacctgggactccgctttgatgcccatggcagcctggccgccctggtcctacaattccagaccaacttccggaacagtccggactacaaccagacccagctcttctacaatgaggtcagccactggctggcagcggagctgggcatggcacctccaggcctccgccgtggttggttcactagccgtctagagctgtatagcctgcagcacagcctgagcactgagcctgctgtggtgctgggcctggctttggcgctggccttctctctgcgccagaccagctgcgccacagccgtgggggctgcagccctgtttgcggcaggcgtgctcatgctgcctgccacagtgctgctctatcgcaagctgggcatcatcctcatgatggtcaaatgcgtcagttgtggctttgccagcttcttcttccaatctctctgctgtttcttcgggccagagaagaactgtgggcagatcctctggccctgtgcccacctgccatgggatgctggtactggggaccctggtggggagaaggcaggccgcccacgaccagggtcagtgggagggatgcccgggtcctgctcagagcaatatgagctacagcccctggcacggcgtcggagccccagctttgacaccagcacagccaccagcaagctgtcccaccggccctcagtactctctgaggatctgcagctccatgatggtccgtgctgttcccggcccccaccagcccctgcctccccaagggagctgctgctggaccaccaggcagtcttcagccagtgccctgccctgcagacctcctccccctataagcaggctggccccagccccaaaacccgggccaggcaggactcccaaggggaggaggctgagcccctgccagcctcaccagaagccccagcccactctcctaaggccaaggctgcagatcctcctgatggcttctgttcctcagccagcaccctggaggggctcagcgtctctgatgagacctgcctaagcacctctgagcccagtgcccgtgtaccagattccgtgggtgtgtccccagatgacctggatgacactgggcagccagtccttgagcgaggccagctcaatgggaagcgggacaccctgtggctggcgctgagggagacagtgtatgacccatcattgcccgcttcccatcacagcagcttgtcctggaagggccgaggggggccaggggatggcagccctgtggtgctgcccaatagccagccagacctgccagatgtttggctgcgcaggcccagcactcacacgtcaggctatagcagctgagggggacccggggaggctggacagggcgcggaaccctgtcatggatgacaaggcaagggcagcaataggctggagcccgaaggtatttctccagatccacagggagaggtctcaccctccagctgtggatgttaaaccctgccagatgtcccagccttgatctgtctgctcctactcctcacatctggaggattccagcaggaggggttttggaggggacctgcttgcgacctgctgagggcttgtctgctcccacagcaccatctaagacccctcctctagaagtggggaaggccagatgtgtagcttcgggtatcagaggaggctgacctggcccccatcccaagttacaagaacttcagtgagactaagggacccccatcctagggatcttgtcagggttccttactgaccagaggagcccgcagcaatctccacagcctcctgggtctcacccctttcatgggctcttcatcaggacacttccctctcttttgggagcttctctgggcagaattgggctgggacctctctccccaactgccctgctctcctcatactcaccggtttgaccagaaattctccaaatccagccatagatggctgctgggtgtgcagcaggagaaggaggatggtcagccttggagcatctctcaattacgggacagtccctctttggaagcaggctcctgtgctttcctgtgttaataaacagtaataatcctttccatctctgcacattttag

SEQ ID NO: 87286 - DNA, 336 bp, Homo sapiens
caagctcagccaccaacttaaaaaggactggacaatacttttaccactttcccttctcagaattcaggcctgtcctcggaatgctacaaggtacagcccatttgagctcctttttattaggccccagtctcattccagacaccagacgaacttaaactgtgcccccaaataacttgtcatccctactatcttctgtctagtcatactcctattcaccattctcaactactcatacatgccctgctcttgtttacactgccggtttacactgtttctccaagccatcacagctgatatctcctcgtgctatccccaaactgccactcttaactcttg

SEQ ID NO: 87287 - DNA, 159 bp, Homo sapiens
cgcttctcttgaacagttttgagtcagagatttagaccatggagtttttagctagaatgaaaattataatcatttgtgaaatttttacaaagatttggacgtaatcacaggtctactgacttaaatattcaggggtgttggacctagacagataacttt

SEQ ID NO: 87288 - DNA, 608 bp, Homo sapiens
cacctgagtactccccaaacccacagcaacacagcatgggctgcaagagatactgttgctcacacccttgcaccacagcccccagtagaagttcttgctcctaaaacagcgctgggagttcaagatgatctcatccaatatcacctcataacagatggggaaaggcaggcataagaaaggtcatgtgtttgcactttgttagtaccagggatatatatatatgttagttttcatgcagtcaactttgtaggaggtactaagaatactataatcatagtttaaagcaggaaggaactttaaagtttagctactctggcacttttcaacctccacactagggtgtcaagatgtgatgtaagctctcttgcaaatattccataattcatttgatgaatatttattgagcacctagaatatgctgtgcattagggacataagtcagataccacccctgccctcaggacttcatgcagtaatgaggaagggtgacagtaataatcacaagcctaatagtagagtcttattgttgcaagtgaattgtttttttaattttcaatattttttttagagacagggtcttgctctgtcacccaggctgaaaaaaaaaa

SEQ ID NO: 87289 - DNA, 7055 bp, Homo sapiens
agccggcgagcggcagcagctccgggctcgagagcccgcgcccatgccagtgcccatgcggggccgccgccagtgacgccggagaggtgttccccccacactggggctcccactactgcgaggagtgacccacgaaggccacagagatggccggggcttcggtgaaggtggcggtgcgggtccgccccttcaattcccgggaaatgagccgtgactccaagtgcatcattcagatgtctggaagcaccaccaccattgttaaccccaaacagcccaaggagacgcccaaaagcttcagctttgactactcctactggtcgcacacctcacctgaggacatcaactacgcgtcgcagaagcaggtgtaccgggacatcggcgaggagatgctgcagcatgcctttgagggatacaacgtgtgcatcttcgcctatgggcagacgggtgccggcaagtcctacaccatgatgggcaagcaggagaaggaccagcagggcatcatcccacagctctgcgaggacctcttctctcggatcaacgacacgaccaacgacaacatgtcctactccgtggaggtcagctacatggagatttactgtgagcgcgtccgtgacctcctgaaccccaagaacaagggcaaccttcgcgtgagggagcacccactgctggggccctacgtggaggacctctccaagctggctgtcacctcctacaatgacatccaggacctcatggactcagggaacaaggccaggaccgtggcggccaccaacatgaatgagaccagcagtcgctcccacgccgtcttcaacatcatcttcacccagaagcgccatgacgcagagaccaatatcaccacggagaaggtgagcaaaatcagcctggtggacctggctgggagcgagcgggctgactccacgggagccaagggcacgcgcctcaaggagggggccaacatcaacaagtcgctgaccaccctgggcaaggtcatctccgccctggctgaaatggactccggacccaacaagaacaagaaaaagaagaagacagatttcattccgtaccgagattccgtgttgacctggctcctccgggaaaacctgggcggtaactcaaggacagctatggtggcagccctgagtcctgcagacatcaactacgatgagacccttagcacgctgaggtatgctgaccgggccaagcagatccgctgcaatgctgtcatcaatgaggaccccaacaacaagctgatccgcgagctgaaggatgaggtgacccggctgcgggaccttctgtacgcccagggtcttggcgacatcactgacatgaccaatgccctggtgggtatgagcccctcatcctcgctctcagccctgtccagccgcgcggcctccgtgtccagcctccacgagcgcatcttgtttgccccgggcagcgaggaggccattgaaagactgaaggaaacagagaagatcatagctgagctcaatgagacctgggaggagaagctgcggcggacagaagccatccggatggagagggaagccctgctggccgagatgggtgtggccatgagggaggatggcggcaccttgggcgtattctctcccaaaaagacaccacacctcgtcaacctgaacgaggacccgctgatgtctgagtgcctgctctactacatcaaggatgggatcaccagagtgggcagggaggatggcgagaggcggcaggacattgttctgagtgggcacttcatcaaggaggagcactgcgtcttccggagcgactccaggggaggcagcgaagctgtggtgaccttggagccctgtgagggggcagacacctacgtcaatggcaagaaagtcacagagcccagcatcctgcgttcaggaaaccgcatcatcatgggtaagagccatgtgttccggttcaaccaccccgagcaggcccggcaggagcgtgagcgcacgccttgtgcggagacgccagctgagcctgtggactgggccttcgcccagcgtgagctgctggagaagcagggcatcgacatgaagcaggagatggagcagaggctccaggaactggaggaccagtaccgccgcgagcgggaggaggccacctacctgctggagcagcagcggctggactatgagagcaagctggaggctctgcagaagcagatggactccaggtactacccggaggtgaacgaggaggaggaggagcccgaggatgaagtccagtggacagagcgggagtgtgagctggcgctctgggccttccggaagtggaagtggtaccagttcacgtctctgcgggacctgctgtggggcaacgccatcttcctcaaggaggctaatgccatcagcgtggagctgaaaaagaaggtacaattccagtttgtcctcctgacggacacactctactcccctctgccacccgacctgctgcccccagaggccgccaaagaccgagagacgcggcccttcccccgcaccattgtggccgtggaggtccaggaccagaagaacggggccacccactactggacgctggagaagctcaggcagcgtctggacctgatgcgggagatgtacgaccgcgctgcagaggtgccctccagtgtcatcgaggactgtgacaacgtggtgaccggcggagaccccttctatgaccgcttcccctggttccggctggtgggcagggccttcgtgtacctgagcaacctgctgtaccccgttcccctggtacaccgtgtggcaatcgtcagcgagaagggcgaggtgaagggcttcctccgcgtggccgtccaggccatctcagccgatgaagaggcccctgattatggctctggcgtccgccagtcgggaactgctaaaatctcctttgatgaccagcattttgaaaagttccagtccgagtcttgccccgtggtggggatgtcccgctcgggaacctcccaggaagagcttcgcatcgtggagggccagggccagggtgcagacgtggggccctcagccgatgaagtcaacaacaacacctgttcagcagtgcccccagaaggcctcctcctagacagctctgagaaagccgccctggatgggcccctggatgctgccctggaccacctccgcctgggcaacaccttcaccttccgtgtgacagtcctgcaggcgtccagcatctctgccgaatatgccgacatcttctgccagttcaacttcatccaccgccacgacgaggccttctccacagagcccctgaagaacacaggcagaggccccccacttggcttctaccacgtccagaacatcgcagtggaggtgaccaagtccttcattgagtacatcaagagccagcccattgttttcgaggtctttggccactaccagcagcacccgttcccgcccctctgcaaggacgtgctcagccccctgaggccctcgcgccgccacttccctcgggtcatgccactgtccaagccagtgcccgccaccaagctcagcacactgacgcggccctgtccgggaccctgccactgcaagtacgacctgctggtctacttcgagatctgtgagctggaggccaacggcgattacatcccggccgtggtggaccaccgtgggggcatgccatgcatggggaccttcctcctccaccagggcatccagcgacggattacggtgacactactgcatgagacaggcagccatatccgctggaaggaagtgcgcgagctggtcgtgggccgcatccgaaacactccagagaccgacgagtccctgatcgaccccaacatcttgtctctcaacatcctctcttccggatacatccacccagcccaagatgaccggaccttttaccaatttgaggctgcgtgggacagctccatgcacaactctctcctgctgaaccgggtcaccccttatcgagagaaaatctacatgacactctccgcttatatcgagatggagaactgcacccagccggctgttgtcaccaaggacttctgcatggtcttctattcccgtgatgccaagctgccagcctcgcgctccatccgcaacctctttggcagtgggagccttcgggcctcagagagtaaccgtgtgactggtgtgtacgagctcagcctgtgccacgtggctgacgcgggcagcccagggatgcagcgccggcgccgacgagtcctggacacatctgtggcctatgtccggggcgaggagaacctggcaggctggaggccccggagtgacagtctcattctggaccaccagtgggagctggagaagctgagcctcctgcaggaggtggagaagactaggcactacctgctcctgcgggagaagctggagaccgcccagcggcctgtcccggaggcactgtccccggccttcagcgaggactctgagtcccatggctcctccagcgcctcctccccgctctcggctgagggccgcccatcacccctggaggctcccaacgagaggcagcgggagctggccgtcaagtgcttgcgcctgctcacgcacacattcaacagagagtacacacacagccacgtctgcgtcagtgccagcgagagcaagctctccgagatgtctgtcaccctgctccgggacccgtcgatgtcccctctaggggtggccactctcaccccctcctccacttgcccctctctggttgaagggcggtacggtgccactgacctgaggaccccgcagccctgctcccggccagccagcccagagcccgagctgctgccagaggccgactccaagaagctcccttcccctgcccgggcaacagagacagacaaggagccccagcgcctgctggtccctgacatccaggagatccgagtcagcccgatcgtttccaagaaggggtacctgcacttcctggagccgcacacgtcaggctgggccaggcgcttcgtggtggtgcggcgcccctatgcctacatgtacaacagcgacaaggacaccgtggagcggttcgtgctcaacctggccactgcccaggtggagtacagtgaggaccagcaggctatgctcaagacacccaacacattcgcggtgtgcacggaacaccgcggcatcctgctgcaggccgccagcgacaaggacatgcatgactggctgtacgccttcaaccccctcctggccgggaccatacggtccaagctctccagaaggaggtctgcccagatgcgggtctgaacctgagccctcccgtgacagccggcaggcccagcccatcccctccctcatcctcgtctgtcctgtcacctgccgcccagcccctctcctgccagacagcccacgaccgggtcgaccccccaggggacgcccatgccaggcccggggacctgtgccacacgaccagctgtgctcccagcagaggctgtgcgtgtcagttcttcttgcagaatgtgctctggtggaacaagttgggagaggctgggggggccaagggcacaggttacgggggttcttgctgccgttctaatatttttttaagcatagacagacttataattaatatacgttagttagtgacattgaaacagtcaactcggaaattaactataagacttgttctatttataagtatttatttctaatgcctccacatagccctgtaatattcagatggaacccccaaccacctccaccctgtttgttcccacatgtgtctcccaagcctgctagggacaggcagggcagggacagccaccttggaaggccgcagtgaggagctgtctggaccagtggggcaccttggggctagcacacgggtgtatcgcctgggccccaggcttctccatggccacatgggtcctgggtgtatgtgtgggagagtgggggggtgtctttggtgcctgaagtctgcgcggcatggagggtggtgtgagttcctctggtgggagggagaacgcacatctcttctgggcggccacctgaggagtgactccaagaagagttccggcagctttccccaggaaagggtgaggggtgacactcggctctggctctgagatgaggcagacggcacccaggctgtgatctgtcctgggcggggaccaggagggagcggggtcgggatcacctgccagtgtgcagactctgggactgcgtgctgtctccggaccatcagggtagggtggtgggttgagaccaggaagtcagggaagatcggaattcagggcgacggtctaggtgtcgagggctgtggcgcagcctcttcagctgcggcgagaaatggagtgagtcaaggtagcttctgggaagaaatgctgccattagcaggtttcttgcaaagactttcctctctttgttcccagggcagagagtttctgtgagtcccactgagaaaatcccatggggtgggggtatcctggtcggtcggcaatggagggtggctggcttggtggttattgtcttcaaggagctcttcgctgctgcatctgcggtgtccctttgttcttgtcccatttcaccccctctgcagacaccaatgtccgagggccacccaggacaggacgggggtcagccccaagctgagagtctggtcataggagtcatgtccagaggcctagggaggttttagggccctccccacccacacccacaggtcgatttggtctctttttagctcaaggaaagacagtagccaagcaacagagcccctctcccgccgtggcccgtgggagcagttacatcgggtctggtgctccagacctagggcccagcactttcatcagatcctgcctcctggagtgggggaaacgcagcaccccactggttctgaggcccctaccctcccaggctgtcccacgtgatgctgacatgagcctcagagaccccaatcccatgcctgggggtccctgagtggcaaaacatcctacagtggatagtcatacacaacaaaagataatcctgctcaaaatgccaacagtgttcccattgagaaacactgaattactgatccttcacaggtcagttcaaatcatacttgtctttagaaacagttctttatgttaaccctaagcccgg

SEQ ID NO: 87290 - DNA, 912 bp, Homo sapiens
acccacgcgtcggacccacgcggtcggcctccactgccatggagactgcctggctgtgtcctctcagccaggtgccgtgttggccttggctaggacccagagccacactgcagcctccgccgactccctccttccgggcctgctctagtgaggagtgcctaagccaggacccagaaactcagagttgatggtgagaggaggccgcctgagtcaggacacctggcttcttgaaaagttcgctctgccagaaaccacctagggaccacgttagctgccttccttgagctccccaggagtcggtttccacatctgtgaggtggagggctggtgtggaggtgctcatggggtgcggtgcttgggagacagccaggcccagggtggctgctgcttcctgctaagtgggggaggtgagacagatctggaaagccgtctccctcagatggtttcatttaatgctttatactgccgatggagactgcctggctgtgtcctctcagccaggtgccgtgtgtggcttgtgtaggacccagaggcacactgcagcctccgcgactcctccttccgggctgctctagtgaggagtgcctaggccaggacccagaaactcagagttgatggtgagaggaggcggctgagtcaggacaccgtggttcttgaagaagtcggtctggcagaaagcactagggacaacgtaagctggcttcttgaagtccccgggagtcggtttccccccttctgtgagtgggaggctggccgcggacggcgccaaggggagtggggggcctgggaaacacgcgagccgcgggaaaaggggggaccttcccgggcggccagaagaactggggaaccggggccagggcacccaccttgggacaccttgggacacagagaagcataggggaacacaacaac

SEQ ID NO: 87291 - DNA, 717 bp, Homo sapiens
gtaaggccttgtgtcctgtctgaaggtggagaagactaggcactacctgctcctgcgggagaagctggagaccgcccagcggcctgtcccggaggcactgtccccggccttcagcgaggactctgagtcccatggctcctccagcgcctcctccccgctctcggctgagggccgcccatcacccctggaggctcccaacgagaggcagcgggagctggccgtcaagtgcttgcgcctgctcacgcacacattcaacagagagtacacacacagccacgtctgcgtcagtgccagcgagagcaagctctccgagatgtctgtcaccctgctccgggacccgtcgatgtcccctctaggggtggccactctcaccccctcctccacttgcccctctctggttgaagggcggtacggtgccactgacctgaggtgagtgagctccaggctcccggagtggcttctggcaccacggctgacccatgaccatggccgtgactcgggcacagagagcacagaacagggggccccaatggccgagtgccttggggtggccacaggctgagggaagggcctggaggagtggagtccgcagccctctcagagggtgcctgtgccccgccagctccatcctagtgtgtgtgtgttctcttccctgaagaagaccagaaatgggtggaaaataagctaaagctcccctttcctgagacagtgcttata

SEQ ID NO: 87292 - DNA, 412 bp, Homo sapiens
gggttcccagggcacagccgagatggccatgggacgccgggctggataacttcctatggaagaggcctacatggctctttgggccccagggtggaccaaggaccaggggaagcccatctccactccagaggggagacagcttcacagatgggcggacctctaggatgggtgggaggagcagccacccatcaggtaggggtggaatgtccacgtgccccatgcagggatgcagcgccggcgccgacgagtcctggacacatctgtggcctatgtccggggcgaggagaacctggcaggctggaggccccggagtgacagtctcattctggaccaccagtgggagctggagaagctgagcctcctgcaggaggtgaggcagcctcagaggatgaggcccgcacggtggtgtcca

SEQ ID NO: 87293 - DNA, 8846 bp, Homo sapiens
agccggcgagcggcagcagctccgggctcgagagcccgcgcccatgccagtgcccatgcggggccgccgccagtgacgccggagaggtgttccccccacactggggctcccactactgcgaggagtgacccacgaaggccacagagatggccggggcttcggtgaaggtggcggtgcgggtccgccccttcaattcccgggaaatgagccgtgactccaagtgcatcattcagatgtctggaagcaccaccaccattgttaaccccaaacagcccaaggagacgcccaaaagcttcagctttgactactcctactggtcgcacacctcacctgaggacatcaactacgcgtcgcagaagcaggtgtaccgggacatcggcgaggagatgctgcagcatgcctttgagggatacaacgtgtgcatcttcgcctatgggcagacgggtgccggcaagtcctacaccatgatgggcaagcaggagaaggaccagcagggcatcatcccacagctctgcgaggacctcttctctcggatcaacgacacgaccaacgacaacatgtcctactccgtggaggtcagctacatggagatttactgtgagcgcgtccgtgacctcctgaaccccaagaacaagggcaaccttcgcgtgagggagcacccactgctggggccctacgtggaggacctctccaagctggctgtcacctcctacaatgacatccaggacctcatggactcagggaacaaggccaggaccgtggcggccaccaacatgaatgagaccagcagtcgctcccacgccgtcttcaacatcatcttcacccagaagcgccatgacgcagagaccaatatcaccacggagaaggtgagcaaaatcagcctggtggacctggctgggagcgagcgggctgactccacgggagccaagggcacgcgcctcaaggagggggccaacatcaacaagtcgctgaccaccctgggcaaggtcatctccgccctggctgaaatggactccggacccaacaagaacaagaaaaagaagaagacagatttcattccgtaccgagattccgtgttgacctggctcctccgggaaaacctgggcggtaactcaaggacagctatggtggcagccctgagtcctgcagacatcaactacgatgagacccttagcacgctgaggtatgctgaccgggccaagcagatccgctgcaatgctgtcatcaatgaggaccccaacaacaagctgatccgcgagctgaaggatgaggtgacccggctgcgggaccttctgtacgcccagggtcttggcgacatcactgacaccaacactgtgcctggaggacccaaattgaccaatgccctggtgggtatgagcccctcatcctcgctctcagccctgtccagccgcgcggcctccgtgtccagcctccacgagcgcatcttgtttgccccgggcagcgaggaggccattgaaagactgaaggaaacagagaagatcatagctgagctcaatgagacctgggaggagaagctgcggcggacagaagccatccggatggagagggaagccctgctggccgagatgggtgtggccatgagggaggatggcggcaccttgggcgtattctctcccaaaaagacaccacacctcgtcaacctgaacgaggacccgctgatgtctgagtgcctgctctactacatcaaggatgggatcaccagagtgggcagggaggatggcgagaggcggcaggacattgttctgagtgggcacttcatcaaggaggagcactgcgtcttccggagcgactccaggggaggcagcgaagctgtggtgaccttggagccctgtgagggggcagacacctacgtcaatggcaagaaagtcacagagcccagcatcctgcgttcaggaaaccgcatcatcatgggtaagagccatgtgttccggttcaaccaccccgagcaggcccggcaggagcgtgagcgcacgccttgtgcggagacgccagctgagcctgtggactgggccttcgcccagcgtgagctgctggagaagcagggcatcgacatgaagcaggagatggagcagaggctccaggaactggaggaccagtaccgccgcgagcgggaggaggccacctacctgctggagcagcagcggctggactatgagagcaagctggaggctctgcagaagcagatggactccaggtactacccggaggtgaacgaggaggaggaggagcccgaggatgaagtccagtggacagagcgggagtgtgagctggcgctctgggccttccggaagtggaagtggtaccagttcacgtctctgcgggacctgctgtggggcaacgccatcttcctcaaggaggctaatgccatcagcgtggagctgaaaaagaaggtacaattccagtttgtcctcctgacggacacactctactcccctctgccacccgacctgctgcccccagaggccgccaaagaccgagagacgcggcccttcccccgcaccattgtggccgtggaggtccaggaccagaagaacggggccacccactactggacgctggagaagctcaggcagcgtctggacctgatgcgggagatgtacgaccgcgctgcagaggtgccctccagtgtcatcgaggactgtgacaacgtggtgaccggcggagaccccttctatgaccgcttcccctggttccggctggtgggcagggccttcgtgtacctgagcaacctgctgtaccccgttcccctggtacaccgtgtggcaatcgtcagcgagaagggcgaggtgaagggcttcctccgcgtggccgtccaggccatctcagccgatgaagaggcccctgattatggctctggcgtccgccagtcgggaactgctaaaatctcctttgatgaccagcattttgaaaagttccagtccgagtcttgccccgtggtggggatgtcccgctcgggaacctcccaggaagagcttcgcatcgtggagggccagggccagggtgcagacgtggggccctcagccgatgaagtcaacaacaacacctgttcagcagtgcccccagaaggcctcctcctagacagctctgagaaagccgccctggatgggcccctggatgctgccctggaccacctccgcctgggcaacaccttcaccttccgtgtgacagtcctgcaggcgtccagcatctctgccgaatatgccgacatcttctgccagttcaacttcatccaccgccacgacgaggccttctccacagagcccctgaagaacacaggcagaggccccccacttggcttctaccacgtccagaacatcgcagtggaggtgaccaagtccttcattgagtacatcaagagccagcccattgttttcgaggtctttggccactaccagcagcacccgttcccgcccctctgcaaggacgtgctcagccccctgaggccctcgcgccgccacttccctcgggtcatgccactgtccaagccagtgcccgccaccaagctcagcacactgacgcggccctgtccgggaccctgccactgcaagtacgacctgctggtctacttcgagatctgtgagctggaggccaacggcgattacatcccggccgtggtggaccaccgtgggggcatgccatgcatggggaccttcctcctccaccagggcatccagcgacggattacggtgacactactgcatgagacaggcagccatatccgctggaaggaagtgcgcgagctggtcgtgggccgcatccgaaacactccagagaccgacgagtccctgatcgaccccaacatcttgtctctcaacatcctctcttccggatacatccacccagcccaagatgaccggaccttttaccaatttgaggctgcgtgggacagctccatgcacaactctctcctgctgaaccgggtcaccccttatcgagagaaaatctacatgacactctccgcttatatcgagatggagaactgcacccagccggctgttgtcaccaaggacttctgcatggtcttctattcccgtgatgccaagctgccagcctcgcgctccatccgcaacctctttggcagtgggagccttcgggcctcagagagtaaccgtgtgactggtgtgtacgagctcagcctgtgccacgtggctgacgcgggcagcccagggatgcagcgccggcgccgacgagtcctggacacatctgtggcctatgtccggggcgaggagaacctggcaggctggaggccccggagtgacagtctcattctggaccaccagtgggagctggagaagctgagcctcctgcaggaggtggagaagactaggcactacctgctcctgcgggagaagctggagaccgcccagcggcctgtcccggaggcactgtccccggccttcagcgaggactctgagtcccatggctcctccagcgcctcctccccgctctcggctgagggccgcccatcacccctggaggctcccaacgagaggcagcgggagctggccgtcaagtgcttgcgcctgctcacgcacacattcaacagagagtacacacacagccacgtctgcgtcagtgccagcgagagcaagctctccgagatgtctgtcaccctgctccgggacccgtcgatgtcccctctaggggtggccactctcaccccctcctccacttgcccctctctggttgaagggcggtacggtgccactgacctgaggaccccgcagccctgctcccggccagccagcccagagcccgagctgctgccagaggccgactccaagaagctcccttcccctgcccgggcaacagagacagacaaggagccccagcgcctgctggtccctgacatccaggagatccgagtcagcccgatcgtttccaagaaggggtacctgcacttcctggagccgcacacgtcaggctgggccaggcgcttcgtggtggtgcggcgcccctatgcctacatgtacaacagcgacaaggacaccgtggagcggttcgtgctcaacctggccactgcccaggtggagtacagtgaggaccagcaggctatgctcaagacacccaacacattcgcggtgtgcacggaacaccgcggcatcctgctgcaggccgccagcgacaaggacatgcatgactggctgtacgccttcaaccccctcctggccgggaccatacggtccaagctctccagaaggaggtctgcccagatgcgggtctgaacctgagccctcccgtgacagccggcaggcccagcccatcccctccctcatcctcgtctgtcctgtcacctgccgcccagcccctctcctgccagacagcccacgaccgggtcgaccccccaggggacgcccatgccaggcccggggacctgtgccacacgaccagctgtgctcccagcagaggctgtgcgtgtcagttcttcttgcagaatgtgctctggtggaacaagttgggagaggctgggggggccaagggcacaggttacgggggttcttgctgccgttctaatatttttttaagcatagacagacttataattaatatacgttagttagtgacattgaaacagtcaactcggaaattaactataagacttgttctatttataagtatttatttctaatgcctccacatagccctgtaatattcagatggaacccccaaccacctccaccctgtttgttcccacatgtgtctcccaagcctgctagggacaggcagggcagggacagccaccttggaaggccgcagtgaggagctgtctggaccagtggggcaccttggggctagcacacgggtgtatcgcctgggccccaggcttctccatggccacatgggtcctgggtgtatgtgtgggagagtgggggggtgtctttggtgcctgaagtctgcgcggcatggagggtggtgtgagttcctctggtgggagggagaacgcacatctcttctgggcggccacctgaggagtgactccaagaagagttccggcagctttccccaggaaagggtgaggggtgacactcggctctggctctgagatgaggcagacggcacccaggctgtgatctgtcctgggcggggaccaggagggagcggggtcgggatcacctgccagtgtgcagactctgggactgcgtgctgtctccggaccatcagggtagggtggtgggttgagaccaggaagtcagggaagatcggaattcagggcgacggtctaggtgtcgagggctgtggcgcagcctcttcagctgcggcgagaaatggagtgagtcaaggtagcttctgggaagaaatgctgccattagcaggtttcttgcaaagactttcctctctttgttcccagggcagagagtttctgtgagtcccactgagaaaatcccatggggtgggggtatcctggtcggtcggcaatggagggtggctggcttggtggttattgtcttcaaggagctcttcgctgctgcatctgcggtgtccctttgttcttgtcccatttcaccccctctgcagacaccaatgtccgagggccacccaggacaggacgggggtcagccccaagctgagagtctggtcataggagtcatgtccagaggcctagggaggttttagggccctccccacccacacccacaggtcgatttggtctctttttagctcaaggaaagacagtagccaagcaacagagcccctctcccgccgtggcccgtgggagcagttacatcgggtctggtgctccagacctagggcccagcactttcatcagatcctgcctcctggagtgggggaaacgcagcaccccactggttctgaggcccctaccctcccaggctgtcccacgtgatgctgacatgagcctcagagaccccaatcccatgcctgggggagagacagcggctcaggagtgggggagcacgggccttctacaccacatgggaaggctctggcatgaggttttcctttgggaaggttgtttgggcccctgaagttccatctccgagagtggtgtgcagggcaggccagggcccatgctggctgcagtctctgtggctgcctgcctgggccagcctgtttgggagctgggactgtgggctcgccttttcgtacctgggctcaggtgcggtgtggccaccgccaccctcatcccctgcctgggaggctctcccaggggctgatgggggggttctgtgagggagaatcagggctcgggaagccacgcctgggaaggcaggacacaggacacagcagctttctttggaaatctcccaggtgaggattcacatcccaaaataaaattcagaagccaggtggcctgtgctccccatgggtgacctctggaggcagtggaccaagatgcagcaaggagaggatgcagaacagcttcttgcagaagcacctgctccggcatccagcgctgcctggaggcaggaaggagaggcagggcaggacacgctggtctgagatgagggggagccccacgggccccaggcaggctagaggaggcacaggccctgccacggccaactcaggtcagccagcctgaggctgtggcctccaaagggtctgggcgcaccccccaggtcgcaggtgtctgaggccagccaacctgcagagcactcgcggcgtgggtgggctgagtggaggtgcctgggagctgcctaaattcagaagcctccactgccatggagactgcctggctgtgtcctctcagccaggtgccgtgttggccttggctaggacccagagccacactgcagcctccgccgactccctccttccgggcctgctctagtgaggagtgcctaagccaggacccagaaactcagagttgatggtgagaggaggccgcctgagtcaggacacctggcttcttgaaaagttcgctctgccagaaaccacctagggaccacgttagctgccttccttgagctccccaggagtcggtttccacatctgtgaggtggagggctggtgtggaggtgctcatggggtgcggtgcttgggagacagccaggcccagggtggctgctgcttcctgctaagtgggggaggtgagacagatctggaaagccgtctccctcagatggtttcatttaatgctttatactgccgagtctgggggcttgttttggtttgggggcagccatcctccaccagaaagggggagctccttccgctgcggctccagatagatggggatgccgggctccaggccgaccagcacttgggatctgatgggacacggccagtgcctaggggtgccaagtccaaggcctcccactgggagtcatcgctgagaagatgccaatgtttcatccaccggctgcacaggcacaaactcccccacccaggacggctgtgatgaggtggccctccctgtcaaccctggtccctggagtccccagcacctggggccctggtggggctgatgtcacaggtgtttactgtgctgctgcactggtcctatgccagcctcacccatgtggggaccacggaaggcacactcccttacccccggtgccgggccgtgcggtcccccagacggacagcagctgtggcgacctgcgtttctccctgggcctgtgcttcctgtagttagtccgtcccctggttcccctgtggctcagaggccgcgtccctggcttgtacatatgtgattgctgtgggcacaccccagaccccatgtcatagctgccgtcccgacgtcacgacgcctgtcccgatgtcttacacccgagtgttagccctaggctcctgtactgtgcgtgcacttgaggctctgtccaattaagaaataaatgtggctcttactcaacacagtc

SEQ ID NO: 87294 - DNA, 7684 bp, Homo sapiens
gttgatggtttctgtttcttgccttctctgggccccatctcttactttttcccatcttcatcttttttctctccctccctctgtctgtctgcccgccctacccctcctccccatagacgtgtccgaccttgagaacaataaccttaaccgtggcgggacggtgaatgaagcccctgaccctctctccacagtgaccaatgccctggtgggtatgagcccctcatcctcgctctcagccctgtccagccgcgcggcctccgtgtccagcctccacgagcgcatcttgtttgccccgggcagcgaggaggccattgaaagactgaaggaaacagagaagatcatagctgagctcaatgagacctgggaggagaagctgcggcggacagaagccatccggatggagagggaagccctgctggccgagatgggtgtggccatgagggaggatggcggcaccttgggcgtattctctcccaaaaagacaccacacctcgtcaacctgaacgaggacccgctgatgtctgagtgcctgctctactacatcaaggatgggatcaccagagtgggcagggaggatggcgagaggcggcaggacattgttctgagtgggcacttcatcaaggaggagcactgcgtcttccggagcgactccaggggaggcagcgaagctgtggtgaccttggagccctgtgagggggcagacacctacgtcaatggcaagaaagtcacagagcccagcatcctgcgttcaggaaaccgcatcatcatgggtaagagccatgtgttccggttcaaccaccccgagcaggcccggcaggagcgtgagcgcacgccttgtgcggagacgccagctgagcctgtggactgggccttcgcccagcgtgagctgctggagaagcagggcatcgacatgaagcaggagatggagcagaggctccaggaactggaggaccagtaccgccgcgagcgggaggaggccacctacctgctggagcagcagcggctggactatgagagcaagctggaggctctgcagaagcagatggactccaggtactacccggaggtgaacgaggaggaggaggagcccgaggatgaagtccagtggacagagcgggagtgtgagctggcgctctgggccttccggaagtggaagtggtaccagttcacgtctctgcgggacctgctgtggggcaacgccatcttcctcaaggaggctaatgccatcagcgtggagctgaaaaagaaggtacaattccagtttgtcctcctgacggacacactctactcccctctgccacccgacctgctgcccccagaggccgccaaagaccgagagacgcggcccttcccccgcaccattgtggccgtggaggtccaggaccagaagaacggggccacccactactggacgctggagaagctcaggcagcgtctggacctgatgcgggagatgtacgaccgcgctgcagaggtgccctccagtgtcatcgaggactgtgacaacgtggtgaccggcggagaccccttctatgaccgcttcccctggttccggctggtgggcagggccttcgtgtacctgagcaacctgctgtaccccgttcccctggtacaccgtgtggcaatcgtcagcgagaagggcgaggtgaagggcttcctccgcgtggccgtccaggccatctcagccgatgaagaggcccctgattatggctctggcgtccgccagtcgggaactgctaaaatctcctttgatgaccagcattttgaaaagttccagtccgagtcttgccccgtggtggggatgtcccgctcgggaacctcccaggaagagcttcgcatcgtggagggccagggccagggtgcagacgtggggccctcagccgatgaagtcaacaacaacacctgttcagcagtgcccccagaaggcctcctcctagacagctctgagaaagccgccctggatgggcccctggatgctgccctggaccacctccgcctgggcaacaccttcaccttccgtgtgacagtcctgcaggcgtccagcatctctgccgaatatgccgacatcttctgccagttcaacttcatccaccgccacgacgaggccttctccacagagcccctgaagaacacaggcagaggccccccacttggcttctaccacgtccagaacatcgcagtggaggtgaccaagtccttcattgagtacatcaagagccagcccattgttttcgaggtctttggccactaccagcagcacccgttcccgcccctctgcaaggacgtgctcagccccctgaggccctcgcgccgccacttccctcgggtcatgccactgtccaagccagtgcccgccaccaagctcagcacactgacgcggccctgtccgggaccctgccactgcaagtacgacctgctggtctacttcgagatctgtgagctggaggccaacggcgattacatcccggccgtggtggaccaccgtgggggcatgccatgcatggggaccttcctcctccaccagggcatccagcgacggattacggtgacactactgcatgagacaggcagccatatccgctggaaggaagtgcgcgagctggtcgtgggccgcatccgaaacactccagagaccgacgagtccctgatcgaccccaacatcttgtctctcaacatcctctcttccggatacatccacccagcccaagatgaccggaccttttaccaatttgaggctgcgtgggacagctccatgcacaactctctcctgctgaaccgggtcaccccttatcgagagaaaatctacatgacactctccgcttatatcgagatggagaactgcacccagccggctgttgtcaccaaggacttctgcatggtcttctattcccgtgatgccaagctgccagcctcgcgctccatccgcaacctctttggcagtgggagccttcgggcctcagagagtaaccgtgtgactggtgtgtacgagctcagcctgtgccacgtggctgacgcgggcagcccagggatgcagcgccggcgccgacgagtcctggacacatctgtggcctatgtccggggcgaggagaacctggcaggctggaggccccggagtgacagtctcattctggaccaccagtgggagctggagaagctgagcctcctgcaggaggtggagaagactaggcactacctgctcctgcgggagaagctggagaccgcccagcggcctgtcccggaggcactgtccccggccttcagcgaggactctgagtcccatggctcctccagcgcctcctccccgctctcggctgagggccgcccatcacccctggaggctcccaacgagaggcagcgggagctggccgtcaagtgcttgcgcctgctcacgcacacattcaacagagagtacacacacagccacgtctgcgtcagtgccagcgagagcaagctctccgagatgtctgtcaccctgctccgggacccgtcgatgtcccctctaggggtggccactctcaccccctcctccacttgcccctctctggttgaagggcggtacggtgccactgacctgaggaccccgcagccctgctcccggccagccagcccagagcccgagctgctgccagaggccgactccaagaagctcccttcccctgcccgggcaacagagacagacaaggagccccagcgcctgctggtccctgacatccaggagatccgagtcagcccgatcgtttccaagaaggggtacctgcacttcctggagccgcacacgtcaggctgggccaggcgcttcgtggtggtgcggcgcccctatgcctacatgtacaacagcgacaaggacaccgtggagcggttcgtgctcaacctggccactgcccaggtggagtacagtgaggaccagcaggctatgctcaagacacccaacacattcgcggtgtgcacggaacaccgcggcatcctgctgcaggccgccagcgacaaggacatgcatgactggctgtacgccttcaaccccctcctggccgggaccatacggtccaagctctccagaaggaggtctgcccagatgcgggtctgaacctgagccctcccgtgacagccggcaggcccagcccatcccctccctcatcctcgtctgtcctgtcacctgccgcccagcccctctcctgccagacagcccacgaccgggtcgaccccccaggggacgcccatgccaggcccggggacctgtgccacacgaccagctgtgctcccagcagaggctgtgcgtgtcagttcttcttgcagaatgtgctctggtggaacaagttgggagaggctgggggggccaagggcacaggttacgggggttcttgctgccgttctaatatttttttaagcatagacagacttataattaatatacgttagttagtgacattgaaacagtcaactcggaaattaactataagacttgttctatttataagtatttatttctaatgcctccacatagccctgtaatattcagatggaacccccaaccacctccaccctgtttgttcccacatgtgtctcccaagcctgctagggacaggcagggcagggacagccaccttggaaggccgcagtgaggagctgtctggaccagtggggcaccttggggctagcacacgggtgtatcgcctgggccccaggcttctccatggccacatgggtcctgggtgtatgtgtgggagagtgggggggtgtctttggtgcctgaagtctgcgcggcatggagggtggtgtgagttcctctggtgggagggagaacgcacatctcttctgggcggccacctgaggagtgactccaagaagagttccggcagctttccccaggaaagggtgaggggtgacactcggctctggctctgagatgaggcagacggcacccaggctgtgatctgtcctgggcggggaccaggagggagcggggtcgggatcacctgccagtgtgcagactctgggactgcgtgctgtctccggaccatcagggtagggtggtgggttgagaccaggaagtcagggaagatcggaattcagggcgacggtctaggtgtcgagggctgtggcgcagcctcttcagctgcggcgagaaatggagtgagtcaaggtagcttctgggaagaaatgctgccattagcaggtttcttgcaaagactttcctctctttgttcccagggcagagagtttctgtgagtcccactgagaaaatcccatggggtgggggtatcctggtcggtcggcaatggagggtggctggcttggtggttattgtcttcaaggagctcttcgctgctgcatctgcggtgtccctttgttcttgtcccatttcaccccctctgcagacaccaatgtccgagggccacccaggacaggacgggggtcagccccaagctgagagtctggtcataggagtcatgtccagaggcctagggaggttttagggccctccccacccacacccacaggtcgatttggtctctttttagctcaaggaaagacagtagccaagcaacagagcccctctcccgccgtggcccgtgggagcagttacatcgggtctggtgctccagacctagggcccagcactttcatcagatcctgcctcctggagtgggggaaacgcagcaccccactggttctgaggcccctaccctcccaggctgtcccacgtgatgctgacatgagcctcagagaccccaatcccatgcctgggggagagacagcggctcaggagtgggggagcacgggccttctacaccacatgggaaggctctggcatgaggttttcctttgggaaggttgtttgggcccctgaagttccatctccgagagtggtgtgcagggcaggccagggcccatgctggctgcagtctctgtggctgcctgcctgggccagcctgtttgggagctgggactgtgggctcgccttttcgtacctgggctcaggtgcggtgtggccaccgccaccctcatcccctgcctgggaggctctcccaggggctgatgggggggttctgtgagggagaatcagggctcgggaagccacgcctgggaaggcaggacacaggacacagcagctttctttggaaatctcccaggtgaggattcacatcccaaaataaaattcagaagccaggtggcctgtgctccccatgggtgacctctggaggcagtggaccaagatgcagcaaggagaggatgcagaacagcttcttgcagaagcacctgctccggcatccagcgctgcctggaggcaggaaggagaggcagggcaggacacgctggtctgagatgagggggagccccacgggccccaggcaggctagaggaggcacaggccctgccacggccaactcaggtcagccagcctgaggctgtggcctccaaagggtctgggcgcaccccccaggtcgcaggtgtctgaggccagccaacctgcagagcactcgcggcgtgggtgggctgagtggaggtgcctgggagctgcctaaattcagaagcctccactgccatggagactgcctggctgtgtcctctcagccaggtgccgtgttggccttggctaggacccagagccacactgcagcctccgccgactccctccttccgggcctgctctagtgaggagtgcctaagccaggacccagaaactcagagttgatggtgagaggaggccgcctgagtcaggacacctggcttcttgaaaagttcgctctgccagaaaccacctagggaccacgttagctgccttccttgagctccccaggagtcggtttccacatctgtgaggtggagggctggtgtggaggtgctcatggggtgcggtgcttgggagacagccaggcccagggtggctgctgcttcctgctaagtgggggaggtgagacagatctggaaagccgtctccctcagatggtttcatttaatgctttatactgccgagtctgggggcttgttttggtttgggggcagccatcctccaccagaaagggggagctccttccgctgcggctccagatagatggggatgccgggctccaggccgaccagcacttgggatctgatgggacacggccagtgcctaggggtgccaagtccaaggcctcccactgggagtcatcgctgagaagatgccaatgtttcatccaccggctgcacaggcacaaactcccccacccaggacggctgtgatgaggtggccctccctgtcaaccctggtccctggagtccccagcacctggggccctggtggggctgatgtcacaggtgtttactgtgctgctgcactggtcctatgccagcctcacccatgtggggaccacggaaggcacactcccttacccccggtgccgggccgtgcggtcccccagacggacagcagctgtggcgacctgcgtttctccctgggcctgtgcttcctgtagttagtccgtcccctggttcccctgtggctcagaggccgcgtccctggcttgtacatatgtgattgctgtgggcacaccccagaccccatgtcatagctgccgtcccgacgtcacgacgcctgtcccgatgtcttacacccgagtgttagccctaggctcctgtactgtgcgtgcacttgaggctctgtccaattaagaaataaatgtggctcttactcaacacagtc

SEQ ID NO: 87295 - DNA, 8732 bp, Homo sapiens
agccggcgagcggcagcagctccgggctcgagagcccgcgcccatgccagtgcccatgcggggccgccgccagtgacgccggagaggtgttccccccacactggggctcccactactgcgaggagtgacccacgaaggccacagagatggccggggcttcggtgaaggtggcggtgcgggtccgccccttcaattcccgggaaatgagccgtgactccaagtgcatcattcagatgtctggaagcaccaccaccattgttaaccccaaacagcccaaggagacgcccaaaagcttcagctttgactactcctactggtcgcacacctcacctgaggacatcaactacgcgtcgcagaagcaggtgtaccgggacatcggcgaggagatgctgcagcatgcctttgagggatacaacgtgtgcatcttcgcctatgggcagacgggtgccggcaagtcctacaccatgatgggcaagcaggagaaggaccagcagggcatcatcccacagctctgcgaggacctcttctctcggatcaacgacacgaccaacgacaacatgtcctactccgtggaggtcagctacatggagatttactgtgagcgcgtccgtgacctcctgaaccccaagaacaagggcaaccttcgcgtgagggagcacccactgctggggccctacgtggaggacctctccaagctggctgtcacctcctacaatgacatccaggacctcatggactcagggaacaaggccaggaccgtggcggccaccaacatgaatgagaccagcagtcgctcccacgccgtcttcaacatcatcttcacccagaagcgccatgacgcagagaccaatatcaccacggagaaggtgagcaaaatcagcctggtggacctggctgggagcgagcgggctgactccacgggagccaagggcacgcgcctcaaggagggggccaacatcaacaagtcgctgaccaccctgggcaaggtcatctccgccctggctgaaatggactccggacccaacaagaacaagaaaaagaagaagacagatttcattccgtaccgagattccgtgttgacctggctcctccgggaaaacctgggcggtaactcaaggacagctatggtggcagccctgagtcctgcagacatcaactacgatgagacccttagcacgctgaggtatgctgaccgggccaagcagatccgctgcaatgctgtcatcaatgaggaccccaacaacaagctgatccgcgagctgaaggatgaggtgacccggctgcgggaccttctgtacgcccagggtcttggcgacatcactgacatgaccaatgccctggtgggtatgagcccctcatcctcgctctcagccctgtccagccgcgcggcctccgtgtccagcctccacgagcgcatcttgtttgccccgggcagcgaggaggccattgaaagactgaaggaaacagagaagatcatagctgagctcaatgagacctgggaggagaagctgcggcggacagaagccatccggatggagagggaagccctgctggccgagatgggtgtggccatgagggaggatggcggcaccttgggcgtattctctcccaaaaagacaccacacctcgtcaacctgaacgaggacccgctgatgtctgagtgcctgctctactacatcaaggatgggatcaccagagtgggcagggaggatggcgagaggcggcaggacattgttctgagtgggcacttcatcaaggaggagcactgcgtcttccggagcgactccaggggaggcagcgaagctgtggtgaccttggagccctgtgagggggcagacacctacgtcaatggcaagaaagtcacagagcccagcatcctgcgttcaggaaaccgcatcatcatgggtaagagccatgtgttccggttcaaccaccccgagcaggcccggcaggagcgtgagcgcacgccttgtgcggagacgccagctgagcctgtggactgggccttcgcccagcgtgagctgctggagaagcagggcatcgacatgaagcaggagatggagcagaggctccaggaactggaggaccagtaccgccgcgagcgggaggaggccacctacctgctggagcagcagcggctggactatgagagcaagctggaggctctgcagaagcagatggactccaggtactacccggaggtgaacgaggaggaggaggagcccgaggatgaagtccagtggacagagcgggagtgtgagctggcgctctgggccttccggaagtggaagtggtaccagttcacgtctctgcgggacctgctgtggggcaacgccatcttcctcaaggaggctaatgccatcagcgtggagctgaaaaagaaggtacaattccagtttgtcctcctgacggacacactctactcccctctgccacccgacctgctgcccccagaggccgccaaagaccgagagacgcggcccttcccccgcaccattgtggccgtggaggtccaggaccagaagaacggggccacccactactggacgctggagaagctcaggcagcgtctggacctgatgcgggagatgtacgaccgcgctgcagaggtgccctccagtgtcatcgaggactgtgacaacgtggtgaccggcggagaccccttctatgaccgcttcccctggttccggctggtgggcagggccttcgtgtacctgagcaacctgctgtaccccgttcccctggtacaccgtgtggcaatcgtcagcgagaagggcgaggtgaagggcttcctccgcgtggccgtccaggccatctcagccgatgaagaggcccctgattatggctctggcgtccgccagtcgggaactgctaaaatctcctttgatgaccagcattttgaaaagttccagtccgagtcttgccccgtggtggggatgtcccgctcgggaacctcccaggaagagcttcgcatcgtggagggccagggccagggtgcagacgtggggccctcagccgatgaagtcaacaacaacacctgttcagcagtgcccccagaaggcctcctcctagacagctctgagaaagccgccctggatgggcccctggatgctgccctggaccacctccgcctgggcaacaccttcaccttccgtgtgacagtcctgcaggcgtccagcatctctgccgaatatgccgacatcttctgccagttcaacttcatccaccgccacgacgaggccttctccacagagcccctgaagaacacaggcagaggccccccacttggcttctaccacgtccagaacatcgcagtggaggtgaccaagtccttcattgagtacatcaagagccagcccattgttttcgaggtctttggccactaccagcagcacccgttcccgcccctctgcaaggacgtgctcagccccctgaggccctcgcgccgccacttccctcgggtcatgccactgtccaagccagtgcccgccaccaagctcagcacactgacgcggccctgtccgggaccctgccactgcaagtacgacctgctggtctacttcgagatctgtgagctggaggccaacggcgattacatcccggccgtggtggaccaccgtgggggcatgccatgcatggggaccttcctcctccaccagggcatccagcgacggattacggtgacactactgcatgagacaggcagccatatccgctggaaggaagtgcgcgagctggtcgtgggccgcatccgaaacactccagagaccgacgagtccctgatcgaccccaacatcttgtctctcaacatcctctcttccggatacatccacccagcccaagatgaccggaccttttaccaatttgaggctgcgtgggacagctccatgcacaactctctcctgctgaaccgggtcaccccttatcgagagaaaatctacatgacactctccgcttatatcgagatggagaactgcacccagccggctgttgtcaccaaggacttctgcatggtcttctattcccgtgatgccaagctgccagcctcgcgctccatccgcaacctctttggcagtgggagccttcgggcctcagagagtaaccgtgtgactggtgtgtacgagctcagcctgtgccacgtggctgacgcgggcagcccagggatgcagcgccggcgccgacgagtcctggacacatctgtggcctatgtccggggcgaggagaacctggcaggctggaggccccggagtgacagtctcattctggaccaccagtgggagctggagaagctgagcctcctgcaggaggtggagaagactaggcactacctgctcctgcgggagaagctggagaccgcccagcggcctgtcccggaggcactgtccccggccttcagcgaggactctgagtcccatggctcctccagcgcctcctccccgctctcggctgagggccgcccatcacccctggaggctcccaacgagaggcagcgggagctggccgtcaagtgcttgcgcctgctcacgcacacattcaacagagagtacacacacagccacgtctgcgtcagtgccagcgagagcaagctctccgagatgtctgtcaccctgctccgggacccgtcgatgtcccctctaggggtggccactctcaccccctcctccacttgcccctctctggttgaagggcggtacggtgccactgacctgaggaccccgcagccctgctcccggccagccagcccagagcccgagctgctgccagaggccgactccaagaagctcccttcccctgcccgggcaacagagacagacaaggagccccagcgcctgctggtccctgacatccaggagatccgagtcagcccgatcgtttccaagaaggggtacctgcacttcctggagccgcacacgtcaggctgggccaggcgcttcgtggtggtgcggcgcccctatgcctacatgtacaacagcgacaaggacaccgtggagcggttcgtgctcaacctggccactgcccaggtggagtacagtgaggaccagcaggctatgctcaagacacccaacacattcgcggtgtgcacggaacaccgcggcatcctgctgcaggccgccagcgacaaggacatgcatgactggctgtacgccttcaaccccctcctggccgggaccatacggtccaagctctccagaaggaggtctgcccagatgcgggtctgaacctgagccctcccgtgacagccggcaggcccagcccatcccctccctcatcctcgtctgtcctgtgccacacgaccagctgtgctcccagcagaggctgtgcgtgtcagttcttcttgcagaatgtgctctggtggaacaagttgggagaggctgggggggccaagggcacaggttacgggggttcttgctgccgttctaatatttttttaagcatagacagacttataattaatatacgttagttagtgacattgaaacagtcaactcggaaattaactataagacttgttctatttataagtatttatttctaatgcctccacatagccctgtaatattcagatggaacccccaaccacctccaccctgtttgttcccacatgtgtctcccaagcctgctagggacaggcagggcagggacagccaccttggaaggccgcagtgaggagctgtctggaccagtggggcaccttggggctagcacacgggtgtatcgcctgggccccaggcttctccatggccacatgggtcctgggtgtatgtgtgggagagtgggggggtgtctttggtgcctgaagtctgcgcggcatggagggtggtgtgagttcctctggtgggagggagaacgcacatctcttctgggcggccacctgaggagtgactccaagaagagttccggcagctttccccaggaaagggtgaggggtgacactcggctctggctctgagatgaggcagacggcacccaggctgtgatctgtcctgggcggggaccaggagggagcggggtcgggatcacctgccagtgtgcagactctgggactgcgtgctgtctccggaccatcagggtagggtggtgggttgagaccaggaagtcagggaagatcggaattcagggcgacggtctaggtgtcgagggctgtggcgcagcctcttcagctgcggcgagaaatggagtgagtcaaggtagcttctgggaagaaatgctgccattagcaggtttcttgcaaagactttcctctctttgttcccagggcagagagtttctgtgagtcccactgagaaaatcccatggggtgggggtatcctggtcggtcggcaatggagggtggctggcttggtggttattgtcttcaaggagctcttcgctgctgcatctgcggtgtccctttgttcttgtcccatttcaccccctctgcagacaccaatgtccgagggccacccaggacaggacgggggtcagccccaagctgagagtctggtcataggagtcatgtccagaggcctagggaggttttagggccctccccacccacacccacaggtcgatttggtctctttttagctcaaggaaagacagtagccaagcaacagagcccctctcccgccgtggcccgtgggagcagttacatcgggtctggtgctccagacctagggcccagcactttcatcagatcctgcctcctggagtgggggaaacgcagcaccccactggttctgaggcccctaccctcccaggctgtcccacgtgatgctgacatgagcctcagagaccccaatcccatgcctgggggagagacagcggctcaggagtgggggagcacgggccttctacaccacatgggaaggctctggcatgaggttttcctttgggaaggttgtttgggcccctgaagttccatctccgagagtggtgtgcagggcaggccagggcccatgctggctgcagtctctgtggctgcctgcctgggccagcctgtttgggagctgggactgtgggctcgccttttcgtacctgggctcaggtgcggtgtggccaccgccaccctcatcccctgcctgggaggctctcccaggggctgatgggggggttctgtgagggagaatcagggctcgggaagccacgcctgggaaggcaggacacaggacacagcagctttctttggaaatctcccaggtgaggattcacatcccaaaataaaattcagaagccaggtggcctgtgctccccatgggtgacctctggaggcagtggaccaagatgcagcaaggagaggatgcagaacagcttcttgcagaagcacctgctccggcatccagcgctgcctggaggcaggaaggagaggcagggcaggacacgctggtctgagatgagggggagccccacgggccccaggcaggctagaggaggcacaggccctgccacggccaactcaggtcagccagcctgaggctgtggcctccaaagggtctgggcgcaccccccaggtcgcaggtgtctgaggccagccaacctgcagagcactcgcggcgtgggtgggctgagtggaggtgcctgggagctgcctaaattcagaagcctccactgccatggagactgcctggctgtgtcctctcagccaggtgccgtgttggccttggctaggacccagagccacactgcagcctccgccgactccctccttccgggcctgctctagtgaggagtgcctaagccaggacccagaaactcagagttgatggtgagaggaggccgcctgagtcaggacacctggcttcttgaaaagttcgctctgccagaaaccacctagggaccacgttagctgccttccttgagctccccaggagtcggtttccacatctgtgaggtggagggctggtgtggaggtgctcatggggtgcggtgcttgggagacagccaggcccagggtggctgctgcttcctgctaagtgggggaggtgagacagatctggaaagccgtctccctcagatggtttcatttaatgctttatactgccgagtctgggggcttgttttggtttgggggcagccatcctccaccagaaagggggagctccttccgctgcggctccagatagatggggatgccgggctccaggccgaccagcacttgggatctgatgggacacggccagtgcctaggggtgccaagtccaaggcctcccactgggagtcatcgctgagaagatgccaatgtttcatccaccggctgcacaggcacaaactcccccacccaggacggctgtgatgaggtggccctccctgtcaaccctggtccctggagtccccagcacctggggccctggtggggctgatgtcacaggtgtttactgtgctgctgcactggtcctatgccagcctcacccatgtggggaccacggaaggcacactcccttacccccggtgccgggccgtgcggtcccccagacggacagcagctgtggcgacctgcgtttctccctgggcctgtgcttcctgtagttagtccgtcccctggttcccctgtggctcagaggccgcgtccctggcttgtacatatgtgattgctgtgggcacaccccagaccccatgtcatagctgccgtcccgacgtcacgacgcctgtcccgatgtcttacacccgagtgttagccctaggctcctgtactgtgcgtgcacttgaggctctgtccaattaagaaataaatgtggctcttactcaacacagtc

SEQ ID NO: 87296 - DNA, 8666 bp, Homo sapiens
agccggcgagcggcagcagctccgggctcgagagcccgcgcccatgccagtgcccatgcggggccgccgccagtgacgccggagaggtgttccccccacactggggctcccactactgcgaggagtgacccacgaaggccacagagatggccggggcttcggtgaaggtggcggtgcgggtccgccccttcaattcccgggaaatgagccgtgactccaagtgcatcattcagatgtctggaagcaccaccaccattgttaaccccaaacagcccaaggagacgcccaaaagcttcagctttgactactcctactggtcgcacacctcacctgaggacatcaactacgcgtcgcagaagcaggtgtaccgggacatcggcgaggagatgctgcagcatgcctttgagggatacaacgtgtgcatcttcgcctatgggcagacgggtgccggcaagtcctacaccatgatgggcaagcaggagaaggaccagcagggcatcatcccacagctctgcgaggacctcttctctcggatcaacgacacgaccaacgacaacatgtcctactccgtggaggtcagctacatggagatttactgtgagcgcgtccgtgacctcctgaaccccaagaacaagggcaaccttcgcgtgagggagcacccactgctggggccctacgtggaggacctctccaagctggctgtcacctcctacaatgacatccaggacctcatggactcagggaacaaggccaggaccgtggcggccaccaacatgaatgagaccagcagtcgctcccacgccgtcttcaacatcatcttcacccagaagcgccatgacgcagagaccaatatcaccacggagaaggtgagcaaaatcagcctggtggacctggctgggagcgagcgggctgactccacgggagccaagggcacgcgcctcaaggagggggccaacatcaacaagtcgctgaccaccctgggcaaggtcatctccgccctggctgaaatggactccggacccaacaagaacaagaaaaagaagaagacagatttcattccgtaccgagattccgtgttgacctggctcctccgggaaaacctgggcggtaactcaaggacagctatggtggcagccctgagtcctgcagacatcaactacgatgagacccttagcacgctgaggtatgctgaccgggccaagcagatccgctgcaatgctgtcatcaatgaggaccccaacaacaagctgatccgcgagctgaaggatgaggtgacccggctgcgggaccttctgtacgcccagggtcttggcgacatcactgacatgaccaatgccctggtgggtatgagcccctcatcctcgctctcagccctgtccagccgcgcggcctccgtgtccagcctccacgagcgcatcttgtttgccccgggcagcgaggaggccattgaaagactgaaggaaacagagaagatcatagctgagctcaatgagacctgggaggagaagctgcggcggacagaagccatccggatggagagggaagccctgctggccgagatgggtgtggccatgagggaggatggcggcaccttgggcgtattctctcccaaaaagacaccacacctcgtcaacctgaacgaggacccgctgatgtctgagtgcctgctctactacatcaaggatgggatcaccagagtgggcagggaggatggcgagaggcggcaggacattgttctgagtgggcacttcatcaaggaggagcactgcgtcttccggagcgactccaggggaggcagcgaagctgtggtgaccttggagccctgtgagggggcagacacctacgtcaatggcaagaaagtcacagagcccagcatcctgcgttcaggaaaccgcatcatcatgggtaagagccatgtgttccggttcaaccaccccgagcaggcccggcaggagcgtgagcgcacgccttgtgcggagacgccagctgagcctgtggactgggccttcgcccagcgtgagctgctggagaagcagggcatcgacatgaagcaggagatggagcagaggctccaggaactggaggaccagtaccgccgcgagcgggaggaggccacctacctgctggagcagcagcggctggactatgagagcaagctggaggctctgcagaagcagatggactccaggtactacccggaggtgaacgaggaggaggaggagcccgaggatgaagtccagtggacagagcgggagtgtgagctggcgctctgggccttccggaagtggaagtggtaccagttcacgtctctgcgggacctgctgtggggcaacgccatcttcctcaaggaggctaatgccatcagcgtggagctgaaaaagaaggtacaattccagtttgtcctcctgacggacacactctactcccctctgccacccgacctgctgcccccagaggccgccaaagaccgagagacgcggcccttcccccgcaccattgtggccgtggaggtccaggaccagaagaacggggccacccactactggacgctggagaagctcaggcagcgtctggacctgatgcgggagatgtacgaccgcgctgcagaggtgccctccagtgtcatcgaggactgtgacaacgtggtgaccggcggagaccccttctatgaccgcttcccctggttccggctggtgggcagggccttcgtgtacctgagcaacctgctgtaccccgttcccctggtacaccgtgtggcaatcgtcagcgagaagggcgaggtgaagggcttcctccgcgtggccgtccaggccatctcagccgatgaagaggcccctgattatggctctggcgtccgccagtcgggaactgctaaaatctcctttgatgaccagcattttgaaaagttccagtccgagtcttgccccgtggtggggatgtcccgctcgggaacctcccaggaagagcttcgcatcgtggagggccagggccagggtgcagacgtggggccctcagccgatgaagtcaacaacaacacctgttcagcagtgcccccagaaggcctcctcctagacagctctgagaaagccgccctggatgggcccctggatgctgccctggaccacctccgcctgggcaacaccttcaccttccgtgtgacagtcctgcaggcgtccagcatctctgccgaatatgccgacatcttctgccagttcaacttcatccaccgccacgacgaggccttctccacagagcccctgaagaacacaggcagaggccccccacttggcttctaccacgtccagaacatcgcagtggaggtgaccaagtccttcattgagtacatcaagagccagcccattgttttcgaggtctttggccactaccagcagcacccgttcccgcccctctgcaaggacgtgctcagccccctgaggccctcgcgccgccacttccctcgggtcatgccactgtccaagccagtgcccgccaccaagctcagcacactgacgcggccctgtccgggaccctgccactgcaagtacgacctgctggtctacttcgagatctgtgagctggaggccaacggcgattacatcccggccgtggtggaccaccgtgggggcatgccatgcatggggaccttcctcctccaccagggcatccagcgacggattacggtgacactactgcatgagacaggcagccatatccgctggaaggaagtgcgcgagctggtcgtgggccgcatccgaaacactccagagaccgacgagtccctgatcgaccccaacatcttgtctctcaacatcctctcttccggatacatccacccagcccaagatgaccggaccttttaccaatttgaggctgcgtgggacagctccatgcacaactctctcctgctgaaccgggtcaccccttatcgagagaaaatctacatgacactctccgcttatatcgagatggagaactgcacccagccggctgttgtcaccaaggacttctgcatggtcttctattcccgtgatgccaagctgccagcctcgcgctccatccgcaacctctttggcagtgggagccttcgggcctcagagagtaaccgtgtgactggtgtgtacgagctcagcctgtgccacgtggctgacgcgggcagcccagggatgcagcgccggcgccgacgagtcctggacacatctgtggcctatgtccggggcgaggagaacctggcaggctggaggccccggagtgacagtctcattctggaccaccagtgggagctggagaagctgagcctcctgcaggaggtggagaagactaggcactacctgctcctgcgggagaagctggagaccgcccagcggcctgtcccggaggcactgtccccggccttcagcgaggactctgagtcccatggctcctccagcgcctcctccccgctctcggctgagggccgcccatcacccctggaggctcccaacgagaggcagcgggagctggccgtcaagtgcttgcgcctgctcacgcacacattcaacagagagtacacacacagccacgtctgcgtcagtgccagcgagagcaagctctccgagatgtctgtcaccctgctccgggacccgtcgatgtcccctctaggggtggccactctcaccccctcctccacttgcccctctctggttgaagggcggtacggtgccactgacctgaggaccccgcagccctgctcccggccagccagcccagagcccgagctgctgccagaggccgactccaagaagctcccttcccctgcccgggcaacagagacagacaaggagccccagcgcctgctggagccgcacacgtcaggctgggccaggcgcttcgtggtggtgcggcgcccctatgcctacatgtacaacagcgacaaggacaccgtggagcggttcgtgctcaacctggccactgcccaggtggagtacagtgaggaccagcaggctatgctcaagacacccaacacattcgcggtgtgcacggaacaccgcggcatcctgctgcaggccgccagcgacaaggacatgcatgactggctgtacgccttcaaccccctcctggccgggaccatacggtccaagctctccagaaggaggtctgcccagatgcgggtctgaacctgagccctcccgtgacagccggcaggcccagcccatcccctccctcatcctcgtctgtcctgtgccacacgaccagctgtgctcccagcagaggctgtgcgtgtcagttcttcttgcagaatgtgctctggtggaacaagttgggagaggctgggggggccaagggcacaggttacgggggttcttgctgccgttctaatatttttttaagcatagacagacttataattaatatacgttagttagtgacattgaaacagtcaactcggaaattaactataagacttgttctatttataagtatttatttctaatgcctccacatagccctgtaatattcagatggaacccccaaccacctccaccctgtttgttcccacatgtgtctcccaagcctgctagggacaggcagggcagggacagccaccttggaaggccgcagtgaggagctgtctggaccagtggggcaccttggggctagcacacgggtgtatcgcctgggccccaggcttctccatggccacatgggtcctgggtgtatgtgtgggagagtgggggggtgtctttggtgcctgaagtctgcgcggcatggagggtggtgtgagttcctctggtgggagggagaacgcacatctcttctgggcggccacctgaggagtgactccaagaagagttccggcagctttccccaggaaagggtgaggggtgacactcggctctggctctgagatgaggcagacggcacccaggctgtgatctgtcctgggcggggaccaggagggagcggggtcgggatcacctgccagtgtgcagactctgggactgcgtgctgtctccggaccatcagggtagggtggtgggttgagaccaggaagtcagggaagatcggaattcagggcgacggtctaggtgtcgagggctgtggcgcagcctcttcagctgcggcgagaaatggagtgagtcaaggtagcttctgggaagaaatgctgccattagcaggtttcttgcaaagactttcctctctttgttcccagggcagagagtttctgtgagtcccactgagaaaatcccatggggtgggggtatcctggtcggtcggcaatggagggtggctggcttggtggttattgtcttcaaggagctcttcgctgctgcatctgcggtgtccctttgttcttgtcccatttcaccccctctgcagacaccaatgtccgagggccacccaggacaggacgggggtcagccccaagctgagagtctggtcataggagtcatgtccagaggcctagggaggttttagggccctccccacccacacccacaggtcgatttggtctctttttagctcaaggaaagacagtagccaagcaacagagcccctctcccgccgtggcccgtgggagcagttacatcgggtctggtgctccagacctagggcccagcactttcatcagatcctgcctcctggagtgggggaaacgcagcaccccactggttctgaggcccctaccctcccaggctgtcccacgtgatgctgacatgagcctcagagaccccaatcccatgcctgggggagagacagcggctcaggagtgggggagcacgggccttctacaccacatgggaaggctctggcatgaggttttcctttgggaaggttgtttgggcccctgaagttccatctccgagagtggtgtgcagggcaggccagggcccatgctggctgcagtctctgtggctgcctgcctgggccagcctgtttgggagctgggactgtgggctcgccttttcgtacctgggctcaggtgcggtgtggccaccgccaccctcatcccctgcctgggaggctctcccaggggctgatgggggggttctgtgagggagaatcagggctcgggaagccacgcctgggaaggcaggacacaggacacagcagctttctttggaaatctcccaggtgaggattcacatcccaaaataaaattcagaagccaggtggcctgtgctccccatgggtgacctctggaggcagtggaccaagatgcagcaaggagaggatgcagaacagcttcttgcagaagcacctgctccggcatccagcgctgcctggaggcaggaaggagaggcagggcaggacacgctggtctgagatgagggggagccccacgggccccaggcaggctagaggaggcacaggccctgccacggccaactcaggtcagccagcctgaggctgtggcctccaaagggtctgggcgcaccccccaggtcgcaggtgtctgaggccagccaacctgcagagcactcgcggcgtgggtgggctgagtggaggtgcctgggagctgcctaaattcagaagcctccactgccatggagactgcctggctgtgtcctctcagccaggtgccgtgttggccttggctaggacccagagccacactgcagcctccgccgactccctccttccgggcctgctctagtgaggagtgcctaagccaggacccagaaactcagagttgatggtgagaggaggccgcctgagtcaggacacctggcttcttgaaaagttcgctctgccagaaaccacctagggaccacgttagctgccttccttgagctccccaggagtcggtttccacatctgtgaggtggagggctggtgtggaggtgctcatggggtgcggtgcttgggagacagccaggcccagggtggctgctgcttcctgctaagtgggggaggtgagacagatctggaaagccgtctccctcagatggtttcatttaatgctttatactgccgagtctgggggcttgttttggtttgggggcagccatcctccaccagaaagggggagctccttccgctgcggctccagatagatggggatgccgggctccaggccgaccagcacttgggatctgatgggacacggccagtgcctaggggtgccaagtccaaggcctcccactgggagtcatcgctgagaagatgccaatgtttcatccaccggctgcacaggcacaaactcccccacccaggacggctgtgatgaggtggccctccctgtcaaccctggtccctggagtccccagcacctggggccctggtggggctgatgtcacaggtgtttactgtgctgctgcactggtcctatgccagcctcacccatgtggggaccacggaaggcacactcccttacccccggtgccgggccgtgcggtcccccagacggacagcagctgtggcgacctgcgtttctccctgggcctgtgcttcctgtagttagtccgtcccctggttcccctgtggctcagaggccgcgtccctggcttgtacatatgtgattgctgtgggcacaccccagaccccatgtcatagctgccgtcccgacgtcacgacgcctgtcccgatgtcttacacccgagtgttagccctaggctcctgtactgtgcgtgcacttgaggctctgtccaattaagaaataaatgtggctcttactcaacacagtc

SEQ ID NO: 87297 - DNA, 8992 bp, Homo sapiens
agccggcgagcggcagcagctccgggctcgagagcccgcgcccatgccagtgcccatgcggggccgccgccagtgacgccggagaggtgttccccccacactggggctcccactactgcgaggagtgacccacgaaggccacagagatggccggggcttcggtgaaggtggcggtgcgggtccgccccttcaattcccgggaaatgagccgtgactccaagtgcatcattcagatgtctggaagcaccaccaccattgttaaccccaaacagcccaaggagacgcccaaaagcttcagctttgactactcctactggtcgcacacctcacctgaggacatcaactacgcgtcgcagaagcaggtgtaccgggacatcggcgaggagatgctgcagcatgcctttgagggatacaacgtgtgcatcttcgcctatgggcagacgggtgccggcaagtcctacaccatgatgggcaagcaggagaaggaccagcagggcatcatcccacagctctgcgaggacctcttctctcggatcaacgacacgaccaacgacaacatgtcctactccgtggaggtcagctacatggagatttactgtgagcgcgtccgtgacctcctgaaccccaagaacaagggcaaccttcgcgtgagggagcacccactgctggggccctacgtggaggacctctccaagctggctgtcacctcctacaatgacatccaggacctcatggactcagggaacaaggccaggaccgtggcggccaccaacatgaatgagaccagcagtcgctcccacgccgtcttcaacatcatcttcacccagaagcgccatgacgcagagaccaatatcaccacggagaaggtgagcaaaatcagcctggtggacctggctgggagcgagcgggctgactccacgggagccaagggcacgcgcctcaaggagggggccaacatcaacaagtcgctgaccaccctgggcaaggtcatctccgccctggctgaaatggactccggacccaacaagaacaagaaaaagaagaagacagatttcattccgtaccgagattccgtgttgacctggctcctccgggaaaacctgggcggtaactcaaggacagctatggtggcagccctgagtcctgcagacatcaactacgatgagacccttagcacgctgaggtatgctgaccgggccaagcagatccgctgcaatgctgtcatcaatgaggaccccaacaacaagctgatccgcgagctgaaggatgaggtgacccggctgcgggaccttctgtacgcccagggtcttggcgacatcactgacatgaccaatgccctggtgggtatgagcccctcatcctcgctctcagccctgtccagccgcgcggcctccgtgtccagcctccacgagcgcatcttgtttgccccgggcagcgaggaggccattgaaagactgaaggaaacagagaagatcatagctgagctcaatgagacctgggaggagaagctgcggcggacagaagccatccggatggagagggaagccctgctggccgagatgggtgtggccatgagggaggatggcggcaccttgggcgtattctctcccaaaaagacaccacacctcgtcaacctgaacgaggacccgctgatgtctgagtgcctgctctactacatcaaggatgggatcaccagagtgggcagggaggatggcgagaggcggcaggacattgttctgagtgggcacttcatcaaggaggagcactgcgtcttccggagcgactccaggggaggcagcgaagctgtggtgaccttggagccctgtgagggggcagacacctacgtcaatggcaagaaagtcacagagcccagcatcctgcgttcaggaaaccgcatcatcatgggtaagagccatgtgttccggttcaaccaccccgagcaggcccggcaggagcgtgagcgcacgccttgtgcggagacgccagctgagcctgtggactgggccttcgcccagcgtgagctgctggagaagcagggcatcgacatgaagcaggagatggagcagaggctccaggaactggaggaccagtaccgccgcgagcgggaggaggccacctacctgctggagcagcagcggctggactatgagagcaagctggaggctctgcagaagcagatggactccaggtactacccggaggtgaacgaggaggaggaggagcccgaggatgaagtccagtggacagagcgggagtgtgagctggcgctctgggccttccggaagtggaagtggtaccagttcacgtctctgcgggacctgctgtggggcaacgccatcttcctcaaggaggctaatgccatcagcgtggagctgaaaaagaaggtacaattccagtttgtcctcctgacggacacactctactcccctctgccacccgacctgctgcccccagaggccgccaaagaccgagagacgcggcccttcccccgcaccattgtggccgtggaggtccaggaccagaagaacggggccacccactactggacgctggagaagctcaggcagcgtctggacctgatgcgggagatgtacgaccgcgctgcagaggtgccctccagtgtcatcgaggactgtgacaacgtggtgaccggcggagaccccttctatgaccgcttcccctggttccggctggtgggcagggccttcgtgtacctgagcaacctgctgtaccccgttcccctggtacaccgtgtggcaatcgtcagcgagaagggcgaggtgaagggcttcctccgcgtggccgtccaggccatctcagccgatgaagaggcccctgattatggctctggcgtccgccagtcgggaactgctaaaatctcctttgatgaccagcattttgaaaagttccagtccgagtcttgccccgtggtggggatgtcccgctcgggaacctcccaggaagagcttcgcatcgtggagggccagggccagggtgcagacgtggggccctcagccgatgaagtcaacaacaacacctgttcagcagtgcccccagaaggcctcctcctagacagctctgagaaagccgccctggatgggcccctggatgctgccctggaccacctccgcctgggcaacaccttcaccttccgtgtgacagtcctgcaggcgtccagcatctctgccgaatatgccgacatcttctgccagttcaacttcatccaccgccacgacgaggccttctccacagagcccctgaagaacacaggcagaggccccccacttggcttctaccacgtccagaacatcgcagtggaggtgaccaagtccttcattgagtacatcaagagccagcccattgttttcgaggtctttggccactaccagcagcacccgttcccgcccctctgcaaggacgtgctcagccccctgaggccctcgcgccgccacttccctcgggtcatgccactgtccaagccagtgcccgccaccaagctcagcacactgacgcggccctgtccgggaccctgccactgcaagtacgacctgctggtctacttcgagatctgtgagctggaggccaacggcgattacatcccggccgtggtggaccaccgtgggggcatgccatgcatggggaccttcctcctccaccagggcatccagcgacggattacggtgacactactgcatgagacaggcagccatatccgctggaaggaagtgcgcgagctggtcgtgggccgcatccgaaacactccagagaccgacgagtccctgatcgaccccaacatcttgtctctcaacatcctctcttccggatacatccacccagcccaagatgaccggaccttttaccaatttgaggctgcgtgggacagctccatgcacaactctctcctgctgaaccgggtcaccccttatcgagagaaaatctacatgacactctccgcttatatcgagatggagaactgcacccagccggctgttgtcaccaaggacttctgcatggtcttctattcccgtgatgccaagctgccagcctcgcgctccatccgcaacctctttggcagtgggagccttcgggcctcagagagtaaccgtgtgactggtgtgtacgagctcagcctgtgccacgtggctgacgcgggcagcccagggatgcagcgccggcgccgacgagtcctggacacatctgtggcctatgtccggggcgaggagaacctggcaggctggaggccccggagtgacagtctcattctggaccaccagtgggagctggagaagctgagcctcctgcaggaggtggagaagactaggcactacctgctcctgcgggagaagctggagaccgcccagcggcctgtcccggaggcactgtccccggccttcagcgaggactctgagtcccatggctcctccagcgcctcctccccgctctcggctgagggccgcccatcacccctggaggctcccaacgagaggcagcgggagctggccgtcaagtgcttgcgcctgctcacgcacacattcaacagagagtacacacacagccacgtctgcgtcagtgccagcgagagcaagctctccgagatgtctgtcaccctgctccgggacccgtcgatgtcccctctaggggtggccactctcaccccctcctccacttgcccctctctggttgaagggcggtacggtgccactgacctgaggaccccgcagccctgctcccggccagccagcccagagcccgagctgctgccagaggccgactccaagaagctcccttcccctgcccgggcaacagagacagacaaggagccccagcgcctgctggtccctgacatccaggagatccgagtcagcccgatcgtttccaagaaggggtacctgcacttcctggagccgcacacgtcaggctgggccaggcgcttcgtggtggtgcggcgcccctatgcctacatgtacaacagcgacaaggacaccgtggagcggttcgtgctcaacctggccactgcccaggtggagtacagtgaggaccagcaggctatgctcaagacacccaacacattcgcggtgtgcacggaacaccgcggcatcctgctgcaggccgccagcgacaaggacatgcatgactggctgtacgccttcaaccccctcctggccgggaccatacggtccaagctctccagaaggaggtctgcccagatgcgggtctgaacctgagccctcccgtgacagccggcaggcccagcccatcccctccctcatcctcgtctgtcctgtcacctgccgcccagcccctctcctgccagacagcccacgaccgggtcgaccccccaggggacgcccatgccaggcccggggacctgtgccacacgaccagctgtgctcccagcagaggctgtgcgtgtcagttcttcttgcagaatgtgctctggtggaacaagttgggagaggctgggggggccaagggcacaggttacgggggttcttgctgccgttctaatatttttttaagcatagacagacttataattaatatacgttagttagtgacattgaaacagtcaactcggaaattaactataagacttgttctatttataagtatttatttctaatgcctccacatagccctgtaatattcagatggaacccccaaccacctccaccctgtttgttcccacatgtgtctcccaagcctgctagggacaggcagggcagggacagccaccttggaaggccgcagtgaggagctgtctggaccagtggggcaccttggggctagcacacgggtgtatcgcctgggccccaggcttctccatggccacatgggtcctgggtgtatgtgtgggagagtgggggggtgtctttggtgcctgaagtctgcgcggcatggagggtggtgtgagttcctctggtgggagggagaacgcacatctcttctgggcggccacctgaggagtgactccaagaagagttccggcagctttccccaggaaagggtgaggggtgacactcggctctggctctgagatgaggcagacggcacccaggctgtgatctgtcctgggcggggaccaggagggagcggggtcgggatcacctgccagtgtgcagactctgggactgcgtgctgtctccggaccatcagggtagggtggtgggttgagaccaggaagtcagggaagatcggaattcagggcgacggtctaggtgtcgagggctgtggcgcagcctcttcagctgcggcgagaaatggagtgagtcaaggtagcttctgggaagaaatgctgccattagcaggtttcttgcaaagactttcctctctttgttcccagggcagagagtttctgtgagtcccactgagaaaatcccatggggtgggggtatcctggtcggtcggcaatggagggtggctggcttggtggttattgtcttcaaggagctcttcgctgctgcatctgcggtgtccctttgttcttgtcccatttcaccccctctgcagacaccaatgtccgagggccacccaggacaggacgggggtcagccccaagctgagagtctggtcataggagtcatgtccagaggcctagggaggttttagggccctccccacccacacccacaggtcgatttggtctctttttagctcaaggaaagacagtagccaagcaacagagcccctctcccgccgtggcccgtgggagcagttacatcgggtctggtgctccagacctagggcccagcactttcatcagatcctgcctcctggagtgggggaaacgcagcaccccactggttctgaggcccctaccctcccaggctgtcccacgtgatgctgacatgagcctcagagaccccaatcccatgcctgggggagagacagcggctcaggagtgggggagcacgggccttctacaccacatgggaaggctctggcatgaggttttcctttgggaaggttgtttgggcccctgaagttccatctccgagagtggtgtgcagggcaggccagggcccatgctggctgcagtctctgtggctgcctgcctgggccagcctgtttgggagctgggactgtgggctcgccttttcgtacctgggctcaggtgcggtgtggccaccgccaccctcatcccctgcctgggaggctctcccaggggctgatgggggggttctgtgagggagaatcagggctcgggaagccacgcctgggaaggcaggacacaggacacagcagctttctttggaaatctcccaggtgaggattcacatcccaaaataaaattcagaagccaggtggcctgtgctccccatgggtgacctctggaggcagtggaccaagatgcagcaaggagaggatgcagaacagcttcttgcagaagcacctgctccggcatccagcgctgcctggaggcaggaaggagaggcagggcaggacacgctggtctgagatgagggggagccccacgggccccaggcaggctagaggaggcacaggccctgccacggccaactcaggtcagccagcctgaggctgtggcctccaaagggtctgggcgcaccccccaggtcgcaggtgtctgaggccagccaacctgcagagcactcgcggcgtgggtgggctgagtggaggtgcctgggagctgcctaaattcagaagcctccactgccatggagactgcctggctgtgtcctctcagccaggtgccgtgttggccttggctaggacccagagccacactgcagcctccgccgactccctccttccgggcctgctctagtgaggagtgcctaagccaggacccagaaactcagagttgatggtgagaggaggccgcctgagtcaggacacctggcttcttgaaaagttcgctctgccagaaaccacctagggaccacgttagctgccttccttgagctccccaggagtcggtttccacatctgtgaggtggagggctggtgtggaggtgctcatggggtgcggtgcttgggagacagccaggcccagggtggctgctgcttcctgctaagtgggggaggtgagacagatctggaaagccgtctccctcagatggtttcatttaatgctttatactgccgagtctgggggcttgttttggtttgggggcagccatcctccaccagaaagggggagctccttccgctgcggctccagatagatggggatgccgggctccaggccgaccagcacttgggatctgatgggacacggccagtgcctaggggtgccaagtccaaggcctcccactgggagtcatcgctgagaagatgccaatgtttcatccaccggctgcacaggcacaaactcccccacccaggacggctgtgatgaggtggccctccctgtcaaccctggtccctggagtccccagcacctggggccctggtggggctgatgtcacaggtgtttactgtgctgctgcactggtcctatgccagcctcacccatgtggggaccacggaaggcacactcccttacccccggtgccgggccgtgcggtcccccagacggacagcagctgtggcgacctgcgtttctccctgggcctgtgcttcctgtagttagtccgtcccctggttcccctgtggctcagaggccgcgtccctggcttgtacatatgtgattgctgtgggcacaccccagaccccatgtcatagctgccgtcccgacgtcacgacgcctgtcccgatgtcttacacccgagtgttagccctaggctcctgtactgtgcgtgcacttgaggctctgtccaattaagaaataaatgtggctcttactcaacacagtcaaaaaaaaaaacaaaacaacaaacccacatttggaacataaaaaatagagagacaacgccatcttatggggcccccgtgtatgaacaagaaagttggccccataagcgaccccccagggtgaggttcccgcacacccccgggggtaaacgctcacccccgcacttgggttaag

SEQ ID NO: 87298 - DNA, 8840 bp, Homo sapiens
agccggcgagcggcagcagctccgggctcgagagcccgcgcccatgccagtgcccatgcggggccgccgccagtgacgccggagaggtgttccccccacactggggctcccactactgcgaggagtgacccacgaaggccacagagatggccggggcttcggtgaaggtggcggtgcgggtccgccccttcaattcccgggaaatgagccgtgactccaagtgcatcattcagatgtctggaagcaccaccaccattgttaaccccaaacagcccaaggagacgcccaaaagcttcagctttgactactcctactggtcgcacacctcacctgaggacatcaactacgcgtcgcagaagcaggtgtaccgggacatcggcgaggagatgctgcagcatgcctttgagggatacaacgtgtgcatcttcgcctatgggcagacgggtgccggcaagtcctacaccatgatgggcaagcaggagaaggaccagcagggcatcatcccacagctctgcgaggacctcttctctcggatcaacgacacgaccaacgacaacatgtcctactccgtggaggtcagctacatggagatttactgtgagcgcgtccgtgacctcctgaaccccaagaacaagggcaaccttcgcgtgagggagcacccactgctggggccctacgtggaggacctctccaagctggctgtcacctcctacaatgacatccaggacctcatggactcagggaacaaggccaggaccgtggcggccaccaacatgaatgagaccagcagtcgctcccacgccgtcttcaacatcatcttcacccagaagcgccatgacgcagagaccaatatcaccacggagaaggtgagcaaaatcagcctggtggacctggctgggagcgagcgggctgactccacgggagccaagggcacgcgcctcaaggagggggccaacatcaacaagtcgctgaccaccctgggcaaggtcatctccgccctggctgaaatggactccggacccaacaagaacaagaaaaagaagaagacagatttcattccgtaccgagattccgtgttgacctggctcctccgggaaaacctgggcggtaactcaaggacagctatggtggcagccctgagtcctgcagacatcaactacgatgagacccttagcacgctgaggtatgctgaccgggccaagcagatccgctgcaatgctgtcatcaatgaggaccccaacaacaagctgatccgcgagctgaaggatgaggtgacccggctgcgggaccttctgtacgcccagggtcttggcgacatcactgacatgaccaatgccctggtgggtatgagcccctcatcctcgctctcagccctgtccagccgcgcggcctccgtgtccagcctccacgagcgcatcttgtttgccccgggcagcgaggaggccattgaaagactgaaggaaacagagaagatcatagctgagctcaatgagacctgggaggagaagctgcggcggacagaagccatccggatggagagggaagccctgctggccgagatgggtgtggccatgagggaggatggcggcaccttgggcgtattctctcccaaaaagacaccacacctcgtcaacctgaacgaggacccgctgatgtctgagtgcctgctctactacatcaaggatgggatcaccagagtgggcagggaggatggcgagaggcggcaggacattgttctgagtgggcacttcatcaaggaggagcactgcgtcttccggagcgactccaggggaggcagcgaagctgtggtgaccttggagccctgtgagggggcagacacctacgtcaatggcaagaaagtcacagagcccagcatcctgcgttcaggaaaccgcatcatcatgggtaagagccatgtgttccggttcaaccaccccgagcaggcccggcaggagcgtgagcgcacgccttgtgcggagacgccagctgagcctgtggactgggccttcgcccagcgtgagctgctggagaagcagggcatcgacatgaagcaggagatggagcagaggctccaggaactggaggaccagtaccgccgcgagcgggaggaggccacctacctgctggagcagcagcggctggactatgagagcaagctggaggctctgcagaagcagatggactccaggtactacccggaggtgaacgaggaggaggaggagcccgaggatgaagtccagtggacagagcgggagtgtgagctggcgctctgggccttccggaagtggaagtggtaccagttcacgtctctgcgggacctgctgtggggcaacgccatcttcctcaaggaggctaatgccatcagcgtggagctgaaaaagaaggtacaattccagtttgtcctcctgacggacacactctactcccctctgccacccgacctgctgcccccagaggccgccaaagaccgagagacgcggcccttcccccgcaccattgtggccgtggaggtccaggaccagaagaacggggccacccactactggacgctggagaagctcaggcagcgtctggacctgatgcgggagatgtacgaccgcgctgcagaggtgccctccagtgtcatcgaggactgtgacaacgtggtgaccggcggagaccccttctatgaccgcttcccctggttccggctggtgggcagggccttcgtgtacctgagcaacctgctgtaccccgttcccctggtacaccgtgtggcaatcgtcagcgagaagggcgaggtgaagggcttcctccgcgtggccgtccaggccatctcagccgatgaagaggcccctgattatggctctggcgtccgccagtcgggaactgctaaaatctcctttgatgaccagcattttgaaaagttccagtccgagtcttgccccgtggtggggatgtcccgctcgggaacctcccaggaagagcttcgcatcgtggagggccagggccagggtgcagacgtggggccctcagccgatgaagtcaacaacaacacctgttcagcagtgcccccagaaggcctcctcctagacagctctgagaaagccgccctggatgggcccctggatgctgccctggaccacctccgcctgggcaacaccttcaccttccgtgtgacagtcctgcaggcgtccagcatctctgccgaatatgccgacatcttctgccagttcaacttcatccaccgccacgacgaggccttctccacagagcccctgaagaacacaggcagaggccccccacttggcttctaccacgtccagaacatcgcagtggaggtgaccaagtccttcattgagtacatcaagagccagcccattgttttcgaggtctttggccactaccagcagcacccgttcccgcccctctgcaaggacgtgctcagccccctgaggccctcgcgccgccacttccctcgggtcatgccactgtccaagccagtgcccgccaccaagctcagcacactgacgcggccctgtccgggaccctgccactgcaagtacgacctgctggtctacttcgagatctgtgagctggaggccaacggcgattacatcccggccgtggtggaccaccgtgggggcatgccatgcatggggaccttcctcctccaccagggcatccagcgacggattacggtgacactactgcatgagacaggcagccatatccgctggaaggaagtgcgcgagctggtcgtgggccgcatccgaaacactccagagaccgacgagtccctgatcgaccccaacatcttgtctctcaacatcctctcttccggatacatccacccagcccaagatgaccggaccttttaccaatttgaggctgcgtgggacagctccatgcacaactctctcctgctgaaccgggtcaccccttatcgagagaaaatctacatgacactctccgcttatatcgagatggagaactgcacccagccggctgttgtcaccaaggacttctgcatggtcttctattcccgtgatgccaagctgccagcctcgcgctccatccgcaacctctttggcagtgggagccttcgggcctcagagagtaaccgtgtgactggtgtgtacgagctcagcctgtgccacgtggctgacgcgggcagcccagggatgcagcgccggcgccgacgagtcctggacacatctgtggcctatgtccggggcgaggagaacctggcaggctggaggccccggagtgacagtctcattctggaccaccagtgggagctggagaagctgagcctcctgcaggaggtggagaagactaggcactacctgctcctgcgggagaagctggagaccgcccagcggcctgtcccggaggcactgtccccggccttcagcgaggactctgagtcccatggctcctccagcgcctcctccccgctctcggctgagggccgcccatcacccctggaggctcccaacgagaggcagcgggagctggccgtcaagtgcttgcgcctgctcacgcacacattcaacagagagtacacacacagccacgtctgcgtcagtgccagcgagagcaagctctccgagatgtctgtcaccctgctccgggacccgtcgatgtcccctctaggggtggccactctcaccccctcctccacttgcccctctctggttgaagggcggtacggtgccactgacctgaggaccccgcagccctgctcccggccagccagcccagagcccgagctgctgccagaggccgactccaagaagctcccttcccctgcccgggcaacagagacagacaaggagccccagcgcctgctggtccctgacatccaggagatccgagtcagcccgatcgtttccaagaaggggtacctgcacttcctggagccgcacacgtcaggctgggccaggcgcttcgtggtggtgcggcgcccctatgcctacatgtacaacagcgacaaggacaccgtggagcggttcgtgctcaacctggccactgcccaggtggagtacagtgaggaccagcaggctatgctcaagacacccaacacattcgcggtgtgcacggaacaccgcggcatcctgctgcaggccgccagcgacaaggacatgcatgactggctgtacgccttcaaccccctcctggccgggaccatacggtccaagctctccagaaggaggtctgcccagatgcgggtctgaacctgagccctcccgtgacagccggcaggcccagcccatcccctccctcatcctcgtctgtcctgtcacctgccgcccagcccctctcctgccagacagcccacgaccgggtcgaccccccaggggacgcccatgccaggcccggggacctgtgccacacgaccagctgtgctcccagcagaggctgtgcgtgtcagttcttcttgcagaatgtgctctggtggaacaagttgggagaggctgggggggccaagggcacaggttacgggggttcttgctgccgttctaatatttttttaagcatagacagacttataattaatatacgttagttagtgacattgaaacagtcaactcggaaattaactataagacttgttctatttataagtatttatttctaatgcctccacatagccctgtaatattcagatggaacccccaaccacctccaccctgtttgttcccacatgtgtctcccaagcctgctagggacaggcagggcagggacagccaccttggaaggccgcagtgaggagctgtctggaccagtggggcaccttggggctagcacacgggtgtatcgcctgggccccaggcttctccatggccacatgggtcctgggtgtatgtgtgggagagtgggggggtgtctttggtgcctgaagtctgcgcggcatggagggtggtgtgagttcctctggtgggagggagaacgcacatctcttctgggcggccacctgaggagtgactccaagaagagttccggcagctttccccaggaaagggtgaggggtgacactcggctctggctctgagatgaggcagacggcacccaggctgtgatctgtcctgggcggggaccaggagggagcggggtcgggatcacctgccagtgtgcagactctgggactgcgtgctgtctccggaccatcagggtagggtggtgggttgagaccaggaagtcagggaagatcggaattcagggcgacggtctaggtgtcgagggctgtggcgcagcctcttcagctgcggcgagaaatggagtgagtcaaggtagcttctgggaagaaatgctgccattagcaggtttcttgcaaagactttcctctctttgttcccagggcagagagtttctgtgagtcccactgagaaaatcccatggggtgggggtatcctggtcggtcggcaatggagggtggctggcttggtggttattgtcttcaaggagctcttcgctgctgcatctgcggtgtccctttgttcttgtcccatttcaccccctctgcagacaccaatgtccgagggccacccaggacaggacgggggtcagccccaagctgagagtctggtcataggagtcatgtccagaggcctagggaggttttagggccctccccacccacacccacaggtcgatttggtctctttttagctcaaggaaagacagtagccaagcaacagagcccctctcccgccgtggcccgtgggagcagttacatcgggtctggtgctccagacctagggcccagcactttcatcagatcctgcctcctggagtgggggaaacgcagcaccccactggttctgaggcccctaccctcccaggctgtcccacgtgatgctgacatgagcctcagagaccccaatcccatgcctgggggagagacagcggctcaggagtgggggagcacgggccttctacaccacatgggaaggctctggcatgaggttttcctttgggaaggttgtttgggcccctgaagttccatctccgagagtggtgtgcagggcaggccagggcccatgctggctgcagtctctgtggctgcctgcctgggccagcctgtttgggagctgggactgtgggctcgccttttcgtacctgggctcaggtgcggtgtggccaccgccaccctcatcccctgcctgggaggctctcccaggggctgatgggggggttctgtgagggagaatcagggctcgggaagccacgcctgggaaggcaggacacaggacacagcagctttctttggaaatctcccaggtgaggattcacatcccaaaataaaattcagaagccaggtggcctgtgctccccatgggtgacctctggaggcagtggaccaagatgcagcaaggagaggatgcagaacagcttcttgcagaagcacctgctccggcatccagcgctgcctggaggcaggaaggagaggcagggcaggacacgctggtctgagatgagggggagccccacgggccccaggcaggctagaggaggcacaggccctgccacggccaactcaggtcagccagcctgaggctgtggcctccaaagggtctgggcgcaccccccaggtcgcaggtgtctgaggccagccaacctgcagagcactcgcggcgtgggtgggctgagtggaggtgcctgggagctgcctaaattcagaagcctccactgccatggagactgcctggctgtgtcctctcagccaggtgccgtgttggccttggctaggacccagagccacactgcagcctccgccgactccctccttccgggcctgctctagtgaggagtgcctaagccaggacccagaaactcagagttgatggtgagaggaggccgcctgagtcaggacacctggcttcttgaaaagttcgctctgccagaaaccacctagggaccacgttagctgccttccttgagctccccaggagtcggtttccacatctgtgaggtggagggctggtgtggaggtgctcatggggtgcggtgcttgggagacagccaggcccagggtggctgctgcttcctgctaagtgggggaggtgagacagatctggaaagccgtctccctcagatggtttcatttaatgctttatactgccgagtctgggggcttgttttggtttgggggcagccatcctccaccagaaagggggagctccttccgctgcggctccagatagatggggatgccgggctccaggccgaccagcacttgggatctgatgggacacggccagtgcctaggggtgccaagtccaaggcctcccactgggagtcatcgctgagaagatgccaatgtttcatccaccggctgcacaggcacaaactcccccacccaggacggctgtgatgaggtggccctccctgtcaaccctggtccctggagtccccagcacctggggccctggtggggctgatgtcacaggtgtttactgtgctgctgcactggtcctatgccagcctcacccatgtggggaccacggaaggcacactcccttacccccggtgccgggccgtgcggtcccccagacggacagcagctgtggcgacctgcgtttctccctgggcctgtgcttcctgtagttagtccgtcccctggttcccctgtggctcagaggccgcgtccctggcttgtacatatgtgattgctgtgggcacaccccagaccccatgtcatagctgccgtcccgacgtcacgacgcctgtcccgatgtcttacacccgagtgttagccctaggctcctgtactgtgcgtgcacttgaggctctgtccaattaagaaataaatgtggctcttactcaacacagtcaaaaataacaaaagagggggg

SEQ ID NO: 87299 - DNA, 8851 bp, Homo sapiens
agccggcgagcggcagcagctccgggctcgagagcccgcgcccatgccagtgcccatgcggggccgccgccagtgacgccggagaggtgttccccccacactggggctcccactactgcgaggagtgacccacgaaggccacagagatggccggggcttcggtgaaggtggcggtgcgggtccgccccttcaattcccgggaaatgagccgtgactccaagtgcatcattcagatgtctggaagcaccaccaccattgttaaccccaaacagcccaaggagacgcccaaaagcttcagctttgactactcctactggtcgcacacctcacctgaggacatcaactacgcgtcgcagaagcaggtgtaccgggacatcggcgaggagatgctgcagcatgcctttgagggatacaacgtgtgcatcttcgcctatgggcagacgggtgccggcaagtcctacaccatgatgggcaagcaggagaaggaccagcagggcatcatcccacagctctgcgaggacctcttctctcggatcaacgacacgaccaacgacaacatgtcctactccgtggaggtcagctacatggagatttactgtgagcgcgtccgtgacctcctgaaccccaagaacaagggcaaccttcgcgtgagggagcacccactgctggggccctacgtggaggacctctccaagctggctgtcacctcctacaatgacatccaggacctcatggactcagggaacaaggccaggaccgtggcggccaccaacatgaatgagaccagcagtcgctcccacgccgtcttcaacatcatcttcacccagaagcgccatgacgcagagaccaatatcaccacggagaaggtgagcaaaatcagcctggtggacctggctgggagcgagcgggctgactccacgggagccaagggcacgcgcctcaaggagggggccaacatcaacaagtcgctgaccaccctgggcaaggtcatctccgccctggctgaaatggactccggacccaacaagaacaagaaaaagaagaagacagatttcattccgtaccgagattccgtgttgacctggctcctccgggaaaacctgggcggtaactcaaggacagctatggtggcagccctgagtcctgcagacatcaactacgatgagacccttagcacgctgaggtatgctgaccgggccaagcagatccgctgcaatgctgtcatcaatgaggaccccaacaacaagctgatccgcgagctgaaggatgaggtgacccggctgcgggaccttctgtacgcccagggtcttggcgacatcactgacatgaccaatgccctggtgggtatgagcccctcatcctcgctctcagccctgtccagccgcgcggcctccgtgtccagcctccacgagcgcatcttgtttgccccgggcagcgaggaggccattgaaagactgaaggaaacagagaagatcatagctgagctcaatgagacctgggaggagaagctgcggcggacagaagccatccggatggagagggaagccctgctggccgagatgggtgtggccatgagggaggatggcggcaccttgggcgtattctctcccaaaaagacaccacacctcgtcaacctgaacgaggacccgctgatgtctgagtgcctgctctactacatcaaggatgggatcaccagagtgggcagggaggatggcgagaggcggcaggacattgttctgagtgggcacttcatcaaggaggagcactgcgtcttccggagcgactccaggggaggcagcgaagctgtggtgaccttggagccctgtgagggggcagacacctacgtcaatggcaagaaagtcacagagcccagcatcctgcgttcaggaaaccgcatcatcatgggtaagagccatgtgttccggttcaaccaccccgagcaggcccggcaggagcgtgagcgcacgccttgtgcggagacgccagctgagcctgtggactgggccttcgcccagcgtgagctgctggagaagcagggcatcgacatgaagcaggagatggagcagaggctccaggaactggaggaccagtaccgccgcgagcgggaggaggccacctacctgctggagcagcagcggctggactatgagagcaagctggaggctctgcagaagcagatggactccaggtactacccggaggtgaacgaggaggaggaggagcccgaggatgaagtccagtggacagagcgggagtgtgagctggcgctctgggccttccggaagtggaagtggtaccagttcacgtctctgcgggacctgctgtggggcaacgccatcttcctcaaggaggctaatgccatcagcgtggagctgaaaaagaaggtacaattccagtttgtcctcctgacggacacactctactcccctctgccacccgacctgctgcccccagaggccgccaaagaccgagagacgcggcccttcccccgcaccattgtggccgtggaggtccaggaccagaagaacggggccacccactactggacgctggagaagctcaggcagcgtctggacctgatgcgggagatgtacgaccgcgctgcagaggtgccctccagtgtcatcgaggactgtgacaacgtggtgaccggcggagaccccttctatgaccgcttcccctggttccggctggtgggcagggccttcgtgtacctgagcaacctgctgtaccccgttcccctggtacaccgtgtggcaatcgtcagcgagaagggcgaggtgaagggcttcctccgcgtggccgtccaggccatctcagccgatgaagaggcccctgattatggctctggcgtccgccagtcgggaactgctaaaatctcctttgatgaccagcattttgaaaagttccagtccgagtcttgccccgtggtggggatgtcccgctcgggaacctcccaggaagagcttcgcatcgtggagggccagggccagggtgcagacgtggggccctcagccgatgaagtcaacaacaacacctgttcagcagtgcccccagaaggcctcctcctagacagctctgagaaagccgccctggatgggcccctggatgctgccctggaccacctccgcctgggcaacaccttcaccttccgtgtgacagtcctgcaggcgtccagcatctctgccgaatatgccgacatcttctgccagttcaacttcatccaccgccacgacgaggccttctccacagagcccctgaagaacacaggcagaggccccccacttggcttctaccacgtccagaacatcgcagtggaggtgaccaagtccttcattgagtacatcaagagccagcccattgttttcgaggtctttggccactaccagcagcacccgttcccgcccctctgcaaggacgtgctcagccccctgaggccctcgcgccgccacttccctcgggtcatgccactgtccaagccagtgcccgccaccaagctcagcacactgacgcggccctgtccgggaccctgccactgcaagtacgacctgctggtctacttcgagatctgtgagctggaggccaacggcgattacatcccggccgtggtggaccaccgtgggggcatgccatgcatggggaccttcctcctccaccagggcatccagcgacggattacggtgacactactgcatgagacaggcagccatatccgctggaaggaagtgcgcgagctggtcgtgggccgcatccgaaacactccagagaccgacgagtccctgatcgaccccaacatcttgtctctcaacatcctctcttccggatacatccacccagcccaagatgaccggaccttttaccaatttgaggctgcgtgggacagctccatgcacaactctctcctgctgaaccgggtcaccccttatcgagagaaaatctacatgacactctccgcttatatcgagatggagaactgcacccagccggctgttgtcaccaaggacttctgcatggtcttctattcccgtgatgccaagctgccagcctcgcgctccatccgcaacctctttggcagtgggagccttcgggcctcagagagtaaccgtgtgactggtgtgtacgagctcagcctgtgccacgtggctgacgcgggcagcccagggatgcagcgccggcgccgacgagtcctggacacatctgtggcctatgtccggggcgaggagaacctggcaggctggaggccccggagtgacagtctcattctggaccaccagtgggagctggagaagctgagcctcctgcaggaggtggagaagactaggcactacctgctcctgcgggagaagctggagaccgcccagcggcctgtcccggaggcactgtccccggccttcagcgaggactctgagtcccatggctcctccagcgcctcctccccgctctcggctgagggccgcccatcacccctggaggctcccaacgagaggcagcgggagctggccgtcaagtgcttgcgcctgctcacgcacacattcaacagagagtacacacacagccacgtctgcgtcagtgccagcgagagcaagctctccgagatgtctgtcaccctgctccgggacccgtcgatgtcccctctaggggtggccactctcaccccctcctccacttgcccctctctggttgaagggcggtacggtgccactgacctgaggaccccgcagccctgctcccggccagccagcccagagcccgagctgctgccagaggccgactccaagaagctcccttcccctgcccgggcaacagagacagacaaggagccccagcgcctgctggtccctgacatccaggagatccgagtcagcccgatcgtttccaagaaggggtacctgcacttcctggagccgcacacgtcaggctgggccaggcgcttcgtggtggtgcggcgcccctatgcctacatgtacaacagcgacaaggacaccgtggagcggttcgtgctcaacctggccactgcccaggtggagtacagtgaggaccagcaggctatgctcaagacacccaacacattcgcggtgtgcacggaacaccgcggcatcctgctgcaggccgccagcgacaaggacatgcatgactggctgtacgccttcaaccccctcctggccgggaccatacggtccaagctctccagaaggaggtctgcccagatgcgggtctgaacctgagccctcccgtgacagccggcaggcccagcccatcccctccctcatcctcgtctgtcctgtcacctgccgcccagcccctctcctgccagacagcccacgaccgggtcgaccccccaggggacgcccatgccaggcccggggacctgtgccacacgaccagctgtgctcccagcagaggctgtgcgtgtcagttcttcttgcagaatgtgctctggtggaacaagttgggagaggctgggggggccaagggcacaggttacgggggttcttgctgccgttctaatatttttttaagcatagacagacttataattaatatacgttagttagtgacattgaaacagtcaactcggaaattaactataagacttgttctatttataagtatttatttctaatgcctccacatagccctgtaatattcagatggaacccccaaccacctccaccctgtttgttcccacatgtgtctcccaagcctgctagggacaggcagggcagggacagccaccttggaaggccgcagtgaggagctgtctggaccagtggggcaccttggggctagcacacgggtgtatcgcctgggccccaggcttctccatggccacatgggtcctgggtgtatgtgtgggagagtgggggggtgtctttggtgcctgaagtctgcgcggcatggagggtggtgtgagttcctctggtgggagggagaacgcacatctcttctgggcggccacctgaggagtgactccaagaagagttccggcagctttccccaggaaagggtgaggggtgacactcggctctggctctgagatgaggcagacggcacccaggctgtgatctgtcctgggcggggaccaggagggagcggggtcgggatcacctgccagtgtgcagactctgggactgcgtgctgtctccggaccatcagggtagggtggtgggttgagaccaggaagtcagggaagatcggaattcagggcgacggtctaggtgtcgagggctgtggcgcagcctcttcagctgcggcgagaaatggagtgagtcaaggtagcttctgggaagaaatgctgccattagcaggtttcttgcaaagactttcctctctttgttcccagggcagagagtttctgtgagtcccactgagaaaatcccatggggtgggggtatcctggtcggtcggcaatggagggtggctggcttggtggttattgtcttcaaggagctcttcgctgctgcatctgcggtgtccctttgttcttgtcccatttcaccccctctgcagacaccaatgtccgagggccacccaggacaggacgggggtcagccccaagctgagagtctggtcataggagtcatgtccagaggcctagggaggttttagggccctccccacccacacccacaggtcgatttggtctctttttagctcaaggaaagacagtagccaagcaacagagcccctctcccgccgtggcccgtgggagcagttacatcgggtctggtgctccagacctagggcccagcactttcatcagatcctgcctcctggagtgggggaaacgcagcaccccactggttctgaggcccctaccctcccaggctgtcccacgtgatgctgacatgagcctcagagaccccaatcccatgcctgggggagagacagcggctcaggagtgggggagcacgggccttctacaccacatgggaaggctctggcatgaggttttcctttgggaaggttgtttgggcccctgaagttccatctccgagagtggtgtgcagggcaggccagggcccatgctggctgcagtctctgtggctgcctgcctgggccagcctgtttgggagctgggactgtgggctcgccttttcgtacctgggctcaggtgcggtgtggccaccgccaccctcatcccctgcctgggaggctctcccaggggctgatgggggggttctgtgagggagaatcagggctcgggaagccacgcctgggaaggcaggacacaggacacagcagctttctttggaaatctcccaggtgaggattcacatcccaaaataaaattcagaagccaggtggcctgtgctccccatgggtgacctctggaggcagtggaccaagatgcagcaaggagaggatgcagaacagcttcttgcagaagcacctgctccggcatccagcgctgcctggaggcaggaaggagaggcagggcaggacacgctggtctgagatgagggggagccccacgggccccaggcaggctagaggaggcacaggccctgccacggccaactcaggtcagccagcctgaggctgtggcctccaaagggtctgggcgcaccccccaggtcgcaggtgtctgaggccagccaacctgcagagcactcgcggcgtgggtgggctgagtggaggtgcctgggagctgcctaaattcagaagcctccactgccatggagactgcctggctgtgtcctctcagccaggtgccgtgttggccttggctaggacccagagccacactgcagcctccgccgactccctccttccgggcctgctctagtgaggagtgcctaagccaggacccagaaactcagagttgatggtgagaggaggccgcctgagtcaggacacctggcttcttgaaaagttcgctctgccagaaaccacctagggaccacgttagctgccttccttgagctccccaggagtcggtttccacatctgtgaggtggagggctggtgtggaggtgctcatggggtgcggtgcttgggagacagccaggcccagggtggctgctgcttcctgctaagtgggggaggtgagacagatctggaaagccgtctccctcagatggtttcatttaatgctttatactgccgagtctgggggcttgttttggtttgggggcagccatcctccaccagaaagggggagctccttccgctgcggctccagatagatggggatgccgggctccaggccgaccagcacttgggatctgatgggacacggccagtgcctaggggtgccaagtccaaggcctcccactgggagtcatcgctgagaagatgccaatgtttcatccaccggctgcacaggcacaaactcccccacccaggacggctgtgatgaggtggccctccctgtcaaccctggtccctggagtccccagcacctggggccctggtggggctgatgtcacaggtgtttactgtgctgctgcactggtcctatgccagcctcacccatgtggggaccacggaaggcacactcccttacccccggtgccgggccgtgcggtcccccagacggacagcagctgtggcgacctgcgtttctccctgggcctgtgcttcctgtagttagtccgtcccctggttcccctgtggctcagaggccgcgtccctggcttgtacatatgtgattgctgtgggcacaccccagaccccatgtcatagctgccgtcccgacgtcacgacgcctgtcccgatgtcttacacccgagtgttagccctaggctcctgtactgtgcgtgcactggcgaggctaggacactggcgaaggctaggacactggcgaggctaggacactggcaaggctaggacactggcgaggcatgga

SEQ ID NO: 87300 - DNA, 7885 bp, Homo sapiens
agccggcgagcggcagcagctccgggctcgagagcccgcgcccatgccagtgcccatgcggggccgccgccagtgacgccggagaggtgttccccccacactggggctcccactactgcgaggagtgacccacgaaggccacagagatggccggggcttcggtgaaggtggcggtgcgggtccgccccttcaattcccgggaaatgagccgtgactccaagtgcatcattcagatgtctggaagcaccaccaccattgttaaccccaaacagcccaaggagacgcccaaaagcttcagctttgactactcctactggtcgcacacctcacctgaggacatcaactacgcgtcgcagaagcaggtgtaccgggacatcggcgaggagatgctgcagcatgcctttgagggatacaacgtgtgcatcttcgcctatgggcagacgggtgccggcaagtcctacaccatgatgggcaagcaggagaaggaccagcagggcatcatcccacagctctgcgaggacctcttctctcggatcaacgacacgaccaacgacaacatgtcctactccgtggaggtcagctacatggagatttactgtgagcgcgtccgtgacctcctgaaccccaagaacaagggcaaccttcgcgtgagggagcacccactgctggggccctacgtggaggacctctccaagctggctgtcacctcctacaatgacatccaggacctcatggactcagggaacaaggccaggaccgtggcggccaccaacatgaatgagaccagcagtcgctcccacgccgtcttcaacatcatcttcacccagaagcgccatgacgcagagaccaatatcaccacggagaaggtgagcaaaatcagcctggtggacctggctgggagcgagcgggctgactccacgggagccaagggcacgcgcctcaaggagggggccaacatcaacaagtcgctgaccaccctgggcaaggtcatctccgccctggctgaaatggactccggacccaacaagaacaagaaaaagaagaagacagatttcattccgtaccgagattccgtgttgacctggctcctccgggaaaacctgggcggtaactcaaggacagctatggtggcagccctgagtcctgcagacatcaactacgatgagacccttagcacgctgaggtatgctgaccgggccaagcagatccgctgcaatgctgtcatcaatgaggaccccaacaacaagctgatccgcgagctgaaggatgaggtgacccggctgcgggaccttctgtacgcccagggtcttggcgacatcactgacatgaccaatgccctggtgggtatgagcccctcatcctcgctctcagccctgtccagccgcgcggcctccgtgtccagcctccacgagcgcatcttgtttgccccgggcagcgaggaggccattgaaagactgaaggaaacagagaagatcatagctgagctcaatgagacctgggaggagaagctgcggcggacagaagccatccggatggagagggaagccctgctggccgagatgggtgtggccatgagggaggatggcggcaccttgggcgtattctctcccaaaaagacaccacacctcgtcaacctgaacgaggacccgctgatgtctgagtgcctgctctactacatcaaggatgggatcaccagagtgggcagggaggatggcgagaggcggcaggacattgttctgagtgggcacttcatcaaggaggagcactgcgtcttccggagcgactccaggggaggcagcgaagctgtggtgaccttggagccctgtgagggggcagacacctacgtcaatggcaagaaagtcacagagcccagcatcctgcgttcaggaaaccgcatcatcatgggtaagagccatgtgttccggttcaaccaccccgagcaggcccggcaggagcgtgagcgcacgccttgtgcggagacgccagctgagcctgtggactgggccttcgcccagcgtgagctgctggagaagcagggcatcgacatgaagcaggagatggagcagaggctccaggaactggaggaccagtaccgccgcgagcgggaggaggccacctacctgctggagcagcagcggctggactatgagagcaagctggaggctctgcagaagcagatggactccaggtactacccggaggtgaacgaggaggaggaggagcccgaggatgaagtccagtggacagagcgggagtgtgagctggcgctctgggccttccggaagtggaagtggtaccagttcacgtctctgcgggacctgctgtggggcaacgccatcttcctcaaggaggctaatgccatcagcgtggagctgaaaaagaaggtacaattccagtttgtcctcctgacggacacactctactcccctctgccacccgacctgctgcccccagaggccgccaaagaccgagagacgcggcccttcccccgcaccattgtggccgtggaggtccaggaccagaagaacggggccacccactactggacgctggagaagctcaggcagcgtctggacctgatgcgggagatgtacgaccgcgctgcagaggtgccctccagtgtcatcgaggactgtgacaacgtggtgaccggcggagaccccttctatgaccgcttcccctggttccggctggtgggcagggccttcgtgtacctgagcaacctgctgtaccccgttcccctggtacaccgtgtggcaatcgtcagcgagaagggcgaggtgaagggcttcctccgcgtggccgtccaggccatctcagccgatgaagaggcccctgattatggctctggcgtccgccagtcgggaactgctaaaatctcctttgatgaccagcattttgaaaagttccagtccgagtcttgccccgtggtggggatgtcccgctcgggaacctcccaggaagagcttcgcatcgtggagggccagggccagggtgcagacgtggggccctcagccgatgaagtcaacaacaacacctgttcagcagtgcccccagaaggcctcctcctagacagctctgagaaagccgccctggatgggcccctggatgctgccctggaccacctccgcctgggcaacaccttcaccttccgtgtgacagtcctgcaggcgtccagcatctctgccgaatatgccgacatcttctgccagttcaacttcatccaccgccacgacgaggccttctccacagagcccctgaagaacacaggcagaggccccccacttggcttctaccacgtccagaacatcgcagtggaggtgaccaagtccttcattgagtacatcaagagccagcccattgttttcgaggtctttggccactaccagcagcacccgttcccgcccctctgcaaggacgtgctcagccccctgaggccctcgcgccgccacttccctcgggtcatgccactgtccaagccagtgcccgccaccaagctcagcacactgacgcggccctgtccgggaccctgccactgcaagtacgacctgctggtctacttcgagatctgtgagctggaggccaacggcgattacatcccggccgtggtggaccaccgtgggggcatgccatgcatggggaccttcctcctccaccagggcatccagcgacggattacggtgacactactgcatgagacaggcagccatatccgctggaaggaagtgcgcgagctggtcgtgggccgcatccgaaacactccagagaccgacgagtccctgatcgaccccaacatcttgtctctcaacatcctctcttccggatacatccacccagcccaagatgaccggaccttttaccaatttgaggctgcgtgggacagctccatgcacaactctctcctgctgaaccgggtcaccccttatcgagagaaaatctacatgacactctccgcttatatcgagatggagaactgcacccagccggctgttgtcaccaaggacttctgcatggtcttctattcccgtgatgccaagctgccagcctcgcgctccatccgcaacctctttggcagtgggagccttcgggcctcagagagtaaccgtgtgactggtgtgtacgagctcagcctgtgccacgtggctgacgcgggcagcccagggatgcagcgccggcgccgacgagtcctggacacatctgtggcctatgtccggggcgaggagaacctggcaggctggaggccccggagtgacagtctcattctggaccaccagtgggagctggagaagctgagcctcctgcaggaggtggagaagactaggcactacctgctcctgcgggagaagctggagaccgcccagcggcctgtcccggaggcactgtccccggccttcagcgaggactctgagtcccatggctcctccagcgcctcctccccgctctcggctgagggccgcccatcacccctggaggctcccaacgagaggcagcgggagctggccgtcaagtgcttgcgcctgctcacgcacacattcaacagagagtacacacacagccacgtctgcgtcagtgccagcgagagcaagctctccgagatgtctgtcaccctgctccgggacccgtcgatgtcccctctaggggtggccactctcaccccctcctccacttgcccctctctggttgaagggcggtacggtgccactgacctgaggaccccgcagccctgctcccggccagccagcccagagcccgagctgctgccagaggccgactccaagaagctcccttcccctgcccgggcaacagagacagacaaggagccccagcgcctgctggtccctgacatccaggagatccgagtcagcccgatcgtttccaagaaggggtacctgcacttcctggagccgcacacgtcaggctgggccaggcgcttcgtggtggtgcggcgcccctatgcctacatgtacaacagcgacaaggacaccgtggagcggttcgtgctcaacctggccactgcccaggtggagtacagtgaggaccagcaggctatgctcaagacacccaacacattcgcggtgtgcacggaacaccgcggcatcctgctgcaggccgccagcgacaaggacatgcatgactggctgtacgccttcaaccccctcctggccgggaccatacggtccaagctctccagaaggaggtctgcccagatgcgggtctgaacctgagccctcccgtgacagccggcaggcccagcccatcccctccctcatcctcgtctgtcctgtcacctgccgcccagcccctctcctgccagacagcccacgaccgggtcgaccccccaggggacgcccatgccaggcccggggacctgtgccacacgaccagctgtgctcccagcagaggctgtgcgtgtcagttcttcttgcagaatgtgctctggtggaacaagttgggagaggctgggggggccaagggcacaggttacgggggttcttgctgccgttctaatatttttttaagcatagacagacttataattaatatacgttagttagtgacattgaaacagtcaactcggaaattaactataagacttgttctatttataagtatttatttctaatgcctccacatagccctgtaatattcagatggaacccccaaccacctccaccctgtttgttcccacatgtgtctcccaagcctgctagggacaggcagggcagggacagccaccttggaaggccgcagtgaggagctgtctggaccagtggggcaccttggggctagcacacgggtgtatcgcctgggccccaggcttctccatggccacatgggtcctgggtgtatgtgtgggagagtgggggggtgtctttggtgcctgaagtctgcgcggcatggagggtggtgtgagttcctctggtgggagggagaacgcacatctcttctgggcggccacctgaggagtgactccaagaagagttccggcagctttccccaggaaagggtgaggggtgacactcggctctggctctgagatgaggcagacggcacccaggctgtgatctgtcctgggcggggaccaggagggagcggggtcgggatcacctgccagtgtgcagactctgggactgcgtgctgtctccggaccatcagggtagggtggtgggttgagaccaggaagtcagggaagatcggaattcagggcgacggtctaggtgtcgagggctgtggcgcagcctcttcagctgcggcgagaaatggagtgagtcaaggtagcttctgggaagaaatgctgccattagcaggtttcttgcaaagactttcctctctttgttcccagggcagagagtttctgtgagtcccactgagaaaatcccatggggtgggggtatcctggtcggtcggcaatggagggtggctggcttggtggttattgtcttcaaggagctcttcgctgctgcatctgcggtgtccctttgttcttgtcccatttcaccccctctgcagacaccaatgtccgagggccacccaggacaggacgggggtcagccccaagctgagagtctggtcataggagtcatgtccagaggcctagggaggttttagggccctccccacccacacccacaggtcgatttggtctctttttagctcaaggaaagacagtagccaagcaacagagcccctctcccgccgtggcccgtgggagcagttacatcgggtctggtgctccagacctagggcccagcactttcatcagatcctgcctcctggagtgggggaaacgcagcaccccactggttctgaggcccctaccctcccaggctgtcccacgtgatgctgacatgagcctcagagaccccaatcccatgcctgggggagagacagcggctcaggagtgggggagcacgggccttctacaccacatgggaaggctagttcgctctgccagaaaccacctagggaccacgttagctgccttccttgagctccccaggagtcggtttccacatctgtgaggtggagggctggtgtggaggtgctcatggggtgcggtgcttgggagacagccaggcccagggtggctgctgcttcctgctaagtgggggaggtgagacagatctggaaagccgtctccctcagatggtttcatttaatgctttatactgccgagtctgggggcttgttttggtttgggggcagccatcctccaccagaaagggggagctccttccgctgcggctccagatagatggggatgccgggctccaggccgaccagcacttgggatctgatgggacacggccagtgcctaggggtgccaagtccaaggcctcccactgggagtcatcgctgagaagatgccaatgtttcatccaccggctgcacaggcacaaactcccccacccaggacggctgtgatgaggtggccctccctgtcaaccctggtccctggagtccccagcacctggggccctggtggggctgatgtcacaggtgtttactgtgctgctgcactggtcctatgccagcctcacccatgtggggaccacggaaggcacactcccttacccccggtgccgggccgtgcggtcccccagacggacagcagctgtggcgacctgcgtttctccctgggcctgtgcttcctgtagttagtccgtcccctggttcccctgtggctcagaggccgcgtccctggcttgtacatatgtgattgctgtgggcacaccccagaccccatgtcatagctgccgtcccgacgtcacgacgcctgtcccgatgtcttacacccgagtgttagccctaggctcctgtactgtgcgtgcacttgaggctctgtccaattaagaaataaatgtggctcttactcaacacagtc

SEQ ID NO: 87301 - DNA, 3896 bp, Homo sapiens
gtttcctacatccaggagatccagtcagcccgatcgtttccaagaaggggtacctgcacttcctggagccgcacacgtcaggctgggccaggcgcttcgtggtggtgcggcgcccctatgcctacatgtacaacagcgacaaggacaccgtggagcggttcgtgctcaacctggccactgcccaggtggagtacagtgaggaccagcaggctatgctcaagacacccaacacattcgcggtgtgcacggaacaccgcggcatcctgctgcaggccgccagcgacaaggacatgcatgactggctgtacgccttcaaccccctcctggccgggaccatacggtccaagctctccagaaggaggtctgcccagatgcgggtctgaacctgagccctcccgtgacagccggcaggcccagcccatcccctccctcatcctcgtctgtcctgtgccacacgaccagctgtgctcccagcagaggctgtgcgtgtcagttcttcttgcagaatgtgctctggtggaacaagttgggagaggctgggggggccaagggcacaggttacgggggttcttgctgccgttctaatatttttttaagcatagacagacttataattaatatacgttagttagtgacattgaaacagtcaactcggaaattaactataagacttgttctatttataagtatttatttctaatgcctccacatagccctgtaatattcagatggaacccccaaccacctccaccctgtttgttcccacatgtgtctcccaagcctgctagggacaggcagggcagggacagccaccttggaaggccgcagtgaggagctgtctggaccagtggggcaccttggggctagcacacgggtgtatcgcctgggccccaggcttctccatggccacatgggtcctgggtgtatgtgtgggagagtgggggggtgtctttggtgcctgaagtctgcgcggcatggagggtggtgtgagttcctctggtgggagggagaacgcacatctcttctgggcggccacctgaggagtgactccaagaagagttccggcagctttccccaggaaagggtgaggggtgacactcggctctggctctgagatgaggcagacggcacccaggctgtgatctgtcctgggcggggaccaggagggagcggggtcgggatcacctgccagtgtgcagactctgggactgcgtgctgtctccggaccatcagggtagggtggtgggttgagaccaggaagtcagggaagatcggaattcagggcgacggtctaggtgtcgagggctgtggcgcagcctcttcagctgcggcgagaaatggagtgagtcaaggtagcttctgggaagaaatgctgccattagcaggtttcttgcaaagactttcctctctttgttcccagggcagagagtttctgtgagtcccactgagaaaatcccatggggtgggggtatcctggtcggtcggcaatggagggtggctggcttggtggttattgtcttcaaggagctcttcgctgctgcatctgcggtgtccctttgttcttgtcccatttcaccccctctgcagacaccaatgtccgagggccacccaggacaggacgggggtcagccccaagctgagagtctggtcataggagtcatgtccagaggcctagggaggttttagggccctccccacccacacccacaggtcgatttggtctctttttagctcaaggaaagacagtagccaagcaacagagcccctctcccgccgtggcccgtgggagcagttacatcgggtctggtgctccagacctagggcccagcactttcatcagatcctgcctcctggagtgggggaaacgcagcaccccactggttctgaggcccctaccctcccaggctgtcccacgtgatgctgacatgagcctcagagaccccaatcccatgcctgggggagagacagcggctcaggagtgggggagcacgggccttctacaccacatgggaaggctctggcatgaggttttcctttgggaaggttgtttgggcccctgaagttccatctccgagagtggtgtgcagggcaggccagggcccatgctggctgcagtctctgtggctgcctgcctgggccagcctgtttgggagctgggactgtgggctcgccttttcgtacctgggctcaggtgcggtgtggccaccgccaccctcatcccctgcctgggaggctctcccaggggctgatgggggggttctgtgagggagaatcagggctcgggaagccacgcctgggaaggcaggacacaggacacagcagctttctttggaaatctcccaggtgaggattcacatcccaaaataaaattcagaagccaggtggcctgtgctccccatgggtgacctctggaggcagtggaccaagatgcagcaaggagaggatgcagaacagcttcttgcagaagcacctgctccggcatccagcgctgcctggaggcaggaaggagaggcagggcaggacacgctggtctgagatgagggggagccccacgggccccaggcaggctagaggaggcacaggccctgccacggccaactcaggtcagccagcctgaggctgtggcctccaaagggtctgggcgcaccccccaggtcgcaggtgtctgaggccagccaacctgcagagcactcgcggcgtgggtgggctgagtggaggtgcctgggagctgcctaaattcagaagcctccactgccatggagactgcctggctgtgtcctctcagccaggtgccgtgttggccttggctaggacccagagccacactgcagcctccgccgactccctccttccgggcctgctctagtgaggagtgcctaagccaggacccagaaactcagagttgatggtgagaggaggccgcctgagtcaggacacctggcttcttgaaaagttcgctctgccagaaaccacctagggaccacgttagctgccttccttgagctccccaggagtcggtttccacatctgtgaggtggagggctggtgtggaggtgctcatggggtgcggtgcttgggagacagccaggcccagggtggctgctgcttcctgctaagtgggggaggtgagacagatctggaaagccgtctccctcagatggtttcatttaatgctttatactgccgagtctgggggcttgttttggtttgggggcagccatcctccaccagaaagggggagctccttccgctgcggctccagatagatggggatgccgggctccaggccgaccagcacttgggatctgatgggacacggccagtgcctaggggtgccaagtccaaggcctcccactgggagtcatcgctgagaagatgccaatgtttcatccaccggctgcacaggcacaaactcccccacccaggacggctgtgatgaggtggccctccctgtcaaccctggtccctggagtccccagcacctggggccctggtggggctgatgtcacaggtgtttactgtgctgctgcactggtcctatgccagcctcacccatgtggggaccacggaaggcacactcccttacccccggtgccgggccgtgcggtcccccagacggacagcagctgtggcgacctgcgtttctccctgggcctgtgcttcctgtagttagtccgtcccctggttcccctgtggctcagaggccgcgtccctggcttgtacatatgtgattgctgtgggcacaccccagaccccatgtcatagctgccgtcccgacgtcacgacgcctgtcccgatgtcttacacccgagtgttagccctaggctcctgtactgtgcgtgcacttgaggctctgtccaattaagaaataaatgtggctcttactcaacacagtc

SEQ ID NO: 87302 - DNA, 6513 bp, Homo sapiens
agccggcgagcggcagcagctccgggctcgagagcccgcgcccatgccagtgcccatgcggggccgccgccagtgacgccggagaggtgttccccccacactggggctcccactactgcgaggagtgacccacgaaggccacagagatggccggggcttcggtgaaggtggcggtgcgggtccgccccttcaattcccgggaaatgagccgtgactccaagtgcatcattcagatgtctggaagcaccaccaccattgttaaccccaaacagcccaaggagacgcccaaaagcttcagctttgactactcctactggtcgcacacctcacctgaggacatcaactacgcgtcgcagaagcaggtgtaccgggacatcggcgaggagatgctgcagcatgcctttgagggatacaacgtgtgcatcttcgcctatgggcagacgggtgccggcaagtcctacaccatgatgggcaagcaggagaaggaccagcagggcatcatcccacagctctgcgaggacctcttctctcggatcaacgacacgaccaacgacaacatgtcctactccgtggaggtcagctacatggagatttactgtgagcgcgtccgtgacctcctgaaccccaagaacaagggcaaccttcgcgtgagggagcacccactgctggggccctacgtggaggacctctccaagctggctgtcacctcctacaatgacatccaggacctcatggactcagggaacaaggccaggaccgtggcggccaccaacatgaatgagaccagcagtcgctcccacgccgtcttcaacatcatcttcacccagaagcgccatgacgcagagaccaatatcaccacggagaaggtgagcaaaatcagcctggtggacctggctgggagcgagcgggctgactccacgggagccaagggcacgcgcctcaaggagggggccaacatcaacaagtcgctgaccaccctgggcaaggtcatctccgccctggctgaaatggactccggacccaacaagaacaagaaaaagaagaagacagatttcattccgtaccgagattccgtgttgacctggctcctccgggaaaacctgggcggtaactcaaggacagctatggtggcagccctgagtcctgcagacatcaactacgatgagacccttagcacgctgaggtatgctgaccgggccaagcagatccgctgcaatgctgtcatcaatgaggaccccaacaacaagctgatccgcgagctgaaggatgaggtgacccggctgcgggaccttctgtacgcccagggtcttggcgacatcactgacatgaccaatgccctggtgggtatgagcccctcatcctcgctctcagccctgtccagccgcgcggcctccgtgtccagcctccacgagcgcatcttgtttgccccgggcagcgaggaggccattgaaagactgaaggaaacagagaagatcatagctgagctcaatgagacctgggaggagaagctgcggcggacagaagccatccggatggagagggaagccctgctggccgagatgggtgtggccatgagggaggatggcggcaccttgggcgtattctctcccaaaaagacaccacacctcgtcaacctgaacgaggacccgctgatgtctgagtgcctgctctactacatcaaggatgggatcaccagagtgggcagggaggatggcgagaggcggcaggacattgttctgagtgggcacttcatcaaggaggagcactgcgtcttccggagcgactccaggggaggcagcgaagctgtggtgaccttggagccctgtgagggggcagacacctacgtcaatggcaagaaagtcacagagcccagcatcctgcgttcaggaaaccgcatcatcatgggtaagagccatgtgttccggttcaaccaccccgagcaggcccggcaggagcgtgagcgcacgccttgtgcggagacgccagctgagcctgtggactgggccttcgcccagcgtgagctgctggagaagcagggcatcgacatgaagcaggagatggagcagaggctccaggaactggaggaccagtaccgccgcgagcgggaggaggccacctacctgctggagcagcagcggctggactatgagagcaagctggaggctctgcagaagcagatggactccaggtactacccggaggtgaacgaggaggaggaggagcccgaggatgaagtccagtggacagagcgggagtgtgagctggcgctctgggccttccggaagtggaagtggtaccagttcacgtctctgcgggacctgctgtggggcaacgccatcttcctcaaggaggctaatgccatcagcgtggagctgaaaaagaaggtacaattccagtttgtcctcctgacggacacactctactcccctctgccacccgacctgctgcccccagaggccgccaaagaccgagagacgcggcccttcccccgcaccattgtggccgtggaggtccaggaccagaagaacggggccacccactactggacgctggagaagctcaggcagcgtctggacctgatgcgggagatgtacgaccgcgctgcagaggtgccctccagtgtcatcgaggactgtgacaacgtggtgaccggcggagaccccttctatgaccgcttcccctggttccggctggtgggcagggccttcgtgtacctgagcaacctgctgtaccccgttcccctggtacaccgtgtggcaatcgtcagcgagaagggcgaggtgaagggcttcctccgcgtggccgtccaggccatctcagccgatgaagaggcccctgattatggctctggcgtccgccagtcgggaactgctaaaatctcctttgatgaccagcattttgaaaagttccagtccgagtcttgccccgtggtggggatgtcccgctcgggaacctcccaggaagagcttcgcatcgtggagggccagggccagggtgcagacgtggggccctcagccgatgaagtcaacaacaacacctgttcagcagtgcccccagaaggcctcctcctagacagctctgagaaagccgccctggatgggcccctggatgctgccctggaccacctccgcctgggcaacaccttcaccttccgtgtgacagtcctgcaggcgtccagcatctctgccgaatatgccgacatcttctgccagttcaacttcatccaccgccacgacgaggccttctccacagagcccctgaagaacacaggcagaggccccccacttggcttctaccacgtccagaacatcgcagtggaggtgaccaagtccttcattgagtacatcaagagccagcccattgttttcgaggtctttggccactaccagcagcacccgttcccgcccctctgcaaggacgtgctcagccccctgaggccctcgcgccgccacttccctcgggtcatgccactgtccaagccagtgcccgccaccaagctcagcacactgacgcggccctgtccgggaccctgccactgcaagtacgacctgctggtctacttcgagatctgtgagctggaggccaacggcgattacatcccggccgtggtggaccaccgtgggggcatgccatgcatggggaccttcctcctccaccagggcatccagcgacggattacggtgacactactgcatgagacaggcagccatatccgctggaaggaagtgcgcgagctggtcgtgggccgcatccgaaacactccagagaccgacgagtccctgatcgaccccaacatcttgtctctcaacatcctctcttccggatacatccacccagcccaagatgaccggaccttttaccaatttgaggctgcgtgggacagctccatgcacaactctctcctgctgaaccgggtcaccccttatcgagagaaaatctacatgacactctccgcttatatcgagatggagaactgcacccagccggctgttgtcaccaaggacttctgcatggtcttctattcccgtgatgccaagctgccagcctcgcgctccatccgcaacctctttggcagtgggagccttcgggcctcagagagtaaccgtgtgactggtgtgtacgagctcagcctgtgccacgtggctgacgcgggcagcccagggatgcagcgccggcgccgacgagtcctggacacatctgtggcctatgtccggggcgaggagaacctggcaggctggaggccccggagtgacagtctcattctggaccaccagtgggagctggagaagctgagcctcctgcaggaggtggagaagactaggcactacctgctcctgcgggagaagctggagaccgcccagcggcctgtcccggaggcactgtccccggccttcagcgaggactctgagtcccatggctcctccagcgcctcctccccgctctcggctgagggccgcccatcacccctggaggctcccaacgagaggcagcgggagctggccgtcaagtgcttgcgcctgctcacgcacacattcaacagagagtacacacacagccacgtctgcgtcagtgccagcgagagcaagctctccgagatgtctgtcaccctgctccgggacccgtcgatgtcccctctaggggtggccactctcaccccctcctccacttgcccctctctggttgaagggcggtacggtgccactgacctgaggaccccgcagccctgctcccggccagccagcccagagcccgagctgctgccagaggccgactccaagaagctcccttcccctgcccgggcaacagagacagacaaggagccccagcgcctgctggtccctgacatccaggagatccgagtcagcccgatcgtttccaagaaggggtacctgcacttcctggagccgcacacgtcaggctgggccaggcgcttcgtggtggtgcggcgcccctatgcctacatgtacaacagcgacaaggacaccgtggagcggttcgtgctcaacctggccactgcccaggtggagtacagtgaggaccagcaggctatgctcaagacacccaacacattcgcggtgtgcacggaacaccgcggcatcctgctgcaggccgccagcgacaaggacatgcatgactggctgtacgccttcaaccccctcctggccgggaccatacggtccaagctctccagaaggaggtctgcccagatgcgggtctgaacctgagccctcccgtgacagccggcaggcccagcccatcccctccctcatcctcgtctgtcctgtcacctgccgcccagcccctctcctgccagacagcccacgaccgggtcgaccccccaggggacgcccatgccaggcccggggacctgtgccacacgaccagctgtgctcccagcagaggctgtgcgtgtcagttcttcttgcagaatgtgctctggtggaacaagttgggagaggctgggggggccaagggcacaggttacgggggttcttgctgccgttctaatatttttttaagcatagacagacttataattaatatacgttagttagtgacattgaaacagtcaactcggaaattaactataagacttgttctatttataagtatttatttctaatgcctccacatagccctgtaatattcagatggaacccccaaccacctccaccctgtttgttcccacatgtgtctcccaagcctgctagggacaggcagggcagggacagccaccttggaaggccgcagtgaggagctgtctggaccagtggggcaccttggggctagcacacgggtgtatcgcctgggccccaggcttctccatggccacatgggtcctgggtgtatgtgtgggagagtgggggggtgtctttggtgcctgaagtctgcgcggcatggagggtggtgtgagttcctctggtgggagggagaacgcacatctcttctgggcggccacctgaggagtgactccaagaagagttccggcagctttccccaggaaagggtgaggggtgacactcggctctggctctgagatgaggcagacggcacccaggctgtgatctgtcctgggcggggacctggagtccccagcacctggggccctggtggggctgatgtcacaggtgtttactgtgctgctgcactggtcctatgccagcctcacccatgtggggaccacggaaggcacactcccttacccccggtgccgggccgtgcggtcccccagacggacagcagctgtggcgacctgcgtttctccctgggcctgtgcttcctgtagttagtccgtcccctggttcccctgtggctcagaggccgcgtccctggcttgtacatatgtgattgctgtgggcacaccccagaccccatgtcatagctgccgtcccgacgtcacgacgcctgtcccgatgtcttacacccgagtgttagccctaggctcctgtactgtgcgtgcacttgaggctctgtccaattaagaaataaatgtggctcttactcaacacagtc

SEQ ID NO: 87303 - DNA, 4999 bp, Homo sapiens
agccggcgagcggcagcagctccgggctcgagagcccgcgcccatgccagtgcccatgcggggccgccgccagtgacgccggagaggtgttccccccacactggggctcccactactgcgaggagtgacccacgaaggccacagagatggccggggcttcggtgaaggtggcggtgcgggtccgccccttcaattcccgggaaatgagccgtgactccaagtgcatcattcagatgtctggaagcaccaccaccattgttaaccccaaacagcccaaggagacgcccaaaagcttcagctttgactactcctactggtcgcacacctcacctgaggacatcaactacgcgtcgcagaagcaggtgtaccgggacatcggcgaggagatgctgcagcatgcctttgagggatacaacgtgtgcatcttcgcctatgggcagacgggtgccggcaagtcctacaccatgatgggcaagcaggagaaggaccagcagggcatcatcccacagctctgcgaggacctcttctctcggatcaacgacacgaccaacgacaacatgtcctactccgtggaggtcagctacatggagatttactgtgagcgcgtccgtgacctcctgaaccccaagaacaagggcaaccttcgcgtgagggagcacccactgctggggccctacgtggaggacctctccaagctggctgtcacctcctacaatgacatccaggacctcatggactcagggaacaaggccaggaccgtggcggccaccaacatgaatgagaccagcagtcgctcccacgccgtcttcaacatcatcttcacccagaagcgccatgacgcagagaccaatatcaccacggagaaggtgagcaaaatcagcctggtggacctggctgggagcgagcgggctgactccacgggagccaagggcacgcgcctcaaggagggggccaacatcaacaagtcgctgaccaccctgggcaaggtcatctccgccctggctgaaatggactccggacccaacaagaacaagaaaaagaagaagacagatttcattccgtaccgagattccgtgttgacctggctcctccgggaaaacctgggcggtaactcaaggacagctatggtggcagccctgagtcctgcagacatcaactacgatgagacccttagcacgctgaggtatgctgaccgggccaagcagatccgctgcaatgctgtcatcaatgaggaccccaacaacaagctgatccgcgagctgaaggatgaggtgacccggctgcgggaccttctgtacgcccagggtcttggcgacatcactgacatgaccaatgccctggtgggtatgagcccctcatcctcgctctcagccctgtccagccgcgcggcctccgtgtccagcctccacgagcgcatcttgtttgccccgggcagcgaggaggccattgaaagactgaaggaaacagagaagatcatagctgagctcaatgagacctgggaggagaagctgcggcggacagaagccatccggatggagagggaagccctgctggccgagatgggtgtggccatgagggaggatggcggcaccttgggcgtattctctcccaaaaagacaccacacctcgtcaacctgaacgaggacccgctgatgtctgagtgcctgctctactacatcaaggatgggatcaccagagtgggcagggaggatggcgagaggcggcaggacattgttctgagtgggcacttcatcaaggaggagcactgcgtcttccggagcgactccaggggaggcagcgaagctgtggtgaccttggagccctgtgagggggcagacacctacgtcaatggcaagaaagtcacagagcccagcatcctgcgttcaggaaaccgcatcatcatgggtaagagccatgtgttccggttcaaccaccccgagcaggcccggcaggagcgtgagcgcacgccttgtgcggagacgccagctgagcctgtggactgggccttcgcccagcgtgagctgctggagaagcagggcatcgacatgaagcaggagatggagcagaggctccaggaactggaggaccagtaccgccgcgagcgggaggaggccacctacctgctggagcagcagcggctggactatgagagcaagctggaggctctgcagaagcagatggactccaggtactacccggaggtgaacgaggaggaggaggagcccgaggatgaagtccagtggacagagcgggagtgtgagctggcgctctgggccttccggaagtggaagtggtaccagttcacgtctctgcgggacctgctgtggggcaacgccatcttcctcaaggaggctaatgccatcagcgtggagctgaaaaagaaggtacaattccagtttgtcctcctgacggacacactctactcccctctgccacccgacctgctgcccccagaggccgccaaagaccgagagacgcggcccttcccccgcaccattgtggccgtggaggtccaggaccagaagaacggggccacccactactggacgctggagaagctcaggcagcgtctggacctgatgcgggagatgtacgaccgcgctgcagaggtgccctccagtgtcatcgaggactgtgacaacgtggtgaccggcggagaccccttctatgaccgcttcccctggttccggctggtgggcagggccttcgtgtacctgagcaacctgctgtaccccgttcccctggtacaccgtgtggcaatcgtcagcgagaagggcgaggtgaagggcttcctccgcgtggccgtccaggccatctcagccgatgaagaggcccctgattatggctctggcgtccgccagtcgggaactgctaaaatctcctttgatgaccagcattttgaaaagttccagtccgagtcttgccccgtggtggggatgtcccgctcgggaacctcccaggaagagcttcgcatcgtggagggccagggccagggtgcagacgtggggccctcagccgatgaagtcaacaacaacacctgttcagcagtgcccccagaaggcctcctcctagacagctctgagaaagccgccctggatgggcccctggatgctgccctggaccacctccgcctgggcaacaccttcaccttccgtgtgacagtcctgcaggcgtccagcatctctgccgaatatgccgacatcttctgccagttcaacttcatccaccgccacgacgaggccttctccacagagcccctgaagaacacaggcagaggccccccacttggcttctaccacgtccagaacatcgcagtggaggtgaccaagtccttcattgagtacatcaagagccagcccattgttttcgaggtctttggccactaccagcagcacccgttcccgcccctctgcaaggacgtgctcagccccctgaggccctcgcgccgccacttccctcgggtcatgccactgtccaagccagtgcccgccaccaagctcagcacactgacgcggccctgtccgggaccctgccactgcaagtacgacctgctggtctacttcgagatctgtgagctggaggccaacggcgattacatcccggccgtggtggaccaccgtgggggcatgccatgcatggggaccttcctcctccaccagggcatccagcgacggattacggtgacactactgcatgagacaggcagccatatccgctggaaggaagtgcgcgagctggtcgtgggccgcatccgaaacactccagagaccgacgagtccctgatcgaccccaacatcttgtctctcaacatcctctcttccggatacatccacccagcccaagatgaccggaccttttaccaatttgaggctgcgtgggacagctccatgcacaactctctcctgctgaaccgggtcaccccttatcgagagaaaatctacatgacactctccgcttatatcgagatggagaactgcacccagccggctgttgtcaccaaggacttctgcatggtcttctattcccgtgatgccaagctgccagcctcgcgctccatccgcaacctctttggcagtgggagccttcgggcctcagagagtaaccgtgtgactggtgtgtacgagctcagcctgtgccacgtggctgacgcgggcagcccagggatgcagcgccggcgccgacgagtcctggacacatctgtggcctatgtccggggcgaggagaacctggcaggctggaggccccggagtgacagtctcattctggaccaccagtgggagctggagaagctgagcctcctgcaggaggtggagaagactaggcactacctgctcctgcgggagaagctggagaccgcccagcggcctgtcccggaggcactgtccccggccttcagcgaggactctgagtcccatggctcctccagcgcctcctccccgctctcggctgagggccgcccatcacccctggaggctcccaacgagaggcagcgggagctggccgtcaagtgcttgcgcctgctcacgcacacattcaacagagagtacacacacagccacgtctgcgtcagtgccagcgagagcaagctctccgagatgtctgtcaccctgctccgggacccgtcgatgtcccctctaggggtggccactctcaccccctcctccacttgcccctctctggttgaagggcggtacggtgccactgacctgaggtgagtgagctccaggctcccggagtggcttctggcaccacggctgacccatgaccatggccgtgactcgggcacagagagcacagaacagggggccccaatggccgagtgccttggggtggccacaggctgagggaagggcctggaggagtggagtccgcagccctctcagagggtgcctgtgccccgccagctccatcctagtgtgtgtgtgttctcttccctgaagaagaccagaaatgggtggaaaataagctaaagctcccctttcctgagacagtgcttata

SEQ ID NO: 87304 - DNA, 984 bp, Homo sapiens
ttcgtctaggtagaggctggttggaatcggccgaggctgagttcgctctgccagaaaccacctagggaccacgttagctgccttccttgagctccccaggagtcggtttccacatctgtgaggtggagggctggtgtggaggtgctcatggggtgcggtgcttgggagacagccaggcccagggtggctgctgcttcctgctaagtgggggaggtgagacagatctggaaagccgtctccctcagatggtttcatttaatgctttatactgccgagtctgggggcttgttttggtttgggggcagccatcctccaccagaaagggggagctccttccgctgcggctccagatagatggggatgccgggctccaggccgaccagcacttgggatctgatgggacacggccagtgcctaggggtgccaagtccaaggcctcccactgggagtcatcgctgagaagatgccaatgtttcatccaccggctgcacaggcacaaactcccccacccaggacggctgtgatgaggtggccctccctgtcaaccctggtccctggagtccccagcacctggggccctggtggggctgatgtcacaggtgtttactgtgctgctgcactggtcctatgccagcctcacccatgtggggaccacggaaggcacactcccttacccccggtgccgggccgtgcggtcccccagacggacagcagctgtggcgacctgcgtttctccctgggcctgtgcttcctgtagttagtccgtcccctggttcccctgtggctcagaggccgcgtccctggcttgtacatatgtgattgctgtgggcacaccccagaccccatgtcatagctgccgtcccgacgtcacgacgcctgtcccgatgtcttacacccgagtgttagccctaggctcctgtactgtgcgtgcacttgaggctctgtccaattaagaaataaatgtggctcttactcaacacagtc

SEQ ID NO: 87305 - DNA, 4191 bp, Homo sapiens
agccggcgagcggcagcagctccgggctcgagagcccgcgcccatgccagtgcccatgcggggccgccgccagtgacgccggagaggtgttccccccacactggggctcccactactgcgaggagtgacccacgaaggccacagagatggccggggcttcggtgaaggtggcggtgcgggtccgccccttcaattcccgggaaatgagccgtgactccaagtgcatcattcagatgtctggaagcaccaccaccattgttaaccccaaacagcccaaggagacgcccaaaagcttcagctttgactactcctactggtcgcacacctcacctgaggacatcaactacgcgtcgcagaagcaggtgtaccgggacatcggcgaggagatgctgcagcatgcctttgagggatacaacgtgtgcatcttcgcctatgggcagacgggtgccggcaagtcctacaccatgatgggcaagcaggagaaggaccagcagggcatcatcccacagctctgcgaggacctcttctctcggatcaacgacacgaccaacgacaacatgtcctactccgtggaggtcagctacatggagatttactgtgagcgcgtccgtgacctcctgaaccccaagaacaagggcaaccttcgcgtgagggagcacccactgctggggccctacgtggaggacctctccaagctggctgtcacctcctacaatgacatccaggacctcatggactcagggaacaaggccaggaccgtggcggccaccaacatgaatgagaccagcagtcgctcccacgccgtcttcaacatcatcttcacccagaagcgccatgacgcagagaccaatatcaccacggagaaggtgagcaaaatcagcctggtggacctggctgggagcgagcgggctgactccacgggagccaagggcacgcgcctcaaggagggggccaacatcaacaagtcgctgaccaccctgggcaaggtcatctccgccctggctgaaatggactccggacccaacaagaacaagaaaaagaagaagacagatttcattccgtaccgagattccgtgttgacctggctcctccgggaaaacctgggcggtaactcaaggacagctatggtggcagccctgagtcctgcagacatcaactacgatgagacccttagcacgctgaggtatgctgaccgggccaagcagatccgctgcaatgctgtcatcaatgaggaccccaacaacaagctgatccgcgagctgaaggatgaggtgacccggctgcgggaccttctgtacgcccagggtcttggcgacatcactgacatgaccaatgccctggtgggtatgagcccctcatcctcgctctcagccctgtccagccgcgcggcctccgtgtccagcctccacgagcgcatcttgtttgccccgggcagcgaggaggccattgaaagactgaaggaaacagagaagatcatagctgagctcaatgagacctgggaggagaagctgcggcggacagaagccatccggatggagagggaagccctgctggccgagatgggtgtggccatgagggaggatggcggcaccttgggcgtattctctcccaaaaagacaccacacctcgtcaacctgaacgaggacccgctgatgtctgagtgcctgctctactacatcaaggatgggatcaccagagtgggcagggaggatggcgagaggcggcaggacattgttctgagtgggcacttcatcaaggaggagcactgcgtcttccggagcgactccaggggaggcagcgaagctgtggtgaccttggagccctgtgagggggcagacacctacgtcaatggcaagaaagtcacagagcccagcatcctgcgttcaggaaaccgcatcatcatgggtaagagccatgtgttccggttcaaccaccccgagcaggcccggcaggagcgtgagcgcacgccttgtgcggagacgccagctgagcctgtggactgggccttcgcccagcgtgagctgctggagaagcagggcatcgacatgaagcaggagatggagcagaggctccaggaactggaggaccagtaccgccgcgagcgggaggaggccacctacctgctggagcagcagcggctggactatgagagcaagctggaggctctgcagaagcagatggactccaggtactacccggaggtgaacgaggaggaggaggagcccgaggatgaagtccagtggacagagcgggagtgtgagctggcgctctgggccttccggaagtggaagtggtaccagttcacgtctctgcgggacctgctgtggggcaacgccatcttcctcaaggaggctaatgccatcagcgtggagctgaaaaagaaggtacaattccagtttgtcctcctgacggacacactctactcccctctgccacccgacctgctgcccccagaggccgccaaagaccgagagacgcggcccttcccccgcaccattgtggccgtggaggtccaggaccagaagaacggggccacccactactggacgctggagaagctcaggcagcgtctggacctgatgcgggagatgtacgaccgcgctgcagaggtgccctccagtgtcatcgaggactgtgacaacgtggtgaccggcggagaccccttctatgaccgcttcccctggttccggctggtgggcagggccttcgtgtacctgagcaacctgctgtaccccgttcccctggtacaccgtgtggcaatcgtcagcgagaagggcgaggtgaagggcttcctccgcgtggccgtccaggccatctcagccgatgaagaggcccctgattatggctctggcgtccgccagtcgggaactgctaaaatctcctttgatgaccagcattttgaaaagttccagtccgagtcttgccccgtggtggggatgtcccgctcgggaacctcccaggaagagcttcgcatcgtggagggccagggccagggtgcagacgtggggccctcagccgatgaagtcaacaacaacacctgttcagcagtgcccccagaaggcctcctcctagacagctctgagaaagccgccctggatgggcccctggatgctgccctggaccacctccgcctgggcaacaccttcaccttccgtgtgacagtcctgcaggcgtccagcatctctgccgaatatgccgacatcttctgccagttcaacttcatccaccgccacgacgaggccttctccacagagcccctgaagaacacaggcagaggccccccacttggcttctaccacgtccagaacatcgcagtggaggtgaccaagtccttcattgagtacatcaagagccagcccattgttttcgaggtctttggccactaccagcagcacccgttcccgcccctctgcaaggacgtgctcagccccctgaggccctcgcgccgccacttccctcgggtcatgccactgtccaagccagtgcccgccaccaagctcagcacactgacgcggccctgtccgggaccctgccactgcaagtacgacctgctggtctacttcgagatctgtgagctggaggccaacggcgattacatcccggccgtggtggaccaccgtgggggcatgccatgcatggggaccttcctcctccaccagggcatccagcgacggattacggtgacactactgcatgagacaggcagccatatccgctggaaggaagtgcgcgagctggtcgtgggccgcatccgaaacactccagagaccgacgagtccctgatcgaccccaacatcttgtctctcaacatcctctcttccggatacatccacccagcccaagatgaccggaccttttaccaatttgaggctgcgtgggacagctccatgcacaactctctcctgctgaaccgggtcaccccttatcgagagaaaatctacatgacactctccgcttatatcgagatggagaactgcacccagccggctgttgtcaccaaggacttctgcatggtcttctattcccgtgatgccaagctgccagcctcgcgctccatccgcaacctctttggcagtgggagccttcgggcctcagagagtaaccgtgtgactggtgtgtacgagctcagcctgtgccacgtggctgacgcgggcagcccaggtaggtatctgccctgctctcactgggtgg

SEQ ID NO: 87306 - DNA, 633 bp, Homo sapiens
tgatgagctggtccaagttagtcgggacgcagcacttgggatctgatgggacacggccagtgcctaggggtgccaagtccaaggcctcccactgggagtcatcgctgagaagatgccaatgtttcatccaccggctgcacaggcacaaactcccccacccaggacggctgtgatgaggtggccctccctgtcaaccctggtccctggagtccccagcacctggggccctggtggggctgatgtcacaggtgtttactgtgctgctgcactggtcctatgccagcctcacccatgtggggaccacggaaggcacactcccttacccccggtgccgggccgtgcggtcccccagacggacagcagctgtggcgacctgcgtttctccctgggcctgtgcttcctgtagttagtccgtcccctggttcccctgtggctcagaggccgcgtccctggcttgtacatatgtgattgctgtgggcacaccccagaccccatgtcatagctgccgtcccgacgtcacgacgcctgtcccgatgtcttacacccgagtgttagccctaggctcctgtactgtgcgtgcacttgaggctctgtccaattaagaaataaatgtggctcttactcaacacagtc

SEQ ID NO: 87307 - DNA, 3361 bp, Homo sapiens
agccggcgagcggcagcagctccgggctcgagagcccgcgcccatgccagtgcccatgcggggccgccgccagtgacgccggagaggtgttccccccacactggggctcccactactgcgaggagtgacccacgaaggccacagagatggccggggcttcggtgaaggtggcggtgcgggtccgccccttcaattcccgggaaatgagccgtgactccaagtgcatcattcagatgtctggaagcaccaccaccattgttaaccccaaacagcccaaggagacgcccaaaagcttcagctttgactactcctactggtcgcacacctcacctgaggacatcaactacgcgtcgcagaagcaggtgtaccgggacatcggcgaggagatgctgcagcatgcctttgagggatacaacgtgtgcatcttcgcctatgggcagacgggtgccggcaagtcctacaccatgatgggcaagcaggagaaggaccagcagggcatcatcccacagctctgcgaggacctcttctctcggatcaacgacacgaccaacgacaacatgtcctactccgtggaggtcagctacatggagatttactgtgagcgcgtccgtgacctcctgaaccccaagaacaagggcaaccttcgcgtgagggagcacccactgctggggccctacgtggaggacctctccaagctggctgtcacctcctacaatgacatccaggacctcatggactcagggaacaaggccaggaccgtggcggccaccaacatgaatgagaccagcagtcgctcccacgccgtcttcaacatcatcttcacccagaagcgccatgacgcagagaccaatatcaccacggagaaggtgagcaaaatcagcctggtggacctggctgggagcgagcgggctgactccacgggagccaagggcacgcgcctcaaggagggggccaacatcaacaagtcgctgaccaccctgggcaaggtcatctccgccctggctgaaatggactccggacccaacaagaacaagaaaaagaagaagacagatttcattccgtaccgagattccgtgttgacctggctcctccgggaaaacctgggcggtaactcaaggacagctatggtggcagccctgagtcctgcagacatcaactacgatgagacccttagcacgctgaggtatgctgaccgggccaagcagatccgctgcaatgctgtcatcaatgaggaccccaacaacaagctgatccgcgagctgaaggatgaggtgacccggctgcgggaccttctgtacgcccagggtcttggcgacatcactgacatgaccaatgccctggtgggtatgagcccctcatcctcgctctcagccctgtccagccgcgcggcctccgtgtccagcctccacgagcgcatcttgtttgccccgggcagcgaggaggccattgaaagactgaaggaaacagagaagatcatagctgagctcaatgagacctgggaggagaagctgcggcggacagaagccatccggatggagagggaagccctgctggccgagatgggtgtggccatgagggaggatggcggcaccttgggcgtattctctcccaaaaagacaccacacctcgtcaacctgaacgaggacccgctgatgtctgagtgcctgctctactacatcaaggatgggatcaccagagtgggcagggaggatggcgagaggcggcaggacattgttctgagtgggcacttcatcaaggaggagcactgcgtcttccggagcgactccaggggaggcagcgaagctgtggtgaccttggagccctgtgagggggcagacacctacgtcaatggcaagaaagtcacagagcccagcatcctgcgttcaggaaaccgcatcatcatgggtaagagccatgtgttccggttcaaccaccccgagcaggcccggcaggagcgtgagcgcacgccttgtgcggagacgccagctgagcctgtggactgggccttcgcccagcgtgagctgctggagaagcagggcatcgacatgaagcaggagatggagcagaggctccaggaactggaggaccagtaccgccgcgagcgggaggaggccacctacctgctggagcagcagcggctggactatgagagcaagctggaggctctgcagaagcagatggactccaggtactacccggaggtgaacgaggaggaggaggagcccgaggatgaagtccagtggacagagcgggagtgtgagctggcgctctgggccttccggaagtggaagtggtaccagttcacgtctctgcgggacctgctgtggggcaacgccatcttcctcaaggaggctaatgccatcagcgtggagctgaaaaagaaggtacaattccagtttgtcctcctgacggacacactctactcccctctgccacccgacctgctgcccccagaggccgccaaagaccgagagacgcggcccttcccccgcaccattgtggccgtggaggtccaggaccagaagaacggggccacccactactggacgctggagaagctcaggcagcgtctggacctgatgcgggagatgtacgaccgcgctgcagaggtgccctccagtgtcatcgaggactgtgacaacgtggtgaccggcggagaccccttctatgaccgcttcccctggttccggctggtgggcagggccttcgtgtacctgagcaacctgctgtaccccgttcccctggtacaccgtgtggcaatcgtcagcgagaagggcgaggtgaagggcttcctccgcgtggccgtccaggccatctcagccgatgaagaggcccctgattatggctctggcgtccgccagtcgggaactgctaaaatctcctttgatgaccagcattttgaaaagttccagtccgagtcttgccccgtggtggggatgtcccgctcgggaacctcccaggaagagcttcgcatcgtggagggccagggccagggtgcagacgtggggccctcagccgatgaagtcaacaacaacacctgttcagcagtgcccccagaaggcctcctcctagacagctctgagaaagccgccctggatgggcccctggatgctgccctggaccacctccgcctgggcaacaccttcaccttccgtgtgacagtcctgcaggcgtccagcatctctgccgaatatgccgacatcttctgccagttcaacttcatccaccgccacgacgaggccttctccacagagcccctgaagaacacaggcagaggccccccacttggcttctaccacgtccagaacatcgcagtggagtaccaagtccttcattgagcaatccgtactgaaccggtaca

SEQ ID NO: 87308 - DNA, 577 bp, Homo sapiens
gccctccctggctgactgtccccccattcctgcagctctgcgaggacctcttctctcggatcaacgacacgaccaacgacaacatgtcctactccgtggaggtcagctacatggagatttactgtgagcgcgtccgtgacctcctgaaccccaagaacaagggcaaccttcgcgtgagggagcacccactgctggggccctacgtggaggacctctccaagctggctgtcacctcctacaatgacatccaggacctcatggactcagggaacaaggccaggaccgtggcggccaccaacatgaatgagaccagcagtcgctcccacgccgtcttcaacatcatcttcacccagaagcgccatgacgcagagaccaatatcaccacggagaaggtgagcaaaatcagcctggtggacctggctgggagcgagcgggctgactccacgggagccaagggcacgcgcctcaaggagggggccaacatcaacaagccacggtcaacccacaagccacggtcaacccacaagccacggtcaacccacgagccacggtcaaccacaagccacggtcaacccac

SEQ ID NO: 87309 - DNA, 8819 bp, Homo sapiens
agccggcgagcggcagcagctccgggctcgagagcccgcgcccatgccagtgcccatgcggggccgccgccagtgacgccggagaggtgttccccccacactggggctcccactactgcgaggagtgacccacgaaggccacagagatggccggggcttcggtgaaggtggcggtgcgggtccgccccttcaattcccgggaaatgagccgtgactccaagtgcatcattcagatgtctggaagcaccaccaccattgttaaccccaaacagcccaaggagacgcccaaaagcttcagctttgactactcctactggtcgcacacctcacctgaggacatcaactacgcgtcgcagaagcaggtgtaccgggacatcggcgaggagatgctgcagcatgcctttgagggatacaacgtgtgcatcttcgcctatgggcagacgggtgccggcaagtcctacaccatgatgggcaagcaggagaaggaccagcagggcatcatcccacagctctgcgaggacctcttctctcggatcaacgacacgaccaacgacaacatgtcctactccgtggaggtcagctacatggagatttactgtgagcgcgtccgtgacctcctgaaccccaagaacaagggcaaccttcgcgtgagggagcacccactgctggggccctacgtggaggacctctccaagctggctgtcacctcctacaatgacatccaggacctcatggactcagggaacaaggccaggaccgtggcggccaccaacatgaatgagaccagcagtcgctcccacgccgtcttcaacatcatcttcacccagaagcgccatgacgcagagaccaatatcaccacggagaaggtgagcaaaatcagcctggtggacctggctgggagcgagcgggctgactccacgggagccaagggcacgcgcctcaaggagggggccaacatcaacaagtcgctgaccaccctgggcaaggtcatctccgccctggctgaaatggactccggacccaacaagaacaagaaaaagaagaagacagatttcattccgtaccgagattccgtgttgacctggctcctccgggaaaacctgggcggtaactcaaggacagctatggtggcagccctgagtcctgcagacatcaactacgatgagacccttagcacgctgaggtatgctgaccgggccaagcagatccgctgcaatgctgtcatcaatgaggaccccaacaacaagctgatccgcgagctgaaggatgaggtgacccggctgcgggaccttctgtacgcccagggtcttggcgacatcactgacatgaccaatgccctggtgggtatgagcccctcatcctcgctctcagccctgtccagccgcgcggcctccgtgtccagcctccacgagcgcatcttgtttgccccgggcagcgaggaggccattgaaagactgaaggaaacagagaagatcatagctgagctcaatgagacctgggaggagaagctgcggcggacagaagccatccggatggagagggaagccctgctggccgagatgggtgtggccatgagggaggatggcggcaccttgggcgtattctctcccaaaaagacaccacacctcgtcaacctgaacgaggacccgctgatgtctgagtgcctgctctactacatcaaggatgggatcaccagagtgggcagggaggatggcgagaggcggcaggacattgttctgagtgggcacttcatcaaggaggagcactgcgtcttccggagcgactccaggggaggcagcgaagctgtggtgaccttggagccctgtgagggggcagacacctacgtcaatggcaagaaagtcacagagcccagcatcctgcgttcaggaaaccgcatcatcatgggtaagagccatgtgttccggttcaaccaccccgagcaggcccggcaggagcgtgagcgcacgccttgtgcggagacgccagctgagcctgtggactgggccttcgcccagcgtgagctgctggagaagcagggcatcgacatgaagcaggagatggagcagaggctccaggaactggaggaccagtaccgccgcgagcgggaggaggccacctacctgctggagcagcagcggctggactatgagagcaagctggaggctctgcagaagcagatggactccaggtactacccggaggtgaacgaggaggaggaggagcccgaggatgaagtccagtggacagagcgggagtgtgagctggcgctctgggccttccggaagtggaagtggtaccagttcacgtctctgcgggacctgctgtggggcaacgccatcttcctcaaggaggctaatgccatcagcgtggagctgaaaaagaaggtacaattccagtttgtcctcctgacggacacactctactcccctctgccacccgacctgctgcccccagaggccgccaaagaccgagagacgcggcccttcccccgcaccattgtggccgtggaggtccaggaccagaagaacggggccacccactactggacgctggagaagctcaggcagcgtctggacctgatgcgggagatgtacgaccgcgctgcagaggtgccctccagtgtcatcgaggactgtgacaacgtggtgaccggcggagaccccttctatgaccgcttcccctggttccggctggtgggcagggccttcgtgtacctgagcaacctgctgtaccccgttcccctggtacaccgtgtggcaatcgtcagcgagaagggcgaggtgaagggcttcctccgcgtggccgtccaggccatctcagccgatgaagaggcccctgattatggctctggcgtccgccagtcgggaactgctaaaatctcctttgatgaccagcattttgaaaagttccagtccgagtcttgccccgtggtggggatgtcccgctcgggaacctcccaggaagagcttcgcatcgtggagggccagggccagggtgcagacgtggggccctcagccgatgaagtcaacaacaacacctgttcagcagtgcccccagaaggcctcctcctagacagctctgagaaagccgccctggatgggcccctggatgctgccctggaccacctccgcctgggcaacaccttcaccttccgtgtgacagtcctgcaggcgtccagcatctctgccgaatatgccgacatcttctgccagttcaacttcatccaccgccacgacgaggccttctccacagagcccctgaagaacacaggcagaggccccccacttggcttctaccacgtccagaacatcgcagtggaggtgaccaagtccttcattgagtacatcaagagccagcccattgttttcgaggtctttggccactaccagcagcacccgttcccgcccctctgcaaggacgtgctcagccccctgaggccctcgcgccgccacttccctcgggtcatgccactgtccaagccagtgcccgccaccaagctcagcacactgacgcggccctgtccgggaccctgccactgcaagtacgacctgctggtctacttcgagatctgtgagctggaggccaacggcgattacatcccggccgtggtggaccaccgtgggggcatgccatgcatggggaccttcctcctccaccagggcatccagcgacggattacggtgacactactgcatgagacaggcagccatatccgctggaaggaagtgcgcgagctggtcgtgggccgcatccgaaacactccagagaccgacgagtccctgatcgaccccaacatcttgtctctcaacatcctctcttccggatacatccacccagcccaagatgaccggaccttttaccaatttgaggctgcgtgggacagctccatgcacaactctctcctgctgaaccgggtcaccccttatcgagagaaaatctacatgacactctccgcttatatcgagatggagaactgcacccagccggctgttgtcaccaaggacttctgcatggtcttctattcccgtgatgccaagctgccagcctcgcgctccatccgcaacctctttggcagtgggagccttcgggcctcagagagtaaccgtgtgactggtgtgtacgagctcagcctgtgccacgtggctgacgcgggcagcccagggatgcagcgccggcgccgacgagtcctggacacatctgtggcctatgtccggggcgaggagaacctggcaggctggaggccccggagtgacagtctcattctggaccaccagtgggagctggagaagctgagcctcctgcaggaggtggagaagactaggcactacctgctcctgcgggagaagctggagaccgcccagcggcctgtcccggaggcactgtccccggccttcagcgaggactctgagtcccatggctcctccagcgcctcctccccgctctcggctgagggccgcccatcacccctggaggctcccaacgagaggcagcgggagctggccgtcaagtgcttgcgcctgctcacgcacacattcaacagagagtacacacacagccacgtctgcgtcagtgccagcgagagcaagctctccgagatgtctgtcaccctgctccgggacccgtcgatgtcccctctaggggtggccactctcaccccctcctccacttgcccctctctggttgaagggcggtacggtgccactgacctgaggaccccgcagccctgctcccggccagccagcccagagcccgagctgctgccagaggccgactccaagaagctcccttcccctgcccgggcaacagagacagacaaggagccccagcgcctgctggtccctgacatccaggagatccgagtcagcccgatcgtttccaagaaggggtacctgcacttcctggagccgcacacgtcaggctgggccaggcgcttcgtggtggtgcggcgcccctatgcctacatgtacaacagcgacaaggacaccgtggagcggttcgtgctcaacctggccactgcccaggtggagtacagtgaggaccagcaggctatgctcaagacacccaacacattcgcggtgtgcacggaacaccgcggcatcctgctgcaggccgccagcgacaaggacatgcatgactggctgtacgccttcaaccccctcctggccgggaccatacggtccaagctctccagaaggaggtctgcccagatgcgggtctgaacctgagccctcccgtgacagccggcaggcccagcccatcccctccctcatcctcgtctgtcctgtcacctgccgcccagcccctctcctgccagacagcccacgaccgggtcgaccccccaggggacgcccatgccaggcccggggacctgtgccacacgaccagctgtgctcccagcagaggctgtgcgtgtcagttcttcttgcagaatgtgctctggtggaacaagttgggagaggctgggggggccaagggcacaggttacgggggttcttgctgccgttctaatatttttttaagcatagacagacttataattaatatacgttagttagtgacattgaaacagtcaactcggaaattaactataagacttgttctatttataagtatttatttctaatgcctccacatagccctgtaatattcagatggaacccccaaccacctccaccctgtttgttcccacatgtgtctcccaagcctgctagggacaggcagggcagggacagccaccttggaaggccgcagtgaggagctgtctggaccagtggggcaccttggggctagcacacgggtgtatcgcctgggccccaggcttctccatggccacatgggtcctgggtgtatgtgtgggagagtgggggggtgtctttggtgcctgaagtctgcgcggcatggagggtggtgtgagttcctctggtgggagggagaacgcacatctcttctgggcggccacctgaggagtgactccaagaagagttccggcagctttccccaggaaagggtgaggggtgacactcggctctggctctgagatgaggcagacggcacccaggctgtgatctgtcctgggcggggaccaggagggagcggggtcgggatcacctgccagtgtgcagactctgggactgcgtgctgtctccggaccatcagggtagggtggtgggttgagaccaggaagtcagggaagatcggaattcagggcgacggtctaggtgtcgagggctgtggcgcagcctcttcagctgcggcgagaaatggagtgagtcaaggtagcttctgggaagaaatgctgccattagcaggtttcttgcaaagactttcctctctttgttcccagggcagagagtttctgtgagtcccactgagaaaatcccatggggtgggggtatcctggtcggtcggcaatggagggtggctggcttggtggttattgtcttcaaggagctcttcgctgctgcatctgcggtgtccctttgttcttgtcccatttcaccccctctgcagacaccaatgtccgagggccacccaggacaggacgggggtcagccccaagctgagagtctggtcataggagtcatgtccagaggcctagggaggttttagggccctccccacccacacccacaggtcgatttggtctctttttagctcaaggaaagacagtagccaagcaacagagcccctctcccgccgtggcccgtgggagcagttacatcgggtctggtgctccagacctagggcccagcactttcatcagatcctgcctcctggagtgggggaaacgcagcaccccactggttctgaggcccctaccctcccaggctgtcccacgtgatgctgacatgagcctcagagaccccaatcccatgcctgggggagagacagcggctcaggagtgggggagcacgggccttctacaccacatgggaaggctctggcatgaggttttcctttgggaaggttgtttgggcccctgaagttccatctccgagagtggtgtgcagggcaggccagggcccatgctggctgcagtctctgtggctgcctgcctgggccagcctgtttgggagctgggactgtgggctcgccttttcgtacctgggctcaggtgcggtgtggccaccgccaccctcatcccctgcctgggaggctctcccaggggctgatgggggggttctgtgagggagaatcagggctcgggaagccacgcctgggaaggcaggacacaggacacagcagctttctttggaaatctcccaggtgaggattcacatcccaaaataaaattcagaagccaggtggcctgtgctccccatgggtgacctctggaggcagtggaccaagatgcagcaaggagaggatgcagaacagcttcttgcagaagcacctgctccggcatccagcgctgcctggaggcaggaaggagaggcagggcaggacacgctggtctgagatgagggggagccccacgggccccaggcaggctagaggaggcacaggccctgccacggccaactcaggtcagccagcctgaggctgtggcctccaaagggtctgggcgcaccccccaggtcgcaggtgtctgaggccagccaacctgcagagcactcgcggcgtgggtgggctgagtggaggtgcctgggagctgcctaaattcagaagcctccactgccatggagactgcctggctgtgtcctctcagccaggtgccgtgttggccttggctaggacccagagccacactgcagcctccgccgactccctccttccgggcctgctctagtgaggagtgcctaagccaggacccagaaactcagagttgatggtgagaggaggccgcctgagtcaggacacctggcttcttgaaaagttcgctctgccagaaaccacctagggaccacgttagctgccttccttgagctccccaggagtcggtttccacatctgtgaggtggagggctggtgtggaggtgctcatggggtgcggtgcttgggagacagccaggcccagggtggctgctgcttcctgctaagtgggggaggtgagacagatctggaaagccgtctccctcagatggtttcatttaatgctttatactgccgagtctgggggcttgttttggtttgggggcagccatcctccaccagaaagggggagctccttccgctgcggctccagatagatggggatgccgggctccaggccgaccagcacttgggatctgatgggacacggccagtgcctaggggtgccaagtccaaggcctcccactgggagtcatcgctgagaagatgccaatgtttcatccaccggctgcacaggcacaaactcccccacccaggacggctgtgatgaggtggccctccctgtcaaccctggtccctggagtccccagcacctggggccctggtggggctgatgtcacaggtgtttactgtgctgctgcactggtcctatgccagcctcacccatgtggggaccacggaaggcacactcccttacccccggtgccgggccgtgcggtcccccagacggacagcagctgtggcgacctgcgtttctccctgggcctgtgcttcctgtagttagtccgtcccctggttcccctgtggctcagaggccgcgtccctggcttgtacatatgtgattgctgtgggcacaccccagaccccatgtcatagctgccgtcccgacgtcacgacgcctgtcccgatgtcttacacccgagtgttagccctaggctcctgtactgtgcgtgcacttgaggctctgtccaattaagaaataaatgtggctcttactcaacacagtc

SEQ ID NO: 87310 - DNA, 6816 bp, Homo sapiens
atcagctcggtcctcactgtacatgtccacaagggcatcgacatgaagcaggagatggagcagaggctccaggaactggaggaccagtaccgccgcgagcgggaggaggccacctacctgctggagcagcagcggctggactatgagagcaagctggaggctctgcagaagcagatggactccaggtactacccggaggtgaacgaggaggaggaggagcccgaggatgaagtccagtggacagagcgggagtgtgagctggcgctctgggccttccggaagtggaagtggtaccagttcacgtctctgcgggacctgctgtggggcaacgccatcttcctcaaggaggctaatgccatcagcgtggagctgaaaaagaaggtacaattccagtttgtcctcctgacggacacactctactcccctctgccacccgacctgctgcccccagaggccgccaaagaccgagagacgcggcccttcccccgcaccattgtggccgtggaggtccaggaccagaagaacggggccacccactactggacgctggagaagctcaggcagcgtctggacctgatgcgggagatgtacgaccgcgctgcagaggtgccctccagtgtcatcgaggactgtgacaacgtggtgaccggcggagaccccttctatgaccgcttcccctggttccggctggtgggcagggccttcgtgtacctgagcaacctgctgtaccccgttcccctggtacaccgtgtggcaatcgtcagcgagaagggcgaggtgaagggcttcctccgcgtggccgtccaggccatctcagccgatgaagaggcccctgattatggctctggcgtccgccagtcgggaactgctaaaatctcctttgatgaccagcattttgaaaagttccagtccgagtcttgccccgtggtggggatgtcccgctcgggaacctcccaggaagagcttcgcatcgtggagggccagggccagggtgcagacgtggggccctcagccgatgaagtcaacaacaacacctgttcagcagtgcccccagaaggcctcctcctagacagctctgagaaagccgccctggatgggcccctggatgctgccctggaccacctccgcctgggcaacaccttcaccttccgtgtgacagtcctgcaggcgtccagcatctctgccgaatatgccgacatcttctgccagttcaacttcatccaccgccacgacgaggccttctccacagagcccctgaagaacacaggcagaggccccccacttggcttctaccacgtccagaacatcgcagtggaggtgaccaagtccttcattgagtacatcaagagccagcccattgttttcgaggtctttggccactaccagcagcacccgttcccgcccctctgcaaggacgtgctcagccccctgaggccctcgcgccgccacttccctcgggtcatgccactgtccaagccagtgcccgccaccaagctcagcacactgacgcggccctgtccgggaccctgccactgcaagtacgacctgctggtctacttcgagatctgtgagctggaggccaacggcgattacatcccggccgtggtggaccaccgtgggggcatgccatgcatggggaccttcctcctccaccagggcatccagcgacggattacggtgacactactgcatgagacaggcagccatatccgctggaaggaagtgcgcgagctggtcgtgggccgcatccgaaacactccagagaccgacgagtccctgatcgaccccaacatcttgtctctcaacatcctctcttccggatacatccacccagcccaagatgaccggaccttttaccaatttgaggctgcgtgggacagctccatgcacaactctctcctgctgaaccgggtcaccccttatcgagagaaaatctacatgacactctccgcttatatcgagatggagaactgcacccagccggctgttgtcaccaaggacttctgcatggtcttctattcccgtgatgccaagctgccagcctcgcgctccatccgcaacctctttggcagtgggagccttcgggcctcagagagtaaccgtgtgactggtgtgtacgagctcagcctgtgccacgtggctgacgcgggcagcccagggatgcagcgccggcgccgacgagtcctggacacatctgtggcctatgtccggggcgaggagaacctggcaggctggaggccccggagtgacagtctcattctggaccaccagtgggagctggagaagctgagcctcctgcaggaggtggagaagactaggcactacctgctcctgcgggagaagctggagaccgcccagcggcctgtcccggaggcactgtccccggccttcagcgaggactctgagtcccatggctcctccagcgcctcctccccgctctcggctgagggccgcccatcacccctggaggctcccaacgagaggcagcgggagctggccgtcaagtgcttgcgcctgctcacgcacacattcaacagagagtacacacacagccacgtctgcgtcagtgccagcgagagcaagctctccgagatgtctgtcaccctgctccgggacccgtcgatgtcccctctaggggtggccactctcaccccctcctccacttgcccctctctggttgaagggcggtacggtgccactgacctgaggaccccgcagccctgctcccggccagccagcccagagcccgagctgctgccagaggccgactccaagaagctcccttcccctgcccgggcaacagagacagacaaggagccccagcgcctgctggtccctgacatccaggagatccgagtcagcccgatcgtttccaagaaggggtacctgcacttcctggagccgcacacgtcaggctgggccaggcgcttcgtggtggtgcggcgcccctatgcctacatgtacaacagcgacaaggacaccgtggagcggttcgtgctcaacctggccactgcccaggtggagtacagtgaggaccagcaggctatgctcaagacacccaacacattcgcggtgtgcacggaacaccgcggcatcctgctgcaggccgccagcgacaaggacatgcatgactggctgtacgccttcaaccccctcctggccgggaccatacggtccaagctctccagaaggaggtctgcccagatgcgggtctgaacctgagccctcccgtgacagccggcaggcccagcccatcccctccctcatcctcgtctgtcctgtcacctgccgcccagcccctctcctgccagacagcccacgaccgggtcgaccccccaggggacgcccatgccaggcccggggacctgtgccacacgaccagctgtgctcccagcagaggctgtgcgtgtcagttcttcttgcagaatgtgctctggtggaacaagttgggagaggctgggggggccaagggcacaggttacgggggttcttgctgccgttctaatatttttttaagcatagacagacttataattaatatacgttagttagtgacattgaaacagtcaactcggaaattaactataagacttgttctatttataagtatttatttctaatgcctccacatagccctgtaatattcagatggaacccccaaccacctccaccctgtttgttcccacatgtgtctcccaagcctgctagggacaggcagggcagggacagccaccttggaaggccgcagtgaggagctgtctggaccagtggggcaccttggggctagcacacgggtgtatcgcctgggccccaggcttctccatggccacatgggtcctgggtgtatgtgtgggagagtgggggggtgtctttggtgcctgaagtctgcgcggcatggagggtggtgtgagttcctctggtgggagggagaacgcacatctcttctgggcggccacctgaggagtgactccaagaagagttccggcagctttccccaggaaagggtgaggggtgacactcggctctggctctgagatgaggcagacggcacccaggctgtgatctgtcctgggcggggaccaggagggagcggggtcgggatcacctgccagtgtgcagactctgggactgcgtgctgtctccggaccatcagggtagggtggtgggttgagaccaggaagtcagggaagatcggaattcagggcgacggtctaggtgtcgagggctgtggcgcagcctcttcagctgcggcgagaaatggagtgagtcaaggtagcttctgggaagaaatgctgccattagcaggtttcttgcaaagactttcctctctttgttcccagggcagagagtttctgtgagtcccactgagaaaatcccatggggtgggggtatcctggtcggtcggcaatggagggtggctggcttggtggttattgtcttcaaggagctcttcgctgctgcatctgcggtgtccctttgttcttgtcccatttcaccccctctgcagacaccaatgtccgagggccacccaggacaggacgggggtcagccccaagctgagagtctggtcataggagtcatgtccagaggcctagggaggttttagggccctccccacccacacccacaggtcgatttggtctctttttagctcaaggaaagacagtagccaagcaacagagcccctctcccgccgtggcccgtgggagcagttacatcgggtctggtgctccagacctagggcccagcactttcatcagatcctgcctcctggagtgggggaaacgcagcaccccactggttctgaggcccctaccctcccaggctgtcccacgtgatgctgacatgagcctcagagaccccaatcccatgcctgggggagagacagcggctcaggagtgggggagcacgggccttctacaccacatgggaaggctctggcatgaggttttcctttgggaaggttgtttgggcccctgaagttccatctccgagagtggtgtgcagggcaggccagggcccatgctggctgcagtctctgtggctgcctgcctgggccagcctgtttgggagctgggactgtgggctcgccttttcgtacctgggctcaggtgcggtgtggccaccgccaccctcatcccctgcctgggaggctctcccaggggctgatgggggggttctgtgagggagaatcagggctcgggaagccacgcctgggaaggcaggacacaggacacagcagctttctttggaaatctcccaggtgaggattcacatcccaaaataaaattcagaagccaggtggcctgtgctccccatgggtgacctctggaggcagtggaccaagatgcagcaaggagaggatgcagaacagcttcttgcagaagcacctgctccggcatccagcgctgcctggaggcaggaaggagaggcagggcaggacacgctggtctgagatgagggggagccccacgggccccaggcaggctagaggaggcacaggccctgccacggccaactcaggtcagccagcctgaggctgtggcctccaaagggtctgggcgcaccccccaggtcgcaggtgtctgaggccagccaacctgcagagcactcgcggcgtgggtgggctgagtggaggtgcctgggagctgcctaaattcagaagcctccactgccatggagactgcctggctgtgtcctctcagccaggtgccgtgttggccttggctaggacccagagccacactgcagcctccgccgactccctccttccgggcctgctctagtgaggagtgcctaagccaggacccagaaactcagagttgatggtgagaggaggccgcctgagtcaggacacctggcttcttgaaaagttcgctctgccagaaaccacctagggaccacgttagctgccttccttgagctccccaggagtcggtttccacatctgtgaggtggagggctggtgtggaggtgctcatggggtgcggtgcttgggagacagccaggcccagggtggctgctgcttcctgctaagtgggggaggtgagacagatctggaaagccgtctccctcagatggtttcatttaatgctttatactgccgagtctgggggcttgttttggtttgggggcagccatcctccaccagaaagggggagctccttccgctgcggctccagatagatggggatgccgggctccaggccgaccagcacttgggatctgatgggacacggccagtgcctaggggtgccaagtccaaggcctcccactgggagtcatcgctgagaagatgccaatgtttcatccaccggctgcacaggcacaaactcccccacccaggacggctgtgatgaggtggccctccctgtcaaccctggtccctggagtccccagcacctggggccctggtggggctgatgtcacaggtgtttactgtgctgctgcactggtcctatgccagcctcacccatgtggggaccacggaaggcacactcccttacccccggtgccgggccgtgcggtcccccagacggacagcagctgtggcgacctgcgtttctccctgggcctgtgcttcctgtagttagtccgtcccctggttcccctgtggctcagaggccgcgtccctggcttgtacatatgtgattgctgtgggcacaccccagaccccatgtcatagctgccgtcccgacgtcacgacgcctgtcccgatgtcttacacccgagtgttagccctaggctcctgtactgtgcgtgcacttgaggctctgtccaattaagaaataaatgtggctcttactcaacacagtc

SEQ ID NO: 87311 - DNA, 6780 bp, Homo sapiens
caagcgctagatggtagggcgtgtccatcgagaggtgcaggaaccagctgcgtcgcgagggtccatcgtaggactccgtacctgcggcatgcgcgctgggtgctgtacgacagcttactgggtgctgagtggaagcagatggactccaggtactacccggaggtgaacgaggaggaggaggagcccgaggatgaagtccagtggacagagcgggagtgtgagctggcgctctgggccttccggaagtggaagtggtaccagttcacgtctctgcgggacctgctgtggggcaacgccatcttcctcaaggaggctaatgccatcagcgtggagctgaaaaagaaggtacaattccagtttgtcctcctgacggacacactctactcccctctgccacccgacctgctgcccccagaggccgccaaagaccgagagacgcggcccttcccccgcaccattgtggccgtggaggtccaggaccagaagaacggggccacccactactggacgctggagaagctcaggcagcgtctggacctgatgcgggagatgtacgaccgcgctgcagaggtgccctccagtgtcatcgaggactgtgacaacgtggtgaccggcggagaccccttctatgaccgcttcccctggttccggctggtgggcagggccttcgtgtacctgagcaacctgctgtaccccgttcccctggtacaccgtgtggcaatcgtcagcgagaagggcgaggtgaagggcttcctccgcgtggccgtccaggccatctcagccgatgaagaggcccctgattatggctctggcgtccgccagtcgggaactgctaaaatctcctttgatgaccagcattttgaaaagttccagtccgagtcttgccccgtggtggggatgtcccgctcgggaacctcccaggaagagcttcgcatcgtggagggccagggccagggtgcagacgtggggccctcagccgatgaagtcaacaacaacacctgttcagcagtgcccccagaaggcctcctcctagacagctctgagaaagccgccctggatgggcccctggatgctgccctggaccacctccgcctgggcaacaccttcaccttccgtgtgacagtcctgcaggcgtccagcatctctgccgaatatgccgacatcttctgccagttcaacttcatccaccgccacgacgaggccttctccacagagcccctgaagaacacaggcagaggccccccacttggcttctaccacgtccagaacatcgcagtggaggtgaccaagtccttcattgagtacatcaagagccagcccattgttttcgaggtctttggccactaccagcagcacccgttcccgcccctctgcaaggacgtgctcagccccctgaggccctcgcgccgccacttccctcgggtcatgccactgtccaagccagtgcccgccaccaagctcagcacactgacgcggccctgtccgggaccctgccactgcaagtacgacctgctggtctacttcgagatctgtgagctggaggccaacggcgattacatcccggccgtggtggaccaccgtgggggcatgccatgcatggggaccttcctcctccaccagggcatccagcgacggattacggtgacactactgcatgagacaggcagccatatccgctggaaggaagtgcgcgagctggtcgtgggccgcatccgaaacactccagagaccgacgagtccctgatcgaccccaacatcttgtctctcaacatcctctcttccggatacatccacccagcccaagatgaccggaccttttaccaatttgaggctgcgtgggacagctccatgcacaactctctcctgctgaaccgggtcaccccttatcgagagaaaatctacatgacactctccgcttatatcgagatggagaactgcacccagccggctgttgtcaccaaggacttctgcatggtcttctattcccgtgatgccaagctgccagcctcgcgctccatccgcaacctctttggcagtgggagccttcgggcctcagagagtaaccgtgtgactggtgtgtacgagctcagcctgtgccacgtggctgacgcgggcagcccagggatgcagcgccggcgccgacgagtcctggacacatctgtggcctatgtccggggcgaggagaacctggcaggctggaggccccggagtgacagtctcattctggaccaccagtgggagctggagaagctgagcctcctgcaggaggtggagaagactaggcactacctgctcctgcgggagaagctggagaccgcccagcggcctgtcccggaggcactgtccccggccttcagcgaggactctgagtcccatggctcctccagcgcctcctccccgctctcggctgagggccgcccatcacccctggaggctcccaacgagaggcagcgggagctggccgtcaagtgcttgcgcctgctcacgcacacattcaacagagagtacacacacagccacgtctgcgtcagtgccagcgagagcaagctctccgagatgtctgtcaccctgctccgggacccgtcgatgtcccctctaggggtggccactctcaccccctcctccacttgcccctctctggttgaagggcggtacggtgccactgacctgaggaccccgcagccctgctcccggccagccagcccagagcccgagctgctgccagaggccgactccaagaagctcccttcccctgcccgggcaacagagacagacaaggagccccagcgcctgctggtccctgacatccaggagatccgagtcagcccgatcgtttccaagaaggggtacctgcacttcctggagccgcacacgtcaggctgggccaggcgcttcgtggtggtgcggcgcccctatgcctacatgtacaacagcgacaaggacaccgtggagcggttcgtgctcaacctggccactgcccaggtggagtacagtgaggaccagcaggctatgctcaagacacccaacacattcgcggtgtgcacggaacaccgcggcatcctgctgcaggccgccagcgacaaggacatgcatgactggctgtacgccttcaaccccctcctggccgggaccatacggtccaagctctccagaaggaggtctgcccagatgcgggtctgaacctgagccctcccgtgacagccggcaggcccagcccatcccctccctcatcctcgtctgtcctgtcacctgccgcccagcccctctcctgccagacagcccacgaccgggtcgaccccccaggggacgcccatgccaggcccggggacctgtgccacacgaccagctgtgctcccagcagaggctgtgcgtgtcagttcttcttgcagaatgtgctctggtggaacaagttgggagaggctgggggggccaagggcacaggttacgggggttcttgctgccgttctaatatttttttaagcatagacagacttataattaatatacgttagttagtgacattgaaacagtcaactcggaaattaactataagacttgttctatttataagtatttatttctaatgcctccacatagccctgtaatattcagatggaacccccaaccacctccaccctgtttgttcccacatgtgtctcccaagcctgctagggacaggcagggcagggacagccaccttggaaggccgcagtgaggagctgtctggaccagtggggcaccttggggctagcacacgggtgtatcgcctgggccccaggcttctccatggccacatgggtcctgggtgtatgtgtgggagagtgggggggtgtctttggtgcctgaagtctgcgcggcatggagggtggtgtgagttcctctggtgggagggagaacgcacatctcttctgggcggccacctgaggagtgactccaagaagagttccggcagctttccccaggaaagggtgaggggtgacactcggctctggctctgagatgaggcagacggcacccaggctgtgatctgtcctgggcggggaccaggagggagcggggtcgggatcacctgccagtgtgcagactctgggactgcgtgctgtctccggaccatcagggtagggtggtgggttgagaccaggaagtcagggaagatcggaattcagggcgacggtctaggtgtcgagggctgtggcgcagcctcttcagctgcggcgagaaatggagtgagtcaaggtagcttctgggaagaaatgctgccattagcaggtttcttgcaaagactttcctctctttgttcccagggcagagagtttctgtgagtcccactgagaaaatcccatggggtgggggtatcctggtcggtcggcaatggagggtggctggcttggtggttattgtcttcaaggagctcttcgctgctgcatctgcggtgtccctttgttcttgtcccatttcaccccctctgcagacaccaatgtccgagggccacccaggacaggacgggggtcagccccaagctgagagtctggtcataggagtcatgtccagaggcctagggaggttttagggccctccccacccacacccacaggtcgatttggtctctttttagctcaaggaaagacagtagccaagcaacagagcccctctcccgccgtggcccgtgggagcagttacatcgggtctggtgctccagacctagggcccagcactttcatcagatcctgcctcctggagtgggggaaacgcagcaccccactggttctgaggcccctaccctcccaggctgtcccacgtgatgctgacatgagcctcagagaccccaatcccatgcctgggggagagacagcggctcaggagtgggggagcacgggccttctacaccacatgggaaggctctggcatgaggttttcctttgggaaggttgtttgggcccctgaagttccatctccgagagtggtgtgcagggcaggccagggcccatgctggctgcagtctctgtggctgcctgcctgggccagcctgtttgggagctgggactgtgggctcgccttttcgtacctgggctcaggtgcggtgtggccaccgccaccctcatcccctgcctgggaggctctcccaggggctgatgggggggttctgtgagggagaatcagggctcgggaagccacgcctgggaaggcaggacacaggacacagcagctttctttggaaatctcccaggtgaggattcacatcccaaaataaaattcagaagccaggtggcctgtgctccccatgggtgacctctggaggcagtggaccaagatgcagcaaggagaggatgcagaacagcttcttgcagaagcacctgctccggcatccagcgctgcctggaggcaggaaggagaggcagggcaggacacgctggtctgagatgagggggagccccacgggccccaggcaggctagaggaggcacaggccctgccacggccaactcaggtcagccagcctgaggctgtggcctccaaagggtctgggcgcaccccccaggtcgcaggtgtctgaggccagccaacctgcagagcactcgcggcgtgggtgggctgagtggaggtgcctgggagctgcctaaattcagaagcctccactgccatggagactgcctggctgtgtcctctcagccaggtgccgtgttggccttggctaggacccagagccacactgcagcctccgccgactccctccttccgggcctgctctagtgaggagtgcctaagccaggacccagaaactcagagttgatggtgagaggaggccgcctgagtcaggacacctggcttcttgaaaagttcgctctgccagaaaccacctagggaccacgttagctgccttccttgagctccccaggagtcggtttccacatctgtgaggtggagggctggtgtggaggtgctcatggggtgcggtgcttgggagacagccaggcccagggtggctgctgcttcctgctaagtgggggaggtgagacagatctggaaagccgtctccctcagatggtttcatttaatgctttatactgccgagtctgggggcttgttttggtttgggggcagccatcctccaccagaaagggggagctccttccgctgcggctccagatagatggggatgccgggctccaggccgaccagcacttgggatctgatgggacacggccagtgcctaggggtgccaagtccaaggcctcccactgggagtcatcgctgagaagatgccaatgtttcatccaccggctgcacaggcacaaactcccccacccaggacggctgtgatgaggtggccctccctgtcaaccctggtccctggagtccccagcacctggggccctggtggggctgatgtcacaggtgtttactgtgctgctgcactggtcctatgccagcctcacccatgtggggaccacggaaggcacactcccttacccccggtgccgggccgtgcggtcccccagacggacagcagctgtggcgacctgcgtttctccctgggcctgtgcttcctgtagttagtccgtcccctggttcccctgtggctcagaggccgcgtccctggcttgtacatatgtgattgctgtgggcacaccccagaccccatgtcatagctgccgtcccgacgtcacgacgcctgtcccgatgtcttacacccgagtgttagccctaggctcctgtactgtgcgtgcacttgaggctctgtccaattaagaaataaatgtggctcttactcaacacagtc

SEQ ID NO: 87312 - DNA, 5795 bp, Homo sapiens
gcaaaaaacacctagatacagcagtgcccccagaaggcctcctcctagacagctctgagaaagccgccctggatgggcccctggatgctgccctggaccacctccgcctgggcaacaccttcaccttccgtgtgacagtcctgcaggcgtccagcatctctgccgaatatgccgacatcttctgccagttcaacttcatccaccgccacgacgaggccttctccacagagcccctgaagaacacaggcagaggccccccacttggcttctaccacgtccagaacatcgcagtggaggtgaccaagtccttcattgagtacatcaagagccagcccattgttttcgaggtctttggccactaccagcagcacccgttcccgcccctctgcaaggacgtgctcagccccctgaggccctcgcgccgccacttccctcgggtcatgccactgtccaagccagtgcccgccaccaagctcagcacactgacgcggccctgtccgggaccctgccactgcaagtacgacctgctggtctacttcgagatctgtgagctggaggccaacggcgattacatcccggccgtggtggaccaccgtgggggcatgccatgcatggggaccttcctcctccaccagggcatccagcgacggattacggtgacactactgcatgagacaggcagccatatccgctggaaggaagtgcgcgagctggtcgtgggccgcatccgaaacactccagagaccgacgagtccctgatcgaccccaacatcttgtctctcaacatcctctcttccggatacatccacccagcccaagatgaccggaccttttaccaatttgaggctgcgtgggacagctccatgcacaactctctcctgctgaaccgggtcaccccttatcgagagaaaatctacatgacactctccgcttatatcgagatggagaactgcacccagccggctgttgtcaccaaggacttctgcatggtcttctattcccgtgatgccaagctgccagcctcgcgctccatccgcaacctctttggcagtgggagccttcgggcctcagagagtaaccgtgtgactggtgtgtacgagctcagcctgtgccacgtggctgacgcgggcagcccagggatgcagcgccggcgccgacgagtcctggacacatctgtggcctatgtccggggcgaggagaacctggcaggctggaggccccggagtgacagtctcattctggaccaccagtgggagctggagaagctgagcctcctgcaggaggtggagaagactaggcactacctgctcctgcgggagaagctggagaccgcccagcggcctgtcccggaggcactgtccccggccttcagcgaggactctgagtcccatggctcctccagcgcctcctccccgctctcggctgagggccgcccatcacccctggaggctcccaacgagaggcagcgggagctggccgtcaagtgcttgcgcctgctcacgcacacattcaacagagagtacacacacagccacgtctgcgtcagtgccagcgagagcaagctctccgagatgtctgtcaccctgctccgggacccgtcgatgtcccctctaggggtggccactctcaccccctcctccacttgcccctctctggttgaagggcggtacggtgccactgacctgaggaccccgcagccctgctcccggccagccagcccagagcccgagctgctgccagaggccgactccaagaagctcccttcccctgcccgggcaacagagacagacaaggagccccagcgcctgctggtccctgacatccaggagatccgagtcagcccgatcgtttccaagaaggggtacctgcacttcctggagccgcacacgtcaggctgggccaggcgcttcgtggtggtgcggcgcccctatgcctacatgtacaacagcgacaaggacaccgtggagcggttcgtgctcaacctggccactgcccaggtggagtacagtgaggaccagcaggctatgctcaagacacccaacacattcgcggtgtgcacggaacaccgcggcatcctgctgcaggccgccagcgacaaggacatgcatgactggctgtacgccttcaaccccctcctggccgggaccatacggtccaagctctccagaaggaggtctgcccagatgcgggtctgaacctgagccctcccgtgacagccggcaggcccagcccatcccctccctcatcctcgtctgtcctgtcacctgccgcccagcccctctcctgccagacagcccacgaccgggtcgaccccccaggggacgcccatgccaggcccggggacctgtgccacacgaccagctgtgctcccagcagaggctgtgcgtgtcagttcttcttgcagaatgtgctctggtggaacaagttgggagaggctgggggggccaagggcacaggttacgggggttcttgctgccgttctaatatttttttaagcatagacagacttataattaatatacgttagttagtgacattgaaacagtcaactcggaaattaactataagacttgttctatttataagtatttatttctaatgcctccacatagccctgtaatattcagatggaacccccaaccacctccaccctgtttgttcccacatgtgtctcccaagcctgctagggacaggcagggcagggacagccaccttggaaggccgcagtgaggagctgtctggaccagtggggcaccttggggctagcacacgggtgtatcgcctgggccccaggcttctccatggccacatgggtcctgggtgtatgtgtgggagagtgggggggtgtctttggtgcctgaagtctgcgcggcatggagggtggtgtgagttcctctggtgggagggagaacgcacatctcttctgggcggccacctgaggagtgactccaagaagagttccggcagctttccccaggaaagggtgaggggtgacactcggctctggctctgagatgaggcagacggcacccaggctgtgatctgtcctgggcggggaccaggagggagcggggtcgggatcacctgccagtgtgcagactctgggactgcgtgctgtctccggaccatcagggtagggtggtgggttgagaccaggaagtcagggaagatcggaattcagggcgacggtctaggtgtcgagggctgtggcgcagcctcttcagctgcggcgagaaatggagtgagtcaaggtagcttctgggaagaaatgctgccattagcaggtttcttgcaaagactttcctctctttgttcccagggcagagagtttctgtgagtcccactgagaaaatcccatggggtgggggtatcctggtcggtcggcaatggagggtggctggcttggtggttattgtcttcaaggagctcttcgctgctgcatctgcggtgtccctttgttcttgtcccatttcaccccctctgcagacaccaatgtccgagggccacccaggacaggacgggggtcagccccaagctgagagtctggtcataggagtcatgtccagaggcctagggaggttttagggccctccccacccacacccacaggtcgatttggtctctttttagctcaaggaaagacagtagccaagcaacagagcccctctcccgccgtggcccgtgggagcagttacatcgggtctggtgctccagacctagggcccagcactttcatcagatcctgcctcctggagtgggggaaacgcagcaccccactggttctgaggcccctaccctcccaggctgtcccacgtgatgctgacatgagcctcagagaccccaatcccatgcctgggggagagacagcggctcaggagtgggggagcacgggccttctacaccacatgggaaggctctggcatgaggttttcctttgggaaggttgtttgggcccctgaagttccatctccgagagtggtgtgcagggcaggccagggcccatgctggctgcagtctctgtggctgcctgcctgggccagcctgtttgggagctgggactgtgggctcgccttttcgtacctgggctcaggtgcggtgtggccaccgccaccctcatcccctgcctgggaggctctcccaggggctgatgggggggttctgtgagggagaatcagggctcgggaagccacgcctgggaaggcaggacacaggacacagcagctttctttggaaatctcccaggtgaggattcacatcccaaaataaaattcagaagccaggtggcctgtgctccccatgggtgacctctggaggcagtggaccaagatgcagcaaggagaggatgcagaacagcttcttgcagaagcacctgctccggcatccagcgctgcctggaggcaggaaggagaggcagggcaggacacgctggtctgagatgagggggagccccacgggccccaggcaggctagaggaggcacaggccctgccacggccaactcaggtcagccagcctgaggctgtggcctccaaagggtctgggcgcaccccccaggtcgcaggtgtctgaggccagccaacctgcagagcactcgcggcgtgggtgggctgagtggaggtgcctgggagctgcctaaattcagaagcctccactgccatggagactgcctggctgtgtcctctcagccaggtgccgtgttggccttggctaggacccagagccacactgcagcctccgccgactccctccttccgggcctgctctagtgaggagtgcctaagccaggacccagaaactcagagttgatggtgagaggaggccgcctgagtcaggacacctggcttcttgaaaagttcgctctgccagaaaccacctagggaccacgttagctgccttccttgagctccccaggagtcggtttccacatctgtgaggtggagggctggtgtggaggtgctcatggggtgcggtgcttgggagacagccaggcccagggtggctgctgcttcctgctaagtgggggaggtgagacagatctggaaagccgtctccctcagatggtttcatttaatgctttatactgccgagtctgggggcttgttttggtttgggggcagccatcctccaccagaaagggggagctccttccgctgcggctccagatagatggggatgccgggctccaggccgaccagcacttgggatctgatgggacacggccagtgcctaggggtgccaagtccaaggcctcccactgggagtcatcgctgagaagatgccaatgtttcatccaccggctgcacaggcacaaactcccccacccaggacggctgtgatgaggtggccctccctgtcaaccctggtccctggagtccccagcacctggggccctggtggggctgatgtcacaggtgtttactgtgctgctgcactggtcctatgccagcctcacccatgtggggaccacggaaggcacactcccttacccccggtgccgggccgtgcggtcccccagacggacagcagctgtggcgacctgcgtttctccctgggcctgtgcttcctgtagttagtccgtcccctggttcccctgtggctcagaggccgcgtccctggcttgtacatatgtgattgctgtgggcacaccccagaccccatgtcatagctgccgtcccgacgtcacgacgcctgtcccgatgtcttacacccgagtgttagccctaggctcctgtactgtgcgtgcacttgaggctctgtccaattaagaaataaatgtggctcttactcaacacagtc

SEQ ID NO: 87313 - DNA, 8851 bp, Homo sapiens
agccggcgagcggcagcagctccgggctcgagagcccgcgcccatgccagtgcccatgcggggccgccgccagtgacgccggagaggtgttccccccacactggggctcccactactgcgaggagtgacccacgaaggccacagagatggccggggcttcggtgaaggtggcggtgcgggtccgccccttcaattcccgggaaatgagccgtgactccaagtgcatcattcagatgtctggaagcaccaccaccattgttaaccccaaacagcccaaggagacgcccaaaagcttcagctttgactactcctactggtcgcacacctcacctgaggacatcaactacgcgtcgcagaagcaggtgtaccgggacatcggcgaggagatgctgcagcatgcctttgagggatacaacgtgtgcatcttcgcctatgggcagacgggtgccggcaagtcctacaccatgatgggcaagcaggagaaggaccagcagggcatcatcccacagctctgcgaggacctcttctctcggatcaacgacacgaccaacgacaacatgtcctactccgtggaggtcagctacatggagatttactgtgagcgcgtccgtgacctcctgaaccccaagaacaagggcaaccttcgcgtgagggagcacccactgctggggccctacgtggaggacctctccaagctggctgtcacctcctacaatgacatccaggacctcatggactcagggaacaaggccaggaccgtggcggccaccaacatgaatgagaccagcagtcgctcccacgccgtcttcaacatcatcttcacccagaagcgccatgacgcagagaccaatatcaccacggagaaggtgagcaaaatcagcctggtggacctggctgggagcgagcgggctgactccacgggagccaagggcacgcgcctcaaggagggggccaacatcaacaagtcgctgaccaccctgggcaaggtcatctccgccctggctgaaatggactccggacccaacaagaacaagaaaaagaagaagacagatttcattccgtaccgagattccgtgttgacctggctcctccgggaaaacctgggcggtaactcaaggacagctatggtggcagccctgagtcctgcagacatcaactacgatgagacccttagcacgctgaggtatgctgaccgggccaagcagatccgctgcaatgctgtcatcaatgaggaccccaacaacaagctgatccgcgagctgaaggatgaggtgacccggctgcgggaccttctgtacgcccagggtcttggcgacatcactgacatgaccaatgccctggtgggtatgagcccctcatcctcgctctcagccctgtccagccgcgcggcctccgtgtccagcctccacgagcgcatcttgtttgccccgggcagcgaggaggccattgaaagactgaaggaaacagagaagatcatagctgagctcaatgagacctgggaggagaagctgcggcggacagaagccatccggatggagagggaagccctgctggccgagatgggtgtggccatgagggaggatggcggcaccttgggcgtattctctcccaaaaagacaccacacctcgtcaacctgaacgaggacccgctgatgtctgagtgcctgctctactacatcaaggatgggatcaccagagtgggcagggaggatggcgagaggcggcaggacattgttctgagtgggcacttcatcaaggaggagcactgcgtcttccggagcgactccaggggaggcagcgaagctgtggtgaccttggagccctgtgagggggcagacacctacgtcaatggcaagaaagtcacagagcccagcatcctgcgttcaggaaaccgcatcatcatgggtaagagccatgtgttccggttcaaccaccccgagcaggcccggcaggagcgtgagcgcacgccttgtgcggagacgccagctgagcctgtggactgggccttcgcccagcgtgagctgctggagaagcagggcatcgacatgaagcaggagatggagcagaggctccaggaactggaggaccagtaccgccgcgagcgggaggaggccacctacctgctggagcagcagcggctggactatgagagcaagctggaggctctgcagaagcagatggactccaggtactacccggaggtgaacgaggaggaggaggagcccgaggatgaagtccagtggacagagcgggagtgtgagctggcgctctgggccttccggaagtggaagtggtaccagttcacgtctctgcgggacctgctgtggggcaacgccatcttcctcaaggaggctaatgccatcagcgtggagctgaaaaagaaggtacaattccagtttgtcctcctgacggacacactctactcccctctgccacccgacctgctgcccccagaggccgccaaagaccgagagacgcggcccttcccccgcaccattgtggccgtggaggtccaggaccagaagaacggggccacccactactggacgctggagaagctcaggcagcgtctggacctgatgcgggagatgtacgaccgcgctgcagaggtgccctccagtgtcatcgaggactgtgacaacgtggtgaccggcggagaccccttctatgaccgcttcccctggttccggctggtgggcagggccttcgtgtacctgagcaacctgctgtaccccgttcccctggtacaccgtgtggcaatcgtcagcgagaagggcgaggtgaagggcttcctccgcgtggccgtccaggccatctcagccgatgaagaggcccctgattatggctctggcgtccgccagtcgggaactgctaaaatctcctttgatgaccagcattttgaaaagttccagtccgagtcttgccccgtggtggggatgtcccgctcgggaacctcccaggaagagcttcgcatcgtggagggccagggccagggtgcagacgtggggccctcagccgatgaagtcaacaacaacacctgttcagcagtgcccccagaaggcctcctcctagacagctctgagaaagccgccctggatgggcccctggatgctgccctggaccacctccgcctgggcaacaccttcaccttccgtgtgacagtcctgcaggcgtccagcatctctgccgaatatgccgacatcttctgccagttcaacttcatccaccgccacgacgaggccttctccacagagcccctgaagaacacaggcagaggccccccacttggcttctaccacgtccagaacatcgcagtggaggtgaccaagtccttcattgagtacatcaagagccagcccattgttttcgaggtctttggccactaccagcagcacccgttcccgcccctctgcaaggacgtgctcagccccctgaggccctcgcgccgccacttccctcgggtcatgccactgtccaagccagtgcccgccaccaagctcagcacactgacgcggccctgtccgggaccctgccactgcaagtacgacctgctggtctacttcgagatctgtgagctggaggccaacggcgattacatcccggccgtggtggaccaccgtgggggcatgccatgcatggggaccttcctcctccaccagggcatccagcgacggattacggtgacactactgcatgagacaggcagccatatccgctggaaggaagtgcgcgagctggtcgtgggccgcatccgaaacactccagagaccgacgagtccctgatcgaccccaacatcttgtctctcaacatcctctcttccggatacatccacccagcccaagatgaccggaccttttaccaatttgaggctgcgtgggacagctccatgcacaactctctcctgctgaaccgggtcaccccttatcgagagaaaatctacatgacactctccgcttatatcgagatggagaactgcacccagccggctgttgtcaccaaggacttctgcatggtcttctattcccgtgatgccaagctgccagcctcgcgctccatccgcaacctctttggcagtgggagccttcgggcctcagagagtaaccgtgtgactggtgtgtacgagctcagcctgtgccacgtggctgacgcgggcagcccagggatgcagcgccggcgccgacgagtcctggacacatctgtggcctatgtccggggcgaggagaacctggcaggctggaggccccggagtgacagtctcattctggaccaccagtgggagctggagaagctgagcctcctgcaggaggtggagaagactaggcactacctgctcctgcgggagaagctggagaccgcccagcggcctgtcccggaggcactgtccccggccttcagcgaggactctgagtcccatggctcctccagcgcctcctccccgctctcggctgagggccgcccatcacccctggaggctcccaacgagaggcagcgggagctggccgtcaagtgcttgcgcctgctcacgcacacattcaacagagagtacacacacagccacgtctgcgtcagtgccagcgagagcaagctctccgagatgtctgtcaccctgctccgggacccgtcgatgtcccctctaggggtggccactctcaccccctcctccacttgcccctctctggttgaagggcggtacggtgccactgacctgaggaccccgcagccctgctcccggccagccagcccagagcccgagctgctgccagaggccgactccaagaagctcccttcccctgcccgggcaacagagacagacaaggagccccagcgcctgctggtccctgacatccaggagatccgagtcagcccgatcgtttccaagaaggggtacctgcacttcctggagccgcacacgtcaggctgggccaggcgcttcgtggtggtgcggcgcccctatgcctacatgtacaacagcgacaaggacaccgtggagcggttcgtgctcaacctggccactgcccaggtggagtacagtgaggaccagcaggctatgctcaagacacccaacacattcgcggtgtgcacggaacaccgcggcatcctgctgcaggccgccagcgacaaggacatgcatgactggctgtacgccttcaaccccctcctggccgggaccatacggtccaagctctccagaaggaggtctgcccagatgcgggtctgaacctgagccctcccgtgacagccggcaggcccagcccatcccctccctcatcctcgtctgtcctgtcacctgccgcccagcccctctcctgccagacagcccacgaccgggtcgaccccccaggggacgcccatgccaggcccggggacctgtgccacacgaccagctgtgctcccagcagaggctgtgcgtgtcagttcttcttgcagaatgtgctctggtggaacaagttgggagaggctgggggggccaagggcacaggttacgggggttcttgctgccgttctaatatttttttaagcatagacagacttataattaatatacgttagttagtgacattgaaacagtcaactcggaaattaactataagacttgttctatttataagtatttatttctaatgcctccacatagccctgtaatattcagatggaacccccaaccacctccaccctgtttgttcccacatgtgtctcccaagcctgctagggacaggcagggcagggacagccaccttggaaggccgcagtgaggagctgtctggaccagtggggcaccttggggctagcacacgggtgtatcgcctgggccccaggcttctccatggccacatgggtcctgggtgtatgtgtgggagagtgggggggtgtctttggtgcctgaagtctgcgcggcatggagggtggtgtgagttcctctggtgggagggagaacgcacatctcttctgggcggccacctgaggagtgactccaagaagagttccggcagctttccccaggaaagggtgaggggtgacactcggctctggctctgagatgaggcagacggcacccaggctgtgatctgtcctgggcggggaccaggagggagcggggtcgggatcacctgccagtgtgcagactctgggactgcgtgctgtctccggaccatcagggtagggtggtgggttgagaccaggaagtcagggaagatcggaattcagggcgacggtctaggtgtcgagggctgtggcgcagcctcttcagctgcggcgagaaatggagtgagtcaaggtagcttctgggaagaaatgctgccattagcaggtttcttgcaaagactttcctctctttgttcccagggcagagagtttctgtgagtcccactgagaaaatcccatggggtgggggtatcctggtcggtcggcaatggagggtggctggcttggtggttattgtcttcaaggagctcttcgctgctgcatctgcggtgtccctttgttcttgtcccatttcaccccctctgcagacaccaatgtccgagggccacccaggacaggacgggggtcagccccaagctgagagtctggtcataggagtcatgtccagaggcctagggaggttttagggccctccccacccacacccacaggtcgatttggtctctttttagctcaaggaaagacagtagccaagcaacagagcccctctcccgccgtggcccgtgggagcagttacatcgggtctggtgctccagacctagggcccagcactttcatcagatcctgcctcctggagtgggggaaacgcagcaccccactggttctgaggcccctaccctcccaggctgtcccacgtgatgctgacatgagcctcagagaccccaatcccatgcctgggggagagacagcggctcaggagtgggggagcacgggccttctacaccacatgggaaggctctggcatgaggttttcctttgggaaggttgtttgggcccctgaagttccatctccgagagtggtgtgcagggcaggccagggcccatgctggctgcagtctctgtggctgcctgcctgggccagcctgtttgggagctgggactgtgggctcgccttttcgtacctgggctcaggtgcggtgtggccaccgccaccctcatcccctgcctgggaggctctcccaggggctgatgggggggttctgtgagggagaatcagggctcgggaagccacgcctgggaaggcaggacacaggacacagcagctttctttggaaatctcccaggtgaggattcacatcccaaaataaaattcagaagccaggtggcctgtgctccccatgggtgacctctggaggcagtggaccaagatgcagcaaggagaggatgcagaacagcttcttgcagaagcacctgctccggcatccagcgctgcctggaggcaggaaggagaggcagggcaggacacgctggtctgagatgagggggagccccacgggccccaggcaggctagaggaggcacaggccctgccacggccaactcaggtcagccagcctgaggctgtggcctccaaagggtctgggcgcaccccccaggtcgcaggtgtctgaggccagccaacctgcagagcactcgcggcgtgggtgggctgagtggaggtgcctgggagctgcctaaattcagaagcctccactgccatggagactgcctggctgtgtcctctcagccaggtgccgtgttggccttggctaggacccagagccacactgcagcctccgccgactccctccttccgggcctgctctagtgaggagtgcctaagccaggacccagaaactcagagttgatggtgagaggaggccgcctgagtcaggacacctggcttcttgaaaagttcgctctgccagaaaccacctagggaccacgttagctgccttccttgagctccccaggagtcggtttccacatctgtgaggtggagggctggtgtggaggtgctcatggggtgcggtgcttgggagacagccaggcccagggtggctgctgcttcctgctaagtgggggaggtgagacagatctggaaagccgtctccctcagatggtttcatttaatgctttatactgccgagtctgggggcttgttttggtttgggggcagccatcctccaccagaaagggggagctccttccgctgcggctccagatagatggggatgccgggctccaggccgaccagcacttgggatctgatgggacacggccagtgcctaggggtgccaagtccaaggcctcccactgggagtcatcgctgagaagatgccaatgtttcatccaccggctgcacaggcacaaactcccccacccaggacggctgtgatgaggtggccctccctgtcaaccctggtccctggagtccccagcacctggggccctggtggggctgatgtcacaggtgtttactgtgctgctgcactggtcctatgccagcctcacccatgtggggaccacggaaggcacactcccttacccccggtgccgggccgtgcggtcccccagacggacagcagctgtggcgacctgcgtttctccctgggcctgtgcttcctgtagttagtccgtcccctggttcccctgtggctcagaggccgcgtccctggcttgtacatatgtgattgctgtgggcacaccccagaccccatgtcatagctgccgtcccgacgtcacgacgcctgtcccgatgtcttacacccgagtgttagccctaggctcctgtactgtgcgtgcacttgaggctctgtccaattaagaaataaatgtggctcttactcaacacagtcctcaccatatacgggatccgctagatcaacca

SEQ ID NO: 87314 - DNA, 2762 bp, Homo sapiens
cacgcgtcggttccggcagctttccccaggagggagcggggtcgggatcacctgccagtgtgcagactctgggactgcgtgctgtctccggaccatcagggtagggtggtgggttgagaccaggaagtcagggaagatcggaattcagggcgacggtctaggtgtcgagggctgtggcgcagcctcttcagctgcggcgagaaatggagtgagtcaaggtagcttctgggaagaaatgctgccattagcaggtttcttgcaaagactttcctctctttgttcccagggcagagagtttctgtgagtcccactgagaaaatcccatggggtgggggtatcctggtcggtcggcaatggagggtggctggcttggtggttattgtcttcaaggagctcttcgctgctgcatctgcggtgtccctttgttcttgtcccatttcaccccctctgcagacaccaatgtccgagggccacccaggacaggacgggggtcagccccaagctgagagtctggtcataggagtcatgtccagaggcctagggaggttttagggccctccccacccacacccacaggtcgatttggtctctttttagctcaaggaaagacagtagccaagcaacagagcccctctcccgccgtggcccgtgggagcagttacatcgggtctggtgctccagacctagggcccagcactttcatcagatcctgcctcctggagtgggggaaacgcagcaccccactggttctgaggcccctaccctcccaggctgtcccacgtgatgctgacatgagcctcagagaccccaatcccatgcctgggggagagacagcggctcaggagtgggggagcacgggccttctacaccacatgggaaggctctggcatgaggttttcctttgggaaggttgtttgggcccctgaagttccatctccgagagtggtgtgcagggcaggccagggcccatgctggctgcagtctctgtggctgcctgcctgggccagcctgtttgggagctgggactgtgggctcgccttttcgtacctgggctcaggtgcggtgtggccaccgccaccctcatcccctgcctgggaggctctcccaggggctgatgggggggttctgtgagggagaatcagggctcgggaagccacgcctgggaaggcaggacacaggacacagcagctttctttggaaatctcccaggtgaggattcacatcccaaaataaaattcagaagccaggtggcctgtgctccccatgggtgacctctggaggcagtggaccaagatgcagcaaggagaggatgcagaacagcttcttgcagaagcacctgctccggcatccagcgctgcctggaggcaggaaggagaggcagggcaggacacgctggtctgagatgagggggagccccacgggccccaggcaggctagaggaggcacaggccctgccacggccaactcaggtcagccagcctgaggctgtggcctccaaagggtctgggcgcaccccccaggtcgcaggtgtctgaggccagccaacctgcagagcactcgcggcgtgggtgggctgagtggaggtgcctgggagctgcctaaattcagaagcctccactgccatggagactgcctggctgtgtcctctcagccaggtgccgtgttggccttggctaggacccagagccacactgcagcctccgccgactccctccttccgggcctgctctagtgaggagtgcctaagccaggacccagaaactcagagttgatggtgagaggaggccgcctgagtcaggacacctggcttcttgaaaagttcgctctgccagaaaccacctagggaccacgttagctgccttccttgagctccccaggagtcggtttccacatctgtgaggtggagggctggtgtggaggtgctcatggggtgcggtgcttgggagacagccaggcccagggtggctgctgcttcctgctaagtgggggaggtgagacagatctggaaagccgtctccctcagatggtttcatttaatgctttatactgccgagtctgggggcttgttttggtttgggggcagccatcctccaccagaaagggggagctccttccgctgcggctccagatagatggggatgccgggctccaggccgaccagcacttgggatctgatgggacacggccagtgcctaggggtgccaagtccaaggcctcccactgggagtcatcgctgagaagatgccaatgtttcatccaccggctgcacaggcacaaactcccccacccaggacggctgtgatgaggtggccctccctgtcaaccctggtccctggagtccccagcacctggggccctggtggggctgatgtcacaggtgtttactgtgctgctgcactggtcctatgccagcctcacccatgtggggaccacggaaggcacactcccttacccccggtgccgggccgtgcggtcccccagacggacagcagctgtggcgacctgcgtttctccctgggcctgtgcttcctgtagttagtccgtcccctggttcccctgtggctcagaggccgcgtccctggcttgtacatatgtgattgctgtgggcacaccccagaccccatgtcatagctgccgtcccgacgtcacgacgcctgtcccgatgtcttacacccgagtgttagccctaggctcctgtactgtgcgtgcacttgaggctctgtccaattaagaaataaatgtggctcttactcaacacagtc

SEQ ID NO: 87315 - DNA, 5564 bp, Homo sapiens
agccggcgagcggcagcagctccgggctcgagagcccgcgcccatgccagtgcccatgcggggccgccgccagtgacgccggagaggtgttccccccacactggggctcccactactgcgaggagtgacccacgaaggccacagagatggccggggcttcggtgaaggtggcggtgcgggtccgccccttcaattcccgggaaatgagccgtgactccaagtgcatcattcagatgtctggaagcaccaccaccattgttaaccccaaacagcccaaggagacgcccaaaagcttcagctttgactactcctactggtcgcacacctcacctgaggacatcaactacgcgtcgcagaagcaggtgtaccgggacatcggcgaggagatgctgcagcatgcctttgagggatacaacgtgtgcatcttcgcctatgggcagacgggtgccggcaagtcctacaccatgatgggcaagcaggagaaggaccagcagggcatcatcccacagctctgcgaggacctcttctctcggatcaacgacacgaccaacgacaacatgtcctactccgtggaggtcagctacatggagatttactgtgagcgcgtccgtgacctcctgaaccccaagaacaagggcaaccttcgcgtgagggagcacccactgctggggccctacgtggaggacctctccaagctggctgtcacctcctacaatgacatccaggacctcatggactcagggaacaaggccaggaccgtggcggccaccaacatgaatgagaccagcagtcgctcccacgccgtcttcaacatcatcttcacccagaagcgccatgacgcagagaccaatatcaccacggagaaggtgagcaaaatcagcctggtggacctggctgggagcgagcgggctgactccacgggagccaagggcacgcgcctcaaggagggggccaacatcaacaagtcgctgaccaccctgggcaaggtcatctccgccctggctgaaatggactccggacccaacaagaacaagaaaaagaagaagacagatttcattccgtaccgagattccgtgttgacctggctcctccgggaaaacctgggcggtaactcaaggacagctatggtggcagccctgagtcctgcagacatcaactacgatgagacccttagcacgctgaggtatgctgaccgggccaagcagatccgctgcaatgctgtcatcaatgaggaccccaacaacaagctgatccgcgagctgaaggatgaggtgacccggctgcgggaccttctgtacgcccagggtcttggcgacatcactgacatgaccaatgccctggtgggtatgagcccctcatcctcgctctcagccctgtccagccgcgcggcctccgtgtccagcctccacgagcgcatcttgtttgccccgggcagcgaggaggccattgaaagactgaaggaaacagagaagatcatagctgagctcaatgagacctgggaggagaagctgcggcggacagaagccatccggatggagagggaagccctgctggccgagatgggtgtggccatgagggaggatggcggcaccttgggcgtattctctcccaaaaagacaccacacctcgtcaacctgaacgaggacccgctgatgtctgagtgcctgctctactacatcaaggatgggatcaccagagtgggcagggaggatggcgagaggcggcaggacattgttctgagtgggcacttcatcaaggaggagcactgcgtcttccggagcgactccaggggaggcagcgaagctgtggtgaccttggagccctgtgagggggcagacacctacgtcaatggcaagaaagtcacagagcccagcatcctgcgttcaggaaaccgcatcatcatgggtaagagccatgtgttccggttcaaccaccccgagcaggcccggcaggagcgtgagcgcacgccttgtgcggagacgccagctgagcctgtggactgggccttcgcccagcgtgagctgctggagaagcagggcatcgacatgaagcaggagatggagcagaggctccaggaactggaggaccagtaccgccgcgagcgggaggaggccacctacctgctggagcagcagcggctggactatgagagcaagctggaggctctgcagaagcagatggactccaggtactacccggaggtgaacgaggaggaggaggagcccgaggatgaagtccagtggacagagcgggagtgtgagctggcgctctgggccttccggaagtggaagtggtaccagttcacgtctctgcgggacctgctgtggggcaacgccatcttcctcaaggaggctaatgccatcagcgtggagctgaaaaagaaggtacaattccagtttgtcctcctgacggacacactctactcccctctgccacccgacctgctgcccccagaggccgccaaagaccgagagacgcggcccttcccccgcaccattgtggccgtggaggtccaggaccagaagaacggggccacccactactggacgctggagaagctcaggcagcgtctggacctgatgcgggagatgtacgaccgcgctgcagaggtgccctccagtgtcatcgaggactgtgacaacgtggtgaccggcggagaccccttctatgaccgcttcccctggttccggctggtgggcagggccttcgtgtacctgagcaacctgctgtaccccgttcccctggtacaccgtgtggcaatcgtcagcgagaagggcgaggtgaagggcttcctccgcgtggccgtccaggccatctcagccgatgaagaggcccctgattatggctctggcgtccgccagtcgggaactgctaaaatctcctttgatgaccagcattttgaaaagttccagtccgagtcttgccccgtggtggggatgtcccgctcgggaacctcccaggaagagcttcgcatcgtggagggccagggccagggtgcagacgtggggccctcagccgatgaagtcaacaacaacacctgttcagcagtgcccccagaaggcctcctcctagacagctctgagaaagccgccctggatgggcccctggatgctgccctggaccacctccgcctgggcaacaccttcaccttccgtgtgacagtcctgcaggcgtccagcatctctgccgaatatgccgacatcttctgccagttcaacttcatccaccgccacgacgaggccttctccacagagcccctgaagaacacaggcagaggccccccacttggcttctaccacgtccagaacatcgcagtggaggtgaccaagtccttcattgagtacatcaagagccagcccattgttttcgaggtctttggccactaccagcagcacccgttcccgcccctctgcaaggacgtgctcagccccctgaggccctcgcgccgccacttccctcgggtcatgccactgtccaagccagtgcccgccaccaagctcagcacactgacgcggccctgtccgggaccctgccactgcaagtacgacctgctggtctacttcgagatctgtgagctggaggccaacggcgattacatcccggccgtggtggaccaccgtgggggcatgccatgcatggggaccttcctcctccaccagggcatccagcgacggattacggtgacactactgcatgagacaggcagccatatccgctggaaggaagtgcgcgagctggtcgtgggccgcatccgaaacactccagagaccgacgagtccctgatcgaccccaacatcttgtctctcaacatcctctcttccggatacatccacccagcccaagatgaccggaccttttaccaatttgaggctgcgtgggacagctccatgcacaactctctcctgctgaaccgggtcaccccttatcgagagaaaatctacatgacactctccgcttatatcgagatggagaactgcacccagccggctgttgtcaccaaggacttctgcatggtcttctattcccgtgatgccaagctgccagcctcgcgctccatccgcaacctctttggcagtgggagccttcgggcctcagagagtaaccgtgtgactggtgtgtacgagctcagcctgtgccacgtggctgacgcgggcagcccagggatgcagcgccggcgccgacgagtcctggacacatctgtggcctatgtccggggcgaggagaacctggcaggctggaggccccggagtgacagtctcattctggaccaccagtgggagctggagaagctgagcctcctgcaggaggtggagaagactaggcactacctgctcctgcgggagaagctggagaccgcccagcggcctgtcccggaggcactgtccccggccttcagcgaggactctgagtcccatggctcctccagcgcctcctccccgctctcggctgagggccgcccatcacccctggaggctcccaacgagaggcagcgggagctggccgtcaagtgcttgcgcctgctcacgcacacattcaacagagagtacacacacagccacgtctgcgtcagtgccagcgagagcaagctctccgagatgtctgtcaccctgctccgggacccgtcgatgtcccctctaggggtggccactctcaccccctcctccacttgcccctctctggttgaagggcggtacggtgccactgacctgaggaccccgcagccctgctcccggccagccagcccagagcccgagctgctgccagaggccgactccaagaagctcccttcccctgcccgggcaacagagacagacaaggagccccagcgcctgctggtccctgacatccaggagatccgagtcagcccgatcgtttccaagaaggggtacctgcacttcctggagccgcacacgtcaggctgggccaggcgcttcgtggtggtgcggcgcccctatgcctacatgtacaacagcgacaaggacaccgtggagcggttcgtgctcaacctggccactgcccaggtggagtacagtgaggaccagcaggctatgctcaagacacccaacacattcgcggtgtgcacggaacaccgcggcatcctgctgcaggccgccagcgacaaggacatgcatgactggctgtacgccttcaaccccctcctggccgggaccatacggtccaagctctccagaaggaggtctgcccagatgcgggtctgaacctgagccctcccgtgacagccggcaggcccagcccatcccctccctcatcctcgtctgtcctgtcacctgccgcccagcccctctcctgccagacagcccacgaccgggtcgaccccccaggggacgcccatgccaggcccggggacctgtgccacacgaccagctgtgctcccagcagaggctgtgcgtgtcagttcttcttgcagaatgtgctctggtggaacaagttgggagaggctgggggggccaagggcacaggttacgggggttcttgctgccgttctaatatttttttaagcatagacagacttataattaatatacgttagttagtgacattga

SEQ ID NO: 87316 - DNA, 790 bp, Homo sapiens
acaggagcctagggctaacactcgggtgtaagacatcgggacgggcgtcgtgacgtcgggacggcagctatgacatggagagtctgggggcttgttttggtttgggggcagccatcctccaccagaaagggggagctccttccgctgcggctccagatagatggggatgccgggctccaggccgaccagcacttgggatctgatgggacacggccagtgcctaggggtgccaagtccaaggcctcccactgggagtcatcgctgagaagatgccaatgtttcatccaccggctgcacaggcacaaactcccccacccaggacggctgtgatgaggtggccctccctgtcaaccctggtccctggagtccccagcacctggggccctggtggggctgatgtcacaggtgtttactgtgctgctgcactggtcctatgccagcctcacccatgtggggaccacggaaggcacactcccttacccccggtgccgggccgtgcggtcccccagacggacagcagctgtggcgacctgcgtttctccctgggcctgtgcttcctgtagttagtccgtcccctggttcccctgtggctcagaggccgcgtccctggcttgtacatatgtgattgctgtgggcacaccccagaccccatgtcatagctgccgtcccgacgtcacgacgcctgtcccgatgtcttacacccgagtgttagccctaggctcctgtactgtgcgtgcacttgaggctctgtccaattaagaaataaatgtggctcttactcaacacagtc

SEQ ID NO: 87317 - DNA, 333 bp, Homo sapiens
ttctgtttcttgccttctctgggccccatctcttactttttcccatcttcatcttttttctctccctccctctgtctgtctgcccgccctacccctcctccccatagacgtgtccgaccttgagaacaataaccttaaccgtggcgggacggtgaatgaagcccctgaccctctctccacagtgaccaatgccctggtgggtatgagcccctcatcctcgctctcagccctgtccagccgcgcggcctccgtgtccagcctccacgagcgcatcttgtttgccccgggcagcgaggaggccattgaaagactgaaggtgagggcaccacctgg

SEQ ID NO: 87318 - DNA, 414 bp, Homo sapiens
gctacctcaagaaatatatacagtagagttcagagctgatgtatacttgtatgacctgaagcatatgcacacaggaataaagtaaaacaagaccctccccgtccataatggagagagagagcccactcaatgaatatgtgccctggcatagtgtgagagtgggaaacaaatctgtttttctgtcagttttagttccagttttcctctcttgtgggcatttggctgcatcaaggatgaatctagtgtttaaaggaaatatttttggtatgccattgccgctgtaacatctgctactttccttgtatgtccataagaaacactgtgtactttgtgcattatttaaagggaatttgcaagcataatcatgactctaggtaacttaggatatcccgtgtaaggtatgattccactgtc

SEQ ID NO: 87319 - DNA, 472 bp, Homo sapiens
tgagcacgtcgtggcctcctggaactggctgctcccacgtgtcctgaagaaggtggggtctgtgacccagagaggagcaaggggagtttgccaagaacagacatcctctgccactcttgatcccctgacgcacacggggcaagctcctttggggtcgaacagaacagaccagttgtttggagtaggtcagtaccatggggttctgcacgcgcttcagggtgccggcgtgccctcgaggctgtctgcaggatgctgtgtgtgtgcagtgcacattactgctggtgggagtccatagttctcaaaagcttttcctgactgccccaccctctcaaaaaagtaaagcaggccgggggcagtggctcatgcctgtaatcccagcactttgggaggccgaggtgggcggatcacgaggtcaggagatcgagaccatcctggctaacacggtgaaaccccgtctctactttaaaaaaaa

SEQ ID NO: 87320 - DNA, 427 bp, Homo sapiens
ctatctccacctcccaccttctctgtctcctttctgtcacaggcatgttctttttttgaaagagttttctgagattgctgcctccacttcctcaccttacaatcattactcaaccctctgtcattaggcttctctccccaaaacaccctgggccccccagcacgtggagcactggcaaagatgaacaatgacctttttgttgctgaatcccatccagtggcactttgctgtcctatgtcacttgacttcccccacaggataaaactagtcacaattcctcatttcctaaactctctttttggttcacatgacattattattattatttggtaatcctcccaactctctggcctctccttcaggcactcccctcaccctaagactgctccattaaaaagtctacattagctctctgctattctcactc

SEQ ID NO: 87321 - DNA, 402 bp, Homo sapiens
tttcattatcttgagaactggtagagaattctgggtgtctttctcagcttgttctgtctcccctttggtgtgcttctttctaatttgctctttgtaatctgctattctcttttgagagtgacagaattacataatttctgggaatactattggatacttaatctttttatcctgttctatgaagggactatagtgtggtggttcaaagcttatgctgtggagtcaaaatgcagttttttcagttactaaattgatgatctttggctacctgtttaacttccctaagtcagtgtatagaaggttaacggtacttacctcacagggatgttggatttaatgaagtggtatctataaagtgcccagcacaatgcctaacacaaagtaagtacagaaatagttacc

SEQ ID NO: 87322 - DNA, 633 bp, Homo sapiens
tgtctctcttccatgctctgagaattatataaaagcatcccagctaaggctggagtgaaggggttggggaaagttaagcaaaggctaacttgaccaataggctcaatagattcagtcttgttggccaggcccacttgaagggttttttgtttcatcttggagaaggacagtgaggtcatggtataattgttatgagtaaagtcaagaacagcttctaggtaaaagtaattatgtacccaaaaggagttgaagggaaaatcaatttaggtttacattaaacatccttcaagttcttatctttaaatggagtttcagtgtctcccaaaggctggatgagttttacagttataaccactggattgtgagaccataggacatttgaacaatcttttcttctacccatctagaaaagcatcttttttatataccaaatttttacacatatatccacatctgtttttgaaatctagagcagaggtactcaaagtttggttcatggactagtgccagttcacaaattgttaatgttttataatgagataagtacggaagttgagagtaaccatttagaaactgtgtaggaatttaaaaagtaatatctgacaaatttaataataaaaatggaggcttgta

SEQ ID NO: 87323 - DNA, 419 bp, Homo sapiens
agatgtggtggtttatgcttgtaatcccagctacttgggagacataggcaggaggattgcttgagcccaggagtttgaggctgcagtaagttatgattgtgccactgcattccagcctgggcaacaaaacaagacctcatctcaaaaaaaaaaaaaaaaaaagcaaatatcatatgaaaaaatacaatttccattcaagattttcaaaaacaaacaacaacaaaaaaactctcagcaagctagaaatagaagagaatttcctcaacttgaaaaaatacatctgcaaaactcctatagctaatatcacactccatggtaaacgatttattttccactatgatcaggattaaagtaaagttctcctttctcaccacttctttttgacgttataactggaatcccaactagcacaacaacac

SEQ ID NO: 87324 - DNA, 223 bp, Homo sapiens
aacaaacaaacaaacccaaaaaacaataagaccaataaactgacaacaatatcctcaaggaggttataacaaaataacatttttattgttattttaaaagtaaaacatgtatattgtggaacatttaggaaaatagaaacttaaaagccagcaaaccaaattcctatttataattcccccttttaaatagtatcaaataaactactgccacattacattaggg

SEQ ID NO: 87325 - DNA, 357 bp, Homo sapiens
aactttggagacattattctattttcatctggagtcattaatgagaatttcaatggcaatttcattcttacccattataggtcatagtttgcttttgttagctgttttcccttcgaagctttaacatcttatcttctagatattcagaaatttcatgagaatctgtttaggagtgggctgtttatttaattcacaatgctcaaaagtttgtgggccttatcaaactgaagacatcatgtcttctttttggctgtggaaatagtcatgtataatttctctttgtgttctgggagatttatttgactctattttctagttcttatactaaaaaattttaattatagctattttatttta

SEQ ID NO: 87326 - DNA, 2031 bp, Homo sapiens
  misc_feature (1354)..(1354): n is a, c, g, or t
  misc_feature (1673)..(1674): n is a, c, g, or t
  misc_feature (1702)..(1702): n is a, c, g, or t
ccggcggagccttaacaagtggtcgggcgggcggacgaggcgggcgatggccctgcggccgggacgcgaacagggaccatgcagggcaacggcagcgcgctgcccaacgcctcccagcccgtgctccgcggggacggcgcgcggccctcgtggctggcgtccgccctagcctgcgtcctcatcttcaccatcgtggtggacatcctgggcaacctcctggtcatcctgtcggtgtatcggaacaagaagctcaggaacgcaggaaacatctttgtggtgagcttagcggtggcagacctggtggtggccatttatccgtacccgttggtgctgatgtcgatatttaacaacgggtggaacctgggctatctgcactgccaagtcagtgggttcctgatgggcctgagcgtcatcggctccatattcaacatcaccggcatcgccatcaaccgctactgctacatctgccacagtctcaagtacgacaaactgtacagcagcaagaactccctctgctacgtgctcctcatatggctcctgacgctggcggccgtcctgcccaacctccgtgcagggactctccagtacgacccgaggatctactcgtgcaccttcgcccagtccgtcagctccgcctacaccatcgccgtggtggttttccacttcctcgtccccatgatcatagtcatcttctgttacctgagaatatggatcctggttctccaggtcagacagagggtgaaacctgaccgcaaacccaaactgaaaccacaggacttcaggaattttgtcaccatgtttgtggtttttgtcctctttgccatttgctgggctcctctgaacttcattggcctggccgtggcctctgaccccgccagcatggtgcctaggatcccagagtggctgtttgtggccagttactacatggcgtatttcaacagctgcctcaatgccattatatacgggctactgaaccaaaatttcaggaaggaatacaggagaattatagtctcgctctgtacagccagggtgttctttgtggacagctctaacgacgtggccgatagggttaaatggaaaccgtctccactgatgaccaacaataatgtagtaaaggtggactccgtttaaaaaagcaccacgttccgggtgagatggacacgctgcgcaaggcctcgctcttgacagatgtctgggaaagcagagtggtggaggaaacttccaacttttacctggctgctgccatagtttctgagctaacgtgctgtcagcattataaacccctccaatctactagtcaagagaagtacagaatgtatggagagttacatgttaactgaggaatgcggttcanggctggggtgagagtaagctgctgaatgcattcaggggaaggagtgtgcaaacttttattgtaaatgagtgccacaaaaggggtaattgcattcttcttcactttttgaagacttctagcagaaaaatgaaagagaattttatttataaatgagcaaatggaacaattttttttctgtaaatggaacaaacaatgaaagtggggtgagtgcctcttattacagagggaaaggctgaacataaatcagttaatggctcatcaacaatcacaaccacaaccaacaccacaaacctttcagctggcagagttagcattgggnngctatactcatggtcataaatgtttgcngctctatattacaagttgtgcatgcaaccagataaagaactaaatcataggccgggcacagtcgctcacacctgtaatctcagcactttgggaggctgaggtgggcagatcaactgagttcaggagtttgagaccaccctgggcaacatgatgaaatcccatctctaaaaaaatacaaaaaattatctgggcatggtgcacacgcctgtaatcccagctactcaggagactgagttaggagaatcccttgagccccagaggcagaggttgtggtgagccgagatcgcgccagtacattccaacttaggctacagaatgagactctgccc

SEQ ID NO: 87327 - DNA, 326 bp, Homo sapiens
ggctcccctgctctgtacgctgatattggaggaaaacaagctctgcccactacccacgtggccactggtcactcctacagaatacacttggatgcatcctcgccatggggggcttccgggcctccttgcggtctgcctgtcattctcactgggctccgcctcctccagacttagagaacattgcaatggtgagacacgctttcccatgcagtcagggccatctcttggggttctggagggagctcgcccttgagaatcagaggtccccaaggctctgcttctgacctgaagtcaccacttcgccctcatcctgtcccagcgcagaa

SEQ ID NO: 87328 - DNA, 436 bp, Homo sapiens
gaaagaatttgtactttgaaaagccaagacaagtactacccctcaccatcagcctaaaaataaacttactgacatattacataaataagaaagggtgctcacaccgcccgctgagctctgtgatgtagccgcttgcggagactgcaagcagccacggcgcgccctcttccgtgggaatggaaacatctgccacacgtgccggaagccaagtggtggcgacaactgcgcgccactccgcggcctaccgcgcagatcctctacgtgtgtcctcgcgagacaagctcaccgaaatggccgcgtccagtcaaggaaacattgagggaaattttgagtcactggaccttacggaatttgctaagaagcagccatggtggcgtaagctgttcgggcaggaatctggaccttcagcagaaaagtatagcatggcaacccagct

SEQ ID NO: 87329 - DNA, 202 bp, Homo sapiens
ctcccttccaccagctcccttccaccagcctcccttccaccactcccgtccaccagcctcccttccaccatcaaggaaacattgagggaaattttgagtcactggaccttacggaatttgctaagaagcagccatggtggcgtaagctgttcgggcaggaatctggaccttcagcagaaaagtatagcatggcaacccagct

SEQ ID NO: 87330 - DNA, 574 bp, Homo sapiens
caggagtgatgatattggtcctgaaggccacattaagtcttttggttgatttttgaaaacagaatgacttcaagaggtttacgaagggtgtgtgtgtgtgtgggcatgcatgcgtgcatgtgtgtgtaggagagaggtatattaacacgtttgcattttaaaatgatttttctggtttttctgagaaaatggactggatggggcaaaagtggaagcaggatgaaccagtggggaggctgtaacagtcgtccaggtaacacatgatgatggcaaggtggtaacagtaagatgatgagaactggataaactcaaaaacactgagtattacattagttagagttgaagtgtgaggcggaaagatgtagagaaaggaaattaatttgatttgagtggatttgacttagaaggcaacattttgagacacctagaatgatggcttctaataggctttcccagagccaaatggaggggttttctggaccctcagccatgtgctatggtgttaccaccatgtttgcttgcatctgttggagaagaagctaccccttcctctgcatggtggccgccttgcaag

SEQ ID NO: 87331 - DNA, 317 bp, Homo sapiens
gaacgtactcacatgtttacatgccctcttccaaccaagattcaggtctgctcctttgtccccatctccttcagaagcccatacctttttactattacttttctttcatgtctgtctcattaaaactctatttcctgattctagattctattaagctgacttaaactgagatcatttgaaaaagcataagcaaaaggcctcggtttatcaggttttatcatataagctgaagtatctagtcaacagttaaccactactttagcaaactcagttatgaacatgcttcccaacttagattcacttggatatgtacctca

SEQ ID NO: 87332 - DNA, 440 bp, Homo sapiens
agcttgcagtgagccgagattgtgccaccgcactccagcctgggtgacagagcgagattccgtctcaaaaaacaacagcaacaaaacaaaaccctcgaggggccactctcctgtctttactccttttcccttctctattctttcaccagaagccctcatttgaccagtgaactcctaggccctcttgacccgcacattagctgggcgatttccttgttctgctaattcctaattctgcttaaaatgtatttggatttctgtttttgaacacttatgatgccaggcactgtaatgcttgaaacccgatctttccctagagaatgtaacatacgtttttattcatttaatcacttcattatgccggggttaattatgtttattttataattggtaataaaggccacatttatttttgtaactgtttaaagagcgacaaaaaa

SEQ ID NO: 87333 - DNA, 2898 bp, Homo sapiens
  misc_feature (2887)..(2889): n is a, c, g, or t
  misc_feature (2895)..(2896): n is a, c, g, or t
atggagtcagggcagccggctcgacggattgccatggcgccgctgctggagtacgagcgacagctggtgctggaactgctcgacactgacgggctagtagtgtgcgcccgcgggctcggcgcggaccggctcctctaccactttctccagctgcactgccacccagcctgcctggtgctggtgctcaacacgcagccggccgaggaggagtattttatcaatcagctgaagatagaaggagttgaacacctccctcgccgtgtaacaaatgaaatcacaagcaacagtcgctatgaagtttacacacaaggtggtgttatatttgcgacaagtaggatacttgtggttgacttcttgactgatagaataccttcagatttaattactggcatcttggtgtatagagcccacagaataatcgagtcttgtcaagaagcattcatcttgcgcctctttcgccagaaaaacaaacgtggttttattaaagctttcacagacaatgctgttgcctttgatactggtttttgtcatgtggaaagagtgatgagaaatctttttgtgaggaaactgtatctgtggccaaggttccatgtagcagtaaactcatttttagaacagcacaaacctgaagttgtagaaatccatgtttctatgacacctaccatgcttgctatacagactgctatactggacattttaaatgcatgtctaaaggaactaaaatgccataacccatcgcttgaagtggaagatttatctttagaaaatgctattggaaaaccttttgacaagacaatccgccattatctggatcctttgtggcaccagcttggagccaagactaaatccttagttcaggatttgaagatattacgaactttgctgcagtatctctctcagtatgattgtgtcacatttcttaatcttctggaatctctgagagcaacggaaaaagcttttggtcagaattcaggttggctgtttcttgactccagcacctcgatgtttataaatgctcgagcaagggtttatcatcttccagatgccaaaatgagtaaaaaagaaaaaatatctgaaaaaatggaaattaaagaaggggaagaaacaaaaaaggaactggtcctagaaagcaacccaaagtgggaggcactgactgaagtattaaaagaaattgaggcagaaaataaggagagtgaagctcttggtggtccaggtcaagtactgatttgtgcaagtgatgaccgaacatgttcccagctgagagactatatcactcttggagcggaggccttcttattgaggctctacaggaaaacctttgagaaggatagcaaagctgaagaagtctggatgaaatttaggaaggaagacagttcaaagagaattaggaaatctcacaaaagacctaaagacccccaaaacaaagaacgggcttctaccaaagaaagaaccctcaaaaagaaaaaacggaagttgaccttaactcaaatggtaggaaaacctgaagaactggaagaggaaggagatgtcgaggaaggatatcgtcgagaaataagcagtagcccagaaagctgcccggaagaaattaagcatgaagaatttgatgtaaatttgtcatcggatgctgctttcggaatcctgaaagaacccctcactatcatccatccgcttctgggttgcagcgacccctatgctctgacaagggtactacatgaagtggagccaagatacgtggttctttatgacgcagagctaacctttgttcggcagcttgaaatttacagggcgagtaggcctgggaaacctctgagggtttactttcttatatacggaggttcaactgaggaacaacgctatctcactgctttgcggaaagaaaaggaagcttttgaaaaactcataagggaaaaagcaagcatggttgtccctgaagaaagagaaggcagagatgaaacaaacttagacctagtaagaggcacagcatctgcagatgtttccactgacactcggaaagccggtggccaggaacagaatggtacacagcaaagcatagttgtggatatgcgtgaatttcgaagtgagcttccatctctgatccatcgtcggggcattgacattgaacccgtgactttagaggttggagattacatcctcactccagaaatgtgcgtggagcgcaagagtatcagtgatttaatcggctctttaaataacggccgcctctacagccagtgcatctccatgtcccgctactacaagcgtcccgtgcttctgattgagtttgaccctagcaagcctttctctctcacttcccgaggtgccttgtttcaggagatctccagcaatgacattagttccaaactcactcttcttacacttcacttccccagactacggattctctggtgcccctctcctcatgcaacggcggagttgtttgaggagctgaaacaaagcaagccacagcctgatgcggcgacagcactggccattacagcagattctgaaacccttcccgagtcagagaagtataatcctggtccccaagacttcttgttaaaaatgccaggggtgaatgccaaaaactgccgctccttgatgcaccacgttaagaacatcgcagaattagcagccctgtcacaagacgagctcacgagtattctggggaatgctgcaaatgccaaacagctttatgatttcattcacacctcttttgcagaagtcgtatcaaaaggaaaagggaaaaagtgaacagtgatggctgttttcttatcccatgcctgtacttttcagcggctccttgccagacatcataggtcattattaattattggtttgctatttcattcttttccaatgctcttaatgattgtacggtggaccagannncagganncc

SEQ ID NO: 87334 - DNA, 3475 bp, Homo sapiens
atggagtcagggcagccggctcgacggattgccatggcgccgctgctggagtacgagcgacagctggtgctggaactgctcgacactgacgggctagtagtgtgcgcccgcgggctcggcgcggaccggctcctctaccactttctccagctgcactgccacccagcctgcctggtgctggtgctcaacacgcagccggccgaggaggagtattttatcaatcagctgaagatagaaggagttgaacacctccctcgccgtgtaacaaatgaaatcacaagcaacagtcgctatgaagtttacacacaaggtggtgttatatttgcgacaagtaggatacttgtggttgacttcttgactgatagaataccttcagatttaattactggcatcttggtgtatagagcccacagaataatcgagtcttgtcaagaagcattcatcttgcgcctctttcgccagaaaaacaaacgtggttttattaaagctttcacagacaatgctgttgcctttgatactggtttttgtcatgtggaaagagtgatgagaaatctttttgtgaggaaactgtatctgtggccaaggttccatgtagcagtaaactcatttttagaacagcacaaacctgaagttgtagaaatccatgtttctatgacacctaccatgcttgctatacagactgctatactggacattttaaatgcatgtctaaaggaactaaaatgccataacccatcgcttgaagtggaagatttatctttagaaaatgctattggaaaaccttttgacaagacaatccgccattatctggatcctttgtggcaccagcttggagccaagactaaatccttagttcaggatttgaagatattacgaactttgctgcagtatctctctcagtatgattgtgtcacatttcttaatcttctggaatctctgagagcaacggaaaaagcttttggtcagaattcaggttggctgtttcttgactccagcacctcgatgtttataaatgctcgagcaagggtttatcatcttccagatgccaaaatgagtaaaaaagaaaaaatatctgaaaaaatggaaattaaagaaggggaagaaacaaaaaaggaactggtcctagaaagcaacccaaagtgggaggcactgactgaagtattaaaagaaattgaggcagaaaataaggagagtgaagctcttggtggtccaggtcaagtactgatttgtgcaagtgatgaccgaacatgttcccagctgagagactatatcactcttggagcggaggccttcttattgaggctctacaggaaaacctttgagaaggatagcaaagctgaagaagtctggatgaaatttaggaaggaagacagttcaaagagaattaggaaatctcacaaaagacctaaagacccccaaaacaaagaacgggcttctaccaaagaaagaaccctcaaaaagaaaaaacggaagttgaccttaactcaaatggcagtagcccagaaagctgcccggaagaaattaagcatgaagaatttgatgtaaatttgtcatcggatgctgctttcggaatcctgaaagaacccctcactatcatccatccgcttctgggttgcagcgacccctatgctctgacaagggtactacatgaagtggagccaagatacgtggttctttatgacgcagagctaacctttgttcggcagcttgaaatttacagggcgagtaggcctgggaaacctctgagggtttactttcttatatacggaggttcaactgaggaacaacgctatctcactgctttgcggaaagaaaaggaagcttttgaaaaactcataagatctaccgtataagatatgagccaccttgaagacaggaattcttgcgtgatcacgattatatccaaagtacctagagcaccacgcaggaacactccataaatgtttttcaataaatgcatgaggaaaaagcaagcatggttgtccctgaagaaagagaaggcagagatgaaacaaacttagacctagtaagaggcacagcatctgcagatgtttccactgacactcggaaagccggtggccaggaacagaatggtacacagcaaagcatagttgtggatatgcgtgaatttcgaagtgagcttccatctctgatccatcgtcggggcattgacattgaacccgtgactttagaggttggagattacatcctcactccagaaatgtgcgtggagcgcaagagtatcagtgatttaatcggctctttaaataacggccgcctctacagccagtgcatctccatgtcccgctactacaagcgtcccgtgcttctgattgagtttgaccctagcaagcctttctctctcacttcccgaggtgccttgtttcaggagatctccagcaatgacattagttccaaactcactcttcttacacttcacttccccagactacggattctctggtgcccctctcctcatgcaacggcggagttgtttgaggagctgaaacaaagcaagccacagcctgatgcggcgacagcactggccattacagcagattctgaaacccttcccgagtcagagaagtataatcctggtccccaagacttcttgttaaaaatgccaggggtgaatgccaaaaactgccgctccttgatgcaccacgttaagaacatcgcagaattagcagccctgtcacaagacgagctcacgagtattctggggaatgctgcaaatgccaaacagctttatgatttcattcacacctcttttgcagggagggaaaagagcaggcacaagaaagctaccatttttaacagtccttgttatctagtgcaacataaataacagtcttaattgcacttatacccatgtcctgtggctctccaaatctggtctttgctgttgtgtctgctggacgcttgaactgatgtttgtgtaggaaatcatgttctgaccctttgtctacaaaggagccttctggaacactgagaagaaacatctctttgccattcctgaccagttctctctaccacattttcttcagctccatacttctgcctgtctgctctaaggaaatttcatggagccttcctactactaattcaagacagtctcctcaaaaactggttgactactcttctaatgaccctaacatatgtagcatatactataatttcattgttccaaattagtatttttaaagcaaaatgaattacctatttgcaaaagttaatgatgaaggagctcttagaattctcaatttttgcacatattcagtctcctaatatcagagatccctaagtccagctggctagttacagagttttttcagacttcctcgtttctcagctcttatatcctaagacaccagcatcatatgctctagaaatacaacctaattggcagtgagccgagatcgcaccactgcacccctgcctgggcgacagagtgagactttgtctctattacaaa

SEQ ID NO: 87335 - DNA, 2931 bp, Homo sapiens
atggagtcagggcagccggctcgacggattgccatggcgccgctgctggagtacgagcgacagctggtgctggaactgctcgacactgacgggctagtagtgtgcgcccgcgggctcggcgcggaccggctcctctaccactttctccagctgcactgccacccagcctgcctggtgctggtgctcaacacgcagccggccgaggaggagtattttatcaatcagctgaagatagaaggagttgaacacctccctcgccgtgtaacaaatgaaatcacaagcaacagtcgctatgaagtttacacacaaggtggtgttatatttgcgacaagtaggatacttgtggttgacttcttgactgatagaataccttcagatttaattactggcatcttggtgtatagagcccacagaataatcgagtcttgtcaagaagcattcatcttgcgcctctttcgccagaaaaacaaacgtggttttattaaagctttcacagacaatgctgttgcctttgatactggtttttgtcatgtggaaagagtgatgagaaatctttttgtgaggaaactgtatctgtggccaaggttccatgtagcagtaaactcatttttagaacagcacaaacctgaagttgtagaaatccatgtttctatgacacctaccatgcttgctatacagactgctatactggacattttaaatgcatgtctaaaggaactaaaatgccataacccatcgcttgaagtggaagatttatctttagaaaatgctattggaaaaccttttgacaagacaatccgccattatctggatcctttgtggcaccagcttggagccaagactaaatccttagttcaggatttgaagatattacgaactttgctgcagtatctctctcagtatgattgtgtcacatttcttaatcttctggaatctctgagagcaacggaaaaagcttttggtcagaattcaggttggctgtttcttgactccagcacctcgatgtttataaatgctcgagcaagggtttatcatcttccagatgccaaaatgagtaaaaaagaaaaaatatctgaaaaaatggaaattaaagaaggggaagaaacaaaaaaggaactggtcctagaaagcaacccaaagtgggaggcactgactgaagtattaaaagaaattgaggcagaaaataaggagagtgaagctcttggtggtccaggtcaagtactgatttgtgcaagtgatgaccgaacatgttcccagctgagagactatatcactcttggagcggaggccttcttattgaggctctacaggaaaacctttgagaaggatagcaaagctgaagaagtctggatgaaatttaggaaggaagacagttcaaagagaattaggaaatctcacaaaagacctaaagacccccaaaacaaagaacgggcttctaccaaagaaagaaccctcaaaaagaaaaaacggaagttgaccttaactcaaatggtaggaaaacctgaagaactggaagaggaaggagatgtcgaggaaggatatcgtcgagaaataagcagtagcccagaaagctgcccggaagaaattaagcatgaagaatttgatgtaaatttgtcatcggatgctgctttcggaatcctgaaagaacccctcactatcatccatccgcttctgggttgcagcgacccctatgctctgacaagggtactacatgaagtggagccaagatacgtggttctttatgacgcagagctaacctttgttcggcagcttgaaatttacagggcgagtaggcctgggaaacctctgagggtttactttcttatatacggaggttcaactgaggaacaacgctatctcactgctttgcggaaagaaaaggaagcttttgaaaaactcataagggaaaaagcaagcatggttgtccctgaagaaagagaaggcagagatgaaacaaacttagacctagtaagaggcacagcatctgcagatgtttccactgacactcggaaagccggtggccaggaacagaatggtacacagcaaagcatagttgtggatatgcgtgaatttcgaagtgagcttccatctctgatccatcgtcggggcattgacattgaacccgtgactttagaggttggagattacatcctcactccagaaatgtgcgtggagcgcaagagtatcagtgatttaatcggctctttaaataacggccgcctctacagccagtgcatctccatgtcccgctactacaagcctaccatttttaacagtccttgttatctagtgcaacataaataacagtcttaattgcacttatacccatgtcctgtggctctccaaatctggtctttgctgttgtgtctgctggacgcttgaactgatgtttgtgtaggaaatcatgttctgaccctttgtctacaaaggagccttctggaacactgagaagaaacatctctttgccattcctgaccagttctctctaccacattttcttcagctccatacttctgcctgtctgctctaaggaaatttcatggagccttcctactactaattcaagacagtctcctcaaaaactggttgactactcttctaatgaccctaacatatgtagcatatactataatttcattgttccaaattagtatttttaaagcaaaatgaattacctatttgcaaaagttaatgatgaaggagctcttagaattctcaatttttgcacatattcagtctcctaatatcagagatccctaagtccagctggctagttacagagttttttcagacttcctcgtttctcagctcttatatcctaagacaccagcatcatatgctctagaaatacaacctaattggcagtgagccgagatcgcaccactgcacccctgcctgggcgacagagtgagactttgtctctattacaaa

SEQ ID NO: 87336 - DNA, 2579 bp, Homo sapiens
cttacacctcagtagtactttcataagattaaatagtctggcttcaactttactgaaaagatttaagtaatcttgccagagaggagaaagcatttgatcaatacctaagaccctttttaaatagtttgtaaattgtggatctttaataccaaagggtaagatgtcttcccttcgggtgaaggaataagggggcacagggaaactaggaggacaagtgaggtaatagtaacataatgttgttttctattttcaggtcaagtactgatttgtgcaagtgatgaccgaacatgttcccagctgagagactatatcactcttggagcggaggccttcttattgaggctctacaggaaaacctttgagaaggatagcaaagctgaagaagtctggatgaaatttaggaaggaagacagttcaaagagaattaggaaatctcacaaaagacctaaagacccccaaaacaaagaacgggcttctaccaaagaaagaaccctcaaaaagaaaaaacggaagttgaccttaactcaaatggtaggaaaacctgaagaactggaagaggaaggagatgtcgaggaaggatatcgtcgagaaataagcagtagcccagaaagctgcccggaagaaattaagcatgaagaatttgatgtaaatttgtcatcggatgctgctttcggaatcctgaaagaacccctcactatcatccatccgcttctgggttgcagcgacccctatgctctgacaagggtactacatgaagtggagccaagatacgtggttctttatgacgcagagctaacctttgttcggcagcttgaaatttacagggcgagtaggcctgggaaacctctgagggtttactttcttatatacggaggttcaactgaggaacaacgctatctcactgctttgcggaaagaaaaggaagcttttgaaaaactcataagatctaccgtataagatatgagccaccttgaagacaggaattcttgcgtgatcacgattatatccaaagtacctagagcaccacgcaggaacactccataaatgtttttcaataaatgcatgaggaaaaagcaagcatggttgtccctgaagaaagagaaggcagagatgaaacaaacttagacctagtaagaggcacagcatctgcagatgtttccactgacactcggaaagccggtggccaggaacagaatggtacacagcaaagcatagttgtggatatgcgtgaatttcgaagtgagcttccatctctgatccatcgtcggggcattgacattgaacccgtgactttagaggttggagattacatcctcactccagaaatgtgcgtggagcgcaagagtatcagtgatttaatcggctctttaaataacggccgcctctacagccagtgcatctccatgtcccgctactacaagcgtcccgtgcttctgattgagtttgaccctagcaagcctttctctctcacttcccgaggtgccttgtttcaggagatctccagcaatgacattagttccaaactcactcttcttacacttcacttccccagactacggattctctggtgcccctctcctcatgcaacggcggagttgtttgaggagctgaaacaaagcaagccacagcctgatgcggcgacagcactggccattacagcagattctgaaacccttcccgagtcagagaagtataatcctggtccccaagacttcttgttaaaaatgccaggggtgaatgccaaaaactgccgctccttgatgcaccacgttaagaacatcgcagaattagcagccctgtcacaagacgagctcacgagtattctggggaatgctgcaaatgccaaacagctttatgatttcattcacacctcttttgcagggagggaaaagagcaggcacaagaaagctaccatttttaacagtccttgttatctagtgcaacataaataacagtcttaattgcacttatacccatgtcctgtggctctccaaatctggtctttgctgttgtgtctgctggacgcttgaactgatgtttgtgtaggaaatcatgttctgaccctttgtctacaaaggagccttctggaacactgagaagaaacatctctttgccattcctgaccagttctctctaccacattttcttcagctccatacttctgcctgtctgctctaaggaaatttcatggagccttcctactactaattcaagacagtctcctcaaaaactggttgactactcttctaatgaccctaacatatgtagcatatactataatttcattgttccaaattagtatttttaaagcaaaatgaattacctatttgcaaaagttaatgatgaaggagctcttagaattctcaatttttgcacatattcagtctcctaatatcagagatccctaagtccagctggctagttacagagttttttcagacttcctcgtttctcagctcttatatcctaagacaccagcatcatatgctctagaaatacaacctaattggcagtgagccgagatcgcaccactgcacccctgcctgggcgacagagtgagactttgtctctattacaaa

SEQ ID NO: 87337 - DNA, 2607 bp, Homo sapiens
ccttaagtagatctttttcaggaaagcagattccatctaacattataaagaaagcttaaataaatgggcatatgtactgatgctcgtgttatctgttgttttaaaagcctttggaagactttatgggtaaatattatcacatagaatgagatatttttatttctctacagaaacaaaaaaggaactggtcctagaaagcaacccaaagtgggaggcactgactgaagtattaaaagaaattgaggcagaaaataaggagagtgaagctcttggtggtccaggtcaagtactgatttgtgcaagtgatgaccgaacatgttcccagctgagagactatatcactcttggagcggaggccttcttattgaggctctacaggaaaacctttgagaaggatagcaaagctgaagaagtctggatgaaatttaggaaggaagacagttcaaagagaattaggaaatctcacaaaagacctaaagacccccaaaacaaagaacgggcttctaccaaagaaagaaccctcaaaaagaaaaaacggaagttgaccttaactcaaatggtaggaaaacctgaagaactggaagaggaaggagatgtcgaggaaggatatcgtcgagaaataagcagtagcccagaaagctgcccggaagaaattaagcatgaagaatttgatgtaaatttgtcatcggatgctgctttcggaatcctgaaagaacccctcactatcatccatccgcttctgggttgcagcgacccctatgctctgacaagggtactacatgaagtggagccaagatacgtggttctttatgacgcagagctaacctttgttcggcagcttgaaatttacagggcgagtaggcctgggaaacctctgagggtttactttcttatatacggaggttcaactgaggaacaacgctatctcactgctttgcggaaagaaaaggaagcttttgaaaaactcataagatctaccgtataagatatgagccaccttgaagacaggaattcttgcgtgatcacgattatatccaaagtacctagagcaccacgcaggaacactccataaatgtttttcaataaatgcatgaggaaaaagcaagcatggttgtccctgaagaaagagaaggcagagatgaaacaaacttagacctagtaagaggcacagcatctgcagatgtttccactgacactcggaaagccggtggccaggaacagaatggtacacagcaaagcatagttgtggatatgcgtgaatttcgaagtgagcttccatctctgatccatcgtcggggcattgacattgaacccgtgactttagaggttggagattacatcctcactccagaaatgtgcgtggagcgcaagagtatcagtgatttaatcggctctttaaataacggccgcctctacagccagtgcatctccatgtcccgctactacaagcgtcccgtgcttctgattgagtttgaccctagcaagcctttctctctcacttcccgaggtgccttgtttcaggagatctccagcaatgacattagttccaaactcactcttcttacacttcacttccccagactacggattctctggtgcccctctcctcatgcaacggcggagttgtttgaggagctgaaacaaagcaagccacagcctgatgcggcgacagcactggccattacagcagattctgaaacccttcccgagtcagagaagtataatcctggtccccaagacttcttgttaaaaatgccaggggtgaatgccaaaaactgccgctccttgatgcaccacgttaagaacatcgcagaattagcagccctgtcacaagacgagctcacgagtattctggggaatgctgcaaatgccaaacagctttatgatttcattcacacctcttttgcagggagggaaaagagcaggcacaagaaagctaccatttttaacagtccttgttatctagtgcaacataaataacagtcttaattgcacttatacccatgtcctgtggctctccaaatctggtctttgctgttgtgtctgctggacgcttgaactgatgtttgtgtaggaaatcatgttctgaccctttgtctacaaaggagccttctggaacactgagaagaaacatctctttgccattcctgaccagttctctctaccacattttcttcagctccatacttctgcctgtctgctctaaggaaatttcatggagccttcctactactaattcaagacagtctcctcaaaaactggttgactactcttctaatgaccctaacatatgtagcatatactataatttcattgttccaaattagtatttttaaagcaaaatgaattacctatttgcaaaagttaatgatgaaggagctcttagaattctcaatttttgcacatattcagtctcctaatatcagagatccctaagtccagctggctagttacagagttttttcagacttcctcgtttctcagctcttatatcctaagacaccagcatcatatgctctagaaatacaacctaattggcagtgagccgagatcgcaccactgcacccctgcctgggcgacagagtgagactttgtctctattacaaa

SEQ ID NO: 87338 - DNA, 473 bp, Homo sapiens
gctgtgttttaaatgacctccaattttattcttaaataacagcaaattcctattaacaacattgcaaatattaaaataacttgcttttacgccatcactggaaatgtcaacgcagtgaaaaaagtcaaataatgtcatggtattgttacgagaaaagttctgacatcacatagccctgaaaatatcttgggggcccctgggagttcacggaccacacccagaaaaccactggtccagctgaacagcgacagatcacagtagtgggaggcggtgtggttggtaggaagacaggatgacagccagttacgtatgtaggtcatgtgaccatcagagactgttttaaattaaccataaattgatggcactttttcttttaacttttcatattaggttggctgtttcttgactccagcacctcgatgtttataaatgctcgagcaagggtttatcatcttccagatgccaaaatgagt

SEQ ID NO: 87339 - DNA, 601 bp, Homo sapiens
gaaataagcagtagcccagaaagctgcccggaagaaattaagcatgaagaatttgatgtaaatttgtcatcggatgctgctttcggaatcctgaaagaacccctcactatcatccatccgcttctgggttgcagcgacccctatgctctgacaagggtactacatgaagtggagccaagatacgtggttctttatgacgcagagctaacctttgttcggcagcttgaaatttacagggcgagtaggcctgggaaacctctgaggcaagttataaagaatcacagctttcagttgcacagttctttaggatttaacccagaaactataccagttgcatgttagttttctttaatatccgttacgatgctgcttatgtttatgaaaccttattttgcttcctgatgaatctgggaagttggataggaaggatgtcaagtatcacagcagaacaacaaaccaaggggactgctcttgttctcgttacgtgctgctgtgcgttctctcctttattctttgggtattggtttgcatcgtatggggtactgtatctgaaaaagtctgggaaatgcataatattctaatttctaacaaaagttaatat

SEQ ID NO: 87340 - DNA, 3539 bp, Homo sapiens
atggagtcagggcagccggctcgacggattgccatggcgccgctgctggagtacgagcgacagctggtgctggaactgctcgacactgacgggctagtagtgtgcgcccgcgggctcggcgcggaccggctcctctaccactttctccagctgcactgccacccagcctgcctggtgctggtgctcaacacgcagccggccgaggaggagtattttatcaatcagctgaagatagaaggagttgaacacctccctcgccgtgtaacaaatgaaatcacaagcaacagtcgctatgaagtttacacacaaggtggtgttatatttgcgacaagtaggatacttgtggttgacttcttgactgatagaataccttcagatttaattactggcatcttggtgtatagagcccacagaataatcgagtcttgtcaagaagcattcatcttgcgcctctttcgccagaaaaacaaacgtggttttattaaagctttcacagacaatgctgttgcctttgatactggtttttgtcatgtggaaagagtgatgagaaatctttttgtgaggaaactgtatctgtggccaaggttccatgtagcagtaaactcatttttagaacagcacaaacctgaagttgtagaaatccatgtttctatgacacctaccatgcttgctatacagactgctatactggacattttaaatgcatgtctaaaggaactaaaatgccataacccatcgcttgaagtggaagatttatctttagaaaatgctattggaaaaccttttgacaagacaatccgccattatctggatcctttgtggcaccagcttggagccaagactaaatccttagttcaggatttgaagatattacgaactttgctgcagtatctctctcagtatgattgtgtcacatttcttaatcttctggaatctctgagagcaacggaaaaagcttttggtcagaattcaggttggctgtttcttgactccagcacctcgatgtttataaatgctcgagcaagggtttatcatcttccagatgccaaaatgagtaaaaaagaaaaaatatctgaaaaaatggaaattaaagaaggggaagaaacaaaaaaggaactggtcctagaaagcaacccaaagtgggaggcactgactgaagtattaaaagaaattgaggcagaaaataaggagagtgaagctcttggtggtccaggtcaagtactgatttgtgcaagtgatgaccgaacatgttcccagctgagagactatatcactcttggagcggaggccttcttattgaggctctacaggaaaacctttgagaaggatagcaaagctgaagaagtctggatgaaatttaggaaggaagacagttcaaagagaattaggaaatctcacaaaagacctaaagacccccaaaacaaagaacgggcttctaccaaagaaagaaccctcaaaaagaaaaaacggaagttgaccttaactcaaatggtaggaaaacctgaagaactggaagaggaaggagatgtcgaggaaggatatcgtcgagaaataagcagtagcccagaaagctgcccggaagaaattaagcatgaagaatttgatgtaaatttgtcatcggatgctgctttcggaatcctgaaagaacccctcactatcatccatccgcttctgggttgcagcgacccctatgctctgacaagggtactacatgaagtggagccaagatacgtggttctttatgacgcagagctaacctttgttcggcagcttgaaatttacagggcgagtaggcctgggaaacctctgagggtttactttcttatatacggaggttcaactgaggaacaacgctatctcactgctttgcggaaagaaaaggaagcttttgaaaaactcataagatctaccgtataagatatgagccaccttgaagacaggaattcttgcgtgatcacgattatatccaaagtacctagagcaccacgcaggaacactccataaatgtttttcaataaatgcatgaggaaaaagcaagcatggttgtccctgaagaaagagaaggcagagatgaaacaaacttagacctagtaagaggcacagcatctgcagatgtttccactgacactcggaaagccggtggccaggaacagaatggtacacagcaaagcatagttgtggatatgcgtgaatttcgaagtgagcttccatctctgatccatcgtcggggcattgacattgaacccgtgactttagaggttggagattacatcctcactccagaaatgtgcgtggagcgcaagagtatcagtgatttaatcggctctttaaataacggccgcctctacagccagtgcatctccatgtcccgctactacaagcgtcccgtgcttctgattgagtttgaccctagcaagcctttctctctcacttcccgaggtgccttgtttcaggagatctccagcaatgacattagttccaaactcactcttcttacacttcacttccccagactacggattctctggtgcccctctcctcatgcaacggcggagttgtttgaggagctgaaacaaagcaagccacagcctgatgcggcgacagcactggccattacagcagattctgaaacccttcccgagtcagagaagtataatcctggtccccaagacttcttgttaaaaatgccaggggtgaatgccaaaaactgccgctccttgatgcaccacgttaagaacatcgcagaattagcagccctgtcacaagacgagctcacgagtattctggggaatgctgcaaatgccaaacagctttatgatttcattcacacctcttttgcagggagggaaaagagcaggcacaagaaagctaccatttttaacagtccttgttatctagtgcaacataaataacagtcttaattgcacttatacccatgtcctgtggctctccaaatctggtctttgctgttgtgtctgctggacgcttgaactgatgtttgtgtaggaaatcatgttctgaccctttgtctacaaaggagccttctggaacactgagaagaaacatctctttgccattcctgaccagttctctctaccacattttcttcagctccatacttctgcctgtctgctctaaggaaatttcatggagccttcctactactaattcaagacagtctcctcaaaaactggttgactactcttctaatgaccctaacatatgtagcatatactataatttcattgttccaaattagtatttttaaagcaaaatgaattacctatttgcaaaagttaatgatgaaggagctcttagaattctcaatttttgcacatattcagtctcctaatatcagagatccctaagtccagctggctagttacagagttttttcagacttcctcgtttctcagctcttatatcctaagacaccagcatcatatgctctagaaatacaacctaattggcagtgagccgagatcgcaccactgcacccctgcctgggcgacagagtgagactttgtctctattacaaa

SEQ ID NO: 87341 - DNA, 2839 bp, Homo sapiens
cacaggaaataatccttttgaaagtatgatttgtattaagaataactatacttaacatattttagcaataccaaattttattcttgttttagacaatccgccattatctggatcctttgtggcaccagcttggagccaagactaaatccttagttcaggatttgaagatattacgaactttgctgcagtatctctctcagtatgattgtgtcacatttcttaatcttctggaatctctgagagcaacggaaaaagcttttggtcagaattcaggttggctgtttcttgactccagcacctcgatgtttataaatgctcgagcaagggtttatcatcttccagatgccaaaatgagtaaaaaagaaaaaatatctgaaaaaatggaaattaaagaaggggaagaaacaaaaaaggaactggtcctagaaagcaacccaaagtgggaggcactgactgaagtattaaaagaaattgaggcagaaaataaggagagtgaagctcttggtggtccaggtcaagtactgatttgtgcaagtgatgaccgaacatgttcccagctgagagactatatcactcttggagcggaggccttcttattgaggctctacaggaaaacctttgagaaggatagcaaagctgaagaagtctggatgaaatttaggaaggaagacagttcaaagagaattaggaaatctcacaaaagacctaaagacccccaaaacaaagaacgggcttctaccaaagaaagaaccctcaaaaagaaaaaacggaagttgaccttaactcaaatggtaggaaaacctgaagaactggaagaggaaggagatgtcgaggaaggatatcgtcgagaaataagcagtagcccagaaagctgcccggaagaaattaagcatgaagaatttgatgtaaatttgtcatcggatgctgctttcggaatcctgaaagaacccctcactatcatccatccgcttctgggttgcagcgacccctatgctctgacaagggtactacatgaagtggagccaagatacgtggttctttatgacgcagagctaacctttgttcggcagcttgaaatttacagggcgagtaggcctgggaaacctctgagggtttactttcttatatacggaggttcaactgaggaacaacgctatctcactgctttgcggaaagaaaaggaagcttttgaaaaactcataagatctaccgtataagatatgagccaccttgaagacaggaattcttgcgtgatcacgattatatccaaagtacctagagcaccacgcaggaacactccataaatgtttttcaataaatgcatgaggaaaaagcaagcatggttgtccctgaagaaagagaaggcagagatgaaacaaacttagacctagtaagaggcacagcatctgcagatgtttccactgacactcggaaagccggtggccaggaacagaatggtacacagcaaagcatagttgtggatatgcgtgaatttcgaagtgagcttccatctctgatccatcgtcggggcattgacattgaacccgtgactttagaggttggagattacatcctcactccagaaatgtgcgtggagcgcaagagtatcagtgatttaatcggctctttaaataacggccgcctctacagccagtgcatctccatgtcccgctactacaagcgtcccgtgcttctgattgagtttgaccctagcaagcctttctctctcacttcccgaggtgccttgtttcaggagatctccagcaatgacattagttccaaactcactcttcttacacttcacttccccagactacggattctctggtgcccctctcctcatgcaacggcggagttgtttgaggagctgaaacaaagcaagccacagcctgatgcggcgacagcactggccattacagcagattctgaaacccttcccgagtcagagaagtataatcctggtccccaagacttcttgttaaaaatgccaggggtgaatgccaaaaactgccgctccttgatgcaccacgttaagaacatcgcagaattagcagccctgtcacaagacgagctcacgagtattctggggaatgctgcaaatgccaaacagctttatgatttcattcacacctcttttgcagggagggaaaagagcaggcacaagaaagctaccatttttaacagtccttgttatctagtgcaacataaataacagtcttaattgcacttatacccatgtcctgtggctctccaaatctggtctttgctgttgtgtctgctggacgcttgaactgatgtttgtgtaggaaatcatgttctgaccctttgtctacaaaggagccttctggaacactgagaagaaacatctctttgccattcctgaccagttctctctaccacattttcttcagctccatacttctgcctgtctgctctaaggaaatttcatggagccttcctactactaattcaagacagtctcctcaaaaactggttgactactcttctaatgaccctaacatatgtagcatatactataatttcattgttccaaattagtatttttaaagcaaaatgaattacctatttgcaaaagttaatgatgaaggagctcttagaattctcaatttttgcacatattcagtctcctaatatcagagatccctaagtccagctggctagttacagagttttttcagacttcctcgtttctcagctcttatatcctaagacaccagcatcatatgctctagaaatacaacctaattggcagtgagccgagatcgcaccactgcacccctgcctgggcgacagagtgagactttgtctctattacaaa

SEQ ID NO: 87342 - DNA, 2983 bp, Homo sapiens
atggagtcagggcagccggctcgacggattgccatggcgccgctgctggagtacgagcgacagctggtgctggaactgctcgacactgacgggctagtagtgtgcgcccgcgggctcggcgcggaccggctcctctaccactttctccagctgcactgccacccagcctgcctggtgctggtgctcaacacgcagccggccgaggaggagtattttatcaatcagctgaagatagaaggagttgaacacctccctcgccgtgtaacaaatgaaatcacaagcaacagtcgctatgaagtttacacacaaggtggtgttatatttgcgacaagtaggatacttgtggttgacttcttgactgatagaataccttcagatttaattactggcatcttggtgtatagagcccacagaataatcgagtcttgtcaagaagcattcatcttgcgcctctttcgccagaaaaacaaacgtggttttattaaagctttcacagacaatgctgttgcctttgatactggtttttgtcatgtggaaagagtgatgagaaatctttttgtgaggaaactgtatctgtggccaaggttccatgtagcagtaaactcatttttagaacagcacaaacctgaagttgtagaaatccatgtttctatgacacctaccatgcttgctatacagactgctatactggacattttaaatgcatgtctaaaggaactaaaatgccataacccatcgcttgaagtggaagatttatctttagaaaatgctattggaaaaccttttgacaagacaatccgccattatctggatcctttgtggcaccagcttggagccaagactaaatccttagttcaggatttgaagatattacgaactttgctgcagtatctctctcagtatgattgtgtcacatttcttaatcttctggaatcttaggaaaacctgaagaactggaagaggaaggagatgtcgaggaaggatatcgtcgagaaataagcagtagcccagaaagctgcccggaagaaattaagcatgaagaatttgatgtaaatttgtcatcggatgctgctttcggaatcctgaaagaacccctcactatcatccatccgcttctgggttgcagcgacccctatgctctgacaagggtactacatgaagtggagccaagatacgtggttctttatgacgcagagctaacctttgttcggcagcttgaaatttacagggcgagtaggcctgggaaacctctgagggtttactttcttatatacggaggttcaactgaggaacaacgctatctcactgctttgcggaaagaaaaggaagcttttgaaaaactcataagatctaccgtataagatatgagccaccttgaagacaggaattcttgcgtgatcacgattatatccaaagtacctagagcaccacgcaggaacactccataaatgtttttcaataaatgcatgaggaaaaagcaagcatggttgtccctgaagaaagagaaggcagagatgaaacaaacttagacctagtaagaggcacagcatctgcagatgtttccactgacactcggaaagccggtggccaggaacagaatggtacacagcaaagcatagttgtggatatgcgtgaatttcgaagtgagcttccatctctgatccatcgtcggggcattgacattgaacccgtgactttagaggttggagattacatcctcactccagaaatgtgcgtggagcgcaagagtatcagtgatttaatcggctctttaaataacggccgcctctacagccagtgcatctccatgtcccgctactacaagcgtcccgtgcttctgattgagtttgaccctagcaagcctttctctctcacttcccgaggtgccttgtttcaggagatctccagcaatgacattagttccaaactcactcttcttacacttcacttccccagactacggattctctggtgcccctctcctcatgcaacggcggagttgtttgaggagctgaaacaaagcaagccacagcctgatgcggcgacagcactggccattacagcagattctgaaacccttcccgagtcagagaagtataatcctggtccccaagacttcttgttaaaaatgccaggggtgaatgccaaaaactgccgctccttgatgcaccacgttaagaacatcgcagaattagcagccctgtcacaagacgagctcacgagtattctggggaatgctgcaaatgccaaacagctttatgatttcattcacacctcttttgcagggagggaaaagagcaggcacaagaaagctaccatttttaacagtccttgttatctagtgcaacataaataacagtcttaattgcacttatacccatgtcctgtggctctccaaatctggtctttgctgttgtgtctgctggacgcttgaactgatgtttgtgtaggaaatcatgttctgaccctttgtctacaaaggagccttctggaacactgagaagaaacatctctttgccattcctgaccagttctctctaccacattttcttcagctccatacttctgcctgtctgctctaaggaaatttcatggagccttcctactactaattcaagacagtctcctcaaaaactggttgactactcttctaatgaccctaacatatgtagcatatactataatttcattgttccaaattagtatttttaaagcaaaatgaattacctatttgcaaaagttaatgatgaaggagctcttagaattctcaatttttgcacatattcagtctcctaatatcagagatccctaagtccagctggctagttacagagttttttcagacttcctcgtttctcagctcttatatcctaagacaccagcatcatatgctctagaaatacaacctaattggcagtgagccgagatcgcaccactgcacccctgcctgggcgacagagtgagactttgtctctattacaaa

SEQ ID NO: 87343 - DNA, 2283 bp, Homo sapiens
cacaggaaataatccttttgaaagtatgatttgtattaagaataactatacttaacatattttagcaataccaaattttattcttgttttagacaatccgccattatctggatcctttgtggcaccagcttggagccaagactaaatccttagttcaggatttgaagatattacgaactttgctgcagtatctctctcagtatgattgtgtcacatttcttaatcttctggaatcttaggaaaacctgaagaactggaagaggaaggagatgtcgaggaaggatatcgtcgagaaataagcagtagcccagaaagctgcccggaagaaattaagcatgaagaatttgatgtaaatttgtcatcggatgctgctttcggaatcctgaaagaacccctcactatcatccatccgcttctgggttgcagcgacccctatgctctgacaagggtactacatgaagtggagccaagatacgtggttctttatgacgcagagctaacctttgttcggcagcttgaaatttacagggcgagtaggcctgggaaacctctgagggtttactttcttatatacggaggttcaactgaggaacaacgctatctcactgctttgcggaaagaaaaggaagcttttgaaaaactcataagatctaccgtataagatatgagccaccttgaagacaggaattcttgcgtgatcacgattatatccaaagtacctagagcaccacgcaggaacactccataaatgtttttcaataaatgcatgaggaaaaagcaagcatggttgtccctgaagaaagagaaggcagagatgaaacaaacttagacctagtaagaggcacagcatctgcagatgtttccactgacactcggaaagccggtggccaggaacagaatggtacacagcaaagcatagttgtggatatgcgtgaatttcgaagtgagcttccatctctgatccatcgtcggggcattgacattgaacccgtgactttagaggttggagattacatcctcactccagaaatgtgcgtggagcgcaagagtatcagtgatttaatcggctctttaaataacggccgcctctacagccagtgcatctccatgtcccgctactacaagcgtcccgtgcttctgattgagtttgaccctagcaagcctttctctctcacttcccgaggtgccttgtttcaggagatctccagcaatgacattagttccaaactcactcttcttacacttcacttccccagactacggattctctggtgcccctctcctcatgcaacggcggagttgtttgaggagctgaaacaaagcaagccacagcctgatgcggcgacagcactggccattacagcagattctgaaacccttcccgagtcagagaagtataatcctggtccccaagacttcttgttaaaaatgccaggggtgaatgccaaaaactgccgctccttgatgcaccacgttaagaacatcgcagaattagcagccctgtcacaagacgagctcacgagtattctggggaatgctgcaaatgccaaacagctttatgatttcattcacacctcttttgcagggagggaaaagagcaggcacaagaaagctaccatttttaacagtccttgttatctagtgcaacataaataacagtcttaattgcacttatacccatgtcctgtggctctccaaatctggtctttgctgttgtgtctgctggacgcttgaactgatgtttgtgtaggaaatcatgttctgaccctttgtctacaaaggagccttctggaacactgagaagaaacatctctttgccattcctgaccagttctctctaccacattttcttcagctccatacttctgcctgtctgctctaaggaaatttcatggagccttcctactactaattcaagacagtctcctcaaaaactggttgactactcttctaatgaccctaacatatgtagcatatactataatttcattgttccaaattagtatttttaaagcaaaatgaattacctatttgcaaaagttaatgatgaaggagctcttagaattctcaatttttgcacatattcagtctcctaatatcagagatccctaagtccagctggctagttacagagttttttcagacttcctcgtttctcagctcttatatcctaagacaccagcatcatatgctctagaaatacaacctaattggcagtgagccgagatcgcaccactgcacccctgcctgggcgacagagtgagactttgtctctattacaaa

SEQ ID NO: 87344 - DNA, 372 bp, Homo sapiens
gcttctctttcctatagtgaaaagagtactgcttctgagatgggcagaggacacaaggatgagtcaagacaaaggggaatttagaaaaaaaagacagtatgagatttcccacccaatagcctctgtgttttcactaaagaagcaggattagctgctgagagtaagagggtacaatagaagtttgggatacatttattttttcctattaattcacaatagcatttcttcagtgatgcaaaaacctgtgaggaagagcaaaaggaaggaaagacatgtcctgccagtcactttcactttgtgccttgcatcttgagaaatctagggtgagaatagcactgaaatacccacaggacctcaagacagaagcagggt

SEQ ID NO: 87345 - DNA, 477 bp, Homo sapiens
gccaatcttatcattaccctaatatgactgcctgagacatttcagctgggtaatgataaaagaacaaggcagaactaatgtgaacaaacttcttgagtttctggctttctttgcaatgtgtcttcctaaggaagggactttagtaataatgtagtcttccctcttcccgaagaggcccatgtgtaagcatctcagacctataggctcatcagctattaataaagctaacactattattccccagattctcttcgaatctcccttgcaaataaccaaggagataaagcttctttttgcttgagagttggaaccaaagctgcaaacctaccttaggaacactgtgtacagagccactaggcaaggaatggcagagaagtttcacatggtgtgcctgctctgacgggtaggatgtagacagctgtgttgggaagggggttgtgttcagaccaggattgaatggcagtgtctgccatggcc

SEQ ID NO: 87346 - DNA, 392 bp, Homo sapiens
ggaatcagcattcctcactttccacctagccaaatactcagggactgcgtcctctcctaaggcatcttcccagagttctcccttggactcttggcataatttctctaccaggggagccctaggtttccatggaaatatcctgtgaccaaccacaggagacagagagggaagagaaagaggagattcatgttcttagtcatatttgcacccttccaacacctaacgctttgctgggtgttttgctaactgtaaataggcatattctagtaccaaagccaaagtacttcaggaacaaatacagaacgaagtaacatcagaagtgtcttaactaagaaatgtcatacttcttcatcagactcttcatctttagttcaaatgtctagtgttaaaat

SEQ ID NO: 87347 - DNA, 832 bp, Homo sapiens
caggcttcgaaaggcccagagcagggacagggcatctatgcagggccactttccaccagcaaagctcagaacggaatcagcaagagtaggtgggagggagggtggctgggggctgtccaggtgaggggctgcagggatggagggaagcattatcaaggggggaggctaattcacctcccaccaaaaacccagcatcgggccagccacagtgctggccacgcaaatatccacgaggtagcctccacctccaccagtaagcccttgactcctgggagctgctcagggactccagctcctggaggttacacggattcccaagctgggaacccctgaattattttaggggatctctcatcccgtatgtgcagccaacactgctggtagaccaaacaaatactatgtttcacacgtgaacatctttcaaaccaaaatagaagctgctttgataaataaaattcacagactccaaagttatctaaaaattggttcttaacagcttcctgtcatcctgtagtttttcaatcttggatattaacccttgtgtgtggggttaatatggcatgggggcagggggtgtctcataatttctgatgataaacaggtctcttccctttacttgaaaagcccgggagtgcaaatggagttcccatacttcacggtgtgggggaaggatcagaggatgaggcctgtactgctggacctcgggtggagaccgcagcccagggctccctgctctgcagggctctggaagatgaggggatctgggggcccagagccaggcaccccagtgttactggcctgcctgcccccagcagaccagcagtcctccaag

SEQ ID NO: 87348 - DNA, 403 bp, Homo sapiens
tgaagaactctccacgttgaagtctgtcctctgctttttctacaggggattttctgtcccatgaaaccctagtcataggttgcctcccagaaacagtgatactttgagccagctgcacaactggtctttagctgtatttgatcagtaaagcacttaaaatttgtattacttttaagtcctggcaaactacagacaaatgttttaaacatgtaaaatatctatattcctctcatagtttcatctggaaggctattcttgaggtggtgtggtctagttggtaaaatgatgggttcagaggtaagaatccatggctcttcactaaatagctgtgtgggtttgggcaacttggttaaccactccacacctgtttttcccatctgtgaaatgaaggggttgaccagat

SEQ ID NO: 87349 - DNA, 2765 bp, Homo sapiens
agctcactggggcttccttccgtctcgctcggagtttccctctgcgttcgctccgcgctgctggaggctgtcgtcccaatgctccccaaacggcggcgagcgcgggtcgggtcccctagcggcgatgccgcttcctccacgccgccctcgacgcgcttcccgggagtcgccatctacctggtcgagcctcgcatgggtcgcagccgccgggccttcctcacaggcctggcgcgctccaaaggcttccgcgtccttgacgcctgcagctccgaagcgacacatgttgtgatggaagagacctcagcagaggaggccgtcagctggcaggagcgcaggatggcagctgctcccccgggttgcacccccccagctctgctggacataagctggttaacagagagcctgggagctgggcagcctgtacctgtggagtgccggcaccgcctggaggtggctgggccaaggaaggggcctctgagcccagcatggatgcctgcctatgcctgccagcgccctacgcccctcacacaccacaacactggcctctccgaggctctggagatactggccgaggcagcaggctttgaaggcagtgagggccgcctcctcaccttctgcagagcagcctcggtgctcaaggcccttcccagccctgtcacaaccctgagccagctgcaggggcttccccactttggagaacactcctctagggttgtccaggagctgctggagcatggagtgtgtgaggaggtggagagagttcggcgctcagagaggtaccagaccatgaagctcttcacccagatcttcggggtcggtgtgaagactgctgaccggtggtaccgggaaggactgcgaaccttagatgacctccgagagcagccccagaaactaacccaacagcagaaagcggggctccagcaccaccaggacctgagcaccccagtcctgcggtccgatgtagatgccctgcagcaggtggtggaggaagctgtggggcaggccctgcctggggccaccgtcacgctgaccggcggcttccgcaggtaagaaggcccgacgtgcccctctggcttggcttcagacccctccccagtgaagggacctgagtcggggaccctgaagcgggcccactcgttggaagggatgtggcctggggctggagtgagcaggccgtgtccctgagtcagagtcagactgacgccctcagggggaagttgcagggccatgacgtggacttcctcatcacccaccccaaggagggtcaggaggcggggctgctgcctagagtgatgtgccgcctgcaggaccagggcctcatcctgtaccaccagcaccagcacagctgctgtgagtcccctacccgcctggcccaacagagccacatggacgcttttgagagaagtttctgcattttccgcctaccacaacctccaggggctgctgtggggggatccacgaggccctgcccatcctggaaggccgtgagagtggacttggtagttgcacccgtcagccagttccctttcgccctgctcggttggactggctccaagcttttccagcgggagctgcgccgcttcagccggaaggagaagggcctgtggctgaacagccatgggctgtttgacccggagcagaagacatttttccaagcggcttcagaggaagacatcttcagacacctgggccttgagtaccttcctccagagcagagaaacgcctgagcctgcctgtgtcccccacttccactcaggaaattgggctgcccccaacctggccactgaatgtctccaggcagatatgctgccccctgacccccaccttcacccctccccgccaaggcctggctcttccggaggtcaattgtgcctgcaggatcagttgagcccctgctggtgtgctgcagggtgtgatgaggtgggagccctcagtgccagcctcatcactgtgtgaccctgggtctgctcttagcctccccatggctcacgttcctgccctggatgggatgtgagtggggcccacatcgtggagctgtggtggggcctgcagtcatgaatggcaagtggtccctgatgtgcagtgtctcattagttgcactgcagttaactgtggctcctgcagggcaccctgcccagaatgcccagaagagaaccatgcatacctgcactgcatttgagagccatgagctggaggctgtggttcgtgccagcaaggagcctactgtctggtgtgctgtaggcatctggagagggagagggcctgggtaggagctgggaggaagataattttcaactatggggcttcagtactgcagcgccccgagccaggctctgtgcttctgcctttaaggcctgttctcagcacaatgtctcaaaaataggtcatatcctgccactcccgtcgcagagccctttaatggttccaaaccctaagtccacacatagcccctggctctggcatctctccagccccactggccccgagctgcttgactcaccggcttcctatttgatgcacccaggcccccttgtggccaactccctccccttctcactgaggcagaagcactgaggtgggctggacatgggtgccctccacgtccctcatatccccaggcacactctggcctcaggttttgccctggccatgtcatctacctggagtgggccctccccttcttcaggccttgaatcaaaagccactttgttaggcgaggatttcccagaccactcatcacattaaaaaatattttgaaaacatgc

SEQ ID NO: 87350 - DNA, 2818 bp, Homo sapiens
agctcactggggcttccttccgtctcgctcggagtttccctctgcgttcgctccgcgctgctggaggctgtcgtcccaatgctccccaaacggcggcgagcgcgggtcgggtcccctagcggcgatgccgcttcctccacgccgccctcgacgcgcttcccgggagtcgccatctacctggtcgagcctcgcatgggtcgcagccgccgggccttcctcacaggcctggcgcgctccaaaggcttccgcgtccttgacgcctgcagctccgaagcgacacatgttgtgatggaagagacctcagcagaggaggccgtcagctggcaggagcgcaggatggcagctgctcccccgggttgcacccccccagctctgctggacataagctggttaacagagagcctgggagctgggcagcctgtacctgtggagtgccggcaccgcctggaggtggctgggccaaggaaggggcctctgagcccagcatggatgcctgcctatgcctgccagcgccctacgcccctcacacaccacaacactggcctctccgaggctctggagatactggccgaggcagcaggctttgaaggcagtgagggccgcctcctcaccttctgcagagcagcctcggtgctcaaggcccttcccagccctgtcacaaccctgagccagctgcaggggcttccccactttggagaacactcctctagggttgtccaggagctgctggagcatggagtgtgtgaggaggtggagagagttcggcgctcagagaggtaccagaccatgaagctcttcacccagatcttcggggtcggtgtgaagactgctgaccggtggtaccgggaaggactgcgaaccttagatgacctccgagagcagccccagaaactaacccaacagcagaaagcggggctccagcaccaccaggacctgagcaccccagtcctgcggtccgatgtagatgccctgcagcaggtggtggaggaagctgtggggcaggccctgcctggggccaccgtcacgctgaccggcggcttccgcaggtaagaaggcccgacgtgcccctctggcttggcttcagacccctccccagtgaagggacctgagtcggggaccctgaagcgggcccactcgttggaagggatgtggcctggggctggagtgagcaggccgtgtccctgagtcagagtcagactgacgccctcagggggaagttgcagggccatgacgtggacttcctcatcacccaccccaaggagggtcaggaggcggggctgctgcctagagtgatgtgccgcctgcaggaccagggcctcatcctgtaccaccagcaccagcacagctgctgtgagtcccctacccgcctggcccaacagagccacatggacgcttttgagagaagtttctgcattttccgcctaccacaacctccaggggctgctgtggggggatccacgaggccctgcccatcctggaaggccgtgagagtggacttggtagttgcacccgtcagccagttccctttcgccctgctcggttggactggctccaagcttttccagcgggagctgcgccgcttcagccggaaggagaagggcctgtggctgaacagccatgggctgtttgacccggagcagggaagcagcagtggcaagactcctaggtcacggaagtcctgcttctgttgcagaagacatttttccaagcggcttcagaggaagacatcttcagacacctgggccttgagtaccttcctccagagcagagaaacgcctgagcctgcctgtgtcccccacttccactcaggaaattgggctgcccccaacctggccactgaatgtctccaggcagatatgctgccccctgacccccaccttcacccctccccgccaaggcctggctcttccggaggtcaattgtgcctgcaggatcagttgagcccctgctggtgtgctgcagggtgtgatgaggtgggagccctcagtgccagcctcatcactgtgtgaccctgggtctgctcttagcctccccatggctcacgttcctgccctggatgggatgtgagtggggcccacatcgtggagctgtggtggggcctgcagtcatgaatggcaagtggtccctgatgtgcagtgtctcattagttgcactgcagttaactgtggctcctgcagggcaccctgcccagaatgcccagaagagaaccatgcatacctgcactgcatttgagagccatgagctggaggctgtggttcgtgccagcaaggagcctactgtctggtgtgctgtaggcatctggagagggagagggcctgggtaggagctgggaggaagataattttcaactatggggcttcagtactgcagcgccccgagccaggctctgtgcttctgcctttaaggcctgttctcagcacaatgtctcaaaaataggtcatatcctgccactcccgtcgcagagccctttaatggttccaaaccctaagtccacacatagcccctggctctggcatctctccagccccactggccccgagctgcttgactcaccggcttcctatttgatgcacccaggcccccttgtggccaactccctccccttctcactgaggcagaagcactgaggtgggctggacatgggtgccctccacgtccctcatatccccaggcacactctggcctcaggttttgccctggccatgtcatctacctggagtgggccctccccttcttcaggccttgaatcaaaagccactttgttaggcgaggatttcccagaccactcatcacattaaaaaatattttgaaaacatgc

SEQ ID NO: 87351 - DNA, 2872 bp, Homo sapiens
agctcactggggcttccttccgtctcgctcggagtttccctctgcgttcgctccgcgctgctggaggctgtcgtcccaatgctccccaaacggcggcgagcgcgggtcgggtcccctagcggcgatgccgcttcctccacgccgccctcgacgcgcttcccgggagtcgccatctacctggtcgagcctcgcatgggtcgcagccgccgggccttcctcacaggcctggcgcgctccaaaggcttccgcgtccttgacgcctgcagctccgaagcgacacatgttgtgatggaagagacctcagcagaggaggccgtcagctggcaggagcgcaggatggcagctgctcccccgggttgcacccccccagctctgctggacataagctggttaacagagagcctgggagctgggcagcctgtacctgtggagtgccggcaccgcctggaggcctttcttcctcaccaagtagatgacacagcaactccgagcgggatgacccatgggttagcaggagcctgtcctctggatgctataaggctcccggcctctgacaggtggctgggccaaggaaggggcctctgagcccagcatggatgcctgcctatgcctgccagcgccctacgcccctcacacaccacaacactggcctctccgaggctctggagatactggccgaggcagcaggctttgaaggcagtgagggccgcctcctcaccttctgcagagcagcctcggtgctcaaggcccttcccagccctgtcacaaccctgagccagctgcaggggcttccccactttggagaacactcctctagggttgtccaggagctgctggagcatggagtgtgtgaggaggtggagagagttcggcgctcagagaggtaccagaccatgaagctcttcacccagatcttcggggtcggtgtgaagactgctgaccggtggtaccgggaaggactgcgaaccttagatgacctccgagagcagccccagaaactaacccaacagcagaaagcggggctccagcaccaccaggacctgagcaccccagtcctgcggtccgatgtagatgccctgcagcaggtggtggaggaagctgtggggcaggccctgcctggggccaccgtcacgctgaccggcggcttccgcaggtaagaaggcccgacgtgcccctctggcttggcttcagacccctccccagtgaagggacctgagtcggggaccctgaagcgggcccactcgttggaagggatgtggcctggggctggagtgagcaggccgtgtccctgagtcagagtcagactgacgccctcagggggaagttgcagggccatgacgtggacttcctcatcacccaccccaaggagggtcaggaggcggggctgctgcctagagtgatgtgccgcctgcaggaccagggcctcatcctgtaccaccagcaccagcacagctgctgtgagtcccctacccgcctggcccaacagagccacatggacgcttttgagagaagtttctgcattttccgcctaccacaacctccaggggctgctgtggggggatccacgaggccctgcccatcctggaaggccgtgagagtggacttggtagttgcacccgtcagccagttccctttcgccctgctcggttggactggctccaagcttttccagcgggagctgcgccgcttcagccggaaggagaagggcctgtggctgaacagccatgggctgtttgacccggagcagaagacatttttccaagcggcttcagaggaagacatcttcagacacctgggccttgagtaccttcctccagagcagagaaacgcctgagcctgcctgtgtcccccacttccactcaggaaattgggctgcccccaacctggccactgaatgtctccaggcagatatgctgccccctgacccccaccttcacccctccccgccaaggcctggctcttccggaggtcaattgtgcctgcaggatcagttgagcccctgctggtgtgctgcagggtgtgatgaggtgggagccctcagtgccagcctcatcactgtgtgaccctgggtctgctcttagcctccccatggctcacgttcctgccctggatgggatgtgagtggggcccacatcgtggagctgtggtggggcctgcagtcatgaatggcaagtggtccctgatgtgcagtgtctcattagttgcactgcagttaactgtggctcctgcagggcaccctgcccagaatgcccagaagagaaccatgcatacctgcactgcatttgagagccatgagctggaggctgtggttcgtgccagcaaggagcctactgtctggtgtgctgtaggcatctggagagggagagggcctgggtaggagctgggaggaagataattttcaactatggggcttcagtactgcagcgccccgagccaggctctgtgcttctgcctttaaggcctgttctcagcacaatgtctcaaaaataggtcatatcctgccactcccgtcgcagagccctttaatggttccaaaccctaagtccacacatagcccctggctctggcatctctccagccccactggccccgagctgcttgactcaccggcttcctatttgatgcacccaggcccccttgtggccaactccctccccttctcactgaggcagaagcactgaggtgggctggacatgggtgccctccacgtccctcatatccccaggcacactctggcctcaggttttgccctggccatgtcatctacctggagtgggccctccccttcttcaggccttgaatcaaaagccactttgttaggcgaggatttcccagaccactcatcacattaaaaaatattttgaaaacatgc

SEQ ID NO: 87352 - DNA, 1756 bp, Homo sapiens
aggctggtacggtccgaagtgttatatgcctagagtgatgtgccgcctgcaggaccaggcctcatcctgtaccaccagcaccagcacagctgctgtgagtcccctacccgcctggcccaacagagccacatggacgcttttgagagaagtttctgcattttccgcctaccacaacctccaggggctgctgtggggggatccacgaggccctgcccatcctggaaggccgtgagagtggacttggtagttgcacccgtcagccagttccctttcgccctgctcggttggactggctccaagcttttccagcgggagctgcgccgcttcagccggaaggagaagggcctgtggctgaacagccatgggctgtttgacccggagcaggtacattgttggggactggggacagcaaacagcacccatagtccgctccctgacccacaatctgaaatggccccagacccctccagcctgaaacccataggacccgaatctgggtctccacacacagttcctggccctcaagagcacaccccacctcggcgctgggctcttccccaccctcagtcttcctgcagggaagcagcagtggcaagactcctaggtcacggaagtcctgcttctgttgcagaagacatttttccaagcggcttcagaggaagacatcttcagacacctgggccttgagtaccttcctccagagcagagaaacgcctgagcctgcctgtgtcccccacttccactcaggaaattgggctgcccccaacctggccactgaatgtctccaggcagatatgctgccccctgacccccaccttcacccctccccgccaaggcctggctcttccggaggtcaattgtgcctgcaggatcagttgagcccctgctggtgtgctgcagggtgtgatgaggtgggagccctcagtgccagcctcatcactgtgtgaccctgggtctgctcttagcctccccatggctcacgttcctgccctggatgggatgtgagtggggcccacatcgtggagctgtggtggggcctgcagtcatgaatggcaagtggtccctgatgtgcagtgtctcattagttgcactgcagttaactgtggctcctgcagggcaccctgcccagaatgcccagaagagaaccatgcatacctgcactgcatttgagagccatgagctggaggctgtggttcgtgccagcaaggagcctactgtctggtgtgctgtaggcatctggagagggagagggcctgggtaggagctgggaggaagataattttcaactatggggcttcagtactgcagcgccccgagccaggctctgtgcttctgcctttaaggcctgttctcagcacaatgtctcaaaaataggtcatatcctgccactcccgtcgcagagccctttaatggttccaaaccctaagtccacacatagcccctggctctggcatctctccagccccactggccccgagctgcttgactcaccggcttcctatttgatgcacccaggcccccttgtggccaactccctccccttctcactgaggcagaagcactgaggtgggctggacatgggtgccctccacgtccctcatatccccaggcacactctggcctcaggttttgccctggccatgtcatctacctggagtgggccctccccttcttcaggccttgaatcaaaagccactttgttaggcgaggatttcccagaccactcatcacattaaaaaatattttgaaaacatgc

SEQ ID NO: 87353 - DNA, 1763 bp, Homo sapiens
gccactgcctcctgctctctccacaccaccggatggtctcagccacgcccgcctctccccacagggcctcatcctgtaccaccagcaccagcacagctgctgtgagtcccctacccgcctggcccaacagagccacatggacgcttttgagagaagtttctgcattttccgcctaccacaacctccaggggctgctgtggggggatccacgaggccctgcccatcctggaaggccgtgagagtggacttggtagttgcacccgtcagccagttccctttcgccctgctcggttggactggctccaagcttttccagcgggagctgcgccgcttcagccggaaggagaagggcctgtggctgaacagccatgggctgtttgacccggagcaggtacattgttggggactggggacagcaaacagcacccatagtccgctccctgacccacaatctgaaatggccccagacccctccagcctgaaacccataggacccgaatctgggtctccacacacagttcctggccctcaagagcacaccccacctcggcgctgggctcttccccaccctcagtcttcctgcagggaagcagcagtggcaagactcctaggtcacggaagtcctgcttctgttgcagaagacatttttccaagcggcttcagaggaagacatcttcagacacctgggccttgagtaccttcctccagagcagagaaacgcctgagcctgcctgtgtcccccacttccactcaggaaattgggctgcccccaacctggccactgaatgtctccaggcagatatgctgccccctgacccccaccttcacccctccccgccaaggcctggctcttccggaggtcaattgtgcctgcaggatcagttgagcccctgctggtgtgctgcagggtgtgatgaggtgggagccctcagtgccagcctcatcactgtgtgaccctgggtctgctcttagcctccccatggctcacgttcctgccctggatgggatgtgagtggggcccacatcgtggagctgtggtggggcctgcagtcatgaatggcaagtggtccctgatgtgcagtgtctcattagttgcactgcagttaactgtggctcctgcagggcaccctgcccagaatgcccagaagagaaccatgcatacctgcactgcatttgagagccatgagctggaggctgtggttcgtgccagcaaggagcctactgtctggtgtgctgtaggcatctggagagggagagggcctgggtaggagctgggaggaagataattttcaactatggggcttcagtactgcagcgccccgagccaggctctgtgcttctgcctttaaggcctgttctcagcacaatgtctcaaaaataggtcatatcctgccactcccgtcgcagagccctttaatggttccaaaccctaagtccacacatagcccctggctctggcatctctccagccccactggccccgagctgcttgactcaccggcttcctatttgatgcacccaggcccccttgtggccaactccctccccttctcactgaggcagaagcactgaggtgggctggacatgggtgccctccacgtccctcatatccccaggcacactctggcctcaggttttgccctggccatgtcatctacctggagtgggccctccccttcttcaggccttgaatcaaaagccactttgttaggcgaggatttcccagaccactcatcacattaaaaaatattttgaaaacatgc

SEQ ID NO: 87354 - DNA, 740 bp, Homo sapiens
tgcatgttttcaaaatatttttgaatgtcatgaatggcaagtggtccctgatgtgcagtgtctcattagttgcactgcagttaactgtggctcctgcagggcaccctgcccagaatgcccagaagagaaccatgcatacctgcactgcatttgagagccatgagctggaggctgtggttcgtgccagcaaggagcctactgtctggtgtgctgtaggcatctggagagggagagggcctgggtaggagctgggaggaagataattttcaactatggggcttcagtactgcagcgccccgagccaggctctgtgcttctgcctttaaggcctgttctcagcacaatgtctcaaaaataggtcatatcctgccactcccgtcgcagagccctttaatggttccaaaccctaagtccacacatagcccctggctctggcatctctccagccccactggccccgagctgcttgactcaccggcttcctatttgatgcacccaggcccccttgtggccaactccctccccttctcactgaggcagaagcactgaggtgggctggacatgggtgccctccacgtccctcatatccccaggcacactctggcctcaggttttgccctggccatgtcatctacctggagtgggccctccccttcttcaggccttgaatcaaaagccactttgttaggcgaggatttcccagaccactcatcacattaaaaaatattttgaaaacatgc

SEQ ID NO: 87355 - DNA, 1733 bp, Homo sapiens
  misc_feature (1681)..(1681): n is a, c, g, or t
  misc_feature (1689)..(1689): n is a, c, g, or t
agctcactggggcttccttccgtctcgctcggagtttccctctgcgttcgctccgcgctgctggaggctgtcgtcccaatgctccccaaacggcggcgagcgcgggtcgggtcccctagcggcgatgccgcttcctccacgccgccctcgacgcgcttcccgggagtcgccatctacctggtcgagcctcgcatgggtcgcagccgccgggccttcctcacaggcctggcgcgctccaaaggcttccgcgtccttgacgcctgcagctccgaagcgacacatgttgtgatggaagagacctcagcagaggaggccgtcagctggcaggagcgcaggatggcagctgctcccccgggttgcacccccccagctctgctggacataagctggttaacagagagcctgggagctgggcagcctgtacctgtggagtgccggcaccgcctggaggtggctgggccaaggaaggggcctctgagcccagcatggatgcctgcctatgcctgccagcgccctacgcccctcacacaccacaacactggcctctccgaggctctggagatactggccgaggcagcaggctttgaaggcagtgagggccgcctcctcaccttctgcagagcagcctcggtgctcaaggcccttcccagccctgtcacaaccctgagccagctgcaggggcttccccactttggagaacactcctctagggttgtccaggagctgctggagcatggagtgtgtgaggaggtggagagagttcggcgctcagagaggtaccagaccatgaagctcttcacccagatcttcggggtcggtgtgaagactgctgaccggtggtaccgggaaggactgcgaaccttagatgacctccgagagcagccccagaaactaacccaacagcagaaagcggggctccagcaccaccaggacctgagcaccccagtcctgcggtccgatgtagatgccctgcagcaggtggtggaggaagctgtggggcaggccctgcctggggccaccgtcacgctgaccggcggcttccgcaggtaagaaggcccgacgtgcccctctggcttggcttcagacccctccccagtgaagggacctgagtcggggaccctgaagcgggcccactcgttggaagggatgtggcctggggctggagtgagcaggccgtgtccctgagtcagagtcagactgacgccctcagggggaagttgcagggccatgacgtggacttcctcatcacccaccccaaggagggtcaggaggcggggctgctgcctagagtgatgtgccgcctgcaggaccagggcctcatcctgtaccaccagcaccagcacagctgctgtgagtcccctacccgcctggcccaacagagccacatggacgcttttgagagaagtttctgcattttccgcctaccacaacctccaggggctgctgtggggggatccacgaggccctgcccatcctggaaggccgtgagagtggacttggtagttgcacccgtcagccagttccctttcgccctgctcggttggactggctccaagcttttccagcgggagctgcgccgcttcagccggaaggagaagggcctgtggctgaacagccatgggctgtttgacccggagcagaagacagtgttgcaagcgggttcagaggaggacatcttganacaccggnggcgtggagacggtgctgcagagcgtaggcgcgtgcgtggctgg

SEQ ID NO: 87356 - DNA, 710 bp, Homo sapiens
ccatcttccatccttttaccacctcttggtcccactttatgcataaggaaaaacagccatcaaaagagatagcctgtggcatgactgtatcaacatcagtatccttatatttggttgcaaaattatagttttgtaaggggttaaccttttgggggagctgggtaaaaggcacatgggatctccctctgtgctatttcttttaactgcgagtgaatctacaactgtctcaaaataaaagtttaaaatttaaagggggagagaagatagtgtcaggcttagattgggatctcactctgctccctgccctagcctcaccttcctcggaggcctctcctggtcctgcaatgacggggccccaggttgatcacctcatgctggtgagggatgggggctcggtgtggtgggcaggctgggtgagtcaggagggccggtgttgccccagggctccagcaccaccaggacctgagcaccccagtcctgcggtccgatgtagatgccctgcagcaggtggtggaggaagctgtggggcaggccctgcctggggccaccgtcacgctgaccggcggcttccgcaggtaagaaggcccgacgtgcccctctggcttggcttcagacccctccccagtgaagggacctgagtcggggaccctgaagcgggcccactcgttggaagggatgtggcctggggctggagtgagcaggccgtgtcc

SEQ ID NO: 87357 - DNA, 2601 bp, Homo sapiens
agctcactggggcttccttccgtctcgctcggagtttccctctgcgttcgctccgcgctgctggaggctgtcgtcccaatgctccccaaacggcggcgagcgcgggtcgggtcccctagcggcgatgccgcttcctccacgccgccctcgacgcgcttcccgggagtcgccatctacctggtcgagcctcgcatgggtcgcagccgccgggccttcctcacaggcctggcgcgctccaaaggcttccgcgtccttgacgcctgcagctccgaagcgacacatgttgtgatggaagagacctcagcagaggaggccgtcagctggcaggagcgcaggatggcagctgctcccccgggttgcacccccccagctctgctggacataagctggttaacagagagcctgggagctgggcagcctgtacctgtggagtgccggcaccgcctggaggtggctgggccaaggaaggggcctctgagcccagcatggatgcctgcctatgcctgccagcgccctacgcccctcacacaccacaacactggcctctccgaggctctggagatactggccgaggcagcaggctttgaaggcagtgagggccgcctcctcaccttctgcagagcagcctcggtgctcaaggcccttcccagccctgtcacaaccctgagccagctgcaggggcttccccactttggagaacactcctctagggttgtccaggagctgctggagcatggagtgtgtgaggaggtggagagagttcggcgctcagagaggtaccagaccatgaagctcttcacccagatcttcggggtcggtgtgaagactgctgaccggtggtaccgggaaggactgcgaaccttagatgacctccgagagcagccccagaaactaacccaacagcagaaagcggggctccagcaccaccaggacctgagcaccccagtcctgcggtccgatgtagatgccctgcagcaggtggtggaggaagctgtggggcaggccctgcctggggccaccgtcacgctgaccggcggcttccgcagggggaagttgcagggccatgacgtggacttcctcatcacccaccccaaggagggtcaggaggcggggctgctgcctagagtgatgtgccgcctgcaggaccagggcctcatcctgtaccaccagcaccagcacagctgctgtgagtcccctacccgcctggcccaacagagccacatggacgcttttgagagaagtttctgcattttccgcctaccacaacctccaggggctgctgtggggggatccacgaggccctgcccatcctggaaggccgtgagagtggacttggtagttgcacccgtcagccagttccctttcgccctgctcggttggactggctccaagcttttccagcgggagctgcgccgcttcagccggaaggagaagggcctgtggctgaacagccatgggctgtttgacccggagcagaagacatttttccaagcggcttcagaggaagacatcttcagacacctgggccttgagtaccttcctccagagcagagaaacgcctgagcctgcctgtgtcccccacttccactcaggaaattgggctgcccccaacctggccactgaatgtctccaggcagatatgctgccccctgacccccaccttcacccctccccgccaaggcctggctcttccggaggtcaattgtgcctgcaggatcagttgagcccctgctggtgtgctgcagggtgtgatgaggtgggagccctcagtgccagcctcatcactgtgtgaccctgggtctgctcttagcctccccatggctcacgttcctgccctggatgggatgtgagtggggcccacatcgtggagctgtggtggggcctgcagtcatgaatggcaagtggtccctgatgtgcagtgtctcattagttgcactgcagttaactgtggctcctgcagggcaccctgcccagaatgcccagaagagaaccatgcatacctgcactgcatttgagagccatgagctggaggctgtggttcgtgccagcaaggagcctactgtctggtgtgctgtaggcatctggagagggagagggcctgggtaggagctgggaggaagataattttcaactatggggcttcagtactgcagcgccccgagccaggctctgtgcttctgcctttaaggcctgttctcagcacaatgtctcaaaaataggtcatatcctgccactcccgtcgcagagccctttaatggttccaaaccctaagtccacacatagcccctggctctggcatctctccagccccactggccccgagctgcttgactcaccggcttcctatttgatgcacccaggcccccttgtggccaactccctccccttctcactgaggcagaagcactgaggtgggctggacatgggtgccctccacgtccctcatatccccaggcacactctggcctcaggttttgccctggccatgtcatctacctggagtgggccctccccttcttcaggccttgaatcaaaagccactttgttaggcgaggatttcccagaccactcatcacattaaaaaatattttgaaaacatgc

SEQ ID NO: 87358 - DNA, 3055 bp, Homo sapiens
agctcactggggcttccttccgtctcgctcggagtttccctctgcgttcgctccgcgctgctggaggctgtcgtcccaatgctccccaaacggcggcgagcgcgggtcgggtcccctagcggcgatgccgcttcctccacgccgccctcgacgcgcttcccgggagtcgccatctacctggtcgagcctcgcatgggtcgcagccgccgggccttcctcacaggcctggcgcgctccaaaggcttccgcgtccttgacgcctgcagctccgaagcgacacatgttgtgatggaagagacctcagcagaggaggccgtcagctggcaggagcgcaggatggcagctgctcccccgggttgcacccccccagctctgctggacataagctggttaacagagagcctgggagctgggcagcctgtacctgtggagtgccggcaccgcctggaggtggctgggccaaggaaggggcctctgagcccagcatggatgcctgcctatgcctgccagcgccctacgcccctcacacaccacaacactggcctctccgaggctctggagatactggccgaggcagcaggctttgaaggcagtgagggccgcctcctcaccttctgcagagcagcctcggtgctcaaggcccttcccagccctgtcacaaccctgagccagctgcaggggcttccccactttggagaacactcctctagggttgtccaggagctgctggagcatggagtgtgtgaggaggtggagagagttcggcgctcagagaggtaccagaccatgaagctcttcacccagatcttcggggtcggtgtgaagactgctgaccggtggtaccgggaaggactgcgaaccttagatgacctccgagagcagccccagaaactaacccaacagcagaaagcggggctccagcaccaccaggacctgagcaccccagtcctgcggtccgatgtagatgccctgcagcaggtggtggaggaagctgtggggcaggccctgcctggggccaccgtcacgctgaccggcggcttccgcaggtaagaaggcccgacgtgcccctctggcttggcttcagacccctccccagtgaagggacctgagtcggggaccctgaagcgggcccactcgttggaagggatgtggcctggggctggagtgagcaggccgtgtccctgagtcagagtcagactgacgccctcagggggaagttgcagggccatgacgtggacttcctcatcacccaccccaaggagggtcaggaggcggggctgctgcctagagtgatgtgccgcctgcaggaccagggcctcatcctgtaccaccagcaccagcacagctgctgtgagtcccctacccgcctggcccaacagagccacatggacgcttttgagagaagtttctgcattttccgcctaccacaacctccaggggctgctgtggggggatccacgaggccctgcccatcctggaaggccgtgagagtggacttggtagttgcacccgtcagccagttccctttcgccctgctcggttggactggctccaagcttttccagcgggagctgcgccgcttcagccggaaggagaagggcctgtggctgaacagccatgggctgtttgacccggagcagaagacatttttccaagcggcttcagaggaagacatcttcagacacctgggccttgagtaccttcctccagagcagagaaacgcctgagcctgcctgtgtcccccacttccactcaggaaattgggctgcccccaacctggccactgaatgtctccaggcagatatgctgccccctgacccccaccttcacccctccccgccaaggcctggctcttccggaggtcaattgtgcctgcaggatcagttgagcccctgctggtgtgctgcagggtgtgatgaggtgggagccctcagtgccagcctcatcactgtgtgaccctgggtctgctcttagcctccccatggctcacgttcctgccctggatgggatgtgagtggggcccacatcgtggagctgtggtggggcctgcagtcatgaatggcaagtggtccctgatgtgcagtgtctcattagttgcactgcagttaactgtggctcctgcagggcaccctgcccagaatgcccagaagagaaccatgcatacctgcactgcatttgagagccatgagctggaggctgtggttcgtgccagcaaggagcctactgtctggtgtgctgtaggcatctggagagggagagggcctgggtaggagctgggaggaagataattttcaactatggggcttcagtactgcagcgccccgagccaggctctgtgcttctgcctttaaggcctgttctcagcacaatgtctcaaaaataggtcatatcctgccactcccgtcgcagagccctttaatggttccaaaccctaagtccacacatagcccctggctctggcatctctccagccccactggccccgagctgcttgactcaccggcttcctatttgatgcacccaggcccccttgtggccaactccctccccttctcactgaggcagaagcactgaggtgggctggacatgggtgccctccacgtccctcatatccccaggcacactctggcctcaggttttgccctggccatgtcatctacctggagtgggccctccccttcttcaggccttgaatcaaaagccactttgttaggcgaggatttcccagaccactcatcacattaaaaaatattttgaaaacatgcagtaaagttgactcttggggtgcagtttttgcacacgtagggcacaccaggtccatccccagaacacttcccatgctgtcctattgtggtcatgtgcttctccacccccacccacttagcggtgctacatccctatagttttgctttctctagaatgtcatgtaaatagaaccaaactatatttaacctttggactggcctctccccacagcctaatgcctttgacgttcctgcaggttgctgggtatgttgagtttgtaatttgttccatgccatgggtgttctacagt

SEQ ID NO: 87359 - DNA, 2007 bp, Homo sapiens
agctcactggggcttccttccgtctcgctcggagtttccctctgcgttcgctccgcgctgctggaggctgtcgtcccaatgctccccaaacggcggcgagcgcgggtcgggtcccctagcggcgatgccgcttcctccacgccgccctcgacgcgcttcccgggagtcgccatctacctggtcgagcctcgcatgggtcgcagccgccgggccttcctcacaggcctggcgcgctccaaaggcttccgcgtccttgacgcctgcagctccgaagcgacacatgttgtgatggaagagacctcagcagaggaggccgtcagctggcaggagcgcaggatggcagctgctcccccgggttgcacccccccagctctgctggacataagctggttaacagagagcctgggagctgggcagcctgtacctgtggagtgccggcaccgcctggaggtggctgggccaaggaaggggcctctgagcccagcatggatgcctgcctatgcctgccagcgccctacgcccctcacacaccacaacactggcctctccgaggctctggagatactggccgaggcagcaggctttgaaggcagtgagggccgcctcctcaccttctgcagagcagcctcggtgctcaaggcccttcccagccctgtcacaaccctgagccagctgcaggggcttccccactttggagaacactcctctagggttgtccaggagctgctggagcatggagtgtgtgaggaggtggagagagttcggcgctcagagaggtaccagaccatgaagctcttcacccagatcttcggggtcggtgtgaagactgctgaccggtggtaccgggaaggactgcgaaccttagatgacctccgagagcagccccagaaactaacccaacagcagaaagcggggctccagcaccaccaggacctgagcaccccagtcctgcggtccgatgtagatgccctgcagcaggtggtggaggaagctgtggggcaggccctgcctggggccaccgtcacgctgaccggcggcttccgcaggtaagaaggcccgacgtgcccctctggcttggcttcagacccctccccagtgaagggacctgagtcggggaccctgaagcgggcccactcgttggaagggatgtggcctggggctggagtgagcaggccgtgtccctgagtcagagtcagactgacgccctcagggggaagttgcagggccatgacgtggacttcctcatcacccaccccaaggagggtcaggaggcggggctgctgcctagagtgatgtgccgcctgcaggaccagggcctcatcctgtaccaccagcaccagcacagctgctgtgagtcccctacccgcctggcccaacagagccacatggacgcttttgagagaagtttctgcattttccgcctaccacaacctccaggggctgctgtggggggatccacgaggccctgcccatcctggaaggccgtgagagtggacttggtagttgcacccgtcagccagttccctttcgccctgctcggttggactggctccaagcttttccagcgggagctgcgccgcttcagccggaaggagaagggcctgtggctgaacagccatgggctgtttgacccggagcagaagacatttttccaagcggcttcagaggaagacatcttcagacacctgggccttgagtaccttcctccagagcagagaaacgcctgagcctgcctgtgtcccccacttccactcaggaaattgggctgcccccaacctggccactgaatgtctccaggcagatatgctgcccctgaggtgggctggacatgggtgccctccacgtccctcatatccccaggcacactctggcctcaggttttgccctggccatgtcatctacctggagtgggccctccccttcttcaggccttgaatcaaaagccactttgttaggcgaggatttcccagaccactcatcacattaaaaaatattttgaaaacatgc

SEQ ID NO: 87360 - DNA, 383 bp, Homo sapiens
aaaccagttctttagatttatattgcttggcttaatactgaatacccagggttaaatgttcttgcatgcaattagagattgtccataagatgtcggaagcggcatctgaggcactctgcttctttatcgagtatttaaactaagcttggcaaaaccaggttaactgacaaatggtatagaaacaggaaagtactttcaaaactacaaaacaccaagcaacattattaacattatgatcgttgcattagccagtcttccacttactagaggaatataagtccatttttacatggctaaaagtagacttctttagtgaatgtacttacatatagaaaatccaaaagaactatctgtatcagacactatctgatagaagatttatc

SEQ ID NO: 87361 - DNA, 371 bp, Homo sapiens
ctgaaagacagatattgtaggagaataccattcctaacaatgtggtccaaaccaagttttaaataaaaagtccccaagtgcctgaggaatacctaaaatattccctataaattattattaggcaaaagaggaaaatcggtgtaaaataatttagaaaacaaaaggaatgctaattttctaattttatagacgggaacttaagctatactcagaagcaaacatattagaaagagtgaaagagagagaagtgagatgaggaagggaggtgtactagtccgttttcacgcaactgataaaaacatatctgagtgggcaatttacaaaagaaagagatttaataagcttagagttccatatggctgggaaggctt

SEQ ID NO: 87362 - DNA, 502 bp, Homo sapiens
agagtttattttaaacattgaacattgtttgctgctgttgaaatgaaagtgagagagttacaagctttcttccactgccatctggcaggtttactgatggatcgggttctttaacccatgtaacccctgtgtgtgggagcctattgtcctttgtgttgatcatgcagcctggcttggcctgaactttaaaaagccttacataaagcctatcaaaagcccatcctatagataaatgaagttgaggatgttgcaaaagtcactgaggcctttttggagaaggcttggatatatatttttcattcttcactgaacacatattttgcatgttctctttatgaactggaaaagaggaagataactgtatttggatattttgaaagaaataactgaagctaccaaaaaaaatgattattcttaattaagaaaagtattgtagcatagtagaaaggaaagaaacagcagattagggcgtccatatttcattaaagtaaatgtgggatgt

SEQ ID NO: 87363 - DNA, 609 bp, Homo sapiens
agcatcatgtcctggtgtcagcttctcatctcccatctctccttaacccactcctgtttgtcccttgctgctgtcactctcctgagactcctcttgccaaggtccccagagtcttcacacttacaagccagagctcttcatcccactgctccactccccaagtcttccctaatattgtacagggcatttccattcacctagttgctgagaccaaatacctacattcaagttatcccacaccagactgtgcacaattcctgctatgtccaccttcattggtaggctgctcgcttttgattctgagctgccatttgtcactgctcacctgtatcaccctcgttgcttcttaactctcttctctgcctctattctgccaattatggcctactctcttcaagccatcagcataacttcttaagagcacttcactcccctgctcaaaatctacctaaagtacccatcaaactggaataaaaacttcttcctggccaggcgcagtggctcacacttgtaatcccagtacttcgggatgccgaagtaggcggatcacctgaggtcgggagttcaagactagcctgaccaacatggcgaagcccggtctctacttaa

SEQ ID NO: 87364 - DNA, 752 bp, Homo sapiens
  misc_feature (34)..(34): n is a, c, g, or t
atgccaaacgcgggctgtactgccctgggagtanggacaccagcctctcggttctttgcatggtttctttgtgcgtagcgccagcctctcggttgtttgcccggtgtttctttggccatagcacctgcctcttggttgtttgcacggtgtttctttgtgcatagtacccgcctctctgcttgcacggtgtttctttgtgcgcagcacgcgcctctctgcttacacggtgtttctttgtgcacagcaccagcctctcggttgtttgcccggtgtttctttggccatagcacctgcctctcggttgtttgcccggtgtttctttggccatagcacctgcctcttggttgtttgcatggtgtttctttgtgtgcagcacgcgcctctctgcttacacggtgtttctttgtgcatagcaccagcctctcggttgtttgcccggtgtttctttggccatagcacctgcctctcggttgtttgcacggtgtttctttgtgcgcagcacccgcctctctgcttacatggtgtttctttgtgcatagcaccagcctctcggttgtttgcacagtgtttctttggccatagcaccagcctctcggttgtttgcatggcgtttctttgtgcacagcacccgcctctcagcttgcatggtgtttctttgtgtgtagcaccagactcttggtgaggggagcagctgccctcctccggcagcttctccctgacttagctcatgggatgagcctcctgtagtgacc

SEQ ID NO: 87365 - DNA, 875 bp, Homo sapiens
ttctgtcttcattgcttaaaacacggaactctagatgacagaataagggttgattacaaacaacctgtcctctaaacaggacacagattcatgccagagactcatgttgttattgccttaagcacagaccagagttttattaactttctagacatatttttactaaacatcactggggaccatgctttgttctccctgcccacaccccaccctgtgtacaagagccctttaaaaattgtacacaaccacatacagcagcctatccacttattcaaatcctattgttgctgatgaagtcctgaaggcaaatcacacctaccttcaaacgaatcaaaaaagagcacaaggaccacctgtgctcttgtacctgcaaatggcctagctaattttttcattaggatgtcagtgattcggtcccacaataaggacctgatagcactgtgcaggtgcagtcattaaaggcccaccccttctaggaagcaccaaccacctccctcttcctgcagcaggcttcactttccacttgcagacacacgtctgacgttaggacattcaatcaggtgttcctcatgctccaagcaactggaacccacctgtgttccaagattacctttcaactgaaaagcttttaaaggccaggcacagtggctcacgcccagctgatttcgtctttcactggtagagatggggtttctccggtaggtcaggctggtctcgagctcctgacctcgggtgagctgcctgccttcggtttccggggtgctgggattgcagatgtaagccaccgtgcccagccgattattctccttttgccactgtatccccgatttctccttgtaccactgattccagcagccacaaaggctctttacaca

SEQ ID NO: 87366 - DNA, 2126 bp, Homo sapiens
gaattccggcacacatcagcactcacacagcacacagcacacacacagcacacatcagcgcacacacagcacagcttcatcaccccgcccaccacaccccagctgcgacggcacaccaagctgaagccaccacggacgccccccccacccagccgcaaggtcttccagctgctgcccagcttccccacactcacccggagcaagtcccatgagtctcagctggggaaccgcattgatgacgtctcctcgatgaggtttgatctctcgcatggatccccacagatggtacggagggatatcgggctgtcggtgacgcacaggttctccaccaagtcctggctgtcgcaggtctgccacgtgtgccagaagagcatgatatttggagtgaagtgcaagcattgcaggttgaagtgtcacaacaaatgtaccaaagaagcccctgcctgtagaatatccttcctgccactaactcggcttcggaggacagaatctgtcccctcggacatcaacaacccggtggacagagcagccgaaccccattttggaaccctccccaaagcactgacaaagaaggagcaccctccggccatgaatcacctggactccagcagcaacccttcctccaccacctcctccacaccctcctcaccggcgcccttcccgacatcatccaacccatccagcgccaccacgccccccaacccctcacctggccagcgggacagcaggttcaacttcccagctgcctacttcattcatcatagacagcagtttatctttccagacatttcagcctttgcacacgcagccccgctccctgaagctgccgacggtacccggctcgatgaccagccgaaagcagatgtgttggaagctcacgaagcggaggctgaggagccagaggctggcaagtcagaggcagaagacgatgaggacgaggtggacgacttgccgagctctcgccggccctggcggggccccatctctcgcaaggccagccagaccagcgtgtacctgcaggagtgggacatccccttcgagcaggtagagctgggcgagcccatcgggcagggccgctggggccgggtgcaccgcggccgctggcatggcgaggtggccattcgcctgctggagatggacggccacaaccaggaccacctgaagctcttcaagaaagaggtgatgaactaccggcagacgcggcatgagaacgtggtgctcttcatgggggcctgcatgaacccgccccacctggccattatcaccagcttctgcaaggggcggacgttgcactcgtttgtgagggaccccaagacgtctctggacatcaacaagacgaggcaaatcgctcaggagatcatcaagggcatgggatatcttcatgccaagggcatcgtacacaaagatctcaaatctaagaacgtcttctatgacaacggcaaggtggtcatcacagacttcgggctgtttgggatctcaggcgtggtccgagagggacggcgtgagaaccagctaaagctgtcccacgactggctgtgctatctggcccctgagattgtacgcgagatgacccccgggaaggacgaggatcagctgccattctccaaagctgctgatgtctatgcatttgggactgtttggtatgagctgcaagcaagagactggcccttgaagaaccaggctgcagaggcatccatctggcagattggaagcggggaaggaatgaagcgtgtcctgacttctgtcagcttggggaaggaagtcagtgagatcctgtcggcctgctgggctttcgacctgcaggagagacccagcttcagcctgctgatggacatgctggagaaacttcccaagctgaaccggcggctctcccaccctggacacttctggaagtcagctgagttgtaggcctggctgccttgcatgcaccaggggctttcttcctcctaatcaacaactcagcaccgtgacttctgctaaaatgcaaaatgagatgcgggcactaacccaggggatgccacctctgctgctccagtcgtctctctcgaggctacttcttttgctttgttttaaaaactggccctctgccctctccacgtggcctgcatatgcccaagccggaattc

SEQ ID NO: 87367 - DNA, 441 bp, Homo sapiens
taagtcataaaatattttcataggttttagagttgcagttgttttagttttaagaatttttgtgtgtctttcttttggtcatagaacaatatttgctgatattaattatttctgcctgagagccttgaggtgctagtactaaaaaatgtatagcgaaaacccacctggacctacagctaaaaggcaggcaggataaagatgttactcccaattcctctttccccccatagtattctgggtagtaagaggtatcccaccaaagtctagagctcaaagcctgtcctgtgaatgagtatagagaaactcatcagggctggggccaagctttatgagaatacagcagagctttctatgcttttctgtggaacaaagggggacagcacctagaaaataaaacagaaagaggagcaggacactgtagtcctgtcagttgattggaca

SEQ ID NO: 87368 - DNA, 440 bp, Homo sapiens
tgtaagagtacttacagttggggtcatctaggcaggaaaagtatggtcatgttccccagaactcttagaaatggatcacgaggtagatgagcttacaggaaaccgggccagcatggtgccatagaacagttcccatccctgccaaattcttcagcccttgtgtccaaggtcagatgccttgtcttccacaaaacattccctggcgtccacccttcgtccccttcagctacaagtgaccctcctctcctgcaagtattcatccttctgaaggctgggcgccaggcactaacagacaggcagctgcctcccagacataaggagcatgggtcctaaccaggaataagcttcacagccattgctgtcaggccaagccgtggtccaggcacctgcaggcattaattcgtgtcctcagccccacacccacggggagcaggtgtagt

SEQ ID NO: 87369 - DNA, 280 bp, Homo sapiens
gctgcagattggcatagactcacccagatgttcagagtggttactcagttgcaagttaactaccaatttggggaacttattgaacttctagagtttagagatggaattccatatgagttttatgatattccatagtatctaaacttatttcgggggaaacctccaaataatttaaatccacaaatatgctatacgtcttacaaaatgttgagagtgagaaattaactggaaattgctaaaattacaaaaaagaagcttttacattttgaacattgttttt

SEQ ID NO: 87370 - DNA, 450 bp, Homo sapiens
ctaatcctgtgaaaaacattgtcttaagtgctttacatgtattaactcatttattccttagaacaaacctgtgagaaaaaaggaaaggaaacagtggttaagtaagtgcccaggtttacttaccttaaaatggtagaggcagaactggaatctagctattgtactgcctctgagaggagtaactaacattgcaagaagcatctcagttgggaggccgaggtgggaggatcacttgaggtcaggagttcgagactagcctgaccaacatgatgaaactccgtctctgctaaaaatacaaaaattagctgggcgtagtggcaggtgcctgtaatcccagctactcgggaggctgaggcaggagagtctcttgaacccgggaggtggaggttgcagtgagccgagatcatgccaatgcactctagcctgggcaataagagccaaaagtgaaac

SEQ ID NO: 87371 - DNA, 302 bp, Homo sapiens
cctgcgtcgcggcgcgtcgcgctgctgctcccgccccagccggggccgaagatggggcggcggctgcggttttccacacgacttccttggatctcggggcacacgcgccgatagttcggacgcgagtccgggctggttttgctccgttttactgcgtttgattactaatttaaaagctttgcgttccccgtcgccccggcccgcttttctcctgcattctcccctcggcccccgtccccgccctgcgatcgctggagggggcgtcggggctcgcgcgccagaacccggctcctccgaagccc

SEQ ID NO: 87372 - DNA, 131 bp, Homo sapiens
tggggcctcccagggccggtaaaggcacccaggcacccagattggctgaaaacttctgtgtctgccatttagctactggggacatgctgagggccatggtggcttctggctcagagctaggaaaaaagctg

SEQ ID NO: 87373 - DNA, 883 bp, Homo sapiens
  misc_feature (543)..(543): n is a, c, g, or t
tcatgggaaaaaaatgtctctcgggctgtgagcagtgaattggcttgtgcccaagtaatgtcctcaaggtgtgccatgagagatgaagtcacttggctcattttaccagcttcaggatggcattaagacctgacaaagccaggcaacacgtacaaggaaactaacctgaggcaggaccgtggcactgaaggagtctccctggatgcagcaaaggtggagaccttgtccaagaaaaatgctggacgggcctttaccccaaagaggaaagctgggtcatggaacaaggaaatgaattacatcaagtgaaaatgcacatctgatgcccagtccagaccaagcacgtctgttcctgctgacttcgaatgattgtcaagtggctggactcagatgttagccgtctgtcattgctgctaataacatattcatgtacaaaaacaacagagaggggtatctaggcagctggagccctctgtgttccggactacagattcggggacccaaagaaaatcttttgtgttggacttttggaagtttctccctganaatgttgtcaggcggccttgaggtcagacaccaaaaactcccttaggaccttcgctcaggaaactccacccctgtgttggaatctccttcctctctctcttctccggagggatgccacccggaattccggaatgttgacctggtgtggtttctgcttggagagggtccattggtcattcccacaggattgaatgaatggagaaacccaggcgttaccccttggttggagcgccagtgaaaatggttggggggactccttaaccctttcttgggagtggttgacgagggccgcctggtccttggcgcgtccgggcccgcgaagggtggcccggctggtccc

SEQ ID NO: 87374 - DNA, 606 bp, Homo sapiens
acagcttctactgaatgcgtattgcttttgcaccattgtaaattgtgaacaattgtgagtcaaatcatatagtaagttcaggaccatctgtactgcatcaaggtccccaggacctgaacacaagtggtataaattattcccactcctggataaaaatttgttccaggaaagcaggtaaattagcatgatataaatcttcaaattacttttgcccagtttggagatgatgatccagcatggtgtgaccaacagtgttttctcatcaacaccataagtaattctgcaaaggacatgctgtacactttgcccagatttgtgattatttcctcaagaaatggaattactgggctaaagggagttaacatctttaaggttctagttaaccactgagaaactggcctcaagaaagattggataatgtatatacctgccaattaaagcccatcattgctactgctaaatatattcctttaaatttttttctatttaatagggtgtaaagggcattttattttttattcaatatgccttactttgatcatgaattattaactttcttatgtttattggtcattatacttcttataaagattatttgcatatttt

SEQ ID NO: 87375 - DNA, 225 bp, Homo sapiens
gatctgtcagaaaagacatatttttgagataaaggagtttctaaataatgaattattgtttagtaccagcttttggaatccttacattttaaggaacttgaataatttaaatattagataatgtaactcctcataaaaacagtgtctagacaagggccaatattgcattgagattggatgaacattttattttgcatataattgttgtctataaaacaaaatact

SEQ ID NO: 87376 - DNA, 827 bp, Homo sapiens
cagctgagaagctgctcagcaccagcccctgggtgggcgcagacaggaacttcctgtgggggaagcgggcactactcccggctgctggctctctgaacaccaggctggcagtcactggaaactaggccgatagagcacccaccctgtgggtgcctcgttctgcctcctgctcctcgggcccagccgccctgccagtcgggctgggttccctcttgtgtctttcctgagtccttccggggaggacgaggctgtcttcctcccagccaaccttctgggcacctttcctctcttcccaagctctgcctgggacccttttccttcccctcagcccgtggccgtgctgtgcagccgagccccggcctggtctctggcagctcagggttcactcaggaggcgcaccatccagtcgtttccagtgtgtttgcaattatgccacaatcgatgcaattctagaagattcttcccactccagaaagaaacccaggactctccccctcgcctggcacccacccgtctgctttctggtcactgggtttctctctgctggacgttgagcgtgagtggacccccacgacacgggtgggacgtgcttgctgtctgccctgcactgttttccaggccttccggtgcgtggtggggctgcacgcctcttcccggccgaacgccctttccatgggtgtgcacgccacgccgtctcttcatccgtttaccgacgggcacctgagctgcttccgcttctcctgccatgagtgcctgagtatgggggtcccctgaggcctccccaggtggaccatcttgccagcaccttcctcccgtgaacgggtgaa

SEQ ID NO: 87377 - DNA, 392 bp, Homo sapiens
caatctgttcacgcagcacctttgactaaatgggaatcccatctatctcagagaaatcaccgcacagtgtctgagctatttattttcaaccagataaactccttgaaaagcagtgtcagagcagaattataaggcatttttaatattccctgttttaataaaactctttttatgtttgatttttctttatattctttgtccgcacgtatatagatgtggatacataacatttaacacggttgcaatcagagggtgatctgatttgttaacttaatgtcacatcataaacattttacatgctgttatataatgtacataatcatttttaatgactacataacatcccatcctattgacgaatcattatgtccttaataaaatctcacagttgg

SEQ ID NO: 87378 - DNA, 282 bp, Homo sapiens
gcaacggaaaatatgaaaagcaaggagacagtaaaactcaatttatctacttgtctctttattgtgcatagctgatctctggttccttctgtccctcctctgcccttcattatcttcacaacccctctgggcctaacacatgcccagactattgacatctgttaggggtcgccacttctggagagaattggtgcattcaataggagattttttattgaatagcagtgaaagccatgtgatatatactaacttctcccaaccactcaccacaaaagaaaagaa

SEQ ID NO: 87379 - DNA, 204 bp, Homo sapiens
cccataaattacctcgacatttgcctactgcctttactatacaagtgaatttcagaggcaaacaggtatgtaggcgagctgttttgaagggcacgggtcaggtccaactactcatgaaaaatcctaacgttcttacttctagccttgcacaataggtaaaattcatatctagaaattcacatcgggccgggcacggtggctcac

SEQ ID NO: 87380 - DNA, 481 bp, Homo sapiens
acccaagcttttattataatggggacacatggccctcttgtatggaatatgtttatatttctaggctgtagtctacatttgccttaaaaaaaggaaagcaaaccaggtcagcttaatgataacgtaatgtttagttgcactcatatactcttttctcttatgatttctttcctcaagatcatggtgacttctggtcggcttctgcatcagccaagtgaacctcttatggggtttgctcctgtgactagttcagctgggcccactcctgatctttctgtctctttctctctccttttctctcagcatctaatactgtggcttttgaatatggttgactgtggcacacagtaaaaaagcattttaggctgggcatggtggctcatgcctgtaatgccagcactttggcaggctgaggagggaggattgcttgagcccaggagtttgagactagcctgggaaaaataggaagacctcatcctcc

SEQ ID NO: 87381 - DNA, 315 bp, Homo sapiens
ggtccaatgaagcttcaactcgttttcagctcaaagcagacggcaaatcagcaaaaagcaaaaataatgtatcttactgcattacagacaaaaaaaaaaaaaacagagtgaaactagaactattttcaatagtagttttctgacagctatataaacaaatatagaagacattatggaattagtgatgtgaacgagaacttgtccatgtatcctgcctgccagcaaaggtagagatggctgttatatttgtaatggtttactatgaaggctgttccataaccttcaatatccactatcttggtgtataccaagata

SEQ ID NO: 87382 - DNA, 407 bp, Homo sapiens
tctctctttgcctgggttggtttgatcaactaccatgtctgtgaagaattacccaccctccctccatgtagatgtaattcttctctccccagatcctggaaacagaaacattcccgacttgcacatgactggccagctctttcattcccagcctgggaaagagccagcctgaatctccagggacacctatagggtttttctaaggcccatcctggaaagctgtgaggggcagagacagcccttcggagggagggcgcttctgcgtggccctgatagcagaaagtatcctgcttttgggcttagaacccctgtgtcctagcctggcctctgtggccttaaaccagtcccgttttcctaagcctcagtttaccgatctgtaagatgaggacatagcagtagttctttaa

SEQ ID NO: 87383 - DNA, 323 bp, Homo sapiens
aagaggctcgctggtgtcacacacttctgttagttactcacagatggtgctggctgagacagctgaggaaagaaagctcagtgggtatgcggcccaagacagctccttcgcctggagcagatcagcagagaaactttgattgcactggcaaagccagaagtgtaagaaatttctctttgcataggaaaatttcattcaccagatatataacacgcatttattaagggccttctaaacctgagagggaaatgggaacccacttcccagctccacggtcttatgggcaaacgggaagttaaataagcaaaaacaatacagtgtgg

SEQ ID NO: 87384 - DNA, 363 bp, Homo sapiens
gtcaaaatcctggttaagaagcagttaggaccctccatatacagacaggtacaccattttataaaactgaaagtttatactccagaaataacaaaaggcttctggactacaggatactaggcatagtgagaagtactgtagtaaaaagtgttagtaatacaggagactggtaatctgaatggtaccgacaaacccaagaccacagaacaatgaaaatgatgatcttctgtaaatgaaaccactggaagaatgtcaatatcaatctttgattactgcatccaaaaagtcatgcaactaaatgcagaatgcttcattctgcttttataaggaaaaatttaagggttaaaacaatagctgatactt

SEQ ID NO: 87385 - DNA, 365 bp, Homo sapiens
gtgctgggattacaggcgtgagccaccgcacccggctctgctcctctctgcttataggacattggtgtgaattctccaggcgattgctcagtccttatctctcccttcctactgcttggatggatttttagatcaaacttgcagccccgctctcctgggggataatccctgttgctggtaaccttgtttcctggttgaccttcacgaagaagagcttcagcaaaaactttctccctcagcccagtcatgcaatgtttctcttcctaatgctttcgcaggccctcaagatggaatggaaaagggctgccttcggaaacatttccaggagaagaagctactcagaataaattagccagaaagtgtta

SEQ ID NO: 87386 - DNA, 442 bp, Homo sapiens
ggcataagacgagaatttaagataaaggagctcggggttgtttaggtctcagggtatagctcagctagctattaaatgtgaacatgaatgcaaaagaatttttttacttacttatttatgtatttatttatttagaaacagagtcttgctctgtttcccaggcaggagtgcagtggcgcaatttccgctctctgaaacctccacctgcctggttcaagtgattctcctgcctcagcctcctgagtagctgggattacaggaatgcgccaccacagcgactaatttttgtatttttagtagagacaaggtttcgccacatcagtcaggctggtcttgtgttcttgacctcaagtgatccgcctgcctcgtaaagaatttttttaatgaagataaaccattatttttgtgacaatggtattgcattcctttttttttttttttt

SEQ ID NO: 87387 - DNA, 211 bp, Homo sapiens
acctggcaatcactggaataatatattaaatacttgccccacagcaccacctttcaatcttcagaacttttcccactgacctcctaccccagaaatttgggctttacatccttcccagtactgtagaaatgtaaggacaggatcttcaggaactgggcagcaagaaaagaaagaagcaatttgagagtggaggatgcaaatccctttcccc

SEQ ID NO: 87388 - DNA, 479 bp, Homo sapiens
agccccacctggcccagttactgcaggctgtggtggtgaccatgtctcatctcacacctggtcttttccatcactggcctggcccttgattctgtattttcaaagcaaactggggaggtgggcattagtatctctgttttgccagagaggaaaccgaggctcaaactggtttcaatatgtcatgtaggaaagtagtcatggcccgattcaatcatggctctgccatttaacagctctgtgacactgggtgagtcacttgccctgtctgggtcccagcctttccattcataaaacaaagaggttgagggctagctaggtagcaaacttctcagtataagaaacagatggaatccagagaagctgggagaggagaaggaaacaaaggagaggtgatggcccaacaacctagcagaaagacattttaaaaggatctctagccttagtaacatagcaagaccttgtctctacacaccaaaaaa

SEQ ID NO: 87389 - DNA, 233 bp, Homo sapiens
ttttgtatttttaataaagatgaggtttcactatgtgggcaggctggtcttgaactcctgatctcgtgatccacccgccttggtttcccaaagtgttgggattacaggcatgagccaccacgccaggcctctgatctgctttctcaccaaagaagaaacccaactcaggccctctgataatcccagcactttgggaagccaaagcagatcgatcacaaggtcatgagtttgag

SEQ ID NO: 87390 - DNA, 1178 bp, Homo sapiens
  misc_feature (1107)..(1107): n is a, c, g, or t
aagaccaaaaaaaggccaagggtgttgttggggcgtctgtctaatgtggtgggtctttttttgaggggtctcctaaaataaaatattttgataagcaaaaaagcggcggacacgcaggtttccgagacactaaagcgttttgcagggaaggtgacaacagccagtgtaaaggaacggagagaaatcctcagtgaacttgggaagtgtgttgctggaaaagatcttccagagggagcagtgaaggggctctgcaaattgttctgcttgactctgcatcgatatagagatgcagcctcccgcagggccttgcaggcagccatccagcagttggctgaggcccagccagaagccactgctaagaaccttctacactctctgcagtcttctggtataggctccaaagcaggtgttcccagtaagagcagtggctctgccgccttgctggccttgacctggacctgcctcctggtgcgcattgtctttccatcgagagccaagcgacaaggagacatctggaacaaactggtggaagtgcagtgcctgctcttgctggaggtgctgggtggctcccacaagcacgccgtggatggtgctgtgaagaaactcacgaagctgtggaaagagaaccccgggctggtggaacagtacttgtcagccattctcagcctagagcccaaccagaactatgctggcatgctggggctgctggtgcagttctgcacgagtcacaaggagatggacgtggtcagtcagcacaagagcgccctactggacttttacatgaagaacatcctgatgagcaaagtcaagcctccgaagtacctgttggatagctgtgcccctctgctccgatacctgtcccactcagaatttaaggatctgatactgcccaccatacagaagtccttactgaggagtccagagaatgttattgaaactatttctagtctgctggcatcagtgacgcttgacctcagccagtatgccatggacatcgtgaaaggactggctggtcacctgaaatccaacagtccccgcctgatggatgaagctgtgctggcactgcggaacctggcacgccagtgcagtgactcttcggccatggantccctgaccaagcacctatttgctatcctcggaggctcggaaggaaaactaactgttgtagcccagaagat

SEQ ID NO: 87391 - DNA, 533 bp, Homo sapiens
gccagtgatgagatacttgagaatgtcaggatctaaccagagctttgtgttctctagagcgccctactggacttttacatgaagaacatcctgatgagcaaagtcaagcctccgaagtacctgttggtgagcgagaggtggacgttactcacctggacaactgatcccattttcaattctgggatgctgaactctttttttgcttcttggtccgttcccatgagggctaggtgccttattcctttttctttgtaggatagctgtgcccctctgctccgatacctgtcccactcagaatttaaggatctgatactgcccaccatacagaagtccttactgaggagtccagagaatgttattgaaagtaggttgctgtcaaccaggatggtgggagggagatgagttgcctatatctctattctcgatatttggcaacaagaagtgtgtgtggtaggggggagggaagggggatgtattcattgtttaccttgttaggacccttgggtcttaagggacccttggaccatgggtcc

SEQ ID NO: 87392 - DNA, 878 bp, Homo sapiens
aagaccaaaaaaaggccaagggtgttgttggggcgtctgtctaatgtggtgggtctttttttgaggggtctcctaaaataaaatattttgataagcaaaaaagcggcggacacgcaggtttccgagacactaaagcgttttgcagggaaggtgacaacagccagtgtaaaggaacggagagaaatcctcagtgaacttgggaagtgtgttgctggaaaagatcttccagagggagcagtgaaggggctctgcaaattgttctgcttgactctgcatcgatatagagatgcagcctcccgcagggccttgcaggcagccatccagcagttggctgaggcccagccagaagccactgctaagaaccttctacactctctgcagtcttctggtataggctccaaagcaggtgttcccagtaagagcagtggctctgccgccttgctggccttgacctggacctgcctcctggtgcgcattgtctttccatcgagagccaagcgacaaggagacatctggaacaaactggtggaagtgcagtgcctgctcttgctggaggtgctgggtggctcccacaagcacgccgtggatggtgctgtgaagaaactcacgaagctgtggaaagagaaccccgggctggtggaacagtacttgtcagccattctcagcctagagcccaaccagaactatgctggcatgctggggctgctggtgcagttctgcacgagtcacaaggagatggacgtggtcagtcagcacaagagcgccccctagttttagaagtttcaatagcagggataacataaagatctttgcatgaggtaaatctacagcatagttcatttttagattttgtgctattgaaacattctaaaactagg

SEQ ID NO: 87393 - DNA, 406 bp, Homo sapiens
acaccagtataaccagcacccagatcaagaagtagaaccattccagcactcctgaacctcctcttgatggcatgtgaggtttcgaggccacttttattttcttagtttcgttcatttagcaaatgtctacccaaagcttttctgtaccaggcattttcctagagtcctgttttgttgttgctttttcctcttggggaggaaggtcttaaatatatggggagtgtccagtgggctgagatcatgtctgggcagaatacctgactccagcggcttaccaagtgatttttattgaccgctgtctgtgtaatctctggtttcagatcttccagagggagcagtgaaggggctctgcaaattgttctgcttgactctgcatcgatataggtgagtcccagccaaaggcccc

SEQ ID NO: 87394 - DNA, 1307 bp, Homo sapiens
  misc_feature (1236)..(1236): n is a, c, g, or t
aagaccaaaaaaaggccaagggtgttgttggggcgtctgtctaatgtggtgggtctttttttgaggggtctcctaaaataaaatattttgataagcaaaaaagcggcggacacgcaggtttccgagacactaaagcgttttgcagggaaggtgacaacagccagtgtaaaggaacggagagaaatcctcagtgaacttgggaagtgtgttgctggaaaagatcttccagagggagcagtgaaggggctctgcaaattgttctgcttgactctgcatcgatatagagatgcagcctcccgcagggccttgcaggcagccatccagcagttggctgaggcccagccagaagccactgctaagaaccttctacactctctgcagtcttctggtataggctccaaagcaggtgttcccagtaagagcagtggctctgccgccttgctggccttgacctggacctgcctcctggtgcgcattgtctttccatcgagagccaagcgacaaggagacatctggaacaaactggtggaagtgcagtgcctgctcttgctggaggtgctgggtggctcccacaagcacgccgtggatggtgctgtgaagaaactcacgaagctgtggaaagagaaccccgggctggtggaacagtacttgtcagccattctcagcctagagcccaaccagaactatgctggcatgctggggctgctggtgcagttctgcacgagtcacaaggagatggacgtggtcagtcagcacaagagcgccctactggacttttacatgaagaacatcctgatgagcaaagtcaagcctccgaagtacctgttggtgagcgagaggtggacgttactcacctggacaactgatcccattttcaattctgggatgctgaactctttttttgcttcttggtccgttcccatgagggctaggtgccttattcctttttctttgtaggatagctgtgcccctctgctccgatacctgtcccactcagaatttaaggatctgatactgcccaccatacagaagtccttactgaggagtccagagaatgttattgaaactatttctagtctgctggcatcagtgacgcttgacctcagccagtatgccatggacatcgtgaaaggactggctggtcacctgaaatccaacagtccccgcctgatggatgaagctgtgctggcactgcggaacctggcacgccagtgcagtgactcttcggccatggantccctgaccaagcacctatttgctatcctcggaggctcggaaggaaaactaactgttgtagcccagaagat

SEQ ID NO: 87395 - DNA, 322 bp, Homo sapiens
tgctgagaattacaggcatgagccaccgtgcctggccaattgcatattgtttctaagtggctgccttggccagacgactggtgaggaggatgcttggctgcccctgctcatgagtgagcaggtgagcctcaggtgcagagcgtgactgccaaaggagtaggcgggagtggtggtaggggtaggcctgtgaagagaaggctgtggttccatcggcttgactcagagaaaccgcaggacactggagagtgactgtactaggatggggagccctttaaggacatctgagctgacaccccaagttgaaagaggagcctcctggcct

SEQ ID NO: 87396 - DNA, 412 bp, Homo sapiens
gttccatttttattcactttgaggaagtgttgcctttttttttgatgtacttaaatggctaaaataaaaaagacaatcacaagaaaaaaaaagaagaaaaaataaaaatgaaaataaaaataaaatatccatcaattttaatttcactccagttagagaaagtaaaagctctggtcttagatacatctcttgtatttcatctgtagtgagaagaaagaacactcttcattggcaattatcaaattatttgtttgaagagcatttttccacattcagctccccatcttcttgcataaggaaatggtttaagaaaagctgactttgacttgagaaacaaaatccattgataagatgtgtcttcattgcatctgtctgttctctgggagaaataaaatctgtgtcactctcttgc

SEQ ID NO: 87397 - DNA, 333 bp, Homo sapiens
atgagacttactcactatcgtaagaatagcttgggaaagacccacccccatgattcaactgggtcccacccacaacacatcagaattatgggagctacaatttaagatgagatttggctgtggacacagccagaccatattagactcataatttgccttctgcacagtaagaactgggctgggatacctcatagatcataaacaaatccgcacccatgaaaagatttggagagtcacacaggaaagtcaacagaagccagagagatgagggtcctggactgcatgtcattagtgtggatccttcagcttcacatctcagcagtgggtcagaac

SEQ ID NO: 87398 - DNA, 457 bp, Homo sapiens
tatcttaggcctacccttccatttacttaatttcttcccctttacctactcaaggacattgttccaataattattttgtttcttctgtatcaccagtttttcttctactgagtcattcccacagtatcacaaacatactgttatttttccttaaaataaaaagtccctggtcaggcatggtggctcatgcctataatcccagcactttgcggggcagaggcgggcagtttgcttgagcccaggggtttgagaccagcctgggcaacaaggcaaaactctgtctttacaacgaatacaaaaattagctgggtgtggtggtgcacgcctgtaatctcagctgctagggaggctgaggtgggagaattgcttgagcctgggaggttgaggctgcagtaagctgtgagtgtgccacagcactctggcctggcaacagaacaagatcctgtcaaaaaaataa

SEQ ID NO: 87399 - DNA, 421 bp, Homo sapiens
tgaaaatagatctaccataatctaaaataaaaacaaaattggcaaaagcaaaaactgtctaccagaacaaaagtcaacatcttgtagagaaaacaaatgacccggactccctacaatctatcagcccaatattctacatacaataaaaaaattactacgcatgaaaagaagcaggaaaaagtgacccatatttaaggaaaaaagtagtcaagatcttaaaaagacccaaatgttggaaatagcaggaaataactcaaaatcgctatcataaatatgttcaacaacttaaaagaaaagatggacataatgaatgaacaaatgaggaatagtggtagaaaaaaataaaaacagaggctgggcacagtggctcatgcttgtaatcccagcaccttgggaggccaaggtggaaggactgcttgag

SEQ ID NO: 87400 - DNA, 440 bp, Homo sapiens
aatagtgataatgcgttaactgaactgtcacctgggtttaggggaaaaagttcagttttagacaggttgaacttgaagttgcaggtaggagtccctgcccataggctattggaattactggactagatcttttgggagctagagcaactggagtggtccgagggagagagaagagccaaaggtgaagaacaggccttggggaataatcttggtggagagcaataagtttcacagaaaccaaggggacaacagtctccagcagatgcttaagagaggtgtcatgttttctggaagtggttctcaaccatcagcatcgcttaaggaacttttttctttctttttttttttttttttttcctggagatggagtctcactctgtcgcccaggctggagtgcagtggcatgatctcagctcactgcaacctccgcctcctgggtt

SEQ ID NO: 87401 - DNA, 346 bp, Homo sapiens
ttcaataattatctgccccgacttacaaaaacttctaactgaaccaggagctggataagatataggagaaaaggaaacccaaaacatgagaatacttcattgaagataagcagaaactaacattgcatccaaaggtcattgatctggaaaacatctgagaagtgctctgacaattctgggaaaaaatggaaaagagagaagaaacagagaatcaagtaagtaggttttttaatttgttttaaagagataaggtattgctctgtcgcctgggctggagtgcagtggcatgaccatagctcactgtaaccttgaactcctgggttctcaagtgatctgcctccctcag

SEQ ID NO: 87402 - DNA, 772 bp, Homo sapiens
atttcaaaaaaaacctggaatattcatacatgaggtattctaattagctaaagtacagccagaaaaccttggttgaatacctttcataaacaattctgttttcttatttttgaaattcaggatctggtctcaggcatcacatgattacaggaacttaagaaatagacctggatggttaaggagactggactgaatgaacagcgactctaagagccttgaaagtctggtagaaaagggacatttccagtctttgatagtaatcctttctaaaatttgagagcattaaatgcctagtcatttgaagagtaaggttaattttgctcaactttggaagggattgttgaaagcccttgttttatagttagaaaatcccctcaaattgtaacttatccaaaggtttgatgggaccaaaaagccctctgattccatgttgtcaagtaaagtgaaataataaagatcttgtatttaaaaatcttactgttagtaggcaattgtgagttcaatttaaatcaaacatttgcaattggaaataaccaaaaatcatcaaaatggctacaaaaaggaagaaatcacttaaaaaccctgaaaacaaaaagggaaaacgttttcggctgggcttggtggctcactcctgtaataccaacactttgcgaggccgaggccagtggatcacttgagctcaggagtttgagaccagcctggacaacacagtgaaaccacatgtccacgtccctgtagtcccaactactcaggaggctgaggtgggaacatc

SEQ ID NO: 87403 - DNA, 367 bp, Homo sapiens
gagatgaggtcttgctgtattgcccaggctggagtacagtagtgattcacaatgcagtcatagcacgttgtagcctcaaactcctgggctcaagggatccttctacttaagccttctgagtaactgggactacaggcaccctgctcttggttttttgttttttctaaatggtgtcttttaaggagcagaaagttcgttttgatggtgcccaatttgtcaattttttaatgattagtgctttttccatacatttttataaggtaccggttcttaatagctttactgagatacaattcacacaccatacaattcatccatttgaagtgtacaattcagtggggtttttttttggtgtattcacagagtt

SEQ ID NO: 87404 - DNA, 2057 bp, Homo sapiens
  misc_feature (45)..(45): n is a, c, g, or t
  misc_feature (53)..(53): n is a, c, g, or t
  misc_feature (72)..(72): n is a, c, g, or t
  misc_feature (100)..(100): n is a, c, g, or t
  misc_feature (249)..(249): n is a, c, g, or t
tggaaatggattttaggaggtaatggaaaattccttttggaggangtagtgtnaagttttgggaattggaanacattgttggtagtgtatccaattcttntcctgagatttaaacttactaactgggaatccttaaccaattataatagttttttttctttattttcaaaatggatttcctttggctttggattagacactatgtgctttttttttttaaccatagttcatcggaaatgcagctttttntgaacttcaaagatagaatcccatttttaatgaactgaagtagcaaaatcatctttttcattctttaggaaatagctattgccaaagtgaaggtgtagataatacctagtcttgttacataaaggggatgtggtttgcagaagaattttctttataaaattgaagttttaagggacgtcagtgtttatgccatttttccagttccaaaatgattccattccattctagaaatttgaagtatgtaacctgaaatccttaataaaatttggatttaattttaaaaaaagtaaaaaaaaaaaaaaaaaaaaaaaaaaaaaaaaaaaaaaaaaaaaaaaaagagaagaaaaaaaaaaaaaaaaaaaaaaaaaagaaaaaaaaaaaaaaacaagaaaacaaaaaacagggaacacagagagaggcacccccgatttgcgcgggagtacgatgcccacacacatggacccgcactacacaacagttcgagcgccaacgctgactaactccggagaaaccaaacgcacattgaagatccgcttattattcgactacgagagtgacacacaacgatgacacaaaacatcaacaacaacaaactaatacacacctcatacaatggatgatactatcaaaattatccacagcgcctatacgagcggaaaaacaaaacgcagaaacaccccagagaggcagcaaacgagcaaccagagaccacaccgaacagacgagacacgaagaaaacacacagtattaccaccacccaagcaccgacgaacaaaaaaaaacacataacgccaaaaaaaccacagcaacagacacacaccacacccacaccgccacgaaactaccacccacaaacgaaacaaccaaaacaaaacacgaacgccacctacccacactagcaagaacaattcacctaggactgtacagagagagagaacgaagaagagcacaggaacgaaaaagaagaaggaaaaaggggagagccagccggggcagacaccacccgaaagagacagcagaaggaccaaacatagccacgcagataccaagagcaaacaacacgaaacaaaaagaaaagaaaacaaaacagacaacacactcaccagacccacaggaagaggaagaatagagccgccaccacatcggagactaaggatgattagtaggagtagcgagatacgaaagaagcagatcaacgagtacgactgacatcgagcataacgcacccatcgagcagcagaggagacaaaaataaaaagcaacacaacgacccagacacgaacagacacgtacgcacacagcgcacacacgccaccagtcgacatagcaaagtaataacacgaaatacagcacaaagagcactacaccgcgcagagacgcaaagcacaggacgagcggaaacgacgagaagagatgagagaaaggagaaaagaacgaagaccagacgacgcacacaggacacacgcaataaccaacagaaacgacgaaggacaacaaggaacagacacgcaaagcgaacacgcgacgagcacaacacgcagccacgccacacgcacgacgagtcacgcaccgagcagacgggagcgagacggcactaagccggtaacgcagccgctagaccacccaagccggcgacaaccgcgcacacgcgacgacccgacgcaccgcagcgcgcaacagcggccgagcacgacaggacccacggagcaacgagtcgctcaccaccgccgagcaacgcagcagctccacaccgcaacgcccgtgacgagagtcgccagcacgcagacacgacacgtcaccacgccccg

SEQ ID NO: 87405 - DNA, 649 bp, Homo sapiens
gacctgttcccccggagagaaggctggtgcagcttgagctctgtgggcaagtctgactgggcctttctcacttttgcctgtgtttgccttgcagctgtgtaaatgagtatggaagattatgatttcctgttcaaaattgttttaattggcaacgctggtgtggggaagacgtgcctcgtccgaagattcactcagggtcttttccccccaggtcaaggagccacaattggagttgattttatgattaagacagtggagattaatggtgaaaaagtaaagctacagatctgggacacagcaggtcaagagagatttcggtccattacccagagttactaccgaagcgccaatgccttgatcctcacctatgacattacctgtgaggaatccttccgttgccttcctgagtggctgcgggagatagaacaatatgccagcaacaaggtcatcactgtgttagtgggtaagtaagggctaacgaggagggaaattgatttgtgggcattagaggatttataatcacataaagcttatacattggtgccttccaagaatatagtctttagctaataattcatgcagtcaaccttcagttcttctgcaattgaagagaaaatgaaataggtcctatcccatggtgacagtttag

SEQ ID NO: 87406 - DNA, 332 bp, Homo sapiens
aggatcaccctgatgcacctatctatcaaggtacagtgctctgttatgagcgctgcatctacagtccattatctccacagtattttgggtcatatctggtctgttatcctcatactactcaataatgtgttagagctgagtttttatattaaaatgtcatcaattcgatctgccccttgcgtagtatgataagtgagaatagcaacagatgaaaagtctcacgacccatttttatatcttcgatgataaccttagaaaaattctgctcgtggaagcagattgaactgtcatttatcccctccttcttgtaataatgttactttgacgcgtaa

SEQ ID NO: 87407 - DNA, 2043 bp, Homo sapiens
tgctgggcttgcgattgccgctcgctccagctgagctaagtgtagcagcagcaccagggcagggactgactccagcccttggactcaggacatcgcagaccttcccttgcgtgcgtgactcattcgcacatccatttctgtttatgcctggggtggggagaaaaatcccaaaccagctgtgtaaatgagtatggaagattatgatttcctgttcaaaattgttttaattggcaacgctggtgtggggaagacgtgcctcgtccgaagattcactcagggtcttttccccccaggtcaaggagccacaattggagttgattttatgattaagacagtggagattaatggtgaaaaagtaaagctacagatctgggacacagcaggtcaagagagatttcggtccattacccagagttactaccgaagcgccaatgccttgatcctcacctatgacattacctgtgaggaatccttccgttgccttcctgagtggctgcgggagatagaacaatatgccagcaacaaggtcatcactgtgttagtgggcaacaagattgacctggctgaaaggagagaggtttcccagcagcgagctgaagaattctcagaagctcaggacatgtattatctggagacctcagccaaggaatctgataatgtggagaaactcttccttgacttagcatgccgactcatcagtgaagccagacagaacacacttgtgaacaatgtatcctcacccttacctggagaagggaaaagcatcagctatttgacttgttgtaatttcaactaaaggctgaggcacggagaagaaaaggaatcagcaactgccctgatgggccatgagatgctggggagatctggcgatgactgtggctcccgctctctgaccttctgactcctgtgggctcctgagcttacaaagcatggcaggccaagggcctcgaccacaggccagcattagcagaacatataatggtttcacccttttccagtctggagttggagcaaggagaaaattgcactaggcactccatgatctgcagagcatgttgcttttgtttttttaaaaagcaagtaaaagcgcattcctaaacagagtccggggggaaatgtactgtagggatccctcctgcacatcagtgggtgcatgtgggaactcttctttagggcttcggtggtaatcatctgggggccctggttttcttgtctaccagataaaccaaaactgggaaggccaagtacagtctctgtggtgcgtattgacgaccccatggagattttgaaaagtgttatttctcttgtccacaggcactttcaagaactttgggatgtaaaaatgaaatgaaacctttacccatgaccaacagtaacaatcattgttttaataatatatacaagctccataactccttttggtgctaatgattccgctatttcacagaccaaacgttttagtacattaatgtccttaaatgtgttatatagaaataaaaaaatgggggaagtccatgaatcagcactctttctcaaagtctcattactacctttttaaaggtggatttttgggaaaagagaatacttttccttttatgttcccctctgaatctctaccactttcttgtctctccagccctttatgtaaatgaaaacgtttgcaaaatgaaaaaaataaacaaatggttgatgacattctaatataaaaacttagctctaacacattttgagtagtatgaggaaacagaccagatatgaccaaaatactgtggattaatggactgtagtgcagggctcctagcagagcacagtccttgatagtaggtcacatcttttacttcctggtactctccatcttggacagaccaaggcttaggattttgtagattttttagtatgataagtgagaatagcaacagatgaaaagtctcacgacccatttttatatcttcgatgataaccttagaaaaattctgctcgtggaagcagattgaactgtcatttatcccctccttcttgtaataatgttactttgacgcgtaa

SEQ ID NO: 87408 - DNA, 1932 bp, Homo sapiens
gtcctgtcacacacggcccgagagctgagtgaggagggaatctgaacagctgaaggaggggtccagcctagtgtgacagtcttccaacagggagaagacatctctgttcctgctgtgtaaatgagtatggaagattatgatttcctgttcaaaattgttttaattggcaacgctggtgtggggaagacgtgcctcgtccgaagattcactcagggtcttttccccccaggtcaaggagccacaattggagttgattttatgattaagacagtggagattaatggtgaaaaagtaaagccagagttactaccgaagcgccaatgccttgatcctcacctatgacattacctgtgaggaatccttccgttgccttcctgagtggctgcgggagatagaacaatatgccagcaacaaggtcatcactgtgttagtgggcaacaagattgacctggctgaaaggagagaggtttcccagcagcgagctgaagaattctcagaagctcaggacatgtattatctggagacctcagccaaggaatctgataatgtggagaaactcttccttgacttagcatgccgactcatcagtgaagccagacagaacacacttgtgaacaatgtatcctcacccttacctggagaagggaaaagcatcagctatttgacttgttgtaatttcaactaaaggctgaggcacggagaagaaaaggaatcagcaactgccctgatgggccatgagatgctggggagatctggcgatgactgtggctcccgctctctgaccttctgactcctgtgggctcctgagcttacaaagcatggcaggccaagggcctcgaccacaggccagcattagcagaacatataatggtttcacccttttccagtctggagttggagcaaggagaaaattgcactaggcactccatgatctgcagagcatgttgcttttgtttttttaaaaagcaagtaaaagcgcattcctaaacagagtccggggggaaatgtactgtagggatccctcctgcacatcagtgggtgcatgtgggaactcttctttagggcttcggtggtaatcatctgggggccctggttttcttgtctaccagataaaccaaaactgggaaggccaagtacagtctctgtggtgcgtattgacgaccccatggagattttgaaaagtgttatttctcttgtccacaggcactttcaagaactttgggatgtaaaaatgaaatgaaacctttacccatgaccaacagtaacaatcattgttttaataatatatacaagctccataactccttttggtgctaatgattccgctatttcacagaccaaacgttttagtacattaatgtccttaaatgtgttatatagaaataaaaaaatgggggaagtccatgaatcagcactctttctcaaagtctcattactacctttttaaaggtggatttttgggaaaagagaatacttttccttttatgttcccctctgaatctctaccactttcttgtctctccagccctttatgtaaatgaaaacgtttgcaaaatgaaaaaaataaacaaatggttgatgacattctaatataaaaacttagctctaacacattttgagtagtatgaggaaacagaccagatatgaccaaaatactgtggattaatggactgtagtgcagggctcctagcagagcacagtccttgatagtaggtcacatcttttacttcctggtactctccatcttggacagaccaaggcttaggattttgtagattttttagtatgataagtgagaatagcaacagatgaaaagtctcacgacccatttttatatcttcgatgataaccttagaaaaattctgctcgtggaagcagattgaactgtcatttatcccctccttcttgtaataatgttactttgacgcgtaa

SEQ ID NO: 87409 - DNA, 1625 bp, Homo sapiens
tgctgggcttgcgattgccgctcgctccagctgagctaagtgtagcagcagcaccagggcagggactgactccagcccttggactcaggacatcgcagaccttcccttgcgtgcgtgactcattcgcacatccatttctgtttatgcctggggtggggagaaaaatcccaaaccagctccattggatatgactgtgcactggagccggttgtgctgttctctcagctgtacacacccatcaaatcacagtgcccctgaggacgagagaaaattgaagctgtgtaaatgagtatggaagattatgatttcctgttcaaaattgttttaattggcaacgctggtgtggggaagacgtgcctcgtccgaagattcactcagggtcttttccccccaggtcaaggagccacaattggagttgattttatgattaagacagtggagattaatggtgaaaaagtaaagctacagatctgggacacagcaggtcaagagagatttcggtccattacccagagttactaccgaagcgccaatgccttgatcctcacctatgacattacctgtgaggaatccttccgttgccttcctgagtggctgcgggagatagaacaatatgccagcaacaaggtcatcactgtgttagtgggcaacaagattgacctggctgaaaggagagaggtttcccagcagcgagctgaagaattctcagaagctcaggacatgtattatctggagacctcagccaaggaatctgataatgtggagaaactcttccttgacttagcatgccgactcatcagtgaagccagacagaacacacttgtgaacaatgtatcctcacccttacctggagaagggaaaagcatcagctatttgacttgttgtaatttcaactaaaggctgaggcacggagaagaaaaggaatcagcaactgccctgatgggccatgagatgctggggagatctggcgatgactgtggctcccgctctctgaccttctgactcctgtgggctcctgagcttacaaagcatggcaggccaagggcctcgaccacaggccagcattagcagaacatataatggtttcacccttttccagtctggagttggagcaaggagaaaattgcactaggcactccatgatctgcagagcatgttgcttttgtttttttaaaaagcaagtaaaagcgcattcctaaacagagtccggggggaaatgtactgtagggatccctcctgcacatcagtgggtgcatgtgggaactcttctttagggcttcggtggtaatcatctgggggccctggttttcttgtctaccagataaaccaaaactgggaaggccaagtacagtctctgtggtgcgtattgacgaccccatggagattttgaaaagtgttatttctcttgtccacaggcactttcaagaactttgggatgtaaaaatgaaatgaaacctttacccatgaccaacagtaacaatcattgttttaataatatatacaagctccataactccttttggtgctaatgattccgctatttcacagaccaaacgttttagtacattaatgtccttaaatgtgttatatagaaataaaaaaatgggggaagtccatgaatcagc

SEQ ID NO: 87410 - DNA, 2144 bp, Homo sapiens
tgctgggcttgcgattgccgctcgctccagctgagctaagtgtagcagcagcaccagggcagggactgactccagcccttggactcaggacatcgcagaccttcccttgcgtgcgtgactcattcgcacatccatttctgtttatgcctggggtggggagaaaaatcccaaaccagctccattggatatgactgtgcactggagccggttgtgctgttctctcagctgtacacacccatcaaatcacagtgcccctgaggacgagagaaaattgaagctgtgtaaatgagtatggaagattatgatttcctgttcaaaattgttttaattggcaacgctggtgtggggaagacgtgcctcgtccgaagattcactcagggtcttttccccccaggtcaaggagccacaattggagttgattttatgattaagacagtggagattaatggtgaaaaagtaaagctacagatctgggacacagcaggtcaagagagatttcggtccattacccagagttactaccgaagcgccaatgccttgatcctcacctatgacattacctgtgaggaatccttccgttgccttcctgagtggctgcgggagatagaacaatatgccagcaacaaggtcatcactgtgttagtgggcaacaagattgacctggctgaaaggagagaggtttcccagcagcgagctgaagaattctcagaagctcaggacatgtattatctggagacctcagccaaggaatctgataatgtggagaaactcttccttgacttagcatgccgactcatcagtgaagccagacagaacacacttgtgaacaatgtatcctcacccttacctggagaagggaaaagcatcagctatttgacttgttgtaatttcaactaaaggctgaggcacggagaagaaaaggaatcagcaactgccctgatgggccatgagatgctggggagatctggcgatgactgtggctcccgctctctgaccttctgactcctgtgggctcctgagcttacaaagcatggcaggccaagggcctcgaccacaggccagcattagcagaacatataatggtttcacccttttccagtctggagttggagcaaggagaaaattgcactaggcactccatgatctgcagagcatgttgcttttgtttttttaaaaagcaagtaaaagcgcattcctaaacagagtccggggggaaatgtactgtagggatccctcctgcacatcagtgggtgcatgtgggaactcttctttagggcttcggtggtaatcatctgggggccctggttttcttgtctaccagataaaccaaaactgggaaggccaagtacagtctctgtggtgcgtattgacgaccccatggagattttgaaaagtgttatttctcttgtccacaggcactttcaagaactttgggatgtaaaaatgaaatgaaacctttacccatgaccaacagtaacaatcattgttttaataatatatacaagctccataactccttttggtgctaatgattccgctatttcacagaccaaacgttttagtacattaatgtccttaaatgtgttatatagaaataaaaaaatgggggaagtccatgaatcagcactctttctcaaagtctcattactacctttttaaaggtggatttttgggaaaagagaatacttttccttttatgttcccctctgaatctctaccactttcttgtctctccagccctttatgtaaatgaaaacgtttgcaaaatgaaaaaaataaacaaatggttgatgacattctaatataaaaacttagctctaacacattttgagtagtatgaggaaacagaccagatatgaccaaaatactgtggattaatggactgtagtgcagggctcctagcagagcacagtccttgatagtaggtcacatcttttacttcctggtactctccatcttggacagaccaaggcttaggattttgtagattttttagtatgataagtgagaatagcaacagatgaaaagtctcacgacccatttttatatcttcgatgataaccttagaaaaattctgctcgtggaagcagattgaactgtcatttatcccctccttcttgtaataatgttactttgacgcgtaa

SEQ ID NO: 87411 - DNA, 1747 bp, Homo sapiens
gacccacgcgtccgcggacgcgtgggttatgattaagacagtggagattaatggtgaaaaagtaactacagatctgggacacagcaggtcaagagagatttcggtccattacccagagttactaccgaagcgccaatgccttgatcctcacctatgacattacctgtgaggaatccttccgttgccttcctgagtggctgcgggagatagaacaatatgccagcaacaaggtcatcactgtgttagtgggcaacaagattgacctggctgaaaggagagaggtttcccagcagcgagctgaagaattctcagaagctcaggacatgtattatctggagacctcagccaaggaatctgataatgtggagaaactcttccttgacttagcatgccgactcatcagtgaagccagacagaacacacttgtgaacaatgtatcctcacccttacctggagaagggaaaagcatcagctatttgacttgttgtaatttcaactaaaggctgaggcacggagaagaaaaggaatcagcaactgccctgatgggccatgagatgctggggagatctggcgatgactgtggctcccgctctctgaccttctgactcctgtgggctcctgagcttacaaagcatggcaggccaagggcctcgaccacaggccagcattagcagaacatataatggtttcacccttttccagtctggagttggagcaaggagaaaattgcactaggcactccatgatctgcagagcatgttgcttttgtttttttaaaaagcaagtaaaagcgcattcctaaacagagtccggggggaaatgtactgtagggatccctcctgcacatcagtgggtgcatgtgggaactcttctttagggcttcggtggtaatcatctgggggccctggttttcttgtctaccagataaaccaaaactgggaaggccaagtacagtctctgtggtgcgtattgacgaccccatggagattttgaaaagtgttatttctcttgtccacaggcactttcaagaactttgggatgtaaaaatgaaatgaaacctttacccatgaccaacagtaacaatcattgttttaataatatatacaagctccataactccttttggtgctaatgattccgctatttcacagaccaaacgttttagtacattaatgtccttaaatgtgttatatagaaataaaaaaatgggggaagtccatgaatcagcactctttctcaaagtctcattactacctttttaaaggtggatttttgggaaaagagaatacttttccttttatgttcccctctgaatctctaccactttcttgtctctccagccctttatgtaaatgaaaacgtttgcaaaatgaaaaaaataaacaaatggttgatgacattctaatataaaaacttagctctaacacattttgagtagtatgaggaaacagaccagatatgaccaaaatactgtggattaatggactgtagtgcagggctcctagcagagcacagtccttgatagtaggtcacatcttttacttcctggtactctccatcttggacagaccaaggcttaggattttgtagattttttagtatgataagtgagaatagcaacagatgaaaagtctcacgacccatttttatatcttcgatgataaccttagaaaaattctgctcgtggaagcagattgaactgtcatttatcccctccttcttgtaataatgttactttgacgcgtaa

SEQ ID NO: 87412 - DNA, 2711 bp, Homo sapiens
ccagcttcctctcaagatcaaaaaatttattctggggaaaaatcctatgagtgtgctgaatttggaaagagcttcacctggaagtcacagttcaaggtacatctgaaagttcctacaggagaaaaactctatgtatgtattgaatgtgggagggcttttgtacagaagccagaattcatcacacatcagaaaacccatatgagagagaagccctataagtgcaatgaatgtggaaaatccttttttcaagtatcgtctcttttcaggcatcacagaattcataccggagaaaaactatatgaatgtagtgaatgtgggaaaggtttcccttataactcagatctcagtatacatgagaaaattcatactggagagagacaccatgaatgcactgactgtggcaaagcgttcacacaaaagtccacactcaagattcatcagaaaatccatacaggcgagagatcctacatctgtattgaatgcgggcaggccttcatccagaaaacacaattgattgcacaccgaagaattcatagtggagaaaaaccatatgaatgcaataactgtggcaaatccttcatttccaagtcacaacttcaggtacatcaacgtgttcacacaagagtgaagccctatatatgtaccgaatatgggaaggtcttcagcaataattccaacctcattacacatgagaagattcaaagtagagagaaatcttccatatgtactgagtgtgggaaggcctttacctacaggtcagagttgattattcatcagagaattcacactggagagaaaccttatgaatgcagtgactgtgggagagccttcactcagaagtcagcactcacagtgcatcagagaattcatacaggagaaaaatcgtatatatgcatgaaatgtggactggccttcatccggaaggcacacttgattacacatcaaataattcatactggagagaaaccttataaatgtggtcactgtgggaaattgtttacttccaagtcacaactccatgttcataaacgaattcacacaggagaaaagccctatgtatgcaataaatgtgggaaggcattcaccaaccggtcaaatctcattacacatcagaaaactcatacaggagagaaatcttatatatgttccaaatgtggaaaggccttcacccagaggtcagacttgattacacatcagagaatccatactggggagaagccttatgaatgcaatacttgtggaaaagcctttactcagaagtcaaatcttaatatacatcagaaaattcacactggagagagacagtatgaatgccacgaatgtgggaaagccttcaaccagaaatcaatactcattgttcatcagaaaattcatacaggagagaaaccctatgtatgcactgagtgtggaagagctttcatccgcaagtcaaactttattactcatcaaagaattcatactggagagaagccttatgaatgcagtgactgtgggaagtcctttacctccaagtctcagctcctggtgcatcagccagttcacacaggagagaaaccctatgtgtgtgctgagtgtgggaaagcctttagtggcaggtcaaatctcagtaagcaccagaaaactcataccggagaaaagccctacatttgttctgaatgtgggaagacctttcgacagaagtcagagttgattacacatcacagaattcatactggagagaaaccttatgagtgcagtgactgtgggaagtctttcactaaaaaatcacagctccaagtgcatcagcgaattcacactggagagaagccttacgtgtgtgctgagtgtgggaaggcctttagcaacaggtccaatttgaataaacatcagacaacacacactggagacaaaccctacaagtgtggcatctgtgggaaaggcttcgttcagaaatcagtgttcagtgttcatcagagcagccacgcttgagagaaacagtgtgagaaaacccccctgagggttgggtctgattgtacactgttgcacgcatgcagcagaaaaatatgtatattattgtaaatagaaatgaccacatcagaatgtcacacatggctgttctggagagggcctctgagaaggcactgaatgaggcgagggacccttcctacattgtcaccatccccagtaaaccttgggtcattattcatactgacaaggaaccgagtcaatttggtgaataggaaaagccttctcatgaaaactacaatagaatactgttaccaaattcttcataagaaagatcatattatgggaatgataatcctgtttactgtggattaggtatagtgccaacagtttgaatggtaagacaacataatatatatgatagtgatgaatccttctgtgagttgtttgttccagaacacactgtctagtagaattgtgggtattttcttcttttgaatcgaacacagttgtgcatatccaattccccattgagtatttctatcaagcaagagatactgcaataagacaaactccctgtgtattcagacacagacctcagagcgtatgttgagtccccattgtcatagaaaaagacttacagtccccttcattatctgccaggactctctctgagccccacaggttctcagcacatgtgtttgacacccagcacagtgttttttcttattcttcctttctttctctttctttctttctttctttct

SEQ ID NO: 87413 - DNA, 856 bp, Homo sapiens
agagccctctcgcggccgcggcggcagcagcagcgccagccccagcaacactgaggccgccgccgccgcctggcgctcccgccgcccggcccgacatgagtgaggcggttcgggtaccctcgcccgccactccgctggtggtggcggcggccgcgcctgaggagaggaaagggaaggagtcagagcgcgagaagctgccgcccatcgtatcggcgggcgccggcgcgaccgcgggtttggacagaggagccaaaggccaaatttccactttcagcagttttatttcagctgttagcccgaagaaagaagctgctgaaaacagaagttcacctgcacatcttgttttccctaacatcaagaatgtgagagaaccaccaccaatttgccttgatgttagacaaaaacagcgtacatctatggatgcatcatcatccgaaatgaaggccccagtccttccagaacctattcttcctatccagcccaaaactgtgaaagactttcaggaagatgtagaaaaagttaagtcatcaggagattggaaagcagtacatgatttttatctaacaacgtttgattctttcccagaattaaatgctgcatttaagaaagatgccactgcctcatttaacaccattgaagactctgggattaatgctaaatttgtgaatgctgtgtatgataccttacttaatactgtaagtattatgacatgcaagtaatattattctgtgtctcttctgtatatcaaaagcagccatacaaatattgtaaaaatcaccttataattaccttagaaactctgatacaattttatagtaaatgtagctggaattctcataaagttagattattttat

SEQ ID NO: 87414 - DNA, 1351 bp, Homo sapiens
  misc_feature (17)..(17): n is a, c, g, or t
gatgaggccccgggtantcggccgaggaggaaaggaaattgtctaggtgtcctggtggtggaggtggggggtattttaatttcataattaaaagctctcttcttcggctttcaagtttttactcctatttgtaatgatttgattgaggactgtgcagcagagtttggggtttggacagaggagccaaaggccaaatttccactttcagcagttttatttcagctgttagcccgaagaaagaagctgctgaaaacagaagttcacctgcacatcttgttttccctaacatcaagaatgtgagagaaccaccaccaatttgccttgatgttagacaaaaacagcgtacatctatggatgcatcatcatccgaaatgaaggccccagtccttccagaacctattcttcctatccagcccaaaactgtgaaagactttcaggaagatgtagaaaaagttaagtcatcaggagattggaaagcagtacatgatttttatctaacaacgtttgattctttcccagaattaaatgctgcatttaagaaagatgccactgcctcatttaacaccattgaagactctgggattaatgctaaatttgtgaatgctgtgtatgataccttacttaatactcctcaagacgttcagaagacagtattaaagggaatcattaacagcctgttacgagaatggaaaggtccacgaacaaaagatgatcttagagcatattttatactttttacagaatcctcagtttaataacacatctacgtatgtcatctatgctcacttgctacgacagatagctaccttagtggaagctgaccatcatttcctagttcactggtttaaaaagtaaatcattctatgatattaagaacttttatagtctcacagttttaagtttggtattagtaattttacaataaaatatatttaaatattttcaggtctttagaaatgatgcttatattcacaatgcttcaaaagccagttacaaaaatctactttagtactacataaaggataattaaaaatctgtttttaatgtaagtaaccaatttgtttgcacaagctgttgagaatttctgtctactgccttcactttttatatagcacattcctattattggttttttacgtatctcaaagatggtgactggatttgctcagacactactattttaatgtgtgtctttttattttctatctgtaaattcataaatttcaccattatttaaatggcgctttctccttacctaaaaatgtcattgtaaaatataggctagccatcaatatcaatttgtaaaagcataatacttttttcacagaactatacccacatgaacaatgac

SEQ ID NO: 87415 - DNA, 810 bp, Homo sapiens
gccgctccagtagactgagaaaaaggaaaaggagggggcgacaagaaaggaaaggaaattgtctaggtgtcctggtggtggaggtggggggtattttaatttcataattaaaagctctcttcttcggctttcaagtttttactcctatttgtaatgatttgattgaggactgtgcagcagagtttggggtttggacagaggagccaaaggccaaatttccactttcagcagttttatttcagctgttagcccgaagaaagaagctgctgaaaacagaagttcacctgcacatcttgttttccctaacatcaagaatgtgagagaaccaccaccaatttgccttgatgttagacaaaaacagcgtacatctatggatgcatcatcatccgaaatgaaggccccagtccttccagaacctattcttcctatccagcccaaaactgtgaaagactttcaggaagatgtagaaaaagttaagtcatcaggagattggaaagcagtacatgatttttatctaacaacgtttgattctttcccagaattaaatgctgcatttaagaaagatgccactgcctcatttaacaccattgaagactctgggattaatgctaaatttgtgaatgctgtgtatgataccttacttaatactgtaagtattatgacatgcaagtaatattattctgtgtctcttctgtatatcaaaagcagccatacaaatattgtaaaaatcaccttataattaccttagaaactctgatacaattttatagtaaatgtagctggaattctcataaagttagattattttat

SEQ ID NO: 87416 - DNA, 719 bp, Homo sapiens
ccattaccagatgaagttatcagctgaggtcagtcccagattttgagttgttctgtcaataagtcagttttgaaaaacacatggtgctctcttatttttcacaatttcaggaggtttttttcaataatatttattttttccatgatgtgctgaaatgtacattgtgctagaattttatattttggaaacattaactaaaggcttttcttagtttacaagtattccttcagcgtccctttatcatttaaaagttgtcagaagctgtatgtgtttctccccttgttctttgtgatatatgaggctaactcattttacaatggcaaaagtttcacaaccagcttttacttcgtttttctagcttttaatcaaggaacacccaggttttttgcttttaattggatgatagtgattggtaccatttatgaaggcactttttatgaaggtgctttatatacattttctttttcgatactcaaaacaacccttaagatagagaatatcattcccattttacagataaggacattgagaatcaaagtgtaaggaacatgcctaagggcatatagctagtaagtggtagaattagccctcagacccagatctgtcttaactccaaagcccatgctcttttcactgtatagccgcagtgtaaatgaaagtctctgttaattaaataacaaataggttattgttattttataatctcaaattttgtttcc

SEQ ID NO: 87417 - DNA, 211 bp, Homo sapiens
atctcaaagtgaatgtaatacaaaataattcatttgttttctgttcatgttgaattaatcttgtattttataattttgaaaagtttaatgattcattattttgaatgtgtttttatacttcacagtgagagaaccaccaccaatttgccttgatgttagacaaaaacagcgtacatctatggatgcatcatcatccgaaatgaaggcccca

SEQ ID NO: 87418 - DNA, 1417 bp, Homo sapiens
agagccctctcgcggccgcggcggcagcagcagcgccagccccagcaacactgaggccgccgccgccgcctggcgctcccgccgcccggcccgacatgagtgaggcggttcgggtaccctcgcccgccactccgctggtggtggcggcggccgcgcctgaggagaggaaagggaaggagtcagagcgcgagaagctgccgcccatcgtatcggcgggcgccggcgcgaccgcgggtttggacagaggagccaaaggccaaatttccactttcagcagttttatttcagctgttagcccgaagaaagaagctgctgaaaacagaagttcacctgcacatcttgttttccctaacatcaagaatgtgagagaaccaccaccaatttgccttgatgttagacaaaaacagcgtacatctatggatgcatcatcatccgaaatgaaggccccagtccttccagaacctattcttcctatccagcccaaaactgtgaaagactttcaggaagatgtagaaaaagttaagtcatcaggagattggaaagcagtacatgatttttatctaacaacgtttgattctttcccagaattaaatgctgcatttaagaaagatgccactgcctcatttaacaccattgaagactctgggattaatgctaaatttgtgaatgctgtgtatgataccttacttaatactcctcaagacgttcagaagacagtattaaagggaatcattaacagcctgttacgagaatggaaaggtccacgaacaaaagatgatcttagagcatattttatactttttacagaatcctcagtttaataacacatctacgtatgtcatctatgctcacttgctacgacagatagctaccttagtggaagctgaccatcatttcctagttcactggtttaaaaagtaaatcattctatgatattaagaacttttatagtctcacagttttaagtttggtattagtaattttacaataaaatatatttaaatattttcaggtctttagaaatgatgcttatattcacaatgcttcaaaagccagttacaaaaatctactttagtactacataaaggataattaaaaatctgtttttaatgtaagtaaccaatttgtttgcacaagctgttgagaatttctgtctactgccttcactttttatatagcacattcctattattggttttttacgtatctcaaagatggtgactggatttgctcagacactactattttaatgtgtgtctttttattttctatctgtaaattcataaatttcaccattatttaaatggcgctttctccttacctaaaaatgtcattgtaaaatataggctagccatcaatatcaatttgtaaaagcataatacttttttcacagaactatacccacatgaacaatgac

SEQ ID NO: 87419 - DNA, 398 bp, Homo sapiens
gacaagtcgagagctgatgcagcttccacaaaacctcggccaacccagcagacaactctggagtggatttatccaacagagatgatccctttgggcccaaattgctgtgcttctgtaccccacctcactctgtcaccagatgcaggctgtcccaggaagggtgaccttggctgaagctgtagctgaggctgagcctgaaggaaccgacagctgggggctgtttgcaaagccgtctccctgaagctgggcctcaagtccttcttcgaggtgaggttgggggcagcacatctccatggcatgcagagcttgatgaggagcttgagtttgacctgaccctgaagggcaagtggggctttggtaggcagagaggagcaggaagaacttgccagctaagcaaa

SEQ ID NO: 87420 - DNA, 325 bp, Homo sapiens
taaagatcactttaaaagtgaagcgttagattttcagttttcagcacaatcaagtttcatactctcatgctgcattgacagaagatgtcctacatcctaaatagtgttcctacagaatggtgaaacctctgtcatcttaggtactgtattgctccgagactttcttagagaattggcaaggcctgcagaacagtgtgaatgagcgtcaaaacttgattgtattaaaccattaaaaatcttgggtccgtttcgaagcatatgtcttagtctatgcggactaatccttagcatttctagaatataatataaaacttaaagcttccta

SEQ ID NO: 87421 - DNA, 467 bp, Homo sapiens
aacatcttccacttagcttttttcataatttttgaaatatttatgaaaatttttattagatatctgaaatatggatttgaatttacaacaaagtgagatattggcattctgtattatagctgaattatattggatttgtaagacttaaaagaaaagtgacaaaacccaaaatgacataaggaaaacattcctaattaaaattttttaatttctgaatttcgaatctctaaaaatcataaaattctaaggtgtgtaattgatcttatgaggcctttgtttaggctcctaagcacagatattagctgctgcacatgacaggaaattcaggcacattaattgtctcctagaatgacacattggcaatcagaagaacaaaacaggttctacagtcacttcagtatatcatttacaatgtgccaaaagtttcagagatgcaaactaaaatgagaaagtatgaccaatactct

SEQ ID NO: 87422 - DNA, 3145 bp, Homo sapiens
ccaccagagtccatctgataactaagatggtaactacatgactaacaggccggtgacgtatagagcatggatatgctggacaaaggggtgagtcatatcccaggtaggatgaagcagggtgacttgagatttcactattcagtatggtgcacaatttaaaacttaggaattgtttatttcttggaacttttcgtttaatgtttttggactgcagttagccacaggtaactgaaactgtggaaagtgaggattggaggataagcagagactgtggtattcatttcattgcacagtgcctagaatacagtaggtgtactataaatattttgtaaagggacaacttttctgaaactaaaaatatttatgttttacccaataatttttcttctggaaatttatgctaaggaaatattcagagatgcttacaaagttttatgcatgagtgtccatgttatttgtaattgtgaaaaatgaaaataactcaaaagtttaacagtggtcatctaaagtattgtatacactgtatatataggttgaatagaaggtcatcctattcatttattaatgagaggtacaatctctagggatctgtaaaatctattttgtcttaaccaaagaacaaatttttgacatatcttgaataggatgactataaattatgacttttaaattgttgtaatttttgtactattatctgatatttttatttttatgtattttcgtaagtagtttagagatagtcacattttaaaaatctaagatcaagcaaatgaagcttatttttatgtattcatagtataaaagaccttcagtaaataggtaatatttttgttttattctagaaaacagctccttgaacacagtgagctggcttttcacacattgcagttgttagtgtttactgcccttgccattttaattatgaggctaaagatgtttttgacaccgcacatgtgtgttatggcttccttgatatgctctcgacagctctttggctggctttttcgcagagttcgttttgagaaggttatctttggcattttaacagtgatgtcaatacaaggttatgcaaacctccgtaatcaatggagcataataggagaatttaataatttgcctcaggaagaacttttacagtggatcaaatacagtaccacatcagatgctgtctttgcaggtgccatgcctacaatggcaagcatcaagctgtctacacttcatcccattgtgaatcatccacattacgaagatgcagacttgagggctcggacaaaaatagtttattctacatatagtcgaaaatctgccaaagaagtaagagataaattgttggagttacatgtgaattattatgttttagaagaggcatggtgtgttgtgagaactaagcctggttgcagtatgcttgaaatctgggatgtggaagacccttccaatgcagctaaccctcccttatgtagcgtcctgctcgaagacgccaggccttacttcaccacagtatttcagaatagtgtgtacagagtattaaaggttaactgagaaggatactacccattttactatggcacaatgccgtgtgtcaaaaacaatcaccctttggcttattcacattaataaaaatcacaagctttaataacagacacttaaaaataagataaaaatggattggaaatttttctgattactaaaaggtaaattacttttctgttcattgaatgtcagccttattaagcttgtcatataagttattaaatcattcatgtcatactgcataaacaaatgttcatttcagaattttaaagagaaatgtatataaaagaacaatgaattttaataaatcaggggtatgtaagtcctttttcatccaactaggtgaattgcttcagattttctctagtaccagagggtacctcctcaaactctttgaaccacttaaggcagaagaatgcaagctctgaaatgacatccttaaaatgctgatactggtcacagcctctttacctctgtgaggaaattgtaacagtgtgtcttttaaggtgtttttattttaccagcccttaagaaagatctctaataccttttaatacttttttttaataatttcaagttgaagtgtttttaaaaacactttgttttgtaatgttttgaatctcttgagatgtgtttaccccactagatacatatttgccactggttagttctccatctaagctcaagaggttattcatctctctttagattccagtggcttttcttttaacatccaggtaaaacagaaactgctatggtatacaaccaagttttggggttaaacataatcagaaaagaaaatccagttaaatttatgaagtgagattttcagatcctagatcttgaataaaggaaaggtcttttcatcttgatggccccaaagcttgttggtcatggtctttatttctggccactatcttcttaaataatatatttttaagccctcatttatttttggttttgggtgaggaaagtcatgttttctaagtcctctcccctaataaaacctacccaacaatagtgctttgaaaagtggtagttatcttgaagatactcttgccaaatgcaaagataaacattctttttgtctgctttataaatatgaaatatgccagatctatagtattttaatgtgcatctactttaaatgagtcatcttggggtttttataattcccttatgttcttgcccctctacacttgaaataacaaaatgccttaattttatggattagttctcttatagtagacaggcagctatatgcagcaaaaccaataaagttatttttcaactttcatagttgtaaaatatcttataacagaatacaaaacagctaagaaaacatgccacattttattttagcattttcaaataatttgtttttggtgtaagcacaggataaaaaaggagagcgtcaaagaaaagagacataacacctaacattcataaaaattaacaaagtatattttggatgatgtttttacaggaaatattttaaataagttggtagaacttttaaaatggtactgtattagctaataaaatattcagtacaaatatatgtttggatttatgcattaaaaaactaataaaattatttccaactttaaaaaaa

SEQ ID NO: 87423 - DNA, 3245 bp, Homo sapiens
ccaccagagtccatctgataactaagatggtaactacatgactaacaggccggtgacgtatagagcatggatatgctggacaaaggggtgagtcatatcccaggtaggatgaagcagggtgacttgagatttcactattcagtatggtgcacaatttaaaacttaggaattgtttatttcttggaacttttcgtttaatgtttttggactgcagttagccacaggtaactgaaactgtggaaagtgaggattggaggataagcagagactgtggtattcatttcattgcacagtgcctagaatacagtaggtgtactataaatattttgtaaagggacaacttttctgaaactaaaaatatttatgttttacccaataatttttcttctggaaatttatgctaaggaaatattcagagatgcttacaaagttttatgcatgagtgtccatgttatttgtaattgtgaaaaatgaaaataactcaaaagtttaacagtggtcatctaaagtattgtatacactgtatatataggttgaatagaaggtcatcctattcatttattaatgagaggtacaatctctagggatctgtaaaatctattttgtcttaaccaaagaacaaatttttgacatatcttgaataggatgactataaattatgacttttaaattgttgtaatttttgtactattatctgatatttttatttttatgtattttcgtaagtagtttagagatagtcacattttaaaaatctaagatcaagcaaatgaagcttatttttatgtattcatagtataaaagaccttcagtaaataggtaatatttttgttttattctagaaaacagctccttgaacacagtgagctggcttttcacacattgcagttgttagtgtttactgcccttgccattttaattatgaggctaaagatgtttttgacaccgcacatgtgtgttatggcttccttgatatgctctcgacagctctttggctggctttttcgcagagttcgttttgagaaggttatctttggcattttaacagtgatgtcaatacaaggttatgcaaacctccgtaatcaatggagcataataggagaatttaataatttgcctcaggaagaacttttacagtggatcaaatacagtaccacatcagatgctgtctttgcaggtgccatgcctacaatggcaagcatcaagctgtctacacttcatcccattgtgaatcatccacattacgaagatgcagacttgagggctcggacaaaaatagtttattctacatatagtcgaaaatctgccaaagaagtaagagataaattgttggagttacatgtgaattattatgttttagaagaggcatggtgtgttgtgagaactaagtttatacttcaagatggacaagaagttctatcagctgctgagaaatgatgccagatggtaactcagatatacaagaaatactcaaatgtgctggaaatggcctggttgcagtatgcttgaaatctgggatgtggaagacccttccaatgcagctaaccctcccttatgtagcgtcctgctcgaagacgccaggccttacttcaccacagtatttcagaatagtgtgtacagagtattaaaggttaactgagaaggatactacccattttactatggcacaatgccgtgtgtcaaaaacaatcaccctttggcttattcacattaataaaaatcacaagctttaataacagacacttaaaaataagataaaaatggattggaaatttttctgattactaaaaggtaaattacttttctgttcattgaatgtcagccttattaagcttgtcatataagttattaaatcattcatgtcatactgcataaacaaatgttcatttcagaattttaaagagaaatgtatataaaagaacaatgaattttaataaatcaggggtatgtaagtcctttttcatccaactaggtgaattgcttcagattttctctagtaccagagggtacctcctcaaactctttgaaccacttaaggcagaagaatgcaagctctgaaatgacatccttaaaatgctgatactggtcacagcctctttacctctgtgaggaaattgtaacagtgtgtcttttaaggtgtttttattttaccagcccttaagaaagatctctaataccttttaatacttttttttaataatttcaagttgaagtgtttttaaaaacactttgttttgtaatgttttgaatctcttgagatgtgtttaccccactagatacatatttgccactggttagttctccatctaagctcaagaggttattcatctctctttagattccagtggcttttcttttaacatccaggtaaaacagaaactgctatggtatacaaccaagttttggggttaaacataatcagaaaagaaaatccagttaaatttatgaagtgagattttcagatcctagatcttgaataaaggaaaggtcttttcatcttgatggccccaaagcttgttggtcatggtctttatttctggccactatcttcttaaataatatatttttaagccctcatttatttttggttttgggtgaggaaagtcatgttttctaagtcctctcccctaataaaacctacccaacaatagtgctttgaaaagtggtagttatcttgaagatactcttgccaaatgcaaagataaacattctttttgtctgctttataaatatgaaatatgccagatctatagtattttaatgtgcatctactttaaatgagtcatcttggggtttttataattcccttatgttcttgcccctctacacttgaaataacaaaatgccttaattttatggattagttctcttatagtagacaggcagctatatgcagcaaaaccaataaagttatttttcaactttcatagttgtaaaatatcttataacagaatacaaaacagctaagaaaacatgccacattttattttagcattttcaaataatttgtttttggtgtaagcacaggataaaaaaggagagcgtcaaagaaaagagacataacacctaacattcataaaaattaacaaagtatattttggatgatgtttttacaggaaatattttaaataagttggtagaacttttaaaatggtactgtattagctaataaaatattcagtacaaatatatgtttggatttatgcattaaaaaactaataaaattatttccaactttaaaaaaa

SEQ ID NO: 87424 - DNA, 3070 bp, Homo sapiens
ccaccagagtccatctgataactaagatggtaactacatgactaacaggccggtgacgtatagagcatggatatgctggacaaaggggtgagtcatatcccaggtaggatgaagcagggtgacttgagatttcactattcagtatggtgcacaatttaaaacttaggaattgtttatttcttggaacttttcgtttaatgtttttggactgcagttagccacaggtaactgaaactgtggaaagtgaggattggaggataagcagagactgtggtattcatttcattgcacagtgcctagaatacagtaggtgtactataaatattttgtaaagggacaacttttctgaaactaaaaatatttatgttttacccaataatttttcttctggaaatttatgctaaggaaatattcagagatgcttacaaagttttatgcatgagtgtccatgttatttgtaattgtgaaaaatgaaaataactcaaaagtttaacagtggtcatctaaagtattgtatacactgtatatataggttgaatagaaggtcatcctattcatttattaatgagaggtacaatctctagggatctgtaaaatctattttgtcttaaccaaagaacaaatttttgacatatcttgaataggatgactataaattatgacttttaaattgttgtaatttttgtactattatctgatatttttatttttatgtattttcgtaagtagtttagagatagtcacattttaaaaatctaagatcaagcaaatgaagcttatttttatgtattcatagtataaaagaccttcagtaaataggtaatatttttgttttattctagaaaacagctccttgaacacagtgagctggcttttcacacattgcagttgttagtgtttactgcccttgccattttaattatgaggctaaagatgtttttgacaccgcacatgtgtgttatggcttccttgatatgctctcgacagatgctgtctttgcaggtgccatgcctacaatggcaagcatcaagctgtctacacttcatcccattgtgaatcatccacattacgaagatgcagacttgagggctcggacaaaaatagtttattctacatatagtcgaaaatctgccaaagaagtaagagataaattgttggagttacatgtgaattattatgttttagaagaggcatggtgtgttgtgagaactaagtttatacttcaagatggacaagaagttctatcagctgctgagaaatgatgccagatggtaactcagatatacaagaaatactcaaatgtgctggaaatggcctggttgcagtatgcttgaaatctgggatgtggaagacccttccaatgcagctaaccctcccttatgtagcgtcctgctcgaagacgccaggccttacttcaccacagtatttcagaatagtgtgtacagagtattaaaggttaactgagaaggatactacccattttactatggcacaatgccgtgtgtcaaaaacaatcaccctttggcttattcacattaataaaaatcacaagctttaataacagacacttaaaaataagataaaaatggattggaaatttttctgattactaaaaggtaaattacttttctgttcattgaatgtcagccttattaagcttgtcatataagttattaaatcattcatgtcatactgcataaacaaatgttcatttcagaattttaaagagaaatgtatataaaagaacaatgaattttaataaatcaggggtatgtaagtcctttttcatccaactaggtgaattgcttcagattttctctagtaccagagggtacctcctcaaactctttgaaccacttaaggcagaagaatgcaagctctgaaatgacatccttaaaatgctgatactggtcacagcctctttacctctgtgaggaaattgtaacagtgtgtcttttaaggtgtttttattttaccagcccttaagaaagatctctaataccttttaatacttttttttaataatttcaagttgaagtgtttttaaaaacactttgttttgtaatgttttgaatctcttgagatgtgtttaccccactagatacatatttgccactggttagttctccatctaagctcaagaggttattcatctctctttagattccagtggcttttcttttaacatccaggtaaaacagaaactgctatggtatacaaccaagttttggggttaaacataatcagaaaagaaaatccagttaaatttatgaagtgagattttcagatcctagatcttgaataaaggaaaggtcttttcatcttgatggccccaaagcttgttggtcatggtctttatttctggccactatcttcttaaataatatatttttaagccctcatttatttttggttttgggtgaggaaagtcatgttttctaagtcctctcccctaataaaacctacccaacaatagtgctttgaaaagtggtagttatcttgaagatactcttgccaaatgcaaagataaacattctttttgtctgctttataaatatgaaatatgccagatctatagtattttaatgtgcatctactttaaatgagtcatcttggggtttttataattcccttatgttcttgcccctctacacttgaaataacaaaatgccttaattttatggattagttctcttatagtagacaggcagctatatgcagcaaaaccaataaagttatttttcaactttcatagttgtaaaatatcttataacagaatacaaaacagctaagaaaacatgccacattttattttagcattttcaaataatttgtttttggtgtaagcacaggataaaaaaggagagcgtcaaagaaaagagacataacacctaacattcataaaaattaacaaagtatattttggatgatgtttttacaggaaatattttaaataagttggtagaacttttaaaatggtactgtattagctaataaaatattcagtacaaatatatgtttggatttatgcattaaaaaactaataaaattatttccaactttaaaaaaa

SEQ ID NO: 87425 - DNA, 3126 bp, Homo sapiens
aactgggaggtcttattacagtactgtgcttctttttcaaccatggagaggccacccgtgtgatgtggacaccacctctccgtgaaagtttttcctatcctttccttgtacttcagatgtgtattttaactttgattctcaggacctcaagcaatgatagaaggcccttcattgcactctgtctttccaatgttgcttttatgcttccctggcaatttgctcagtttatactttttacacagatagcatcattatttcccatgtatgttgtgggatacattgaaccaagcaaatttcagaagatcatttatatgaacatgatttcagttacccttagtttcattttgatgtttggaaattcaatgtacttatcttcttattattcttcatctttgttaatgacgtgggcaataattctaaagagaaatgaaattcaaaaactgggagtatctaaactcaacttttggctaattcaaggtagtgcctggtggtgtggaacaatcattttgaaatttctgacatctaaaatcttaggcgtttcagaccacattcgcctgagtgatcttatagcagccagaatcttaaggtatacagattttgatactttaatatatacctgtgctcccgaatttgacttcatggaaaaagcgactccgctgagatacacaaagacattattgcttccagttgttatggtgattacatgttttatctttaaaaagactgttcgtgatatttcatatgttttagctacaaacatttatctaagacagatggagcacagggaaatgtgtcttggcattctaaaaaagaatgaatggagaaccctggacactgttcccataaggagtacatgaagggacttgggatatttaattggataatagaagattgaaggaaaacagctccttgaacacagtgagctggcttttcacacattgcagttgttagtgtttactgcccttgccattttaattatgaggctaaagatgtttttgacaccgcacatgtgtgttatggcttccttgatatgctctcgacagatgctgtctttgcaggtgccatgcctacaatggcaagcatcaagctgtctacacttcatcccattgtgaatcatccacattacgaagatgcagacttgagggctcggacaaaaatagtttattctacatatagtcgaaaatctgccaaagaagtaagagataaattgttggagttacatgtgaattattatgttttagaagaggcatggtgtgttgtgagaactaagtttatacttcaagatggacaagaagttctatcagctgctgagaaatgatgccagatggtaactcagatatacaagaaatactcaaatgtgctggaaatggcctggttgcagtatgcttgaaatctgggatgtggaagacccttccaatgcagctaaccctcccttatgtagcgtcctgctcgaagacgccaggccttacttcaccacagtatttcagaatagtgtgtacagagtattaaaggttaactgagaaggatactacccattttactatggcacaatgccgtgtgtcaaaaacaatcaccctttggcttattcacattaataaaaatcacaagctttaataacagacacttaaaaataagataaaaatggattggaaatttttctgattactaaaaggtaaattacttttctgttcattgaatgtcagccttattaagcttgtcatataagttattaaatcattcatgtcatactgcataaacaaatgttcatttcagaattttaaagagaaatgtatataaaagaacaatgaattttaataaatcaggggtatgtaagtcctttttcatccaactaggtgaattgcttcagattttctctagtaccagagggtacctcctcaaactctttgaaccacttaaggcagaagaatgcaagctctgaaatgacatccttaaaatgctgatactggtcacagcctctttacctctgtgaggaaattgtaacagtgtgtcttttaaggtgtttttattttaccagcccttaagaaagatctctaataccttttaatacttttttttaataatttcaagttgaagtgtttttaaaaacactttgttttgtaatgttttgaatctcttgagatgtgtttaccccactagatacatatttgccactggttagttctccatctaagctcaagaggttattcatctctctttagattccagtggcttttcttttaacatccaggtaaaacagaaactgctatggtatacaaccaagttttggggttaaacataatcagaaaagaaaatccagttaaatttatgaagtgagattttcagatcctagatcttgaataaaggaaaggtcttttcatcttgatggccccaaagcttgttggtcatggtctttatttctggccactatcttcttaaataatatatttttaagccctcatttatttttggttttgggtgaggaaagtcatgttttctaagtcctctcccctaataaaacctacccaacaatagtgctttgaaaagtggtagttatcttgaagatactcttgccaaatgcaaagataaacattctttttgtctgctttataaatatgaaatatgccagatctatagtattttaatgtgcatctactttaaatgagtcatcttggggtttttataattcccttatgttcttgcccctctacacttgaaataacaaaatgccttaattttatggattagttctcttatagtagacaggcagctatatgcagcaaaaccaataaagttatttttcaactttcatagttgtaaaatatcttataacagaatacaaaacagctaagaaaacatgccacattttattttagcattttcaaataatttgtttttggtgtaagcacaggataaaaaaggagagcgtcaaagaaaagagacataacacctaacattcataaaaattaacaaagtatattttggatgatgtttttacaggaaatattttaaataagttggtagaacttttaaaatggtactgtattagctaataaaatattcagtacaaatatatgtttggatttatgcattaaaaaactaataaaattatttccaactttaaaaaaa

SEQ ID NO: 87426 - DNA, 811 bp, Homo sapiens
attttaaaatcttttaaattattgtttaaatttaaagggctcggacaaaaatagtttattctacatatagtcgaaaatctgccaaagaagtaagagataaattgttggagttacatgtgaattattatgttttagaagaggcatggtgtgttgtgagaactaagtgagtattaaccctatgctatctgatatggtatatttttgagcaacaaatgtttcactttattatagtagtcctgattctttaagaatttttattttaaatttattaaaatattatcctggtaccttagtttaaattatttcatctagagacataaaactatactatcaatgaagtagaatttaattccaaacattatagtatatttaatatcctgatttttcaatttaacatcttccacttagcttttttcataatttttgaaatatttatgaaaatttttattagatatctgaaatatggatttgaatttacaacaaagtgagatattggcattctgtattatagctgaattatattggatttgtaagacttaaaagaaaagtgacaaaacccaaaatgacataaggaaaacattcctaattaaaattttttaatttctgaatttcgaatctctaaaaatcataaaattctaaggtgtgtaattgatcttatgaggcctttgtttaggctcctaagcacagatattagctgctgcacatgacaggaaattcaggcacattaattgtctcctagaatgacacattggcaatcagaagaacaaaacaggttctacagtcacttcagtatatcatttacaatgtgcca

SEQ ID NO: 87427 - DNA, 3072 bp, Homo sapiens
aactgggaggtcttattacagtactgtgcttctttttcaaccatggagaggccacccgtgtgatgtggacaccacctctccgtgaaagtttttcctatcctttccttgtacttcagatgtgtattttaactttgattctcaggacctcaagcaatgatagaaggcccttcattgcactctgtctttccaatgttgcttttatgcttccctggcaatttgctcagtttatactttttacacagatagcatcattatttcccatgtatgttgtgggatacattgaaccaagcaaatttcagaagatcatttatatgaacatgatttcagttacccttagtttcattttgatgtttggaaattcaatgtacttatcttcttattattcttcatctttgttaatgacgtgggcaataattctaaagagaaatgaaattcaaaaactgggagtatctaaactcaacttttggctaattcaaggtagtgcctggtggtgtggaacaatcattttgaaatttctgacatctaaaatcttaggcgtttcagaccacattcgcctgagtgatcttatagcagccagaatcttaaggtatacagattttgatactttaatatatacctgtgctcccgaatttgacttcatggaaaaagcgactccgctgagatacacaaagacattattgcttccagttgttatggtgattacatgttttatctttaaaaagactgttcgtgatatttcatatgttttagctacaaacatttatctaagaaaacagctccttgaacacagtgagctggcttttcacacattgcagttgttagtgtttactgcccttgccattttaattatgaggctaaagatgtttttgacaccgcacatgtgtgttatggcttccttgatatgctctcgacagctctttggctggctttttcgcagagttcgttttgagaaggttatctttggcattttaacagtgatgtcaatacaaggttatgcaaacctccgtaatcaatggagcataataggagaatttaataatttgcctcaggaagaacttttacagtggatcaaatacagtaccacatcagatgctgtctttgcaggtgccatgcctacaatggcaagcatcaagctgtctacacttcatcccattgtgaatcatccacattacgaagatgcagacttgagggctcggacaaaaatagtttattctacatatagtcgaaaatctgccaaagaagtaagagataaattgttggagttacatgtgaattattatgttttagaagaggcatggtgtgttgtgagaactaagcctggttgcagtatgcttgaaatctgggatgtggaagacccttccaatgcagctaaccctcccttatgtagcgtcctgctcgaagacgccaggccttacttcaccacagtatttcagaatagtgtgtacagagtattaaaggttaactgagaaggatactacccattttactatggcacaatgccgtgtgtcaaaaacaatcaccctttggcttattcacattaataaaaatcacaagctttaataacagacacttaaaaataagataaaaatggattggaaatttttctgattactaaaaggtaaattacttttctgttcattgaatgtcagccttattaagcttgtcatataagttattaaatcattcatgtcatactgcataaacaaatgttcatttcagaattttaaagagaaatgtatataaaagaacaatgaattttaataaatcaggggtatgtaagtcctttttcatccaactaggtgaattgcttcagattttctctagtaccagagggtacctcctcaaactctttgaaccacttaaggcagaagaatgcaagctctgaaatgacatccttaaaatgctgatactggtcacagcctctttacctctgtgaggaaattgtaacagtgtgtcttttaaggtgtttttattttaccagcccttaagaaagatctctaataccttttaatacttttttttaataatttcaagttgaagtgtttttaaaaacactttgttttgtaatgttttgaatctcttgagatgtgtttaccccactagatacatatttgccactggttagttctccatctaagctcaagaggttattcatctctctttagattccagtggcttttcttttaacatccaggtaaaacagaaactgctatggtatacaaccaagttttggggttaaacataatcagaaaagaaaatccagttaaatttatgaagtgagattttcagatcctagatcttgaataaaggaaaggtcttttcatcttgatggccccaaagcttgttggtcatggtctttatttctggccactatcttcttaaataatatatttttaagccctcatttatttttggttttgggtgaggaaagtcatgttttctaagtcctctcccctaataaaacctacccaacaatagtgctttgaaaagtggtagttatcttgaagatactcttgccaaatgcaaagataaacattctttttgtctgctttataaatatgaaatatgccagatctatagtattttaatgtgcatctactttaaatgagtcatcttggggtttttataattcccttatgttcttgcccctctacacttgaaataacaaaatgccttaattttatggattagttctcttatagtagacaggcagctatatgcagcaaaaccaataaagttatttttcaactttcatagttgtaaaatatcttataacagaatacaaaacagctaagaaaacatgccacattttattttagcattttcaaataatttgtttttggtgtaagcacaggataaaaaaggagagcgtcaaagaaaagagacataacacctaacattcataaaaattaacaaagtatattttggatgatgtttttacaggaaatattttaaataagttggtagaacttttaaaatggtactgtattagctaataaaatattcagtacaaatatatgtttggatttatgcattaaaaaactaataaaattatttccaactttaaaaaaa

SEQ ID NO: 87428 - DNA, 353 bp, Homo sapiens
cttaactttttccagttgctttatttcatgggtttctttctgaggcagctgcatcactcataaatttggatctaagttgaaatactcattaccttcttgatatagtttggaaaggtgtcctctctaaacctcatgttgaaatgtaattcccaatgttggaggtggggcctagtgggaggtgtttgggtcatgggggaggatcccttagggcttggtgccatcctcacaatagtgagtgagttcttgcaagatctggttgtttaaagcgtgtgaatatccagcctcttgctcctgccatgtgagatgcctgctccccttttccttctgctatgactggaagcttcctgaggcct

SEQ ID NO: 87429 - DNA, 445 bp, Homo sapiens
gacagaggagcttggcaaaaggtgtgagcagcctgagagaagaaccaggtagatgaacggagaagctaatgaatcatacagcatttgtcatgggactcagcttcaggctatgtcagactaaatggtgttacacacacttttctgctgagaacaattagaaagctgaattaaacaactaaactatttcaagagattgtagagctgccaagaccaccaggatgcaaggggccaagatgctgaagagaagcacatggaagtaagcctgacatccggagctgcctttcacttcaaggcataagtccctgtgtaagcaacacaggacttgattctatcctactgacctgcttgactctccttgcatcaggagcacattgaatcactaccgctgcacgtccaagggctggacggccaagatgtcaatcaaaatgaaatggcaaagagactc

SEQ ID NO: 87430 - DNA, 298 bp, Homo sapiens
cccaaacatgccccaaacttctctagggatgcctgcccgggctaccatgggctgcttccagacatgatttcaggaaggatgtgggatccacagtgtgtagctttaaggctctgtcacttacctgtcgtggataccaactatggattcagtttcttaacagtggaaatgggtgtgtgttaacatttccaaagcaattgactgtgcttcttcgtcaggtgagcacatgcagcccgtgagacccaggatgccagctgtagctttggtttgcatgaagaatgcacacgtggaaatatttggg

SEQ ID NO: 87431 - DNA, 445 bp, Homo sapiens
tccttggttctaccatgccaactttaccttctcgtccctcagtgggatgctagggcttgggttaattcatctctctccttcaaggcgacatgaagcccctgagaacaggggcatatttttgcccagccattacctacaatgatacaggagtcctgtaatattcgttagagaaatgtgtccactgaacatgaatttcctatcctgttccttctaaaaaggatgcatgagttatcctatattcccaaggcacaacatgactttgttctgatatgtgccaccgtgatcctgtagaatttgttttgtttccagtccctaagaataaatgtctcttaaagtattgtagtcattcactctacatttttatgagttattactggcccacctacaaccatatttcctccgaaattcatccatcctcctggaattacctgattctgaattatta

SEQ ID NO: 87432 - DNA, 221 bp, Homo sapiens
atggaattaggtccttcagtccatttctatgcttatttttgaatttttaaattttaatgtcacatggtcatctttaatgttgcattttctcttaatgtgaaagattaatatatttatcatctttcaagagtagctgttccagttttttaataagcagaacccttatttatgtatttcttcttatttattcaagaaaacctttttgttggatattcttttaa

SEQ ID NO: 87433 - DNA, 281 bp, Homo sapiens
atgctaccctaaaaatgtgattccttggcaaacacagagatttccttccatactgacatgtcccttagcccactggaaatgcatcaggtttgtggttcatcgggtttttgcttctcaaggcatagctcactgtgttatgtgcctaatgagacaacaaggactctagtagcgtcagactaaacaagaaactgcagctcctgtttgttaacaaggctgccactctaaaggcaaaaggacagtttccttccaaaattctgctaagcacagcaggaacctccact

SEQ ID NO: 87434 - DNA, 669 bp, Homo sapiens
ttactgtgaatattccttgacatttgtttaacaagtagaaaagtacagctacaaaccatttatgaatatattttaataggaaaatttcataaagccccaagtaatgaactctttttaattaatggtgatatttggaggataaatatatgctatctttttcttagatttttttccttccatcttcaaaattagagaaataatgataatgatgatgatgacgtgttcactttggcccccaagggtattttgatcattctaaactactacctgctaataaagatgtattttcttacgatttggagacttaatagagcaagttactacatgtagatatgtggttcccattataaacattctaacttcctccttaagtttactggagaaatgtgtttcattgaagatactatgtatgttctctcctttcaaattctgttttcttcaaagagttttccgtcctgtcaagctgctgcctttacaatatgacagtcttgatatctgacatgttgacattgataatactctttgtaacctgttaatgttgtgatcaaaagctttctggattataattgtttagtattggacacatttttttccctcagtgaaatctgaaattttcttctgtgcactaaacctcaaatgtatatattttcactaaattttgcaaactat

SEQ ID NO: 87435 - DNA, 468 bp, Homo sapiens
cttgctgagagagacatttgtaggagaaagaagataagtaggttcataccagaagggccaggactcggatggagcaaatcccagttcttgtcctacaagctgattgtgcgattgagcacaggcctctggaattgtgcagagatgagaaacaggctgaatttgcaaggccacaacatcaggttgtcatgtacccatcattacagcttatgcccagaagtcctgaccctgtgacaggttattatcttaaaaactcatcttcagcccactttttcagagaactaactctttccttagatgttgggccaggatttcactatttacccagagaaactaagagaaagtggcactaggcgtcttgtcttccagatgtgagatttcgatctttctaatgaaattgggggcactttgagactgtcagggtttgttcctgtctcagaatggctcataataaactcactgaaacactca

SEQ ID NO: 87436 - DNA, 427 bp, Homo sapiens
tccacacccctctggagataacctattgtccttgcattgaacatatgcatttgtacctctctttccttaaagaagtgactctcaaaggtggcccatagtgggagcacctgggggcattcccaacctttacacacacacacacacacacacacacacacagattttgatgcctctaccctgcattgatgtagtacactgccagttacccactgtgccagacaagtttgtggtactcaccaactcctctgtaatgtaggggctggaagactgggaactatatttcccagaatctgttgccagcaggcttctggtttaaatttcccgatgagaggcactcactgagaattggaagatagaaggggaacagacgccaaagggttccttcagcagtggtgggcagacacatttgggtttgttttgcagccgc

SEQ ID NO: 87437 - DNA, 282 bp, Homo sapiens
tgagagaaatattacctggcacatgctttaagtaacacagaaaggcaaacagccccacctgtgttaaaggacttccttgggcagatctttgccatctgactttttaaatttcactgtctctgacctttcaaagtctcatgctgggtgacactatatcttggtgcccatcctcactttctcatgaaacaggacaaagatgtaatctgatcaacatctggggctggtgtgcagttaggcgttggaaggatttgacaggaataggaagtgattatctgcaatata

SEQ ID NO: 87438 - DNA, 192 bp, Homo sapiens
gatccacccacctcggcctcccaaagttttgggattacaggcacgagccacagtgccagctgaaaacgtttcctaaacagaagtgcgcagagcatgatggagcccagcctgggcttgacatttggagagaactacagagaagtatccagactgttgttactaataaataaatacataagctccgctgaacga

SEQ ID NO: 87439 - DNA, 396 bp, Homo sapiens
cagtggcatctatggctctaaaatggaaaggaggagtcctggattcaggctactgacttactctgtgaatttacacataacttcctttgagccacagatttagcattctaccagtcacctgatatttctgagcagccacaatattttaaaactatatttaaatctgaatttggatttagcagaattttattttttccatttctattttctatggtcactaaattgaaattacaaccattgtaaaatttgatatcattaaatatgtaggactttatccagtttcaaagtaaagatgtctctaatgtaattaattgttattttcactgatgagactgaaatacaatcagtctgtattgtgtgtgcgtatgtatcagtggtaagaggctatgattagac

SEQ ID NO: 87440 - DNA, 297 bp, Homo sapiens
tgagccgagattgcaccactgcactccagcctgggcgacagagcgagactccgtctcaacaacaacaacaaaaaaaaattatggccaaatctctccaaatgtattgatattcttcagacctataattatagaaagcattacatacttagttccagaaattctccatttccattattgctggataagccatctaaaaagcacttgaagttgatgatgtatgttgtttacactcttgaaaaaacatcctctccaaatagggggaaaggttagaaatgatttgtactgcattgatcaatt

SEQ ID NO: 87441 - DNA, 372 bp, Homo sapiens
gacttcctgacaggcactgccctgctgctctgcccaaacaaattgagtggttgagagaaaggtgaagcagaccccgtctctcattctcagtgattcctgctacctgagtttcttctacccaacaacactgtcccctccatcaccattcaggcctggtgtcccgtgcctcaggagcccatgcagccctcttcacccctcctcctgcccagatggcacaggtacatctgtgcatcttccaacatcctagacaggaagttccctagggaccaaggcaattccatattggacccttcccctttagctcctttaggtaggggataaaacccgtagctcacacactgttgttggaactgtctcccttgcttctcctgc

SEQ ID NO: 87442 - DNA, 285 bp, Homo sapiens
tttaaagaatgattcatttactcaaaaacaatttaggctcaccttttcttcatgtagaagatacaatctaaacatctgctctaccttacagagaattaatgtctcatacatgccaattcagcctcactagagatctcctgtattagtctggaagtccagagaagcagaaccaaaagataggtagatactagatagacatatatgtttgaatatagataaagatataaagagatttattcgaagaaattggctcgcacagttatagaggctgaaaagtctcaagat

SEQ ID NO: 87443 - DNA, 125 bp, Homo sapiens
tagaagacttggtgtgcctcaatgtttaagaatcccatttcatttcttattaatctctcaagagcaaagaaaatcctataattcctgtcagggagtttagactggtgccttatgtggtgctgact

SEQ ID NO: 87444 - DNA, 401 bp, Homo sapiens
gtgggtaattgtatcagactctgcctcccaggtggggtttgagggttctgtgtacctggtgtaggcctgggctaaacagaagagcttctcgttagagcatctccctgtggactggctgcagagttacgatatcattctggttctgctgtgctccccactgccccttttcagctgactctttgctcataggaatacagtggtatgagatagggtcatagaatttggttccagtctaacactcttcctgtttcctgcccgcctgtatgtctctatccattagcagactcctttatgtatgatagagacacatgcacatatgcatacacggacagtccctgacttacagtgtttcatttagaatttttcaacttatgatttattgggagttagccccattgtac

SEQ ID NO: 87445 - DNA, 359 bp, Homo sapiens
aacacttggactacagaagcaactaaaatacaagatatcaaccagaatcaaatgacagtaaaagcatcatatacatcaaacctgtgggacatggccacagccatccttgaagagaaaaatgatagcttataagcattgagagtactaaaggaaaaagacttgaaaatgaataaaacaagctttctactcaagaaactagaaaaagtccacaaaacgaaccaaagaaaaaagctaaggaatgaagaaaggtaaaagcagaaatagatgaaatgtaaaacaaaacatggccaataaaacctaaagctgattctttgaaaatgcaatgaaatagacagactttctgcaggtatgatcaagaa

SEQ ID NO: 87446 - DNA, 430 bp, Homo sapiens
cctgttattattttcagcacaacagaaataggcactgtatgtgaaacacttcagtgttttaactcttaaagatttttaatgaattttatggaatcaagttaaatactaattcccaatgaaaaattctaattaattcaactctattcctcattttcaaactttttcttcaaaggcttttggtttactgagtatgagaatttaagattgttgaaagtcaataagaatgagttaaaatttaaaaacaaagatagaggccgggtgcagtggctcatgcctgtaatcccagcactttgggaggctgaggcaggcggatcacccgaggttgggagttggagaccagcctgaccaacatggggaaaccccgtctctactaaaaatacaaaattagccaggcatggtggcgcatgcctgtagtcccagctactcggga

SEQ ID NO: 87447 - DNA, 186 bp, Homo sapiens
gcgtggcatttaggaagtctgcgatgacctttgagaaagcagtttcagcataatggagcaaagtagcagagtgggtttacactactccttaaggagaatttgaagagaaaggaaagagatgggtcagtggtttgcaagacaggtaagactgaaagaaagttcttttggtggccatttttaagaata

SEQ ID NO: 87448 - DNA, 469 bp, Homo sapiens
ataggaatatgaacttatgaggccaaccccacctggggtttctggcgtgggaaggggctgcctcatcagtgcagggtcacccataagcaggcatgggcactggcagagcaggggcaccaaaagaatcccagtaccattacatgggtgatgttggctatttgatattttgaaaaacatctaaaatgtgtcattgtaggaaaaaccagaactttgctggacttctttacaggcatgtgcatgatggcattgtttcctacattaaattacgtatggaagcaccatcaactttgcagtgcccagagtctctgaagatcttaatctggccctgccgatcatggttgatggggcagtgaactcatttcatctatcatatactttcaaatatgtgtgtgtgtgtgtgggtgggtggggggttcccattatgtaataagaggtaaatgggataagaacagtttctgtgtaaatcctt

SEQ ID NO: 87449 - DNA, 417 bp, Homo sapiens
  misc_feature (314)..(314): n is a, c, g, or t
gcagtaccccaattcagggcaggctggccttgcttctcaaaacttagtagaggaggagagggcaggcaggttttctgtagtgggagcaatagacaggcatcccttccagcaaaagaaaaaaaaataaccctttcttggcagaggcagtgccttactcatctgcacagccctggagcaccaagcctagcctagcacatggtacccacatgtaacagtaacagcccacgtgtacaagctttcccaggtgccagcccccccagaagaatttcaacaatctctagggcaccaaaggtaactacacctccggggtcggngagtactcctccagcattcagaactctgacaatgacctggccgtcgtccaaggcagctcctccttctcccggaaaggctatccctccttgaagggagcccaaa

SEQ ID NO: 87450 - DNA, 585 bp, Homo sapiens
cagaagctaccactcagaacagctgactggctccaggtcacacagcccaggaggagcaacgctgggctgcctcggcgtgtgtgcagtcctgctgtccccaagggcatgtgtgcagtcctgctgtccccaaggccaggtaggggaggtgatgggggaggcagaaagagccatggagggatgtggtgtccccaggagtagggaagcccacagaagaacaggtttccttcagagatgggctggcagcctcacattcctcttatccaatttctcagaagtgtgtgtgtgtgtgtgtgtgtgtgtgtgtgtgtgtgaagttgggggggtcctcctgcctcccggtattctatctctttggggaaatggaggcagatccatagagccccaggggttgggcctccccagcagcccacgcccactgtgaggcctggatcctggcagcctgtatgctctgatcccaagtctaccctggaaattcccaggcacagcatgcctggaggtgtgagccgcctcttagaagctttataatcccggataatgctgctgtaattggcattgtttttccattacaatcctttcattacctga

SEQ ID NO: 87451 - DNA, 387 bp, Homo sapiens
gagttttccaagccctccagatgacttacatgtgtaagtcagggttgagaacagctgacatggagagtggaaggagggtggaatggtggtgtggaagcacatgggctggcagcagattcaccctggtttgaatccggctctgcccttgactggccaagtaaccttgggtgtgcagtccactatataagcctcagttttctcatccataagaacaggggataatactgcctccctcctaggattgtgaggcttagcccatttatgcctgaggttgcccttttttgaatttttgcaatcaaaccttggcaatgaccttcagcagtaggatatcaagaactcctacatgcttagcactccaataatggaatactaggtataaatgcgttt

SEQ ID NO: 87452 - DNA, 435 bp, Homo sapiens
ggggactggaaggcaggaggtggaaagaagtgcaagctatctgacggctagtcatgtcagtgtcaacccagggaaggctgttcaccccgacagcagcaactggctccagcttcctagaaaaagtcactttgacccccgtgtaggtactggctccagtacctacagatggagccctcttttcagagatctgaactcctgctccttaagcctctgctctgagcccctgaggtcccgacatcagccaggtatgtccctcattctagcttccagtttctgatagcctcaacctctttcctttgttgtctcaggtctggggggttataacctgcatgaatccttttgttccctttttgctttttcagtcctctgaaaggtgtttagcaattcttcttttttttccaagacaaggtctcactctgtcacgcaggctggagt

SEQ ID NO: 87453 - DNA, 442 bp, Homo sapiens
gatgcgatatatgcatgtaagaaatctgcacttgtaccctctaaatccatttttaaaatcgaaaaatatcaccgtaagataccgcttcacagccactggaatgactattataagcaaacaaagcaaagagcaaacaagttttggtagggcctggtgggaggtgttttcatcatgggggcaggtccttcatgggtggcttggtaccactctcatagtaatgagtgagttctccctctgaattcattgcaagagttggtcgtttaaaagagtgtggcatgtccccccaccactttctctcttcctcccactttcatcatgtgagatgcatgctcccactctaccttcctgaggctctcaccagaagcagatgctggcaccatgctttctgtacagcctgcagaatcatgaaccaattaaacctcttttctttataaattattca

SEQ ID NO: 87454 - DNA, 134 bp, Homo sapiens
tgcaagctaaggaactgaaattttgtctgaaagtatgtggtcaggtacagaagaagtaacaaaggaaacaagatcgaaattctagaaaagccattttggctgccgtgtggagggtggattacagacgagagaca

SEQ ID NO: 87455 - DNA, 228 bp, Homo sapiens
gcagaatgttaaatttacatatatatgtcaatttaaaatatatatacatttacatttatatgtgaatgtaaatatatacatacatacaagtgtgtgtgtgtgtgtgtgtgtgtgtgtgtgtgtgtccttaggacaaaatatcctataaagagtattgtactacacacagagagggcagaagaatagagcagagcatggggagctcccagaaaggctttgtgaaagcac

SEQ ID NO: 87456 - DNA, 355 bp, Homo sapiens
gggtgggatgaggttatgtgggtggtggagaacccaaggtgggatgagccacttataagacgtgaagagcccagagctccctctctcccctacatgagcacagagtgagaaagcgcctcccgcaagccagggagaaggttcccaccaggaaccccacctgccggcacgtggatctggagtatccagaacagatacatgaaggtgctgttttcagccgcccatctatggcaatgtgttacagcagcctgggtgactaagccagtcactcgtttttcctgaaagcaggcacgtgcccggcacccctgactctgagtggctactaatggggcccctgaaacctgggaaaagcagctga

SEQ ID NO: 87457 - DNA, 398 bp, Homo sapiens
cagggtcttgttatgttgcccagactggagtgcagtggctattcgcaggcatgatcccactactgatcagcgcaggagttttgacctgcttgtttccaatctgggccagttcacccctcattagtaaatctggtggtcccccttcctgggaggtcaccatactgatgctgaacttagtgtggacccccaactggcatagcacagtacagcccagaactcttggactcaagccatcctcctgccgcagcttcccaagtagttgggactacaggcacgcgccaccgtacctggcgacattcttcataaacacatttccttttgctgcttgcagtttgttattccactttcatttctttaactctcttctcaaaccacggacagttataaatccctttcag

SEQ ID NO: 87458 - DNA, 421 bp, Homo sapiens
ttctggttttaagtgctttcagaaatgaagctattgctaactatatagacagatcgatgcaggagagtagaagctctgattcaggctgtatgaatatcaccctagttgtaagtgaagaatgagctgtagaggtctgaacaggaagcaagaagatcagttagaaagccattgtgcttagttttccaggcatgaaatgaaaaggctttgcctcagggggtggcagtggagacagagaaattgagggactcagaatgtaatttggaggaagaactgagaggatttgctgatcaagggagagagagagaagaaagggtgactcttacccatttttggcttgagcaactgcatggataatggttctagggagggatggctctgaggatgtgggaggaaggagggttctgttttggccacacaatct

SEQ ID NO: 87459 - DNA, 1137 bp, Homo sapiens
gcattttggagatcttagaggctgccactcccatcataggcccatattatcaggaccttgagggcagtacacttttaagggggctggggaacccattggaccttggagggtgttttccagggatgcttcaagtttctaatccttgcatcctggtgtagtgttccttggtcaccccagatatggctcctgtgggcccaggtgctgtcctctggaaagtacaagccataaaccttggtggtgtccatatggtgctaactgcaggtatgcagtgtgcacatctgtgaaagcatggatgcctccacccagattccacggagaccctcagagccttgacagataactgccgcgggcaaagagccaccacagagagccccgactagagcaatgcctagcagtcaggggctcagtgctactcctaaaaccccagacctgtagagccaccaacatggaaagccagcttgagagagctgcaggcacccagcctcaacccttgagagcggcaatgtacactgcacatagccaagccatgagtgtagggctacccaaggtctttggggcaaataccccaccctggtgtgtcatgaactttcaggggccaggagacaaatgctgtggtttgaatcaacatcctccctgaccccctggacacacacacttcttacctaagactcaatgtgataatattaagaggtggggccttcagaggtgaataaataaagagggaagagctttattatttattaagaaatttatttattaagaaatactattatgatgtagagtagtgactttataaaaaggctggaagggactagctaggggtccttttttgcccttctatcccttctataatgtgaggacacagtgtatgtcctctccagaggacacggctttcaaggtaccagcttggaatcaaagatcaggccctcaccagacaccaagcctgctgacacctttatcttggagttgcctaaaatgacctaaatgtaagatctgaaagtataaaactgctagaagaaaacatggatatttgattggacaatgatatttggatatgacaccaaaagcctaggcaactaatgcaaaaatagacagggagagtacatcaatcttaaaaaccttatgatggcaaaaaaa

SEQ ID NO: 87460 - DNA, 148 bp, Homo sapiens
gatctaattttcaaatgcaaatcagaacaaaacaaacttataaaatcgtaataccaacaatatgactattttgtctagtgcctgattgtattttgaatatatatgtatgtatgtgtgtgtgtatatatataaacatatgtgtaaatat

SEQ ID NO: 87461 - DNA, 1005 bp, Homo sapiens
gttgctgcccagtttcacactggaagagatcctgtgcaaagatccagcggcctgctttgggttccagtaaacacaaaagtacgtactggcactctgcggattacagactcactgacaacttcatggattcatagatcaagttttgttacattgatccaaggtgaaggcacgccacagcaggttacttgtggccttgttactgtctgtaactccttgagttacagatgaaagttcagctaaagatgaaaagggctccaggcggggcaggaaaggtagcatcgtgaggccagcatctcacctatggcattttgacctaaaagagctgtatcaacagaggtaaagtgacccatacatttaccttggggttagacagcttctagttccttggactatctggaaccatgtctctttctgaaggtgccacatgcagtgaggaacctgccctggcagaggaactcgtgttcatcctctgaggccccttcgtttccaactgagccatgtgcttagcagttgggggtttcctactaatttttcggagaatgttattgtttgaaaagtgctctccacagagcatgtgattagatctttttgttacttgggtgagaatctagagctcctgtcttgccttgacagctaatattcatgcccatctattgtggtcctgtttccaaagaggaacacacaacagagtttctgtgcagtgaaacctgtgtcagacctaaaggaggcaagggctgctgaggagcttgaaatgacccttaaaagatatcaaggagaagagttgtcttcatactctcttctatctgtctgtccatctgtctattcatccattcatccatccagcattcagagcaggtctcccatattttaatgaagggaacctcatttttatttccccaagatctagagattaggaagagtgcagacagtgctgaacggctaaaaagaaacgattcacagcgaggttctccttccttccttatgggaaaccaacaaatcatagcc

SEQ ID NO: 87462 - DNA, 429 bp, Homo sapiens
agtttaactttagagacacggttactgtctgtggctttataatttgtcagtatgaaacatttgttctagaaggtttaaatgttattcctaaacacagggtgctaggctgttccgcctattcttcttcagcagtctagaacaaaagcaaattcattaacgcaacatataaagctatgatccgcggtagagctaattctcaagaaactcattaatttcctctgattacagttcagcccattttccatgttgtcacatagttaaaaacagggggaccccccttcatattacttccagaaaatgtagtttttcctgtgtacatctgattattgttctctccatgatctaaattccttaccaatattggaatatccttcttgctagtacctattgcttgtatcttcttgcttctattatttaatatcactggat

SEQ ID NO: 87463 - DNA, 218 bp, Homo sapiens
tgccgtcttatttcatctctctccgttatttggttcccctgtccttagtcccctttctcccccaatggcatcccaagatgcacaatagtggcaagtgcccagcctgtttccacagcctgatccccaccactgcgttggccagtcacccaagaagcagctggacccatcatctggctctagggatgacccagttccagcacccccgcaaacctccgtct

SEQ ID NO: 87464 - DNA, 483 bp, Homo sapiens
ctggccttcacatcttctaacttgcccttgaactatggtttcctcaacactctagagacttcctaaggtgacctcatctcctctcacagctttgaaaccaccaccaacatgcccctgctcaccagttctctatctggagtctaaacctgtctcctgagttctcagccttctagacatcttcacttaggggttccatgggaccttcaaatgctacaggttaaccaatctttcatcatccaaatatattctaccttgtacaatctagtattggttactggtattaccatccactcaaactatcattttaggagaaaatacctagtttctccttacccataaatctttacatccattgtagtccagtagactctttttcttctattgcaatgtttctcctatggattccttctgcctttgcctcacccagtgcatcatctcttgcctggttttgctgtagtctggtaactggccttcctgctagca

SEQ ID NO: 87465 - DNA, 278 bp, Homo sapiens
gtgagaaggcctaagctagcctgggcccctttcccagggggaagttcactgggagtgcagaactttaaaaatatataggagacgcctcctagaggctgtctcagttagaaaggaggagaattggcatttctaccccaaggggaacctccagacaggtggggcaacagagcccccatcttcagtgagccaagaggaaaacagtcccctaccctctgccctcaaagattcctgagaggaaacccctgtcctccagagctttacaatctaatctaaacaaa

SEQ ID NO: 87466 - DNA, 428 bp, Homo sapiens
tctactaccctgtgcaagacccccctcctctatgagctttcctgttcatgctaatcctgagaacttcccattccacaggtttctgcagctctaatgtgggtcctacagtcacatcctaccttattttacaggtagttattgcataactgctatttgcaaatatatgtcagattgaaataaatgacaatacttacatgcaaagatgctcagggcaatattatttataatcacgaaaaattgtaaacaaaatatccagtagaagattaaactgtgcagacctcctaaacaatagtttataacatataaaatgttcacatgctgtcaagtggaaaaagtaaacaacaattctatttgcatgttttgtaaaaaccaaaaacaaaagattggaagaaaacatattgaaaagttagaatgggtatctttgggtg

SEQ ID NO: 87467 - DNA, 605 bp, Homo sapiens
taaatgtttgttgaatgccttcttgttgaaatccttctcacactaaaacagttcaccttaaacactactttcttcatgaaaatcttaacggccctcatccacaggtctttctccttccttttctagtccttatggcacttaaacctttcactgctgtgtatcatggccatgcgtaagtgtctcattcttctgtgagcctgtaagctggcagaaatgtttctttctttgcttttgtgtctgttgcagtatctcaaacaatctccccaccccacccccaacagcagatacctaataaatgtttgactttaaccactgtaactctaattctggaattccactttgttcttctttatggattctttgcttaggaaaggtaacacttcccccctccattagcacagtagtgtttcttagattttaaatatccaaagctaatgggtgggtgaatgaatgagcccctgaacaatgtctcttcccaaactgccaaacaaagtgccacaatggtccttggtcttatggtcatcagttagggaacaaaagcgtgtgatcggaagttgtaaaaataataataaatgaagctttataaaaaaattaaaatgtctcac

SEQ ID NO: 87468 - DNA, 318 bp, Homo sapiens
tgaaatttttataccgtcaacattcatgcaaaaaaaaaaactattgagggcctttttttctgccatacatttgaattgacttcaaacttcttaatttcttttagtcacttaaaggtttttcacattttcgtggcccaagcataaagatcacctatctgcaggattcaagacacccaatcatttgagtagttctgataggactgctttacagatacgttagcagaggcctttcaaaaagggagtgtttttgtatgttagaagatactataaagccaacaagcaaatatttgcaacttatatgaaaaagaacaaatgaga

SEQ ID NO: 87469 - DNA, 798 bp, Homo sapiens
agttagtccccattttcatcaggaaaccgagtctctgagaacataagtaacttgcccaagatcacaaacccaggtggatgttagagcctgtgctcttaaccactacactgtagaaagaagaattaagtggcaaatttttagataagccttccagcttcttttaaatagagccttcagatccagttcagctgctgaagaagttcccacctttccaagggccctgttgtctatgatgggcatccttttgggtgacaagttcaaaaccttcacagaattttccccagagggcattattttaaaggtgcccaggctgttgggggctttatttctttagtgctgtgttttaggattaaagtagctttatttagcaagtttcaaattaatatatttgaattaaagggaggcagtaaaggagtagaaattatacttaaatacttagtacatgtcgtcagcccacaattcttatttctacagacttagagtatattttaccgaaaagttagtgcccaggtgttagggtagctctggaaaaggcatatctgaaccaaggactaaacaaaatagggagcacttaaaatattttattaatttcctcctttgaagatcataacaaatctgctgcattcccatccatctcaaataaagcaaacccgattaataagcactgtgagccccgtgaggaagagcagaacaacccagacaccaaggattgtgctgataaatgtttaatgactggctttctgggagggagaaagccctggtttgtgcatttgccaattcccatgatgaaaaaatccc

SEQ ID NO: 87470 - DNA, 562 bp, Homo sapiens
ttgtacctttataagaatgtcatagaaattaattgagataatgtaggtaaagttcttagcatgtggcctggctacagaaagctttaataattcactgttatcttagttatattagtagtaatagctgcttgatattacacatctgcccttctgggctgtaattttctccagagtaaggactcagttttgtttatctctacgtgctcccctagcatagggcctgtcatgaatgaggtactctgaataattattggattgaataaagcagtcaaataaattttttcaatcaaaaagttgttttcccagtgactaaacttaagctcacagaggttacctgaactggttttaaacagctgctattaatcagtctcatagattatatcatttaatctttaggcaacttgatgaaaggttcaaataaagccccaggattcaaacctacatctgtgagtcatgagatcaaaacttttccacaaaattttcctgcctctttacaaaatatataagaattctttcttggtcaattactaatagataattactttttgagttataaggtgaa

SEQ ID NO: 87471 - DNA, 649 bp, Homo sapiens
cctaacttttacatacatattagattaatttgagcctacataaaaagaaaacaaatttgtgaggatttgaggggggaaaatcaggggacttcctgtttgcagctcttatcattgggagaacagtaaattagatctagactaatatatttggtttctctaatttatggcaatttgttaactttgtcattgagtggaatgctgaacaaaatttctatggcacataagcaccttgcacagggttcgctttaattctttgagaagctttcaggcatagactatttagtatactgattaaagtatgattaattattaattagtatcttgtcctgtgagaatgcctttagcttcaataggttcatctttacttgaaaataatggaaagctgggtgcagtggctctcgcctactgagtggtgagaggatcacttgaggccaggagtggaagaccaacctaggcaacatagcaagacctcgactctacaaaaattttttttaattagccaggtatggtggtgcacgcctgtagtcccatctactcagaaggctgcggtggaaggatcacttgagcgcaggagttcaggggtcagcagtgaggttcagttgtgtcactgcacttcatcctgggccacaaaatgagaacctgtctttaa

SEQ ID NO: 87472 - DNA, 209 bp, Homo sapiens
caacataatttctaatagcaaaattggtattcaaacattaaacggaggcatcttgagaaattaaacattttttgaagaagagttaacattgcttgcctcatttctgacccacagttttagctatgtttttatgcatggaacagatttccaagtgtggaaatgaattctttgacacagacatagacttagattcatgcagggccagtaac

SEQ ID NO: 87473 - DNA, 637 bp, Homo sapiens
atatatataattttttttttttgagatgcagtctccctctgccgcccaggctggagtgcagtggcaacattactgttcactgcagcctcgactatctgctctcaaccaaacctcccacctcagcttcctgagtagctgtgactgcaggcgcacaccaccatacccggctaatttttgtattttttgtagagtgggggtttcaccatattgctctggctggtctccaactccagagctcaagtgatccactcatctcggcctccaaaagtgttgggattacaggtgtgagccactgcacctggctgtttttttatatttctatgatgtcagtaaactccccttcattcctctccttctcacatcttgaaaaaaggcttctacagaccacagaggccttggtgtgagtggtgggtttggatgtagtttttatggtatatgtgtggaaaatagagggaaggagctgagttttgcttttaggttgacactaagataaaaacaaagagccataccttcagaatggagacacaggatttaggagcagcaggaagctgaagtcagaggggaccataaaatggcaactccccatgtattcacggaaattttgcgcagggcaagtagactgttccaaagggggaaa

SEQ ID NO: 87474 - DNA, 280 bp, Homo sapiens
gcagcccgcactgttattacacatctggtaaatcacctgggccattatccaatgagcggtggtcctgctatgctaacaagtcaggtgtgtgaaaatcacgacaatcattacagtgaaagtactgaactttctcctgaactctttgagagtccaaatatccagttctttgtgttaataatacaaccttagtgtcctgtatccagatcagatcagaagagaatatgcctggaggaggtttatctgctggccttgcatcagccaattcaaatgtcagaatcat

SEQ ID NO: 87475 - DNA, 596 bp, Homo sapiens
ggggggtatgaaataagacctgttttcccctaactaaatcttatgcagaaccccgctgtgtaaagcagatgcaagctgagagactagagctctcccactcatctcctgttacctctcggcgtctccgaggacgcaagggctccagagcctggagcttgaaaacaggtgtgctaggtgattgctacctccatttcccttcttcattaaacaaatctatgagtcttctccagttctctcaatccatttttactgggacgagagttgtcagttttaacttctgtgttaactttaatttatgtgtggtatagaaggatgttttgagagagaaactgatgcgcttaagtcatcatctaacattgtttgggtaactattccaggtgtgcttacacttaccagtttgacattggttatttgtcttatgattgtgtctgtcatcgaaggcataactgattgattacaacaggaaagaagggtagataacaggagagtttaaagataagtgtcattagtaatatactctgtgtgtagatcaatgatgttctggagcattcatgattaccgtatgccttacgggactaagtggacctcatttgctt

SEQ ID NO: 87476 - DNA, 542 bp, Homo sapiens
ggggggtatgaaataagacctgttttcccctaactaaatcttatgcagaaccccgctgtgtaaagcagatgcaagctgagagactagagctctcccactcatctcctgttacctctcggcgtctccgaggacgcaagggctccagagcctggagcttgtctatgagtcttctccagttctctcaatccatttttactgggacgagagttgtcagttttaacttctgtgttaactttaatttatgtgtggtatagaaggatgttttgagagagaaactgatgcgcttaagtcatcatctaacattgtttgggtaactattccaggtgtgcttacacttaccagtttgacattggttatttgtcttatgattgtgtctgtcatcgaaggcataactgattgattacaacaggaaagaagggtagataacaggagagtttaaagataagtgtcattagtaatatactctgtgtgtagatcaatgatgttctggagcattcatgattaccgtatgccttacgggactaagtggacctcatttgctt

SEQ ID NO: 87477 - DNA, 1034 bp, Homo sapiens
gtcatagctgactcttgaggataaaacgacagcacactgaaacacacacagtcaaaaattcacatgtaacttttgactcctccaaaactttactataacctattgtttaccagaagccttaccaataacataaacagttgattaacacgtattttgtatatgtatgtattgtgtactgtattcttacagcaaagtaagctagagaaaagaaactgttactaagaaaatcataaggaaagaaaatatatttactattaagtggatcattataaaggttttcatacttgttatgtttgcattaagtaggctaaaggggaggagtaataggaggattttcatcttgctgtctaagaggtgacagaggtggaagaaaatctgtgtataaatggacccacacagttaaaatctgtgttgttcaagggtcaattgtacttaattttttgattgtttttaaatttttaaatagataatacattgatgtacaaaactcaaaagttacaaaagggtttgcaatgaaaaggaagtccctctttcacccttatttcagtcacaggtgttgctttcagttctttttatatttttactggggtagctgctgcacctacaaacaaacatatttgcctcattcttttttagcagctacttagtaggcaattgattcgttggattctgtgttattaaatattcccctgttggtcaacatttgggtagtttcttgctgttgaaaacattgctgtagagaatattctgtgatatatatcactatgcacttgtctaaatatagccagtagttttataattcctagaaatagaaagtgcatctaaatattttttgtagatgttgccaaatttccctctagagaaaggtgtgtttgctaatttataatcttacaggctctgtaagagactgttttttcctcctgtgccttcaacgataccatgtgttattaaactttttgatcattccaaattaacagcgaaaatttataactcattatagttttaacttgcacttctcttatgggtgagggtga

SEQ ID NO: 87478 - DNA, 999 bp, Homo sapiens
cagtgaacacacacagatgaacatagatatttcacgagtgaaaactccagacctttactataacctattgtttaccagaagccttaccaataacataaacagttgattaacacgtattttgtatatgtatgtattgtgtactgtattcttacagcaaagtaagctagagaaaagaaactgttactaagaaaatcataaggaaagaaaatatatttactattaagtggatcattataaaggttttcatacttgttatgtttgcattaagtaggctaaaggggaggagtaataggaggattttcatcttgctgtctaagaggtgacagaggtggaagaaaatctgtgtataaatggacccacacagttaaaatctgtgttgttcaagggtcaattgtacttaattttttgattgtttttaaatttttaaatagataatacattgatgtacaaaactcaaaagttacaaaagggtttgcaatgaaaaggaagtccctctttcacccttatttcagtcacaggtgttgctttcagttctttttatatttttactggggtagctgctgcacctacaaacaaacatatttgcctcattcttttttagcagctacttagtaggcaattgattcgttggattctgtgttattaaatattcccctgttggtcaacatttgggtagtttcttgctgttgaaaacattgctgtagagaatattctgtgatatatatcactatgcacttgtctaaatatagccagtagttttataattcctagaaatagaaagtgcatctaaatattttttgtagatgttgccaaatttccctctagagaaaggtgtgtttgctaatttataatcttacaggctctgtaagagactgttttttcctcctgtgccttcaacgataccatgtgttattaaactttttgatcattccaaattaacagcgaaaatttataactcattatagttttaacttgcacttctcttatgggtgagggtga

SEQ ID NO: 87479 - DNA, 870 bp, Homo sapiens
tgctgggattacaggtgtgagccaccgtgcccagcctgcatgttgtaatttattaaatgctttttcaacatctgatgagatgattgtatagtttttcccattattctattaatatggtgtctaacactgattgcttttcatatattaaaccagtagctgttggattttgtctgattccagatgacctatgctacctcctagaggagtaaataacattttccacttctgacatttgtggggttttttaatcaattctgaattttatttttgtttacatgagtatagggctctaattttatttttttcccaaaacttcctttgaatattattctagatcttactctgttccactggtctaattgtatacttttctgctaacatggaattattgtatagttgacccttgaacaacaaggggattgggatgccacctttgcaacacacacagtcaaaaattcacatgtaacttttgactcctccaaaactttactataacctattgtttaccagaagccttaccaataacataaacagttgattaacacgtattttgtatatgtatgtattgtgtactgtattcttacagcaaagtaagctagagaaaagaaactgttactaagaaaatcataaggaaagaaaatatatttactattaagtggatcattataaaggttttcatacttgttatgtttgcattaagtaggctaaaggggaggagtaataggaggattttcatcttgctgtctaagaggtgacagaggtggaagaaaatctgtgtataaatggacccacacagttaaaatctgtgttgttcaagggtcaattgtacttaattttttgattgtttttaaatttttaaatagataatac

SEQ ID NO: 87480 - DNA, 379 bp, Homo sapiens
ggggaagggcgccaacaaatgctgagcacttagtagtgccatgtactttactcctcacatgaatcctagtgatgctgcgagaggaatattattttacccacatcttctatatgaggactctcaggctcagagaagttaagtaattaactccaaatcaaacaaagggtaagtgataaagctgggatgccaacccatgcctgtttggctccatatctcacagtctccctccacgatacaacagtgttttccaaagcaatgataggggagaaactctgagcacagactcctggggtagggctccttctacccttttcttgcaaattattgatgctttatgacattgtaagcaaataccatcatcaactgcacatcttcccat

SEQ ID NO: 87481 - DNA, 359 bp, Homo sapiens
tagagatttatacttctgaagaaaatgctaacttaggtaaataactattcccccatgcacactccttgttgcccttcaactgtcaatcagaattacccaaggaaaataaaaatggcaaaatctacataatcactggaaggtaagatagggtgggcaatccataagccacaaacttcaaagaatgaggtcgctttgaagggtttcatctctatcaatatatgatgactttctatgccttgcttagctggaactctacttgtctatatgaatactgccactttggctttcttttttctttcttttatctcccttcttccctccctccctctcttccttttttcctcacttcctccttcctt

SEQ ID NO: 87482 - DNA, 341 bp, Homo sapiens
tcaatgacaacttttaaagatcccatgactggtcacagtgagaactctcttttgcagtcatcctttgcaatgataatatatgcctgtaaactaaggctttaattttttttttttttgagatgaggtctcactctgttgcccagtctagagtgcagcagtttagtcatagctcactgcagcccgaacttctgggctcaagcgatcctccttccatgcctgagtagctgggactacaggcatgtgccatcatgcctagctagtttatcgttattattttttgtagagacagggtctcactatgttgcccaggctggtctcagactcttggcctcaagggattc

SEQ ID NO: 87483 - DNA, 636 bp, Homo sapiens
gatgcttgaaaggataagaaagtctgaattagaggcagctgactttgttttgagaggcgatttttagctttaatgggaaaatactggaaactaaacacacttttgaccaatttatataaccttgctacatataaatttatatgagtaaatgattcagcataacctttttttacaagtaagacttttatgggacatttgaagctgattttaaatgtcagattatttaatcacatctgaattcaaattctaaactaaattgtttctaatatgtaagatcatttctttataatcataatacttgtcctcccctcctttttgtttccctcctgctttttagtttttaactagtaatgagaagaggaggtaatgttgttaccaaagagcaaagtctagttctttggacttaatttgcatgacaagtttttgctcactgtaattagaatttagttaaataaatgtcattttccttaatgttatctatgtttagctcatggaaaaaaaaatgttcttgagcactgggcccctgtgaaaatatacaagttgagtatccctaatctgaaaatctgaaatccaacatgttccaaaatccaaaaccttttcggtgccaacatgatgcacaaagaaaatgcttagtgg

SEQ ID NO: 87484 - DNA, 403 bp, Homo sapiens
gcgtctaaccttctgtctgcgtcgaccttcgctctgcgtcgaccttctgctctgcgtcgaccttcgctctgcgtcgaccttctgctctgcgtcgaccttctgctctgcgtcgaccttcgctctgcgtcgaccttctgccctttgtaatgataagtcaacatgagagtcttcatagagatgatgcagctgaatcccacgtcgtttactaaacaattcagctaagtagccctcaggtctggatggactctaaggacaggcagcatacgatacggaggcctcccggaatcctgcagccccaagtcacccaaccttcccactggctaaagagagaaaggagacacactctattgtcaatttcacccccaaagctttatctatgttcctaggagaagtcacatctata

SEQ ID NO: 87485 - DNA, 495 bp, Homo sapiens
actccatctcaaaaagaaaaaaaagccaaagttttaattttggtgaagtccaatttatcatttgtttcttttgtctgtaccttttttgtattatctaagaaacccttgtctaccccaaggttgcacagacttgcttttcttgtatcactttatgtttttacaggacaatgtagccaaggattacttgtttgatttaaaatttactttttaaaagtaggaacaaccttctttaaaaaatgggttttacaagagtccacagtgtgtggttacattttgacaaagtacaacgagcaaaatcagcgttgttagaagtcaagagagtggccacctgggggagggcagaggtgcgagtggcttctgggagctggggatgttctctttcttgatttgggttctggttacctgtatgtgtttaatttggagaaatgtatctagttgcaaactttttttttttttttttgagacacagttttactcttttgcccaggctggagt

SEQ ID NO: 87486 - DNA, 615 bp, Homo sapiens
cttgctacttggaaagctgggaggaaggctctgtttgagctcagaccaagactgcagtgaaccagaatcccgctactgcactccagctaagtgacaaagcaagaccctgtttttttttgttgttgttgttgtttttttttttttgagacgaagtctcgctctgtcgcccaggctggagggcaatggcactatctcagctcactgcaacctccgcctccggggttcaagcaattctcctgcctcagcctcctgagtagctgggattacaggcgcctgccaccccgcccagctaattcttgtatttttagtagagatagggtttcatcatgttggtcagggtggtctcgaacccctgacctcgtgatccacccgcctcggcctcccaaagtgctgggattacaggcctgagccactgcgcccggccaagaccccgtctcttaaaaaaaggaagaagaaactaaatcagattttcaaagtacagaacatagaaattatttacctggggccgacgcggtggctcacgccccagcacttcgggaggccaaagtgggtggaccacctgaggtcaggagttcaagaccagcctggccaacatagtgaaaccccatctctact

SEQ ID NO: 87487 - DNA, 756 bp, Homo sapiens
  misc_feature (20)..(20): n is a, c, g, or t
tgcaggctgtcggcccggangtatggatcccttggcctggccctcgagcagcgatgctggggtctcagcccagtacccaaatctcccagactgtgggggaggcagagccagaccctgaccctcccagccagaagaatagggctggggtcagagagagggacctaggacctgcctgaggaagactatatggagaaatggggcacacagctggggtcttgcaggatgagtaggagttcaccagacagagacagagaaactacgtgaaggcctgggaatgaacttggttttcccccaggggtgacagggagccatgggagggtttagagcaggggaggggcagggtgagatctggggcttggggtgggggtagctgctggccccagagccagcaggctttgtttacccctcactgtttatacctaggcaggcaaacttccctggcgtctgggcccacccgcagacaagacatagaaagatacaagattaggagccctggaatgcgtgttctcgcggtgcacatggagtgggggaggagccaggccagggctagggacctaaagtgcccccagtctccatccgcagccccagcggccccctgcccctctccagggcgggctgggatgctgggtgtgggcgtctctccctcctctttccctcccacctgcctctcctttctttcctgccctcagctgtctcttgctgtctcccccctttgtctgtctctgccactcccctatctctttgtctccgtgtccc

SEQ ID NO: 87488 - DNA, 439 bp, Homo sapiens
ctgggattacaggcacatgccaccatgcctggctaatttttgtatttttagtagagacggggtttcaccatattggccaggctggtctcgaactcctgaccttgtgatccgcctgccttggccttgcaaagtgctggtattacaggcatgagccaatgtgcctggcctggagcatgtattcttttatgagtggtccttcttctgtggcactgtacacagtgctaagggaagacttttctgtctttccttctacactcccagattctcactgggctaggtgtcccttttataagctcccatttaactctatgctgttattgttgcctctacacttacccctttcaaagtatgaccccttgtacttaaaaacagacctttttaggtttagctgtgtcttgatccaaagaaccacacttaccagagtatgttagttttagag

SEQ ID NO: 87489 - DNA, 427 bp, Homo sapiens
agcttcaaataacaggctgcttctcttgttaggggctaatacaactgatgatgagtttaagttgaagccaatactcatttaacactctggaaattgtagggcccttcagaattacgctaaatctactttgtctgtgctccagaaatgcaacaaagtctggatgacaacacatctgtacacagcatggtttactgaatattttaagcccatagttgagacgtacggctcaggaagaaaaaatattactgatcattgacaatgcacctggtcacccaagaactctaacagagattgctgctttcatacctgttaacacaaaatccattctgcagcccatggatcaaggagtcactttgactttcaagtcttattaccttagaaatacatttcaaagactgtagctgccacagacagtgattcctctgaa

SEQ ID NO: 87490 - DNA, 358 bp, Homo sapiens
ctcagaggatcccatccccggtggtgggtattcggggaggttgaacacagtggcgggatttggggaggttgcacacagtgggggggatttggggaggttgcacagattgcgggggatttggggagattacacagagtgatggggatttggggaggttgcacagagtggtggggatttgaggaggttgcatacatttggttggatttatggaggttgcacagaaaggagatctggggaggttgcacacagtggggggggggatttggggaggtttcacaaagctaggggcatttgaggagaatgcacacagtggggcgatttggggacgttgcacacactgggggggatttgaggaggc

SEQ ID NO: 87491 - DNA, 506 bp, Homo sapiens
ctgcctgctccaagcactgccactgtgtaataggacaaccataggttgacaggtacccaacagagtacggatcagcactgcccaactctgggacgtgccattctaccatatccacaaggccagtgtgaatgccaagccacagaagacagcagagcatgggctgagtcgtcagtgggcaggaacagggcttcccctacagaagcccgggctgcagccctcccagtggtgttcaggcccctcaggcacaccagcaagaccgtactctttccccactaggccaccgaagagaaccctggaagggagcagggcgtgtgtgaggtctctggtttgctgtttgactccttctggcattcagttccatccctctcctcccacccctccccaaattccacttacttcaatatctccattcaaatgcctgcttctcttctaagagaggcatattgccccaccctctccttccccacttacagagagctctatcagaatttacccccacgttctct

SEQ ID NO: 87492 - DNA, 368 bp, Homo sapiens
gtagttatcaaacatcaatatttggcatggattggcgaaatggatatggggggaagaaaggagtctgaccatttctgtaaagggtaaaaccttgagcaaacagactgcatttcttattaggggcactaaagagcagagatgcatttcagaagggaccactcggactgcaccccaacaggctttgtgaaaccaatgatctgggctcaaaattagattctggattacatcaggaaagccagctaccttcagaggataggggatgggagggagagttaagcagtgtatctcacaactgttagccctacaactattacagggcttgcagccttgtaacagacaactccagcactcaaactggacagagctga

SEQ ID NO: 87493 - DNA, 543 bp, Homo sapiens
attgaattcatgcaaactttgatttctatcctaaaatgtctccatgtttataaattttaaaattacaagttatctttgcctccctcctacccctactgtatgaagctgtactgtttttttgtttgtttgttttaatcagtggcttcatagtagccctttcacagagctgggtgctattttacttcagaggcagggttttaaaaccttgaaagtcccttctagcacttttaagacctgatgtgaaaatggagtcgtatacaacacaattaggaggtaactttgttccagggaggggttctgagatgccattatgtcaaagcacttcatgccttctcactgctgcacagtaagcgcgactggctgtgcccatattttgttttgttttgttttgttttgagaaagggtctcactctgtcacccaggttggagtgcagtggcgtgatcttggctcactgcagccttgacctcccaggctcaagcaatcttcccacctcagccttcgagtatctgggactacaggtgtgcactgccatgcccagctaa

SEQ ID NO: 87494 - DNA, 941 bp, Homo sapiens
cctttcaatagagcagtctttcccgctcttctgttctgagaatgcacccggaatgggggaaacccagcaagcagcagagagaaaggctcttcccgggagacctgccgcctctagggtggtcagagaatagcagctgggattttggagagggagaggataggtaaagcagcgtattgaagcatttgcggaggggtgtattagtcctcccaccctgagcacaccaggacggggatgcatccttgccttgtgtgcttgtaaaggcttctttcccttggtatagcaacttcaactgcacctgaacctccaacctctgcccagcctctggtgcagggtggatagaggtctagccagcccttacttcctgaagagagctctgtgggaaactcgaggctacagtagcttcccggctcccagctcctaccctacccccaccaaagcagaaacgggagacggcaacgttctggctgccattagacttacgtctccctcccctacgtcccctagcttcccaagacaggaagaaatgtgcaaaaggcccctccggagaaaactattttgccgttcagctgttctttacagaggatgttattttagtgagacccaggtcctagaccttctgattcctatttatttttttaacagactagtctcaaagtacagcacaaaatctcttctctgccttctcttgtgatgttccagagagcatctgtggttgtgatttggaataagtcatatttatttggtttactgtgcctattcagatctctgtatgttgtgtgtgtttctgtgtcctggaattggatgcgtgggactcgttctgtccgcggagtgcactctttttttcagtgtggcccacatatcttgtaaatgtttgctgaagagttgtgtctatatatagagaaaatatatataaacagagaaatatgtgaatctgttttttt

SEQ ID NO: 87495 - DNA, 393 bp, Homo sapiens
gacggaacgtcctgggattacggaagcgtcacttggatgaggaacgtcactgggatgagaacgtcactgggatgaggaacgtcactttcaacctagaaatcactgtacagctccaataagacatgatcttatttggcaatttcagttaaaaagacagcaagaaacaaaaaaattggtggaaaaagtgatttctcatttcctttcatgtcctataactaaagattagatgtaaagtgttaagacctcagcacaaggaaaccaaaagcttgtgtttgtgcaccaagtctgccacttaatagctctataacctttggtgagtaacttaacctctctcagcctctgcttcctcacctgtaaaatgagaccaatgagaccaatttgtacagtctcatt

SEQ ID NO: 87496 - DNA, 229 bp, Homo sapiens
tggtaagagtgaagccagcagagagagcttggaaaagagaattcagacccatcttcaagttaacaaaaacaattactgactcatacgaagaaatcgggaaagtcaataaaacggatgcttctaaacctgttgatgaagtttttctgaagttgtgaaaatttccaacaaaaaagactaactctaagcctgaaagtatcctttcctttctttttgagccattgcactccgg

SEQ ID NO: 87497 - DNA, 435 bp, Homo sapiens
aggccacacgaatatcaaaaactcagtgagcgacaggtactagaactgatgctgaagaaaattcagggcttttggtactgcttttgagacttccattctggatctttccaaccctttggagtaagaggatggggccatgtggtgtgattgacaagtctttgtgagtcagttaaaggctacagcagctggaagatagagtgtaggtttatctagagcaagactggcaaaccacagtccatgagccaaattcagctcaccttctgttgtggtaaataaagttttattagaacacagccatatgtttctccccacaatggctgagttgagtcactgagacagagaccatatggcccccaatgtctaaaacatcgccatctggccctttacaggaaaggtttgctgagtcctgttccagcccaggtgtgtcctgggcaa

SEQ ID NO: 87498 - DNA, 452 bp, Homo sapiens
acatttcagttttaaaatgcatgctcaccacaggggccctgctcagccacggtctggctgtccccacagcgcctggagactagcccaggcgctccagatggctccatggagacttttttccatgattctcctgtaagatcaacaacaacaacacatttcacaaaccacactttttgactgcacatagaaataaattttgtcacattcctttttcttcaacaaagatgagtgtcacttcaatttcagtttttcttcaatttttcaattttcaatttttttgagcactagagagctagaaatctagaaaacataataaatccctataactttcctttgtagatgaaaggtatttagcaatgcagtctccatgttatagttttataatgttagattttgttagaatagtttgaaaagttgctccacttaatgaattattagattacgtatatacc

SEQ ID NO: 87499 - DNA, 1160 bp, Homo sapiens
cgctactcttatcccctgaggattagaggctgggagaagtatatatgagagtcatatggagattaaatacctgaagtcatgaggagatgatgcactctccaagagagctttgatgacagcctatttatgcagcttctgtcatctgtacacattctcctctttctgtcaacaaagagtttttcttttgcaattgtaaatgtcctctgttttcagagacttttgttggaaaacaaaacaaaatcttgagacatgaaggatctgtaatggacacctgtcgattgtgtctgttcagcagctcctctcccacctgtcttccagtacaacaccttatttcattggagagaaaggttctacctcttctccttaaggttttagtggacagccaaaccagtcttcagtctacagggtgagtatgagatccaggcttgaccaaccatagtcaccacccacttggctacatcaaattgagccagaaagagcctttccctgggaatttatatgtagactttgggaaaaggaagctttcttctctgatgttactagacagcgatgacaaaaccagtgcttgtctggaccatgctccacttcctctccacagcaagatgagcaagctcatctgtagtaggaaagaatgtaggaatgcatcccctgcacagagaaaagcggaggagagaatgagagagagagagagagagagagagagagagagagagagagagagatctgactgtactgctaagtccctgcaatccccaccaaggtctgcaaggtctacttcccctagactacaactacccattacttgtgccaaatattcaataaatcgtaaccttagcagggagagggatgaagagagattgattaatgggtatgtatatacagtatgatagaagaaataagacctagtatttcatcagtcagtagtatgactatagtttacaataatctattgtatatttcaatatagctagaagagaagaattagaatgtttctagcataaagaaaacacaaatatttaaggtgatgggaatctcagttacactgattttatctttacaaggcatatgaatgttttaaattgtcatagtacccccaaaatatgtacatgttatgtatcaataaaacacaaaattaaaaaataaatatttaaacaatcata

SEQ ID NO: 87500 - DNA, 487 bp, Homo sapiens
tcactgcaacctccgcctccctggttcaagagattctcctgcctcagcctcccgagtagctgggactacaggcacatgccaccacactcagctaatttttatgtttttagtagagacagggttttcacatgttggccaggatggtatcgatctcttgaccttgtgatttgcctgacttggcctcccaaagggctgggattataggcgtgagccaccacgcccgaccctaactttttactttgaagtatttcaaacctaagaaaagttcaaaataatacaatcaatattcattcctgtaatctagactcaccagttgttaatatgttgctttttctctctgtatataaatacatattttgggctggacagggtggttcatgcctgtaatcccagtgttttgggaggctgaggcagaaggattgcttgaggcctggagttcaagaccagcctgagcaacatcaagagacttcgtctctaacaaaaatac

SEQ ID NO: 87501 - DNA, 321 bp, Homo sapiens
gcaagatccagttccaaatcaggctaacctgtgctctctttgtatcttttacacctttctttgatggcatgacttacactgtgctgtgaataagataggctttttgccttcaaaggattcacagtctggcaggctgacaaatagctatgttgcagtcttcaaatctagggctcactcttaggctccacacttcggtgtggtaaaaattcaaatagtattatcaaagcaggtaatgaaaagtttcccttctctaaaatcagagcttctgctatgttgcacagttccaggggacactgttgccattatggtctagatatgtgg

SEQ ID NO: 87502 - DNA, 288 bp, Homo sapiens
tgttgttgcagtttgtactgaaagtccttaaatgagcaaagcgaattggacaaacatttatttcaacattacttcttaaataaaactagaagccttatcaaaccttgatttagctttacaaatgttttgtaaacaaataccaagcttattgtataacaagagaaaactaaaactcagcccctcctaagagcagggaatggtctctcacaatctacgccagtcgctgggtgatggcagcacgctgctggcctcttccctcttgcccctgcttccgcagacacacaggtg

SEQ ID NO: 87503 - DNA, 285 bp, Homo sapiens
atcagtccaatgcagattagtatcactttgctcataaaagagagtataaaggttcttgaagtttttgaaaggagcggcttagctgactgttaaggaagctatcttttgtctacaagaaatttatactttttccttctaaatttcacaaacagaatattattagagacaacagaatacatttacaaaaatggcatcagaaataattgaatacattgtgtacaatatcttctattaatgaaataaatgtatattttatatgatatttggtctttatgaaaaaataat

SEQ ID NO: 87504 - DNA, 424 bp, Homo sapiens
tttggtatgtgtgtagggtcatttccagtgttgatcatcttgagcatgttcaatgacagttcaagatggggtaaaagagttcatttccacattcaaataatagagattaaatattataataatatttgctatatccaataaatctatgattaactaaaagtgcttgctttttagcttttcttgatacagctctaaatgaactggaaaccataaaattaccccccaaacggttgcagaattagctcatgttctattgtcaaatcaacattaattagcctcgattctcatttttaaacaatgtaaaagatttttctatcaaatcaagatggcctaacttcaccacattatcttgtgactcatttttagtattatagggcagaatttttagcctcttctcagaagtctacatgctttttcctcgtgc

SEQ ID NO: 87505 - DNA, 430 bp, Homo sapiens
aaaaagactccgtctaaaaaatataaagggcgcccactgtctactgtcagtaggatgggcgggcccattgctgcccaatctgattttcttccccaagagaaacaggaaatctgaatttttacataaaatagccccatttttaaacgtggacaccatggccaggcacagcggttcacgcctgtaatcccaacactttaggaggccaagcgggaaaatcacctgaagttcaagaccagtctggccaacatggtgaaacctcatctctagtaaaaatacaaaaattagccaggcgtagtggtgtgtgtctgtaatcccagctactcggaggctgaggcaggagaattgcctgagcccaggaggcggagattgcagtgagccgagatcgagccactgcactgcagcctgggtggcgagtgaaactctattgcac

SEQ ID NO: 87506 - DNA, 237 bp, Homo sapiens
tgtaatgacctccctcttggatttatctgtaggcaatcctgcttggaaaagtgaaagtgcattctggaacttaaaatattatttgcctgcacttccttttgtgggtcatttggagagttgtaaaaatgagaagaaaaaccttgtttccttaggcaatgacctcttatctcacttcctattttatttatcattgtccctattaatgaaaatattcctggtattttgggcccaagccaa

SEQ ID NO: 87507 - DNA, 368 bp, Homo sapiens
ttctcctgccattccaaaccacttcccattatgccaagatgctaaccctacttcttaatctagagagatcgggccttcttcagagaagctgccctcattcccttaccctctagcctggtccgacgcaccatgtcagacacttgcatagctctctatacttctctttcatagtctgcaggtatctatttgtgttattacttgattaccatctgtcccccatccctatccactcaaagttctgtgagggctggtatagtgtttattaatctaatctctgtaaccaacaaaatgcctggcacatagtatactcaataaacacttgctggttgaatgatgagtatgataggggtatgctctgattagctccg

SEQ ID NO: 87508 - DNA, 492 bp, Homo sapiens
ccaggagcttctcctctcttgccagggctatgagcagaaacctcaaataaaccctgggcagagaaaaccaacttaatgaagaggacgttgctgtttccactggcttctaattttgcagatgcaatgagcacttacggcttttgcagtggttcaggaaaaggcaagaagaagcagattgtcatgttccaaagccctctgatggctgcatggagccagcggtgctgtgactttttttaatagcttcagtacctttgatacgtatgtgcttatttactctttatctatgctctcttcctcccatcagcctgggagctccctggggcaggtctgtttctcccctccagtccggacttcgcaggagctgtgcctcccccatcacacttggagctgtctgaaggcaggggctgtgtctctgccattagactggaagctccccaaggttaaaggtcatatcctcaaatagctttagaatagctttagaacctgagggct

SEQ ID NO: 87509 - DNA, 462 bp, Homo sapiens
aaaaaaagagagagagacagtaaggccatctatagataattaaatatttctctatctaacctggggcaaactcatagtacttgaataaggccaaaaacaaatagaaaattactgtttaagctttcattctgctattgcaaacatttggaaacctctgcaactctttcaactaacatatttgtccttagcggtttttttttttttttttttaagtctgatatatggaatgtttggtgaaccttcctatcaacactgagactggaaactcaaagtacagtccaaatacattgtgttcaatcaccttcaagagccatttttctttttgggtgggaggtgggcagatgggttgagggtgggaagaaaatactattatgcagggtgttttgggaggggggagggtaacataaagagcagtgtacaggcaagttttgttattaaaattgtgtatactgtaaaaagtga

SEQ ID NO: 87510 - DNA, 111 bp, Homo sapiens
agggtgagacctttcaaagctgccaagtgggcaagcttccagcagcagtctgggagcgagcgacagagccaccaagctgggcggcagggcattgagcctcgcgtttcaatt

SEQ ID NO: 87511 - DNA, 142 bp, Homo sapiens
tatactcatggaggttgtatctctccaaaaacagacaaatccaaggctgtgaacaagcatccacatttgaattccattaaaccaaaatctatgttgaacgaagtgaagtctgtacacagcattgcaaatgtgaacacattcc

SEQ ID NO: 87512 - DNA, 332 bp, Homo sapiens
ggaaataaaggtgacatgaactaactattcaatcatgaatggtagaaaaaaatgaaaatgtaacgagatgggatccgggtcaaagtcaggggaggtatagttgaagatattgaaggagtcattatgataccaaagaaaatggaaagaagtggtatccagataggttatccttggagagtatccagggatgtctcttttcctaagaccttagagaaggaaaggatggctgataatatagggaaaagttgacatggaaggattaaataattttttgagaattcacgtaaggaatgataatctgaattttcagggctaggctcagaagcagaaat

SEQ ID NO: 87513 - DNA, 371 bp, Homo sapiens
aggggcgaagaaaggcttagggttgctgattatttacagctccaagccccgggcaggtacacagaattaaaggcctcccaccactccaattgcatttaattttattccgaaaatgactacctgccaataagcctcattgttcaccagcatctctgcaagtactttgaggtactattacccgagttcacttaacaccgcttgacaactttaagcagataacaattgaggtgctggtaatagagtctgtttttttttttaatttttacatttttaccacatgactttatgactctctttatcaagcatgttgaaattaatccatgtgttgattggagtatttcctcacccctgctgtgtattgagacgttggg

SEQ ID NO: 87514 - DNA, 764 bp, Homo sapiens
taaactaggacaactaatatgcttcaaacttccaatgataatgtatagacaagaagacagctctgtcctctaggctgtgcttttagtgccaactttcttaataacatcacctattctgctgacactcactctggaggaataaaactttagagcccctggctaaacaggatctgagaggaaggttggaatccagtggcagtatcgtggctcactgcaacctcaacctgccactctcatgccatccaaccacctcagcctccctagtagctgggactacaggtatacgccacaatgcccaggtttttactcctgggtctgaaaaagtcatcaaatcttggtaattcttagacactgacatcagtcaaagcctcatctgcagacctaggagaaggtgataataaaaatgaactgcttttgtgagacacggggccagaaattaaaactgttcaattgctctaggcccaagcattatttcagaagaggctggcatgaagtggctcaatctcagctcactgcaacctccacctcaaggattgaagcgattctcatgcctcagactccccagtagctggggttacaggtcaaaaactactaccgcaatgagtgggaagtcagatgattaatgtctgctgtttacacagaaacttgcagagatttacagcaagagcataagtatatcaagatgacaataacaacaatgtttaacatctagaagccacttccaacaaaaccatgtggaaggcgggagcaaattgcatagatgt

SEQ ID NO: 87515 - DNA, 322 bp, Homo sapiens
aaaattagagaatgccctaacttagatggtttttgaagcctgtacatttggtattgtttgacccttaagcttttacatctcttagcatggaagacgaagaaagctgtacattgttgcttgagagtctgtacatttagtccagatttgtatttgcactgtcagtatggcaaatgagtgaaaaatgtttaatacactattggatttttttttttttttttttgattcagcttataccagggctgaaaacctcaatttatgttcatgacagtggggatttttttaaatgcctacattctttctaataaactgttggaagacttta

SEQ ID NO: 87516 - DNA, 309 bp, Homo sapiens
ctgcctcagcctcccgagtagctgggactacaggcgcctgccaccatgcccggctaattttttgtattttttagtagagatggggtttcaccgtgttagccaggatggtctcgatctcctgacctcgtgatctgcccccctcagcctcccaaagtgctgggattacaggcatgagccaccgcgcccggccggattttttctttttttgattcagcttataccagggctgaaaacctcaatttatgttcatgacagtggggatttttttaaatgcctacattctttctaataaactgttggaagacttta

SEQ ID NO: 87517 - DNA, 291 bp, Homo sapiens
gcctataggccgcctttttttgggggggaagggtctcgctattgttgcccagactgatgtgcagtggtgcgatcttggctcactgccacctccgcctcccgggttcaagcgattctcatgcctcagcctcccaaagtgctgggattacaggcatgagccaccgcgcccggccggattttttctttttttgattcagcttataccagggctgaaaacctcaatttatgttcatgacagtggggatttttttaaatgcctacattctttctaataaactgttggaagacttta

SEQ ID NO: 87518 - DNA, 209 bp, Homo sapiens
tctccttactttagttctatttttttccccaaagcacagcattagttaacatttacactttttctctcaattaaatataagttctatgaaggtaggaaccctttctgtcatgttcaccacagtatctccaatgcctaggcactgtgtggcacacggtaggtacttaatatttctttactagaagataggaggagggaaggaagaaaaga

SEQ ID NO: 87519 - DNA, 189 bp, Homo sapiens
tagactcaaatataccaaccataagccttagcatccataacttttaagtcagtttctaaatatacacaaaccaaattaagaatcccctaccttttgttaacatttggggataccaggtaaaagacaaacaggaatgctttgtactgtactatttttgttaacttttctgtgagtttgaaattatcccaa

SEQ ID NO: 87520 - DNA, 346 bp, Homo sapiens
gtggcggggtgagtagtttggcgggaaggatggttacaaaacaggtgactcagaatgactcaggtcagagcaggtgatagaggctaggaggggactgttcactgaaactaggggctaggagacgaagggaaagaggaaattaaattttaaaatgaagaacaaagaacaggggagctgaacatactgatgcactggttctttggagaggatctcagaactcattgtactaaacaatttacaggctaaaacctttgaagaagaatttattatatcctacattttgtttttgtttttgagacagggtctcgccccgttgcccaggctggagtgcaatggtgcaatcata

SEQ ID NO: 87521 - DNA, 451 bp, Homo sapiens
tgtgctggcaatgagcgaggctctgtgggcgtaggaccctccgagccatgcgcaggatataatatcctggtgtgctgtttgctaagaccattggaaaagtgcagtattagggtgggagtgacccaattttccaggtgccatttgtcaccccttcccttggctatgaaagagaattccctcaccccttgcacttcccaggtgaggcgatgcctcgccctgcttcggctcatggtcagtgcactgcacccactgtcctgcacccactgtccaacaatccccagtgagatgaacctggtacctcagttggaagtgcagaaatcacccgccttctgcgtcgctcatgctgggagctatagactggagctgttcctattcagccatctttgaactgcccccctatttcaggtaccaatttttttcttttcttttatgtttttgagacagattctca

SEQ ID NO: 87522 - DNA, 944 bp, Homo sapiens
agtccacaaaagagaattttctgatgtgagaatggagggtgttgcctgcaactaccccagatccctgcggtggcagtttaagccgcctcctggagcagattgttaagctgatgcgagtctgggctctgcctcaccacttgtctcagagaatgtccagtgctaggagactcataagttggagagaaacggcctgatttatagaaactgagcgagactccggaccacctgatgcagagaaacctgtgacctgaaaaagtctatttgtgtttcctctaggaatctcggccaagaagacagggacaagctcccaactctgactaccccttttacagggaaaaaaaaaaaatcccgtgccttctttgcagcaagtgacaaatccttgtcatatcgagatggcttttcctcctcctcttcaaacatcttttagcagcaacagcagctcaagtaactggaattatttcagagttaaaatgcaggctttgtagaccctcttagacagacagattcaatttcaaaggaaacttctttggctgggtactcagtgagtgttacacagggatttggggagttaatattcactgtttctgttgttggagaaaaggaaagcagagttgctctttctcattactctccccaacgcacatctgtttcctctcgtatcttggaattaggaagatggaggagacttaagtggtgacccacctagcctcctgatgtatgctgggctcactttaaaactcccaaaacagatggcagttgatcacggttttaaagatcccagcatagactttctgcagcctcccttgttagccactatcagcgcttaacattctgtcatctgaataactccttaaaaatgatagcaatggtagtagaaatttaaaaggaacctcccaaaaaacatgcaaaagcttaccaccccagtaaatcacccgcaacaatgt

SEQ ID NO: 87523 - DNA, 725 bp, Homo sapiens
ctacagagtgggtctaggtccaggtacagtctcagaaccacactgcaaaactggcttagtcaggtagctgctgtatctgctgcttccactgtgaactcaaaaaccacattgcctgtgctgcaggccggaaagctgctgaaccaggaagctgtgctgatgctgctgactgcccctgaggttagagattgactagacatagtgccactgtcatccctgctggagaaggtccgaagcacctccacctctgtgcttccagaggggcactgtggtggccacttaaaatgctcaggctataccatgcactagagcatctacctgggcaagggatatgctgtatgacactctcctgatgctgggcatggctgtgagccaaagcacccaggcagccctgccatcagaagggtaaaccacggacacctgatgccttcctgaaggaagagcactacgcctgccaaaccatcaagcgttgatgctccagcgccttctacccgtggttctccagcctcagcagaagagagagaaattgatgaccctgtcgttgtagcatccccatcacccagcaattaattttagttcaatgcttcaaacgctcttcaggcgcagtgtgcgttcagctgtgtcagctaatggcactggagacacagaaatgaacagagacaacgtgccctcaaggatctcacagtgtgtggtgaggtggacacacacacacatatctaagcacatga

SEQ ID NO: 87524 - DNA, 600 bp, Homo sapiens
tgagatcacactcgtgtcatgaaagtctttgaacggtaggtggaatgggcgtgaacgatggtcgatggggattcggcacggcatggtgagacggtacatcatctcgcatatcagctgttcataacactaatcatggcggcgtgtgggtaaacacactggatggtcgaggacactagcaaatgggggatctcagaagtcttaatgaagtaactatccctgaacactgggatcaatactcagcatccagctgtcaaatcaacaccaagccgcctcctggagcagattgttaagctgatgcgagtctgggctctgcctcaccacttgtctcagagacagagtcttgctctgtcacctaggctggagtgcagtggtgccatcacagctcactgcagcctcgacctccccgtgctcaagtgatcctcacacctcagcctcccgagtagccgcgatcacaagttaaacaaacacagttctttacatcaatgcttccgtccctggccatctggtctcctgtcccctccagacccaaaaccatgggctgggctgcagcaaaatgagggtgtactcagtgcactgaggcccatgtaccatgagagatgg

SEQ ID NO: 87525 - DNA, 416 bp, Homo sapiens
agtccacaaaagagaattttctgatgtgagaatggagggtgttgcctgcaactaccccagatccctgcggtggcagtttaagccgcctcctggagcagattgttaagctgatgcgagtctgggctctgcctcaccacttgtctcagagacagagtcttgctctgtcacctaggctggagtgcagtggtgccatcacagctcactgcagcctcgacctccccgtgctcaagtgatcctcacacctcagcctcccgagtagccgcgatcacaagttaaacaaacacagttctttacatcaatgcttccgtccctggccatctggtctcctgtcccctccagacccaaaaccatgggctgggctgcagcaaaatgagggtgtactcagtgcactgaggcccatgtaccatgagagatgg

SEQ ID NO: 87526 - DNA, 1581 bp, Homo sapiens
ctacagagtgggtctaggtccaggtacagtctcagaaccacactgcaaaactggcttagtcaggtagctgctgtatctgctgcttccactgtgaactcaaaaaccacattgcctgtgctgcaggccggaaagctgctgaaccaggaagctgtgctgatgctgctgactgcccctgaggttagagattgactagacatagtgccactgtcatccctgctggagaaggtccgaagcacctccacctctgtgcttccagaggggcactgtggtggccacttaaaatgctcaggctataccatgcactagagcatctacctgggcaagggatatgctgtatgacactctcctgatgctgggcatggctgtgagccaaagcacccaggcagccctgccatcagaagggtaaaccacggacacctgatgccttcctgaaggaagagcactacgcctgccaaaccatcaagcgttgatgctccagcgccttctacccgtggttctccagcctcagcagaagagagagaaattgatgaccctgtcgttgtagcatccccatcacccagcaattaattttagttcaatgcttcaaacgctcttcaggcgcagtgtgcgttcagctgtgtcagctaatgcaaatgggggatctcagaagtcttaatgaagtaactatccctgaacactgggatcaatactcagcatccagctgtcaaatcaacaccaagccgcctcctggagcagattgttaagctgatgcgagtctgggctctgcctcaccacttgtctcagagaatgtccagtgctaggagactcataagttggagagaaacggcctgatttatagaaactgagcgagactccggaccacctgatgcagagaaacctgtgacctgaaaaagtctatttgtgtttcctctaggaatctcggccaagaagacagggacaagctcccaactctgactaccccttttacagggaaaaaaaaaaaatcccgtgccttctttgcagcaagtgacaaatccttgtcatatcgagatggcttttcctcctcctcttcaaacatcttttagcagcaacagcagctcaagtaactggaattatttcagagttaaaatgcaggctttgtagaccctcttagacagacagattcaatttcaaaggaaacttctttggctgggtactcagtgagtgttacacagggatttggggagttaatattcactgtttctgttgttggagaaaaggaaagcagagttgctctttctcattactctccccaacgcacatctgtttcctctcgtatcttggaattaggaagatggaggagacttaagtggtgacccacctagcctcctgatgtatgctgggctcactttaaaactcccaaaacagatggcagttgatcacggttttaaagatcccagcatagactttctgcagcctcccttgttagccactatcagcgcttaacattctgtcatctgaataactccttaaaaatgatagcaatggtagtagaaatttaaaaggaacctcccaaaaaacatgcaaaagcttaccaccccagtaaatcacccgcaacaatgt

SEQ ID NO: 87527 - DNA, 1280 bp, Homo sapiens
gcctcctgagtagctgggacaacaggcacctgccaccacgcccagctaatcttttttgtatttttagtagagacggggtttcaccttgttagccaggatggtctccatctcctgacctcgtgatctgcctgccttgacctcccaaagtgctgggattacaggcgtgagccaccgcgcccggcctctacagcatattttaaaaggcaaaaagcaaatgggggatctcagaagtcttaatgaagtaactatccctgaacactgggatcaatactcagcatccagctgtcaaatcaacaccaagcgtttcactcgtcgcccagcctagagtgcaatggcgctatttcggctcattataacctccgcctcccgggttcaagcaattcttctgcttcagcgtcccaagtagctgggattacagccgcctcctggagcagattgttaagctgatgcgagtctgggctctgcctcaccacttgtctcagagaatgtccagtgctaggagactcataagttggagagaaacggcctgatttatagaaactgagcgagactccggaccacctgatgcagagaaacctgtgacctgaaaaagtctatttgtgtttcctctaggaatctcggccaagaagacagggacaagctcccaactctgactaccccttttacagggaaaaaaaaaaaatcccgtgccttctttgcagcaagtgacaaatccttgtcatatcgagatggcttttcctcctcctcttcaaacatcttttagcagcaacagcagctcaagtaactggaattatttcagagttaaaatgcaggctttgtagaccctcttagacagacagattcaatttcaaaggaaacttctttggctgggtactcagtgagtgttacacagggatttggggagttaatattcactgtttctgttgttggagaaaaggaaagcagagttgctctttctcattactctccccaacgcacatctgtttcctctcgtatcttggaattaggaagatggaggagacttaagtggtgacccacctagcctcctgatgtatgctgggctcactttaaaactcccaaaacagatggcagttgatcacggttttaaagatcccagcatagactttctgcagcctcccttgttagccactatcagcgcttaacattctgtcatctgaataactccttaaaaatgatagcaatggtagtagaaatttaaaaggaacctcccaaaaaacatgcaaaagcttaccaccccagtaaatcacccgcaacaatgt

SEQ ID NO: 87528 - DNA, 606 bp, Homo sapiens
aaaagtccacaaaagagaattttctgatgtgagaatggagggtgttgcctgcaactaccccagatccctgcggtggcagtttaaggtaggtgggaaggctctagacgtgtgggactggagtcttgtgttctttgcctcaaagctgaattctgactcctctttcagccttataccaatttcccttaagtgaccgtctgcacatagaggtgctattgaggctggagagtggtgagttcagcttcaaggtgcactctagagatagggcttgggcctgtgtgtatttttggaattgctctccaaacattccaaaaactgaaagcttcgaggtccactccaccagctgacctagtttttcagctaaaagaccatggcctggcctcctaaagtcgtatatctatagattccagccaggtgggacccatggtgcccattttgttaattccaaagacacagcatggtgtaggagaaaaaggatggaatttcaaatacagaagtttggagtcagacttatgttgaaggcaaaatgaatcttttgtgtcaaagtcagaaggggccgggggtttactgagaaagggcacaaggagacgttctgagtgatggaaacat

SEQ ID NO: 87529 - DNA, 139 bp, Homo sapiens
taattatctattgctatgtaacaacttacccccaaatgtcacaactctctatcaccttctgcagtttctttctttcttttgttttcttttttttctttttttattttattttttatttttagacagggtcttgctctgt

SEQ ID NO: 87530 - DNA, 891 bp, Homo sapiens
tggcgttcgaccttcgccccacctggaaggcgccggatgcgagactcgcccttggctcggcccgcggccccggccggcgcctcgcccttcaccttcaagtccccgagggagctcggcaactcggcccaaggacaggggcccagcctagccgtcaccgccggcagcgcgctccgggtctggctctggtattcactggcgtatcccgcatccggcctgctcacggcgctccaggcctgccccgcgcgccgaaaccctccgccggacgcggaggaaaagaaggtggtgagcgaagcacggagatgctccgactgctgcgcgggtctcccaagcccaaccgccacccgcgttccgggccagtcccagcccacggcgtggccagcgctgccgccggtccagcgacaatgagggagcccccgggccgcggggcatcttttgagaccatgtggcccacagagaatctaagctcccgccgccgggctccacctcaacggcggagaactcgggcgccgagcatcgcccgatccctacccggcagcggacggctactgggtttgattttcccctccacaggaaagaacgtgcagaggcacaaatcccctcctcttccctcagaggaaagcctgtcccagcggtcccgctgagaacttccgaagccttggcgcggcaggcaggcccctgagccggtgcaccgcgaagttgcattctcaccttcgagtcaccgtggcttaggccgagtaaacgagcacttcatctagcgccgggcgggccccggcaccaagctaagagctcaaaactcctcgaagcgggcgcgcgacgtcgcggtccgagctttcctcgccgcactcccccatcagacctaagatcttttaccttttaaattaaagtgaatcc

SEQ ID NO: 87531 - DNA, 862 bp, Homo sapiens
tctttttagtagagacggggttatgccatattggccaggctggtctcaaactcctgacctcaggtgatccgcccaccttggcctcccaaagtgctgggattacaggcatgagccaccgcacccggcccttgtatgcttttactgatagaaattatttccttcaagaaacgggaatttggctaatttacctcttaaaggaaattaatgctgctttatctaaatgaacagaatagtgagtgaactgataattgtacttaaagtaattgttccaatctttagaatctcctataaaatctaagatacaagtttaccttattttagggtttcaaactaatgtatgttatattttatggaggaaagaactacataatgcagagcagaattttttaacgacgttcttgtatgggttctttagtgagtccaggtacccccttgaaatcgtatgggacaggttgtgtatgtgtgcatttttctgaggagtggatccatgactcaaaaaggttaagaacttctgccctggaaaggaaaagcaaaagattgaagaataaaaacattttgtatttgccaaaacttgttctgtagcagtaagtgtgaaacaagtttgctacatttttctttttggttttacttggttggggcttttttgtttggttggttttaaaggatttaggggattggcaagtcagtttgtcagatgtcaatgaacagaaaacctaagaaaaaaggtagcaaaagttctgctggccccagatggattttgccttaagtaatttcctaatcattagttacagctctgtgtcaaaagatgtacatagaaatttatgctagattcttaacatctttcttactgtgtgcagaaatg

SEQ ID NO: 87532 - DNA, 174 bp, Homo sapiens
ttatccctacatttctgaagatgaaaggaaggctcagagaggtagaggaatttgctgtgggtcacacagcatgtagctcaaattaaaaatcagagctgtcaggatccaaaccttgagctctcttccactttgcatcctgcgtgttcagaggaggagaaagcttttgcgtatggg

SEQ ID NO: 87533 - DNA, 462 bp, Homo sapiens
aaattagctaggcgtgatggtaggcacctgtaatcccagctactcgggaggctgagggaggagaattgcttgaccccaggaggtggaggttgcagtgagcctagatcacaccactgcacttcagcctgagcgacattgactgtctcaaaaaaaaaattaggattattcaatgttgtcatcatttccactcctaaattctgaaatgctttctttggtagaggtgagagtgtggagccacagctagtagagaaggaacagtaggacctgcagcctccctggttttccaggacaagtcattgctgtgtgtggcaggaatgccttacctcaaataacaaaacagtgtgaaaaacgaatttgtgttacatttaaagtttgtaaagcaatgagaaatgtgtgtatcataaagagcatctttaaatttttgctaaaatattagcctcttaaattctctaggaaccccct

SEQ ID NO: 87534 - DNA, 340 bp, Homo sapiens
cagggaacggaatgaggccagagggcctcgggaaagcccgaggaggtgtcgcacaggaagtgtccagaatggaagaggaagcgtccagcaaggaacaggaagaatggacacttgtgaggggaaatcatgtccctcccactaaatgtgctctccacaaggacccggcccgcccttctgtccctgctggatccctgagctggcaccagccctgccctcagagagaacgtccaggagacaggtggaggtgtacgtgtgggtccctggggaaatccatcctccagccgcgggctcccagtcggctcccagcctctcgctccagcttcaccccatggagctcatc

SEQ ID NO: 87535 - DNA, 353 bp, Homo sapiens
cgataacacaatcttcagccgcatcccaagagccatggctcccagagttagggtgctaaacggtcctggtatgatttctactggtcatgtctctcaaggagggctttttaaatctcaacgatgtggtttcgaaggctattaaactatactttatcaaatggagacttaaaactctgaaacaaagaacaggtaaaagaactagaaatattttatctggggaaggaaatattcagagggcacagaaaagatgtcctcaagtattcaaaagggtaattaccttgagatagttgacttattttttttgagacagagtctggctctgtcacccaggctggactgcagtggcgcgatct

SEQ ID NO: 87536 - DNA, 728 bp, Homo sapiens
ggtgggggaaggtgtctgtccatctatccctggcccccagcccatgtggttttggcagcaataaggtgtgtggggtaatgacccctgaaattaaaatggtgtgtgtatgtgaaggaaaggcgggcaaagctatggggagcggtggagtggaaggaacaaaggaggtcagtactgggaacgctgaaggtgggaggccatttcataacattacttgttgatgaaattgccatgaataccttctttgcccatcagcaggcctagcgtcttggcagtcatggtgacaatgacgttgaaggtggggactccaccgatgctcttcatatgaagatccacggtcaattccccatcctgcagcagtgagtccaggaccacagtatatttctggccccccagtgtcagtccattcatgacaaagtttgaccagtctttgccaaccaggacaccaacctcagctggcgtgatgttgaggaaggttttccctgggatggcggcccagatggaaggtgggtccttgttgccaacaatggccgtgtcctaacaggtcccgtccgccacgaggctgtagatggaggtgtccacctggccgttgcgttgctgcaggggctcctctggtcgctgctgttggggccgcctgggctggcgggtgggggaggcggagagctcgatgcaggtgctgtcctcctcgccacgactctgctagctgtgcagtagccctcgctccgccactt

SEQ ID NO: 87537 - DNA, 471 bp, Homo sapiens
agaaaaagatttgcactatgatctatttagggtgagaactgcatgtgattcttcattatgattagtaaaactacgttgaattgtgaataaactgtaacaaattggtatatgatgtttagtttcacatgatctaatgtaaaagtcctaacaactttaagctgctttatattataatcaccttcctaaaaaactgtatatgtatttgattatttgctaagattttaaatttcttgctcttaaatgtgtcttaatctcaacccctctttgtaatccccactaccatggctttagttcacacttttcctcatttattacctacttagccgcctaaattttctccctgcttcaatctcacttactttgaaactgttccccacagtgcaaatctgactatactggccagcctgaattcattctggacatgctttcatgatctggtcccagcctacctctccagcctcatttttcact

SEQ ID NO: 87538 - DNA, 429 bp, Homo sapiens
tggggaggaaactaacttcaaaaacagttgaccaaatttcactttgaataataaaagagttttttatttgtaggctacacaggtttaggtggatatcaaggcaaaaagaataaaagttttgggaaacttctttggctaccatctcaataatggcttatcattaataattattttggccaaggatttttaaagcaaatagagaagagtcactttgaacccttgactgcaaaatcagtgagaagaaaggctaaaatgggaataatcaacaccaacaatgatatgttaatatttcccttgttctatagtagcatggttgaatagatccttctgtaatgatggaaatgtcccaagctacatctgtgctgtctaatatagtagccactagccaactgtggttactgagcacttgaaatgtgctagtgtgactgg

SEQ ID NO: 87539 - DNA, 3581 bp, Homo sapiens
  misc_feature (603)..(603): n is a, c, g, or t
  misc_feature (606)..(606): n is a, c, g, or t
  misc_feature (609)..(609): n is a, c, g, or t
  misc_feature (1071)..(1072): n is a, c, g, or t
  misc_feature (2171)..(2171): n is a, c, g, or t
  misc_feature (2229)..(2229): n is a, c, g, or t
  misc_feature (3012)..(3012): n is a, c, g, or t
  misc_feature (3201)..(3201): n is a, c, g, or t
  misc_feature (3581)..(3581): n is a, c, g, or t
cgccgccgctgcgcctcgggcagccccagcgagcggcaactcccgggctggcgcggctcgctttctggctccttccgcgcggcgagctcagccccgctcgatttttcctcttctgttccagccctctcttgtctgggtggctgtggcggcggcagggggatggggaccccgtgtggggaaggggttgaagatcgatgaagattattgttcttttaaaggatgccttagcttcctcccgccgcctttcctctgagccttcctactagagaccgtgaaccagagtcagggatgtaaagacagggggaaagcacgccgggagctccagccagccggggagaccctcctctctgtggaggggagggggatttccagcgacaggtcattggcgaaggggatcgtcgcggggagaggctccccggagggagcggggaatcccacagccctttgtggtgcccgagcccgtgccgcctgctgagcggggtctgtgggagctagctttgtcagtggaaatgcctgccccagagggatattgcttcagttgacctcattttttaaggaccctggctctgcggctttgtccagttcaaaatggcagaaaaggcnccnccnggcttaaacaggaagacttcaaggtcgacactttcccttcctccagagcctgtggacattatccggagcaaaacatgctccaggagagttaagatcaatgtggggggcctcaaccacgaagtcctgtggagaacgctggacaggctgcccaggacgcgcctggggaagcttcgagactgcaacacacacgagagcctcctggaagtgtgcgacgactataatctgaacgagaacgagtatttctttgatcggcatccaggagccttcacttccattttaaatttctaccggaccgggaaactccatatgatggaagaaatgtgtgcactttcgtttggccaagaacttgattactgggggattgatgagatctacttggagtcctgctgccaggccagatatcatcaaaaaaaagaacaaatgaacgaagaactgaggcgagaggcagagactatgcgaganngagaaggagaagagtttgataatacctgctgccctgataaaaggaagaaactgtgggacttgctggagaaacctaactcatcagtggctgcaaagatcctggccatcgtgtctatcctgttcattgtgctttccaccattgctttgtctctcaatacgctgccggagctgcaggaaacggacgaatttggacaactcaatgacaaccgccaattagcacacgtggaggctgtgtgtattgcatggtttaccatggagtaccttttgcgattcttatcctcaccaaataaatggaagttcttcaaaggcccactgaatgtcattgatttgctggccatcttgccgtactatgtcaccatttttctgacggagtccaacaagagcgtgctgcagttccaaaacgtgaggcgcgtggtccagatcttccgaatcatgcgcatcctcaggatcctgaaactcgccaggcattcgacaggcctgcagtctctgggtttcacccttaggcggagttacaatgaattgggcttgttgatattgtttctggccatggggataatgatattttccagcctggtattttttgctgagaaggatgaagatgctaccaagttcaccagtatccctgcatcattttggtgggccaccatcaccatgaccactgttggctatggtgacatttaccctaaaacattactagggaaaattgtgggaggtctgtgctgtattgctggggttctggttattgcccttcctatcccaattattgtgaacaatttttctgagttttacaaggagcagaaacgccaagagaaagcaattaaaaggagggaggctcttgagcgggccaaaaggaacggaagcatcgtttctatgaacttaaaagatgccttcgctcgaagtatggaactgatagatgtggctgttgagaaggccggagagtccgccaacacaaaggactccgccgacgataatcacctgtcgccaagccggtggaagtgggccaggaaggctctgtcggaaacaagctccaacaagtctttcgagaataagtaccaggaggttagccaaaaagactcccacgagcagctgaacaacacgtnttcctccagcccacagcatctgagtgcccagaaactggagatgctatacaatgaaatnaccaagacacagcctcattctcacccaaacccagactgccaagaaaagcctgagaggccatctgcatatgaagaagagattgaaatggaagaagtggtgtgtccacaggagcagctggccgtggcacagaccgaggtcattgtggacatgaagagcacctccagcatcgacagcttcaccagctgtgccaccgacttcacagagacagagagatcgccgctgccgccgccctccgcctctcacttgcagatgaagttcccaaccgacctcccagggacagaagagcaccaaagagctaggggccccccgtttctaactctatccagagagaaaggacctgctgccagggatggcacgctggagtatgccccagttgacataactgtgaacctcgatgccagtggctcccagtgtgggctacatagtcctttgcagtctgacaatgccaccgacagtcctaagagctctctaaaaggcagcaacccactaaagtccagatccctcaaagtgaactttaaggaaaatagaggcagtgcaccacagaccccgcccagcacagccaggccactgccagtcaccacagctgacttttcgctcactaccccgcagcacatcagtaccatcctcttagaagaaaccccctcccagggagacagacccttgctgggcactgaggtttcagcgccttgtcagggaccttccaaagggctgtcccccaggtttcccaagcagaaactgttccctttctcttcaagagagaggaggagcttcactgaaataganactggtgacgacgaagacttcttagagctcccaggggcaagggaggagaagcaggtggactccagcccaaattgctttgcagataagcctagtgatgggagagaccctttaagagaagagggcagtgtgggctcttcctccccgcaggacacaggtcacaactgtaggcaagacatttaccatgctgtnagtgaagtcaaaaaggacagtagtcaagaagggtgcaagatggaaaatcacttgtttgccccagaaattcattccaacccaggagacacaggttattgtcccacacgtgaaaccagcatgtgactagttacaaaagcaataaattgaaacaaaacaaaacaaaacaaaacttgtttcttaaaaatgcggttaataatgcctgtgaactaaaaaaatgggaagccctccccaaaaaaagtgcataaaatgttatttttgcatggcatgaacagtttagcttaagtactgtttaaataatgagtcaagactgcattttgtaacaaaccaacaaaaatgactgaagaacagtgaacaaataaaaagagctctattaggaaccn

SEQ ID NO: 87540 - DNA, 1543 bp, Homo sapiens
  misc_feature (19)..(19): n is a, c, g, or t
  misc_feature (755)..(755): n is a, c, g, or t
  misc_feature (816)..(816): n is a, c, g, or t
  misc_feature (830)..(830): n is a, c, g, or t
  misc_feature (879)..(879): n is a, c, g, or t
  misc_feature (881)..(882): n is a, c, g, or t
  misc_feature (884)..(884): n is a, c, g, or t
  misc_feature (892)..(892): n is a, c, g, or t
cacgccactgacagatagntgctacatcacgctggctcaagctctgggaatgagcatggggggagcccctgctggacctgcaggcacaggcaaaacagaaaccactaaagacatgggacgatgcctcgggaaatacgtcgtggttttcaattgttcagaccagatggatttccgaggacttggacggatttttaagggactggcacagtctggagcctggggctgttttgacgaattcaaccgtattgatctaccagttctctcggttgcagcccagcaaatttccattattctgacatgtaaaaaggagcacaaaaagtcttttatctttactgatggagataatgtgactatgaaccctgaatttgggcttttcttaaccatgaatcctggctatgccggacggcaggaactccctgaaaacttgaagattaatttccgctcagtggccatgatggtgcctgaccgtcagattatcataagggtgaagttggctagttgtggcttcattgacaacgttgttttggccaggaagtttttcacgctctacaaactgtgtgaggagcagctttctaagcaggttcattatgactttggcctgcgtaacattctgtcagttcttcggaccttgggagcagcaaaaagagccaatccaatggatacggagtccacgattgtcatgcgtgtactacgggacatgaatctttctaaactgattgatgaggatgaacccttgtttttgagtttgattgaanatctctttccaaatattcttctggacaaggcaggttaccctgaactggaagcagcaattantagacaggttgaanaagctggtttaatcaaccatcctccttggaaactgaaggtcatccagcnanncnaaacgcanagagtgcgacatgggatgatgactctggggcccagtggggctgggaagaccacctgcatccacaccttgatgagagccatgacagattgtggaaaaccacatcgggaaatgaggatgaatcccaaagcgattactgccccacagatgtttggtcggctggacgttgccacaaatgactggactgatgggatattttctacgctttggaggaaaacattaagagcaaagaaaggggaacatatctggataattcttgatggtccagtagatgccatctggattgaaaatctgaattctgttttggatgataacaaaactctaacccttgccaatggtgatcggattcccatggctccaaactgcaagatcattttcgagcctcataacattgacaatgcttctcctgccaccgtctcaagaaatggaatggttttcatgagctcttctatccttgattggagtcctattcttgagggttttcttaagaaacgctcacctcaagaagcagaaattcttcgtcagctgtacaccgagtctttcccagacttgtatcgcttctgtatccagaacttagaatacaagatggaggtgctggaggcctttgtcatcacacagagcattaacatgcttcaaggcctgattcctctgaag

SEQ ID NO: 87541 - DNA, 417 bp, Homo sapiens
gtcatatgactcctgagcattaaaactatagaagttgcacctacatcctagcagaattcatgccccacccataggcctattcttgtggccttctgttagtcttacatatgtggtttttggttcctaagcaaagaggaggttagttttagagagggactcttatcatccttgcttttaagttaaaccagaaactaaatttgcctccaagttactttggcctacgcccaggaaagaacaagaacagcttggaaatcagaagcaagattaagtgaactatgtcagatttctctgagtgtcataattttgtaaaggtagattcagggccattaacctatgcccctttcaggcagaatggactctctgtgactaactgaggtgctcaaagttaaaatagaatcaggtatccatggctgggtc

SEQ ID NO: 87542 - DNA, 478 bp, Homo sapiens
tggtttttattgttcatattaatatttaatattataactttgaatcatttttacacattgtaatacaaagaaaataagtaattatgttaatgttattaggaaccaagattttcagtataataaataaaagaagtaaacagcaaaaatcctgtaatgtaaatttgaattggaattattgatataagtgttttttaaaaaacatatttcttggccgggcatggtggctgacgcctgtaatcccagcactttgggaggccaaggcaggtggatcacgaggtcaggagtttgagaccagcctggccaacatggtgaaatcccgtctctattaaaaatacaaaaattagctgggcatagtggcaggcgcctgtaatcccagctactcaggaggctgaagcaggagaatcgcttgaacctgggaggtggaggttgcagtgagccaagatcaggtcattgcactccagcctgggcgacaagagca

SEQ ID NO: 87543 - DNA, 139 bp, Homo sapiens
cctgaaaattgtaatgaaatgaccatgaattgatccaggaggcaatgggtttgttttgttgttattgttttgtggttttttctttttgacacggagtctcgctctgtcacccaggctggagtgcagtcacactgacctc

SEQ ID NO: 87544 - DNA, 768 bp, Homo sapiens
atgggattattatttactttatttaattcacacaatgatatggctacatggtctcctttaatcctcacaagaaccatttgagaaaggaaatactattctaaagttgagcacaagataataaaaatatgtctgatgccacagaactgataagagtgatggctctaagctatgttatctactttacattcaaattttgagaatttagcttgtagtgaataactatttctaagaaaagaagaatagtgtattcctttaaaaacaatagctaagcttgacttctttgtcactgggatttagggcatgataaacatgtgatccaagaacaaagtttataccctcagactacatatttggaaacatgacatgccaattcaagtgatttaagtcctggttttccttattaatcatagaaaaaaaatttctacaagtcagaggatttacctgctttgtttgctgctctaagcctggcaccaacaacgatgtcaaacatacaataggagctcaataaatattagttgaatgaatgagtcaagaatgaatctactcataaagcatataatccagtgctttaggtctgatgctgtgagtcaaagttgagttgtgggtgtctcagaaaactacatacaaagcatggcatttatttccactggagtcatagcttttacttatatatttaccatatgagaatttacctactatatttcttcctatctaagaaataattaatggcaagacaaaccatcattgaatgaagtagtgaaagaagaa

SEQ ID NO: 87545 - DNA, 260 bp, Homo sapiens
ctcaaagcaagccataaaacctaagaaggtcactctctgacctcctcccttttgccctgaagaccttcgtgtgacaggtgttctgcccctccctagaggccaaagagaatctgaacaaacaggccttgttaagtttccagtttattaactttaggccatacctcctttttatccaatcccacttcaacacgactgttcatcctttatcccacctaagcactaaaatacagttttccctgggtctttgtgtcttcattttt

SEQ ID NO: 87546 - DNA, 273 bp, Homo sapiens
agtgttagtttttctttaaatatttgttagaattcagctgtgcagcgatcgattcctggctgtttctttgttgggagactttttattattaccttgatcttattacttgttattggtctgttcaagttttctatttcttcctgactcaatcgtggtaggttgcatgtgtccgggaatttattcatttcccccagtctttccagttttttagtgtgtagtcattcataataatctatgatgctcttttgtatttctgtgatatcggttataatg

SEQ ID NO: 87547 - DNA, 428 bp, Homo sapiens
actgattcggtaatacccttttaaaaaattaatttttctccgatgcaggacccagtcttggaaccacgttatttcctgtgtctttattctcctttaatatgggtcctttccgcctttctttaacttttataacattaacgttttttgcagaatctagtcttcttttttaaaaaatgctcatcattttgagcttgccatgtttcctcatgatttgattcatgtaacgcatttctggctgaaatagtatgtgtctggctgaaatagtatgtgtccttctcatggtatcacatttggaggcacacagcacctacctgtacctcattggtgatgttaagtttcatcatccagacaaactgctatccaattttcctactgcttagttactatcttttccctgcaaccaataagcaatatttggacagacactt

SEQ ID NO: 87548 - DNA, 281 bp, Homo sapiens
actcccagcagccgccagccagctgcatcaggagatgttagtcacgcccggaaggctgttctagtccgcctccttggaaaagaagctcaagtaaataattgatggagaatgaccgaacccaggacaaagctttgcaggaaaccagtgcatccgtgttcgagcggttttgggatcctctgccaagtacgggataagagaatagagcaaggagtttgagcgctgctgccaatcttccatctcgggcgtggctctggcctttttgtctctttatcccgccactc

SEQ ID NO: 87549 - DNA, 532 bp, Homo sapiens
ttgagtgctggcaataccctttctacaatactacacagtctttcttttgttaaacgcagtaacaaaaatgtcctcaggtgggtgtcagtcatatagttaagcaaaacaaagtatgtatgtaaaaggtatgtgcaggtcttaccaaattaattggccatctttacacagtgtaaagtctttttctttaaaaagatgtttctttggagaatatctttatgccttcattcttgccaggctttgaggatttgtatctatttaatgaaaggtggttctctttagcacacttacaccaagcatgcaggtgaaaaccatcaccatatagtctcactgtcactagtttgcccctatttccattccattcttcactctgctgactgcctggcctttctaaaatgcacatctgatgatgtttgagtttttttcaatggctttccatgtgctacataaggtaaaatctacacttcttaggctggcattcaggggtctttgaaatgtttagcctgtaccaccccttcagtttcacttctaacac

SEQ ID NO: 87550 - DNA, 454 bp, Homo sapiens
cagagaagtaaactgatttgtttttggaataatggacacattcacgcacctgtatgccccatttctagagcattccgggccatcaaagtctgacagtcactgaacgatgctttgcagacacctttcttaccacctcaagtcgtatcatccaggaggcagcaaaaatagtactcaaaatttaaaaaattaaacaggaaggagaaccaaatcaattcggagggatctgctcagacgttgcaagcacggccgctgtccttctggtactttcacgcaatgcgtttccatttccaaatgtctttcacttacagtctttcataaacatggcatactgattagaatcaaatatttcagtatggagggtgtgcagagagcattcatctgagtcaagattcatttattcccagctctatcactaaaataccttgcggctttaaataatagtgacgttcctcat

SEQ ID NO: 87551 - DNA, 675 bp, Homo sapiens
gttgcctgtgcccctggagtctgtaaaagagatgcttaagtcagtcatgcaggaactcgaagactatagtgaaggaggtcctctctataaaaatggttctttgcgaaatgcagattcagaaataaaacattctacaccatctcctaccaaatattcactatcaccaagtaaaagttacaaggtaaacaggaaagaatggaatcatttcattgtgaaattgtttctaagtgttttaaatgctcttttgttatttttatttttttttttagtattctcccaaaacaccacctcgatgggcagaagatcagaattctttacggaaaatgatttgccaagaagtaaaggccattacgaaactaaatagcagtaagtcagcatcccgtcatcgttggcccacagagaattatggaccagactcggtgcctgatggatatcaggggtcacagacatttcatggggctccactaacagttgcaactactggcccttcagtatattatagtcagtcaccagcatataattcccagtatcttctcagaccagcagctaatgttactcccacaaagggttcttctaatacagaatttaagtcaaccaaagaaggattttccatcgctgtgtctgctgatggatttaaatttggcatttcggaaccaggaaatcaagaaaagaaaa

SEQ ID NO: 87552 - DNA, 219 bp, Homo sapiens
tattactttaacatttttagcaattttttttttaccagtttagtgagcaggactgatatggtttgatgctgtgtcccaaatctcatgtcgaattgtaatccccacatgttagaagagggacctggtgggatgtgattggatcatggggtggatttcccccttgttgttctcgtgatggtgagtgagttctcatgaggtctggttgtttaaaagtgtgta

SEQ ID NO: 87553 - DNA, 389 bp, Homo sapiens
tctaattttttcctttctgaaagaaagtgggtcatataatgagagcttaaagggttcttggttgcttatgttagatcctagtgaaggagcctcactttctctgaggtgctgtggagaattagaatttgctttgtcatgaggctatgaaagaggagaaactctcctccagtagcttcccccacaacaaaaaacctggctaatataaacccaaggacaaagaattgattggcatcagatctgtgagcttgttggggaaaacaagccttccaaatgtgtttttctttctgtcctctgttaacccaggtgataggtgagctcgtctctccagataaccgcatccccccagagcggctagatgaagcagacaggtaggagtctgatatgggggt

SEQ ID NO: 87554 - DNA, 1089 bp, Homo sapiens
cctgtttccaaaacaaagccagaaggaaatatgttagatttttaacagtgattgtcgttagatattgcgctaatccgagatttgtgttttcaatcttacacttttgtaatgtattttctaaaggatgttctttgtattagaaactgtattaaatatgtggagattaactttagcaaaattgaatgtaattaatggtattaattaaacttgtctgcgggtttggaaaaaaaaaaaaaaaaaaaaaaaaaaaaaaaaaaaaaaaaaaaaaaaaaaaaaaaaacaacaaagaacaaaaaaaaagacaaaaaaaaaacaaagaaaacaaaacaacaacaacaaaagaacgacacaggaaaaaaaaagcgacgagagtgaggggggccgcgccacatcgacaccacacgcgctggcgccgcgcaccccgcgcaccaccggccccgacgccgacacaggagggggcagccaaacaccaggacggagagagatagaaaaaacaggagagcaaggcgagacaaaaacacaaagcaacaaagagagtgaggaccagacgacacacgaacagacagcgaggaagacagtaaacaagaaccacccctccacggcggggggagcaaaagcagaacgagagagtagaacaacacgaaaggagaacgacagagagaaaacagcaagcgacacgccggcgcgagcgcggaaaaaacaaccaccgccaatgcgcgaaagacgagaagtgcaggacaacacagatacgacgcataaaggtcacagacccaccggcgcaacaagccgtgggaaagcacgaggaagaaacagagagagaaccgtgggtactgaggggcacgcagcgagaggggcaggagggaacagcgcgaggaggcaccgggaagagcggaggcgaagcacacgaacgcaggacacacagggcgcagagagagaaacacaaaattacacggggcaaaaagcggggccaacagactaaggggcggcacacacgacgaggcgcaagcgcaactcggcagacggcaaggcggcgggagccaaccagagcgaccggcacccggggcggcggccccccaggagtgcggcggg

SEQ ID NO: 87555 - DNA, 372 bp, Homo sapiens
ctcccaaagtgctaggattacaggcatgagccaccttgccaagcctgcgacctacattttattgttactgctaatttacaaacttttattctcaaggacaaagtcaagtctatgttatgccttccatgcatatgtgcttcataaaagggaataaaattatagcttgttatatttcttttatgtaaatttcaacaatttttttttttccttttcctctttttttttttttgagatgaagtcttgttgcactccagcctgggcaacagagtgagactgtctcaaaaaaaaaattcatttttgttttgggatgaatttgtgtttcatgttactagttcctttgtaaatgataaatttgttcaactgctagaagta

SEQ ID NO: 87556 - DNA, 498 bp, Homo sapiens
aaatgataactagattctggtaagcctatgtaaagcctatgtgcatcccaacttacagcccaaatattgtgccaattaggcacaggtacatacagcacacatcctcacttttcttttctttatgtttgttagcactctaactttcccagtgaaaagaatagcaaaacaaaagtggaaaaaacctatgataacaggattcacaaaaattgttgcttagacacctcaaaggagtttaatgtccttcagtgctttagatctttctcttttagggggcattcactacaagaaaagaaaaataaaagaaaatgctttgtccttcagctgtgccaccatgaatttgaattggggagaataagcgtgttcatttcccctcaatttcttccacagagtttaaagtcagactcagatccaaatcctttcaaatccaagctgctttttcatcacaggtaattataaacatttcagagcaaggtgaaatcctttaaactctatcagatt

SEQ ID NO: 87557 - DNA, 168 bp, Homo sapiens
gcaagatccacaaagaacggttggaacttttttctgtcacaccaaggaccatttctccagggttccctttaatattttatgaatctcaagaattctggctgaattcctttttctataaagttgtcatgatttatgttaatctatgaggttcctctccccagtgactgg

SEQ ID NO: 87558 - DNA, 907 bp, Homo sapiens
gtaaaggagtgagaatagagtaattgctttttaaaaagaaagtataaatgggttaatttttttcttccaactttgactttaattcagtaagaaaggcctaggtttcatctcatattcttcataattgattttcaagaagttaatttgtcattcagcctaggaggctataaaacagcagttagttggcattattagactaaaacttgggtggggggaggagactgtttcctcattgctgcaacccatggtctatcctattcctaagccattagaaagaccttgtactttgtatagaaacattagagtgaggttttgatttttaacatagtactctcaaactttgatgtgcatatgaacaagtggattctgattcagtagatctgcattgggccccgtgagtctttttaaacacagtcccaggtgattcatgcagatgcctgtgaactgcgctggtagatgggcctaagaggcttcaggctgtgttttaggttttggtaagccaggcagattcaagtccttttataactgtcaattttgtgaattggggatgcagactggttttgaaggcttaaagttcaaaaattataagaaagttaagaattttgcttaagagccttttaaaaatatggacgatttattttttaagtaggcagactaagaatttcaagttataaagaatcttattgataaggcaaagtagacaaagtattttctcatgagtatttgtgggttatgtttttgttaatataaaagttgatttctaagtattagaatatatttagtctctaaataaatcttgccttctattatggatcatcgttattaataaacatggaaaatcaacactacccctaatattaatctggcagttaaatttagtagtgctataatgaataagtcagtctag

SEQ ID NO: 87559 - DNA, 255 bp, Homo sapiens
gcagtggcacaatcacgtctcactgaagcctcgacttcctttagctcagatgattctcctatctcagcctccagagtagctggccctacaggcacgcaccaccacatgctgagattagaggtgttagctactgcactgggccctttgtatattgtatatcctttatcaaatatgtcatttatttccttctagtctgtggcttttcttttgattctcttgacagcatcccttgcaatttagaaaaaaaacaactgt

SEQ ID NO: 87560 - DNA, 724 bp, Homo sapiens
cactagattttataaattaatttcttttcattgacctaaactccacatttctgctgtgttcatctgaggtcatgtccatatagtcaaatagctgaaggaaaggtgatatttttagtcaaatcaaactccaaacatcatttttatctaaattatctggagaattgaataaatatttttttaaggctgtctgtagaagaaaattatgtcaatttttcatttagctagagaggtcctgaccacagtgtcttctgttgaatttctcctcaaggtaggattccaaaatacctggaaaatgtgaaacagtgttcctcgtatgggtaatgtagcatcttcacaaaaattctgtcatgattcatttgaaaaataataccttctcatgtctaaaatagtttttcatgagaaatacattctataagaaaaaaacaattggcctatcttagaggaaaatgctattaaaaattgtgttatggaaacaggtaacattttctttatctttgtgagttttttcaacataaattttggtcagagaaatcatttcaaaatagaagagagtcagaaataatcagtacagaaatggttttgttgagaactgttaattgaaaaggcaccaagtgaagccctcatctatgtttgcataaaaaactgttttcatccctaagaagcttgtagcgtttggtgtttctagaaagctaccgcagaagtggtgctgtaggggatagtgatt

SEQ ID NO: 87561 - DNA, 582 bp, Homo sapiens
catgaatttaaagcaacaaaaagaagggtctttgttaggtttgaaatgatccccatttacctggtcagtcccttaagagaggaaatggaactgaagacaacactctctgaaatatccctaggcctgtgccaatccaattagtcaattattatttgatgcaaataccctgccccaggtgaccagttggtggttctctgctaaactacatagctaatgccattcaaagatggtatctgcagagactgctaatctacggatgattccaacccagctgttaagtgacatcacagattatgaaaagagtgaattcaatcattcaaagtgaggaaatttattcacaacatacatataacaacaaacaagcattgaaagggggaaaatacagtcgcttgacaaagggaggtttttgaatccaatgggcttttttcctgaatgtggtttgtgtggtcgacatcacctcagtctttttctagatatgtcatgctgcaacattaaggtcatcagagatctgtatgcccatccagcagatagcaggactttcttttctgttgctgctgagttgctgctgatctttcaaacatt

SEQ ID NO: 87562 - DNA, 669 bp, Homo sapiens
ttaatgaattcatttcaaataaaaatccattcagtgcatgcagaaaagccagtccctctgagtgacaaatttgtgtgtgccagggatgagagagcaaatcaaactcgtggagcttgcaaccaaactcctagaggcccaaacacaggactgccaagagcccaggagtgcagagtcattctgctaaaagaagttcccactccaaaaagctctatagagatgctggcctgggtggaaacgtcccctctccctgccctttcacttaaccaaaagggaagaccagcaggagccgtggaaatcaaacccagggcatgtggctagccacctgcgggaggctggggcctggaccaggtgatctctccaggcactttcctgctcttgaatttcatgaatatttcattgtccaggttccaatccatgcagaacagaacctcagaaaacatacaaatatttccccttcttatagagaagtgacctatagtgctagaccaatgactctcatctaagggtgactgtgtcccccaggagacacgtggcaattgctagctgtcacaaccagggagggattgctactggcatctagtgggtagaggccggggatgccgctaaacatcctactacagatacaatgcactccaatgcacccccacttccccaacctccacccttgca

SEQ ID NO: 87563 - DNA, 241 bp, Homo sapiens
taaacaaatatcctgtggccacacccattgtggattgccttatcctctagtgtgaatttgttttagctctgaatgtctgatcaccctaaccagacatctacccttcccaggtaaccagcccagtggttctaaaagtacagtcccaggaccagcagcctcagcaccacctgagaacatgttaggaatgcaaactctcaagccccactccatacccgcagaatcaaaaactcttggggtggga

SEQ ID NO: 87564 - DNA, 2000 bp, Homo sapiens
  misc_feature (1452)..(1452): n is a, c, g, or t
gcgcccagaacgccccggccatgggcatccgaggcatgctgcgagccgcagtgatcctgctgctcatcaggacctggctcgcggagggcaactaccccagtcccatcccgaaattccacttcgagttctcctctgctgtgcccgaagtcgtcctgaacctcttcaactgcaaaaattgtgcaaatgaagctgtggttcaaaagattttggacagggtgctgtcaagatacgatgtccgcctgagaccgaattttggaggtgcccctgtgcctgtgagaatatctatttatgtcacgagcattgaacagatctcagaaatgaatatggactacacgatcacgatgttttttcatcagacttggaaagattcacgcttagcatactatgagaccaccctgaacttgaccctggactatcggatgcatgagaagttgtgggtccctgactgctactttctgaacagcaaggatgctttcgtgcatgatgtgactgtggagaatcgcgtgtttcagcttcacccagatggaacggtgcggtacggcatccgactcaccactacagcagcttgttccctggatctgcataaattccctatggacaagcaggcctgcaacctggtggtagagagctatggttacacggttgaagacatcatattattctgggatgacaatgggaacgccatccacatgactgaggagctgcatatccctcagttcactttcctgggaaggacgattactagcaaggaggtgtatttctacacaggttcctacatacgcctgatactgaagttccaggttcagagggaagttaacagctaccttgtgcaagtctactggcctactgtcctcaccactattacctcttggatatcgttttggatgaactatgattcctctgcagccagggtgacaattggcttaacttcaatgctcatcctgaccaccatcgactcacatctgcgggataagctccccaacatttcctgtatcaaggccattgatatctatatcctcgtgtgcttgttctttgtgttcctgtccttgctggagtatgtctacatcaactatcttttctacagtcgaggacctcggcgccagcctaggcgacacaggagaccccgaagagtcattgcccgctaccgctaccagcaagtggtggtaggaaacgtgcaggatggcctgattaacgtggaagacggagtcagctctctccccatcaccccagcgcaggcccccctggcaagcccggaaagcctcggttctttgacgtccacctccgagcaggcccagctggccacctcggaaagcctcagcccactcacttctctctcaggccaggcccccctggccactggagaaagcctgagcgatctcccctccacctcagagcaggcccggcacagctatggtgttcgctttaatggtttccaggctgatgacagtattnttcctaccgaaatccgcaaccgtgtcgaagcccatggccatggtgttacccatgaccatgaagattccaatgagagcttgagctcggatgagcgccatggccatggccccagtgggaagcccatgcttcaccatggcgagaagggtgtgcaagaagcaggctgggaccttgatgacaacaatgacaagagcgactgccttgccattaaggagcaattcaagtgtgatactaacagtacctggggccttaatgatgatgagctcatggcccatggccaagagaaggacagtagctcagagtctgaggatagttgccccccaagccctgggtgctccttcactgaagggttctccttcgatctctttaatcctgactacgtcccaaaggtcgacaagtggtcccggttcctcttccctctggcctttgggttgttcaacattgtttactgggtataccatatgtattagtcccccagtgctccagaacagcgggagcactgtgctgtgctcctttcagtttcttttgggtttgtttttccctctttcctt

SEQ ID NO: 87565 - DNA, 585 bp, Homo sapiens
gcgcccagaacgccccggccatgggcatccgaggcatgctgcgagccgcagtgatcctgctgctcatcaggacctggctcgcggagggcaactaccccagtcccatcccgaaattccacttcgagttctcctctgctgtgcccgaagtcgtcctgaacctcttcaactgcaaaaattgtgcaaatgaagctgtggttcaaaagattttggacagggtgctgtcaagatacgatgtccgcctgagaccgaattttggagtgtgatactaacagtacctggggccttaatgatgatgagctcatggcccatggccaagagaaggacagtagctcagagtctgaggatagttgccccccaagccctgggtgctccttcactgaagggttctccttcgatctctttaatcctgactacgtcccaaaggtcgacaagtggtcccggttcctcttccctctggcctttgggttgttcaacattgtttactgggtataccatatgtattagtcccccagtgctccagaacagcgggagcactgtgctgtgctcctttcagtttcttttgggtttgtttttccctctttcctt

SEQ ID NO: 87566 - DNA, 83 bp, Homo sapiens
agaacagaagtttaaatattgggcatgaacaagtggacatacatatcccatggatattaaaaggataataaatgaatactatg

SEQ ID NO: 87567 - DNA, 590 bp, Homo sapiens
tgatgtgatctagaggatcccttgggctcattcagggttgtgtcattcagggttggggctcagtcaggaagagatgggaacatctgggccctcaccggcctctcgccacactccccacttccctcctcacggtagccaaagttctcccggggctttccaccaggggtgccttcgtgcagggccggtgcgtgccattccttctgtctagaaggctctttcccccttggcttctcctttctgattcttcctaatttttcaagtctcaccttataagtcacttcctccaggaaggcctgccgggaggaagtgacttataaggtgagacttgaaaaagtaggaagaatcagaaagcagaaccagagaggatccagagcaaggccagggtcagggcagaaccaggaccaggataaggcaaagccaaggccagggtagggcaaggccagggcagggcaagatcagggaagggcaaggccagggtagaaaaggccagggtagggccaggccagggtaggagaaggccatggtagggccaaggccaaggcagggcagggctagggtagcacagggcatggccaaaaacagagcagggc

SEQ ID NO: 87568 - DNA, 306 bp, Homo sapiens
gggactttcttagccaatctggttatgccaacatcttgcctcctaggagcagccttggcttattgtcccccagcaacaaccctgagagagccaacaggaaggactcccttactgagagctgggccatcttaggagcccacatcccactggaggcccgaggattgttttaagtcttgtgaaatcacaggcaactcgcacaaagctcgaggtgttttttttgttttttgttaattgatttcgttgttagttggttttgacagtgtgtttgttttgcaacacaactgacacagaaccctggctgaactc

SEQ ID NO: 87569 - DNA, 371 bp, Homo sapiens
tgctaggattacaggcatgaaccaccgtgcccagcctccaaagcttttttatcatcccaaacggaaactctactggttaagcagtcactccccgtttcccatcccttccgccagccccagctcatctgctttctgtctctatggatttgtctattctagagatttcatacagcgtttggctttttgtctggcttctgtcacttagcacaatgttttcaaagttgacccacgcggtggcacgtgtagggcttggttccttgttaaggctgaataaggtcccatcggataactagaccgcgttgtgtttatccactcatccatcatacacttgggctgtttccatccttctttcaagtctcaggagtgtgttt

SEQ ID NO: 87570 - DNA, 580 bp, Homo sapiens
tccatagagatggggtttcaccatgttgcccaggctggtcttgaactcctggactcaagccatctactcaccttggcctcccgaagtgctgggattatgagcatgtaccaccacacccatcccacagtttctaagagaatctgacctttttcagtttccagagacagtctttgtgattaatgatctatctgtgttagtctaagactccaagaccaatctcccatttccaaagacagaactgggagaaacttccctttcctctaaagaggtgattctgtatgtaagctaagagtaatcaaagcaagttagaatgcaatctccttatatccttgtgagaaggatgggagaggctccccacacatgaaggtaaacaagaggttgcagattttcaccatcgttgacagggtgggtggtgtgctggcagaggggaagcagtagagttattcaggctgaatggacatcactaagggaaccaggttctttcaggtgcacaggggaaatcagcaagtttcagtgaattcatgacaacttgcctcaggctgctatgaaagatggccacaaggtctcctctattagtgag

SEQ ID NO: 87571 - DNA, 854 bp, Homo sapiens
gcagagtctgatggagtctgcctccggcctgccttcctctgggccttcgaagccccctctcaaaaggccaggacgcgctgggcccaagaaagacacccgtcttcacaggccaaccagaactctggccacctgcgggaggacggcactgtcccttgcgacccggcccaggagccgtcctcctccacagcctcctcgaggatagcgagcccgaattccacgcgggcgatgagccccgaagcgcgcggttgcctctgcccctcccgaaccgagaaggaaagaggggagagggaaacaggagtctgatggaggggagagaaatggaattccagaggcagcccacgggcagacacctgcaagaatggctgtgttctggccctgaagttcttaatagtgagggcccaggatagttcccttggggctgtgggaaaagagggaagttcacgctctcagatgttggaggaattggaagccggaggtgtgatttcttggcctccagcagaaacttggttacagtggccacgttctttctctcttctgagaatttggacaagtcactcaatctctctgctcttctgttttctgatatgtgcgatatcatctcaaaaatttcttccagctcctgagatattagtgacaaaatcatcacaagttattttttcagcccttctaaatatagcttcatataatgtaatatattgaagtaaataatctagaaacatgtgaaatgaccaattcctctcacaatgaagatgtgcatcagaaataaaaaacaaagaacatgtttcttttaataagcaaaatagacccattctcagacttatgatcagaaataagactgactcaaagttttcctc

SEQ ID NO: 87572 - DNA, 402 bp, Homo sapiens
ggtgctctttcagttgctcggtcctccctccctccatcccttccttctgcactcctgcacctctttgctttctggcactagaagttgctccaggctcatctcgtgtatttcctgcccaaggcctagaatcagccatttcttcaaggaatcgaggctcttctcttggagaatggtattagaaagcaagacttgggtgctaggtatgcttgttgctattggggtgtcacttgcttggccccctcagatgacagaacatggaaatacctatgtgtatactaacccatgtgtatacacataattataaatatttctgtatgtgacgatctgtatgtatattaagctaagcatgaattgatagcatgaattgatagtgatgtctccagctctgattattaccatgtg

SEQ ID NO: 87573 - DNA, 480 bp, Homo sapiens
ccgaattcggcacgagagaggatacaggtgtaagctctaatagatgtctaattggattgtcacaagcagaagagagaggaaagggtcagagacaacatttgaagtgacaatggcaaaaatctttctggaaatgatgaaaaataacaatcgatgtttcaacaaatccaatgtatcaacatttacctttatattctttctccaaatttctacctctttatctctcttataagaattccagaagttctttggttctattttctagttttctaattttattttcaactgtgtctaatttgttataaaatttatccactgaaatttgttaattaaataattatgtttttacttctcagagtattgtttgatttgtttgcaaatatgcttaggctttaaccatattttaaacttctttgcctcacatttatcagttttactcctcagttactgataagcaacttataatatgtactctctttcctc

SEQ ID NO: 87574 - DNA, 1846 bp, Homo sapiens
ggagctgcgggctgcgtggccgggatgagcgccagcacgggcggtggtggggacagcggcggcagcggcggcagtagcagcagctcacaggcctcctgcgggcccgagtcctcgggctccgaactagccctggccacaccggtgcctcagatgctgcagggccttctgggctccgacgacgaggaacaggaagaccccaaagactactgcaagggcggctaccaccctgtgaagatcggcgacgtgttcaatgggcggtaccacgtggtgcgcaaactgggctggggccacttctccaccgtctggctctgctgggacatccagcgcaagcgctttgtggccctcaaagtggtgaagagtgcggggcattacacggagacagctgtggatgagatcaagctcctgaaatgtgtccgggacagcgaccccagtgaccccaaaagagagaccattgtccagctcattgatgacttcaggatctcaggagtcaatggagtccatgtgtgcatggtgctggaggtgctgggccaccagctcctcaaatggatcatcaagtccaactaccagggcctgcccgtgccctgcgtgaagagcatcgtgaggcaggtgctgcacggcctggactacctccacaccaagtgcaagatcatccacacggacatcaagcccgagaacatcttgctgtgtgtgggggacgcttacatcaggcgcctggctgccgaggccacggagtggcaacaggcaggggcgccgcccccctcccgctccatagtcagcactgccccccaggaggtcttgaccggtaagctgtccaaaaacaagaggaagaagatgaggcgcaaacggaaacagcagaagcggctgctggaggagcggctgcgggacctgcagaggctggaggccatggaggctgccacccaggctgaggactctggcttgagactagacgggggcagcggctccacatcctcttcaggcttctccggctccctcttctctcctgcctcctgctccatcctctccggctcgtccaatcagcgagagaccgggggcctcctgtcgcctagcacaccattcggtgcctcgaacctcctggtgaaccccctggagccccaaaatgcagataagatcaagatcaagatcgcagacctgggcaacgcctgctgggtgcacaagcacttcacggaagacatccagactcggcagtaccgggccgtcgaggtgctgatcggcgccgaatacggccccccggcagacatctggagcacagcctgcatggccttcgagctggccactggtgactacctgttcgagccgcattctggagaagactacagtcgtgatgaggaccacatcgctcacatagtggagcttctgggggacatccccccagccttcgccctctcaggccgctattcccgggagttcttcaaccggagaggagagctgcggcacatccacaatctcaagcactggggcctgtacgaggtactcatggaaaagtacgagtggcccctagagcaggccacacagttcagcgcctttctgctgcccatgatggagtacatccccgaaaagcgggccagtgccgctgactgcctccagcacccctggctcaacccctaggcccggctgtggctccacctccagctctccgtgccttaagggaaaagcgggacagctcccaccaccctgctgggcgccagttctccacaaccacagggcagagagacgctggagccaggcccggctctcagagcgtgttctgcctgagacccccgtgagggctctcggagaaagtgtgtgtattcctttcttaataaagtgtggactgaacatcggtgcc

SEQ ID NO: 87575 - DNA, 1778 bp, Homo sapiens
  misc_feature (706)..(707): n is a, c, g, or t
  misc_feature (709)..(709): n is a, c, g, or t
  misc_feature (712)..(713): n is a, c, g, or t
  misc_feature (715)..(715): n is a, c, g, or t
  misc_feature (719)..(719): n is a, c, g, or t
  misc_feature (722)..(722): n is a, c, g, or t
  misc_feature (726)..(726): n is a, c, g, or t
  misc_feature (729)..(729): n is a, c, g, or t
ggagctgcgggctgcgtggccgggatgagcgccagcacgggcggtggtggggacagcggcggcagcggcggcagtagcagcagatgctgcagggccttctgggctccgacgacgaggaacaggaagaccccaaagactactgcaagggcggctaccaccctgtgaagatcggcgacgtgttcaatgggcggtaccacgtggtgcgcaaactgggctggggccacttctccaccgtctggctctgctgggacatccagcgcaagcgctttgtggccctcaaagtggtgaagagtgcggggcattacacggagacagctgtggatgagatcaagctcctgaaatgtgtccgggacagcgaccccagtgaccccaaaagagagaccattgtccagctcattgatgacttcaggatctcaggagtcaatggagtccatgtgtgcatggtgctggaggtgctgggccaccagctcctcaaatggatcatcaagtccaactaccagggcctgcccgtgccctgcgtgaagagcatcgtgaggcaggtgctgcacggcctggactacctccacaccaagtgcaagatcatccacacggacatcaagcccgagaacatcttgctgtgtgtgggggacgcttacatcaggcgcctggctgccgaggccacggagtggcaacaggcaggggcgccgcccccctcccgctccatagnnancanngncccncangggnctngaccggtaagctgtccaaaaacaagaggaagaagatgaggcgcaaacggaaacagcagaagcggctgctggaggagcggctgcgggacctgcagaggctggaggccatggaggctgccacccaggctgaggactctggcttgagactagacgggggcagcggctccacatcctcttcaggcttctccggctccctcttctctcctgcctcctgctccatcctctccggctcgtccaatcagcgagagaccgggggcctcctgtcgcctagcacaccattcggtgcctcgaacctcctggtgaaccccctggagccccaaaatgcagataagatcaagatcaagatcgcagacctgggcaacgcctgctgggtgcacaagcacttcacggaagacatccagactcggcagtaccgggccgtcgaggtgctgatcggcgccgaatacggccccccggcagacatctggagcacagcctgcatggccttcgagctggccactggtgactacctgttcgagccgcattctggagaagactacagtcgtgatgaggaccacatcgctcacatagtggagcttctgggggacatccccccagccttcgccctctcaggccgctattcccgggagttcttcaaccggagaggagagctgcggcacatccacaatctcaagcactggggcctgtacgaggtactcatggaaaagtacgagtggcccctagagcaggccacacagttcagcgcctttctgctgcccatgatggagtacatccccgaaaagcgggccagtgccgctgactgcctccagcacccctggctcaacccctaggcccggctgtggctccacctccagctctccgtgccttaagggaaaagcgggacagctcccaccaccctgctgggcgccagttctccacaaccacagggcagagagacgctggagccaggcccggctctcagagcgtgttctgcctgagacccccgtgagggctctcggagaaagtgtgtgtattcctttcttaataaagtgtggactgaacatcggtgcc

SEQ ID NO: 87576 - DNA, 722 bp, Homo sapiens
gacagccttggccccagcccgtccccagggctccccttgcttccagcacaagcacttcacggaagacatccagactcggcagtaccgggccgtcgaggtgctgatcggcgccgaatacggccccccggcagacatctggagcacagcctgcatggccttcgagctggccactggtgactacctgttcgagccgcattctggagaagactacagtcgtgatgaggaccacatcgctcacatagtggagcttctgggggacatccccccagccttcgccctctcaggccgctattcccgggagttcttcaaccggagaggagagctgcggcacatccacaatctcaagcactggggcctgtacgaggtactcatggaaaagtacgagtggcccctagagcaggccacacagttcagcgcctttctgctgcccatgatggagtacatccccgaaaagcgggccagtgccgctgactgcctccagcacccctggctcaacccctaggcccggctgtggctccacctccagctctccgtgccttaagggaaaagcgggacagctcccaccaccctgctgggcgccagttctccacaaccacagggcagagagacgctggagccaggcccggctctcagagcgtgttctgcctgagacccccgtgagggctctcggagaaagtgtgtgtattcctttcttaataaagtgtggactgaacatcggtgcc

SEQ ID NO: 87577 - DNA, 302 bp, Homo sapiens
tcccactcctaatggagctgtggggagtggggccacaggcggggaggcagggagagtagtgagtagctggtgccaaggggcgctggcgccacattctggtgtccatgggagccctggggcccggagaggcctcttccctggcggctgtgcagggaaacctccacttcatgctgactggggcgggcgacaggaaccctggggtgaccctggctctgacagcagaccggtaagctgtccaaaaacaagaggaagaagatgaggcgcaaacggaaacagcagaagcggctgctggaggagcggct

SEQ ID NO: 87578 - DNA, 1945 bp, Homo sapiens
ggagctgcgggctgcgtggccgggatgagcgccagcacgggcggtggtggggacagcggcggcagcggcggcagtagcagcagctcacaggcctcctgcgggcccgagtcctcgggctccgaactagccctggccacaccggtgcctcagatgctgcagggccttctgggctccgacgacgaggaacaggaagaccccaaagactactgcaagggcggctaccaccctgtgaagatcggcgacgtgttcaatgggcggtaccacgtggtgcgcaaactgggctggggccacttctccaccgtctggctctgctgggacatccagcgcaagcgctttgtggccctcaaagtggtgaagagtgcggggcattacacggagacagctgtggatgagatcaagctcctgaaatgtgtccgggacagcgaccccagtgaccccaaaagagagaccattgtccagctcattgatgacttcaggatctcaggagtcaatggagtccatgtgtgcatggtgctggaggtgctgggccaccagctcctcaaatggatcatcaagtccaactaccagggcctgcccgtgccctgcgtgaagagcatcgtgaggcaggtgctgcacggcctggactacctccacaccaagtgcaagatcatccacacggacatcaagcccgagaacatcttgctgtgtgtgggggacgcttacatcaggcgcctggctgccgaggccacggagtggcaacaggcaggggcgccgcccccctcccgctccatagtcagcactgccccccaggaggtcttgaccggtaagctgtccaaaaacaagaggaagaagatgaggcgcaaacggaaacagcagaagcggctgctggaggagcggctgcgggacctgcagaggctggaggccatggaggctgccacccaggctgaggactctggcttgagactagacgggggcagcggctccacatcctcttcaggctgtcaccccgggggcgccagagcaggtccctccccagcctcttcctcccccgccccagggggcggccgtagcctcagcgcgggctcacagacctcaggcttctccggctccctcttctctcctgcctcctgctccatcctctccggctcgtccaatcagcgagagaccgggggcctcctgtcgcctagcacaccattcggtgcctcgaacctcctggtgaaccccctggagccccaaaatgcagataagatcaagatcaagatcgcagacctgggcaacgcctgctgggtgcacaagcacttcacggaagacatccagactcggcagtaccgggccgtcgaggtgctgatcggcgccgaatacggccccccggcagacatctggagcacagcctgcatggccttcgagctggccactggtgactacctgttcgagccgcattctggagaagactacagtcgtgatgaggaccacatcgctcacatagtggagcttctgggggacatccccccagccttcgccctctcaggccgctattcccgggagttcttcaaccggagaggagagctgcggcacatccacaatctcaagcactggggcctgtacgaggtactcatggaaaagtacgagtggcccctagagcaggccacacagttcagcgcctttctgctgcccatgatggagtacatccccgaaaagcgggccagtgccgctgactgcctccagcacccctggctcaacccctaggcccggctgtggctccacctccagctctccgtgccttaagggaaaagcgggacagctcccaccaccctgctgggcgccagttctccacaaccacagggcagagagacgctggagccaggcccggctctcagagcgtgttctgcctgagacccccgtgagggctctcggagaaagtgtgtgtattcctttcttaataaagtgtggactgaacatcggtgcc

SEQ ID NO: 87579 - DNA, 1881 bp, Homo sapiens
ggagctgcgggctgcgtggccgggatgagcgccagcacgggcggtggtggggacagcggcggcagcggcggcagtagcagcagctcacaggcctcctgcgggcccgagtcctcgggctccgaactagccctggccacaccggtgcctcagatgctgcagggccttctgggctccgacgacgaggaacaggaagaccccaaagactactgcaagggcggctaccaccctgtgaagatcggcgacgtgttcaatgggcggtaccacgtggtgcgcaaactgggctggggccacttctccaccgtctggctctgctgggacatccagcgcaagcgctttgtggccctcaaagtggtgaagagtgcggggcattacacggagacagctgtggatgagatcaagctcctgaaatgtgtccgggacagcgaccccagtgaccccaaaagagagaccattgtccagctcattgatgacttcaggatctcaggagtcaatggagtccatgtgtgcatggtgctggaggtgctgggccaccagctcctcaaatggatcatcaagtccaactaccagggcctgcccgtgccctgcgtgaagagcatcgtgaggcaggtgctgcacggcctggactacctccacaccaagtgcaagatcatccacacggacatcaagcccgagaacatcttgctgtgtgtgggggacgcttacatcaggcgcctggctgccgaggccacggagtggcaacaggcaggggcgccgcccccctcccgctccatagtcagcactgccccccaggaggtcttgaccggtaagctgtccaaaaacaagaggaagaagatgaggcgcaaacggaaacagcagaagcggctgctggaggagcggctgcgggacctgcagaggctggaggccatggaggctgccacccaggctgaggactctggcttgagactagacgggggcagcggctccacatcctcttcaggctgtcaccccgggggcgccagagcaggtccctccccagcctcttcctcccccgccccagggggcggccgtagcctcagcgcgggctcacagacctcaggcttctccggctccctcttctctcctgcctcctgctccatcctctccggctcgtccaatcagcgagagaccgggggcctcctgtcgcctagcacaccattcggtgcctcgaacctcctggtgaaccccctggagccccaaaatgcagataagatcaagatcaagatcgcagacctgggcaacgcctgctgggtgcacaagcacttcacggaagacatccagactcggcagtaccgggccgtcgaggtgctgatcggcgccgaatacggccccccggcagacatctggagcacagcctgcatggccttcgagctggccactggtgactacctgttcgagccgcattctggagaagactacagtcgtgatgaggaccacatcgctcacatagtggagcttctgggggacatccccccagccttcgccctctcaggccgctattcccgggagttcttcaaccggagaggagagctgcggcacatccacaatctcaagcactggggcctgtacgaggtactcatggaaaagtacgagtggcccctagagcaggccacacagttcagcgcctttctgctgcccatgatggagtacatccccgaaaagcgggccagtgccgctgactgcctccagcacccctggctcaacccctaggcccggtgggcgccagttctccacaaccacagggcagagagacgctggagccaggcccggctctcagagcgtgttctgcctgagacccccgtgagggctctcggagaaagtgtgtgtattcctttcttaataaagtgtggactgaacatcggtgcc

SEQ ID NO: 87580 - DNA, 330 bp, Homo sapiens
gatcaggacctcttcttcctcccaacactgccccaagagcccgttgttaaacgtttaccagcacactactgggctgtttctctaccacttgattgaaatgatccttatggaagcacaaatgacttcactgtcactaaatccaagggacaatttttagtctctatttttcttcaactctccaggatgtttgagagctgatctttccctccctcttgagcctcctctcctgcctggcttttaggggtctctgctgacttttcttcatttctaaacacatgttctcaggggtcctcagcctgcaggccatgcactggtaccagtctgtggcct

SEQ ID NO: 87581 - DNA, 334 bp, Homo sapiens
gcaaaatatgaattctgagctttacccacttacatgtggtattagttttctacagatgccataagaaattaccacaaacaggctgggcaaagtggctcatgcctgtaatcccagcactttgggaggccgaggcaggtggatcacttgaggtcaggagttcgagatttgagaccagcctggccaacacagtgaaaacccatctctactaaaaatacaaaatttagcagggcatggtggcgcgtgcctgtaatcccagccactcaggaggctgaggcaggagaattgcttgaacccgggaggtggaggttgcagtgagatgagatcgtgccactgc

SEQ ID NO: 87582 - DNA, 334 bp, Homo sapiens
tggaattagtagtgataactgcattaacattgtggatatactaaaaaccagtgaacagtatacttaaaaatggttaaaatggttaattttatgatatatgatttttgtctcagtttaataaaaaacaaaagctgctgaacaactgaaaacaggttaaacactatactgagaatacagaaacagtgacaccagtctttccaggttctgttaaacttactatcaaagacatctttcatttaagaagattttcttctcaactgagcttttgagtttgcatttggcaaataaaaatgttaaagttttagttctactcttaacagagagaaaagactgc

SEQ ID NO: 87583 - DNA, 434 bp, Homo sapiens
tgttgcccagactggagtgcaatggggggacctcggctcactgcaacctctgcctcccaggttcaagcaattctcctgcctcagcctcccgagtggctgggattacaggcgcctgccatcacgcccggctaatttttgtgtttttagtaaagacagggtttcactatgttgcccaggctgggctcgaattcctgacctcaactgattcgcccacctcggccatgatgcccagctaatttttgtatttttcataaagacggggtttcaccatgttggccagactggtctcgaactcctgacctcaggtgatccacctgccttggcctcccaaagtgctgagattacagatgtgagcaagcacgcccggcctacttatcattattgatccctgacatatacgaaggggttggatatattaattattttttcaaaag

SEQ ID NO: 87584 - DNA, 290 bp, Homo sapiens
tttacctccctcccctaacttactaaatgcaaatgtactaaatgagatcctggctcaacaaaagcgcaggatctcatctgctttgttcactaccactgtagttccagacctacaatcatctctgttactgcaacattcaaaatatatttttggaatgaattaataataactttgaaatgaagaggaagatggcatgaatcacaaaaactctttggaaattgtgtcagaatttaattgattattttcatatgcattatctattaataataaatacctcatattataaattc

SEQ ID NO: 87585 - DNA, 339 bp, Homo sapiens
cccatttcagccttccaagtagctggacccacaggcatgcaccaccatgctcagctaatttttatactttttttgtagaagcagagttttgctatgttacccatagtggtctcagactcctgagctcaagcaatcagcctgcctcagccttccaaagtgctgggatttcaggtgcgagccactgtgcccagccagcaataaataacaacttctctcaacttaatttagagagctaattcaatagtgattttaaaaatccaatggaaattgatacaaatatcgaaggagttgatacaagtattctgaagttcaatgagataataaagaaaatattcaaaa

SEQ ID NO: 87586 - DNA, 445 bp, Homo sapiens
aatgctatgtgttctattactatgatgctgattattaagtacaggtaacatttattggatgcatactaactacagcttaaagtgctttatatgtttatctcctttaatcatcatggcaagatgatgtggtaaagaatatgactacttttggctgggcacagtggctcacgctggtaattccagtgtgcctccagaccagtatgctccttcctgatagctgcagtgacgttcctcatcctatataaagtcttcagaattatgtaaacagtgatttactgctacctatttgtcttcattgaccttttaaaaacaaattccttgcacaggcaagccttaaaatgtagttttcaacagttgagtcaacaatgcgtaattgtcttaacagttacagactttcacagcaacactaagttaacccattagtaacagagtaagaactttgggt

SEQ ID NO: 87587 - DNA, 224 bp, Homo sapiens
ccgcatccccgtgcccactgcggggctcggacagggggcgccgcgccaggccgcagaccccgcccttccgcgtccccactccggctgcccgtgcggctccggacgaggcttcccgggggctccgggccggggcagccgcggcgccctctccccaggtccaccgcgggcgctgctttcaaacaaaggcaggagacggagcgggagacgctgccgtgactgctccg

SEQ ID NO: 87588 - DNA, 2574 bp, Homo sapiens
ccacgcgtccgcgctcccctcagctcctgcagtgctaattaagggagggagcagcggggagcttgcagtgaccaagagggtgttgaggctaggaggccacgataaacaggatacgataaaagtccttaaccaagacgcagatgggaagaagcgttagagcgagcagcactcacatctcaagaaccagcctttcaaacagtttccagagatggattatcctactttacttttggctcttcttcatgtatacagagctctatgtgaagaggtgctttggcatacatcagttccctttgccgagaacatgtctctagaatgtgtgtatccatcaatgggcatcttaacacaggtggagtggttcaagatcgggacccagcaggattccatagccattttcagccctactcatggcatggtcataaggaagccctatgctgagagggtttactttttgaattcaacgatggcttccaataacatgactcttttctttcggaatgcctctgaagatgatgttggctactattcctgctctctttacacttacccacagggaacttggcagaaggtgatacaggtggttcagtcagatagttttgaggcagctgtgccatcaaatagccacattgtttcggaacctggaaagaatgtcacactcacttgtcagcctcagatgacgtggcctgtgcaggcagtgaggtgggaaaagatccagccccgtcagatcgacctcttaacttactgcaacttggtccatggcagaaatttcacctccaagttcccaagacaaatagtgagcaactgcagccacggaaggtggagcgtcatcgtcatccccgatgtcacagtctcagactcggggctttaccgctgctacttgcaggccagcgcaggagaaaacgaaaccttcgtgatgagattgactgtagccgagggtaaaaccgataaccaatataccctctttgtggctggagggacagttttattgttgttgtttgttatctcaattaccaccatcattgtcattttccttaacagaaggagaaggagagagagaagagatctatttacagagtcctgggatacacagaaggcacccaataactatagaagtcccatctctaccggtcaacctaccaatcaatccatggatgatacaagagaggatatttatgtcaactatccaaccttctctcgcagaccaaagactagagtttaagcttattcttgacatgagtgcattagtaatgactcttatgtactcatgcatggatctttatgcaatttttttccactacccaaggtctaccttagatactagttgtctgaattgagttactttgataggaaaaatacttcattacctaaaatcatttttcatagaactgtttcagaaaacctgactctaactggtttatatacaaaagaaaacttactgtatcatataacagaatgatccaggggagattaagctttgggcaagggctatttaccagggcttaaatgttgtgtctagaattaagtatgggcataaactggcttctgaatccctttccagagtgttggatccatttccctggtcttggcctcactctcatgcaggctttcctcttgtgttggcaagatggctgccaactcttggcaattcatacatccttgtttctgtctggtagagagtttgcttctcaaatggagcaaacaaatttgattattttttcattgttaaataggcaacatgaccagaaaggatggaatggcttaagtaaactaagggttcacttctagagctgagaagcagggtcaaagcacaatactgggcaattcagagcatggttagaagaggaaaggggagtctcaaagctggagagtttaccaacaaatattgactgcagtgattaaccaagacatttttgttaactaaaaagtgaaatatgggatggattctagaaatggggtatctctgtccatacttctagaatccactctatcagcatagtccagaagaatacctggcagtagaagaaatgaatattcaagaggaagataaatgcgagagggcaatcctttactattctcatatttatttatctctcattctgtatagaattcttgccgccatcccaggtctagccttaggagcaaatgtagtagatagtcgaataataaataacttaatgttttggacatattttgtctacttttgagaattatttttaatatgtaaattctctcaaaagggtcaggcacctagttattattttttaatgattatgtgaaagttgaatataatataccactaaaagtgacagttgaaagtggtggcataggatggtagggtagaaatttgggagggaaaaaagaaattgggagggtacaggcaacaggagaaaggaatcaaaccacagaaaaatacaaagggaaacttctgcttcactattcagacaaagacagccctaatgacatcaccaacagtcaaagcaattagagaccatacctaatattgtttaaattctagatgtaggctaacaatgaaaagtatttgccaaactgaataaaactgtcatggttaccttg

SEQ ID NO: 87589 - DNA, 397 bp, Homo sapiens
caagccttctgggcagctaaaattttactgaattttatccaggagaacataatggcttaggctgggtgactaagactccaggaccatttggaagaattaggaaaccagggcaaaagccacatttccttggaacacgatgagctctgtcttaaatacggtgagtgtggaaaattgtaagagacagacatttggaagatgggtagactgggatgagctcagaagaggctcggctagagatacagacttgatatctgcaaaaaagaaaaccatcaaagatgtaagagcttcttcctcagccttagttttgctcttctactccccctactcaatatttcaactgagatcatgagctctggactcacgtcccacaccacaagatgtccagagcacctggcat

SEQ ID NO: 87590 - DNA, 651 bp, Homo sapiens
gagagatagagagagagagagcagatatgcaccagtaaacttggtgggatttgcatggggaattattgcatgagccactgtacctggcctttatgccattatttaatttacagtgttcaagctaggttagcttttacattataaagccagatctcttacattagagtatcaaggtgagccttctgtgtttgagtgtttaatttagatgtgaaatgtttgataggacactatactagaggctctaagaaatagagctctgtggtgaatttcttttctttactattacagatttctaatgatacttttctatgttgtaattttgggtttgtacatgtgggttgtgagaaataaactggaaatcctgtctctgtgggttggaatctggtgtggcttcaaaaggcaaacaaaatattctagcatttacatgccaggtaaattttttaaatggactttccataggttccaaacttctggggccaaataatataaagtaatattgtagttgcagacagacttctgttggcatacatttggtttcttaatttatgatgggacatcaatagctgattaagcaaacaactaaagaaatatctttgtacatccttagtacagcttgttcctgttcatttgtgacaagttgtttgggaaaga

SEQ ID NO: 87591 - DNA, 935 bp, Homo sapiens
accagacctgtcttccagatgttatgtccacagcagtgacttctctaaaatctgaaaggaaagggaaagctattggccatgctttgtaatacacaaatttattttaattacacttgcagaactaaaaggattgctcttcctctggcctccgggtcgccatagtggtggcagaggctgcagtgttggaggaacactttggaatctgtggctgacccgggtagctgaaaacagcagtggcatttcagtaccacttgtcagtttttggctcagtagcagaaggctgcctacagagcacctaaagtgtatgtttcccaaataggagtggcactgcggctggtctggatcatgtacaaaacttcatcctctttccttcaacacaggaacaggaaggattttaatggcttgagtttatgatgctattgaaaaggcactatcaacatttcccagcggctacgactccatatccattcagggaccagcagcccatctgttgatttccaaggcagggctgttaactgcatctgggttacatatgcctggccagttcaatggttgtgtgtgtgtagcaatctttggttgtgcatgactgtaacaacctctcagggtctcagtttcctctttggttcagtaagaatgtcccctgtgcttttgaagtctgttacatgtgctcatgcttgaatgagactgtgttgcatcaattgagctataatgcaagatcattaaattaatgactgatgaaatgacggtaaactctttctccagggtagactggctgagtagaacagggacttcttaaaattatgtcacattaatttggccagaggtttgctgtcctaatgatctcaagattaggatgggcaaccttctgtacacaggctataaccagcgtggctagtggtggtgcatcccaacacatggaggaggagatcctcctc

SEQ ID NO: 87592 - DNA, 466 bp, Homo sapiens
atcccacaggctggtcacttccatctgctgaaatcatgttgttagaagcctaacttcaacacagcctctcagctctgcattcccatgctgaccccaacttaaccccgcaggctggcttcactctcccctcccctcctgctctctctggaaccttctcctgggcctgcctctgaacccacccctcctgctgctgttttggaaagtgtgcggcgtgtcgggcagagggaggtgtgagacgtcagagacagctgtttccagaaatttcactttgaaggggaggggaggcgcaggataggcgctgcagagatcactgggaacaggaaaaggagtttgctttattattagagacagggtcttgctctgtcacccaggctggagtgcagtggcaccgtcacagctcactgcagccttgacctcctgggctcaaacaatcctcccaccttagcctcccaagtagatgggactg

SEQ ID NO: 87593 - DNA, 402 bp, Homo sapiens
ttctttgagctcaacagctattctagctttagtgtattttatgtgtggcccaaggcgattcttcttcttccaatgtggcgcagggaggccaaaatattggacatccctgatatacacgttaacaggtgccatccttggatggcaggattatagagatttctacacgttcatatctgtactacgtcatttttatgaatacgcattttccacttgtaacaaaaaaagtgactgaaaatcatcctgggtcacagtgtctcatgcctgtaatcccaacactgtaagaggctgaggctttaggaggctgaggtgagcagatcacctgaggtcaagagttcaagaccagcctggccaacacagtgaaaccctatctttactaaaaacacaaaaattagccaggggtgg

SEQ ID NO: 87594 - DNA, 95 bp, Homo sapiens
gatcttagagtttgcacagcttaaaaaaatggaaatattggaatctgaatccaaaacagcctgactcaaaacaatgttctttccattatgcaagg

SEQ ID NO: 87595 - DNA, 483 bp, Homo sapiens
ctccaattatgatcagtcttccttctgatttaatgaggtttgatttgtttcagaaaattttcatgcctatacctgccacactttagcagcggccgacacctggcttgccacggtgggtgcatgtatttattgtgtgtatagagagaagggaggatgtcactgtgaaccaaagaaaccccaactaattgcaacacaaagagtgttcccttgctcaggaccccctttttttttcatggccatttctggaaaagatgagctgctccaggcaagatattcttcagaaacatcaatttctgtgaaaacacagtccaaagaaaatgcagaggaaatcagatggctgtgtgccttcctgggccagtgcttgtttttgtttttgtttttaggtgcagtctcgctctgtcgtcaggttggagtgcagtctcgcatcctcggctcactgcaacctctgcttcctgggttcaagtgattctcctgcctcaacct

SEQ ID NO: 87596 - DNA, 472 bp, Homo sapiens
cttgtgcctggcatttcatctgcactaactcagttaatgtccacaggccttagtcaggtgtctggctcttgggaggggtgctgtcaatgagagctattatttttgttgttattgtgtttatgattacaagagaccataagagacaaggaatcaaaagctgtgtttctccattatcagattatcaagggaacatcagtgaagaatatacataagacctcatgtaaggaacaaattaagcatgattgtgtctgtattctagcagtttatcatctacaacatacaattatttgagagaggaggcgtaggaagagggagcgagggagcgagaacatgcatataggtaaatggaccagtatacatgctattctgttctgttttgtaagcatgttttctggaaaatgactgttagacagcagatgtagcactcacatttgtgagttttcatttcagcagtttactgaagtgaaattta

SEQ ID NO: 87597 - DNA, 731 bp, Homo sapiens
tagtttcgccctgaccttgtgatctcaccctgaccttctgccttgtgatcttttattgccctatgaagcatgtgatccctgtgacccacaccctattcgtacactccctcccctttgaaaatcgctaataaaaacttgctggttttgcggctcagggggcatcacggaacctgctgacatgtgtctcccctggacacccagctttaaaatttctctcttttgtactctttccctttatttctcagaccggccgacatttagggaaaatagaaaagaacctacgttgaaatattgggggctggttcccccaacagattatagccaatttttctttctggattggaacaaaaaccattattacttctgttgagctgaagaagttgatttgcattcagggcccttcagtatgaaaaatctttaaaacctagaatcacaatcagccagcaagatagtctcacttagaaacgcacacctaaactgaggctaaaaaaaagtaatagtaaattcatacatcttccacctcattctgaagcatatactctaatataaaaaagaagacaatttataccacataggttgatggttgtttcaatccccaaattttcctgcctggtattcatctttattttctctcctatcagcaccccaactttcctccaaaagccaccctttctccactttaatccttgagtttctactccctccctctttcccccttgggtccccacagg

SEQ ID NO: 87598 - DNA, 629 bp, Homo sapiens
caataaatactggatatagatcatttatactaatttttcaatacctgcaacaaaaggccatgtggaataacattatcatttattatgtaccttccagcattcaaaatattaaactaagtttctttataatattattaagtgcataatcaaaactgactggaaggatgtaggtgataaaatatatttatatttggcattaagtatagtgttagggaagctaacataaacatacagaattaactgaagctatcaaaatgaggttaacaattaaagggactttttcaattatgggcaaggaaagaataaaaatgaaagttaaatcgcttgctagtttagatattatgataaaaagaaaacaaaaccacacaactgtttacattgctactgtctctctttttaaaacatttttcagatggaaatgaactgatgtccaagaaattacacacacacaaatgacaactcctcttttggctctgagaaggaaaagcagtgaaagtgacaccagggtcagctctgagcgttggccaagtacctggccaggtgcctaaggagagtcccaggtgagtggtgagtacagcatctgcgcaaagataggagcagaggcttcaagagatggttcaagtattcac

SEQ ID NO: 87599 - DNA, 959 bp, Homo sapiens
gcttcctttttattacatcttttttgtagcatctgtttatactaatccaaaattcctggacaatataacctattatgtacaacttaagaaaattagtgtaatgccttacccatagtataaagagaaaattaatctatgataatgcataatttcaaaatgttaatgtccaggcatgagttcactgttaagatgaaaatgtttccaagggggggtagtaaagggtatttgatgataattgtctgtatatcccaactctgaaactttgacttttgagctcaaagtctgtatatccaactacaaatgaaacctatgtgcctgaataactcagtttgttatcttcccatccaatctgtttatctttctaaagtttctcttttagtgaatggtaccactcatttattcacccaagttggaatcttggaatcatcttaactcctttcttccttgccttctatatcaaataccaggtcttgttggtttttacctatttaatttctctggaatttgttttccatgccttagtttaggctttaatagtttttagtttgtattattgcaattgtctaatactggttttcctgcctctgccctctttttcttatgttttgctagagtgatttgtcactcttctgcttaaaattaccatttaggggttcattattgctctctggatgtaatattttctgtgagctagaaatcagtttcatttcttggacaaaaatcctttttaatggtgagtggctgcaacatcgcattaaggaagattctgaagtatctgcggggaagaatgcagtgataagggaatgacagcatgagtcctgctttggctagaccacaggatcctttacagtctgaacctgcctacattccagtaataatgaactgcttgtggtgtcctgcaacaggaactgttgttagtttgcttttggatactttttcacatggcgttttcttggtct

SEQ ID NO: 87600 - DNA, 2119 bp, Homo sapiens
tccgcttacacaccaaggaaagttgggctttgaagaattccatccccatggccactggaggaagaatatttctcccgtcttgcttacccatctccccagttttttggaattttctctagctgttactccagaggattatgtttctttcaaagccttctgtgtacatctgtcttttcacctgtgtcctccaactcagccacagctggtcggtgaacaatttcctgatgactggtccaaaggcttacctgatttactccagcagtgtggcagctggtgcccagagtggtattgaagaatgcaagtatcagtttgcctgggaccgctggaactgccctgagagagccctgcagctgtccagccatggtgggcttcgcagtgccaatcgggagacagcatttgtgcatgccatcagttctgctggagtcatgtacaccctgactagaaactgcagccttggagattttgataactgtggctgtgatgactcccgcaacgggcaactggggggacaaggctggctgtggggaggctgcagtgacaatgtgggcttcggagaggcgatttccaagcagtttgtcgatgccctggaaacaggacaggatgcacgggcagccatgaacctgcacaacaacgaggctggccgcaaggcggtgaagggcaccatgaaacgcacgtgtaagtgccatggcgtgtctggcagctgcaccacgcagacctgttggctgcagctgcccgagttccgcgaggtgggcgcgcacctgaaggagaagtaccacgcagcactcaaggtggacctgctgcagggtgctggcaacagcgcggccgcccgcggcgccatcgccgacacctttcgctccatctctacccgggagctggtgcacctggaggactccccggactactgcctggagaacaaaacgctagggctgctgggcaccgaaggccgagagtgcctaaggcgcgggcgggccctgggtcgctgggaactccgcagctgccgccggctctgcggggactgcgggctggcggtggaggagcgccgggccgagaccgtgtccagctgcaactgcaagttccactggtgctgtgcagtccgctgcgagcagtgccgccggagggtcaccaagtacttctgtagccgcgcagagcggccgcgggggggcgctgcgcacaaacccgggagaaaaccctaagggtttcctctgccccctccttttcccactggttcttggcttcctttagagaccccggtaattgtggaacctagggaatggggaacccgctctcccagacctagggatcctgaaagggaaaaactgcaatttctccaaagcttgccactttccagcctgtttccccaattcctctgtgctctcctaaagctctgtctgaatcctcgcagccacacctaggtctgaaaactcaggctttgagttactgatcttccttggattaggaaaacaggtgttcctcctcccctctcctatcagccctaatctctgacctagcctatcaacccttaggcgctggaaaaaccttctcatacacgcaggacccaggttaactcaaagctttgcccttttgcccactgtctgctaccaggggctcaccctctgctgcacctctcttctgcacagctcctcccctgctactgctgaccaaattcccaggaatcttgaatgctttctctcctcttctccctttcctttcccaaaaaaaactgaggaaactggccccggaaaagcatgtctttggggttggttcctagaggcagaggttgaagatggaagagggagctctggagtgctaacttgaacaccaagggtgctactcatccctatggtatcatatcatgaatggactttactagtggggcaatgactttcctagacaataacccgagggactccagatacataccccgaaggtctaggaaatacgttaagggcagattacagtcatttcctaccctttaaaggtaacttctcccttctcctgacctacttcctcctagcaaccaactttacctcttcttctccaaaggatctttgttcctctgagccaagactgaggtaaataaagccactttcctcttcagatcctggtctgcacctctaga

SEQ ID NO: 87601 - DNA, 347 bp, Homo sapiens
ctaggtctgagaactcaggctttgagttacggatcctgaaagggaaaaactgcaatttctccaaagcttgccactttccagcctgtttccccaattcctctgtgctctcctaaagctctgtctgaatctcgcctattgtaggtctggattggatgcttccactcattcatttccttttaattaacccgcattcctggaggagaaatatttatgttggctcccatagaggcaatcctcagactggaaagaagggggaagaaagcctgtcttagcaaaacaatatctctaaagagctcaagaagagaaaataggagaacaaaatgccattaaaatagccttctaccccc

SEQ ID NO: 87602 - DNA, 1721 bp, Homo sapiens
tcgatgatcagagtatagggaggacgtgggcccattcattgcaggagaagggctccaccttcctgcagctgggctcttccaccgagcaacagcttcaggtcatctttgaggtgctggaggagtatgactggacgtcctttgtagccgtgaccactcgtgcccctggccaccgggccttcctgtcctacattgaggtgctgactgacggtagtctggtgggctgggagcaccgcggagcgctgacgctggaccctggggcgggcgaggccgtgctcagtgcccagctccgcagtgtcagcgcgcagatccgcctgctcttctgcgcccgagaggaggccgagcccgtgttccgcgcagctgaggaggctggcctcactggatctggctacgtctggttcatggtggggccccagctggctggaggcgggggctctggggcccctggtgagccccctcttctgccaggaggcgcccccctgcctgccgggctgtttgcagtgcgctcggctggctggcgggatgacctggctcggcgagtggcagctggcgtggccgtagtggccagaggtgcccaggccctgctgcgtgattatggtttccttcctgagctcggccacgactgtcgcgcccagaaccgcacccaccgcggcgagagtctgcataggtacttcatgaacatcacgtgggataaccgggattactccttcaatgaggacggcttcctagtgaacccctccctggtggtcatctccctcaccagagacaggacgtgggaggtggtgggcagctgggagcagcagacgctccgcctcaagtacccgctgtggtcccgctatggtcgcttcctgcagccagtggacgacacgcagcacctcacggtggccacgctggaggaaaggccgtttgtcatcgtggagcctgcagaccctatcagcggcacctgcatccgagactccgtcccctgccggagccagctcaaccgaacccacagccctccaccggatgccccccgcccggaaaagcgctgctgcaagggtttctgcatcgacattctgaagcggctggcgcataccatcggcttcagctacgacctctacctggtcaccaatggcaagcacggaaagaagatcgatggcgtctggaacggcatgatcggggaggtgttctaccagcgcgcagacatggccatcggctccctcaccatcaacgaggagcgctccgagatcgtggacttctccgtccccttcgtggagaccggcatcagcgtcatggtggcgcgcagcaatggcacggtgtccccctcggccttcctcgagccctacagccccgccgtgtgggtgatgatgttcgtcatgtgcctcactgtggtcgccgtcactgttttcatcttcgagtacctcagtcctgttggttacaaccgcagcctggccacgggcaagcgccctggcggttcaaccttcaccattgggaaatccatctggctgctctgggccctggtgttcaataattcggtgcccgtggagaacccccggggaaccaccagcaaaatcatggtgctggtgtgggccttcttcgccgtcatcttcctcgccagctacacagccaacctggccctccggccattcgacgcctccgtccattctacgcctccggccattcacagcctccggccattcacgcctccggccattcaacgcctccggccattcaacgcctccgca

SEQ ID NO: 87603 - DNA, 4299 bp, Homo sapiens
ggacgccgggttccggtcctggcccccccgccatccccccaacagaacagggtcatgaaaagaggccgcccggcggggcccgcaggcgatgcgcggcgccggtggcccccgcggccctcggggccccgctaagatgctgctgctgctggcgctggcctgcgccagcccgttcccggaggaggcgccggggccgggcggggccggtgggcccggcggcggcctcggcggggcgcggccgctcaacgtggcgctcgtgttctcggggcccgcgtacgcggccgaggcggcacgcctgggcccggccgtggcggcggcggtgcgcagcccgggcctagacgtgcggcccgtggcgctggtgctcaacggctcggacccgcgcagcctcgtgctgcagctctgcgacctgctgtcggggttgcgcgtgcacggcgtggtcttcgaagacgactcgcgcgcgcccgccgtcgcgcccatcctcgacttcctgtcggcgcagacctcgctgcccatcgtggccgtgcacggcggcgccgcgctcgtgctcacgcccaaggagaagggctccaccttcctgcagctgggctcttccaccgagcaacagcttcaggtcatctttgaggtgctggaggagtatgactggacgtcctttgtagccgtgaccactcgtgcccctggccaccgggccttcctgtcctacattgaggtgctgactgacggtagtctggtgggctgggagcaccgcggagcgctgacgctggaccctggggcgggcgaggccgtgctcagtgcccagctccgcagtgtcagcgcgcagatccgcctgctcttctgcgcccgagaggaggccgagcccgtgttccgcgcagctgaggaggctggcctcactggatctggctacgtctggttcatggtggggccccagctggctggaggcgggggctctggggcccctggtgagccccctcttctgccaggaggcgcccccctgcctgccgggctgtttgcagtgcgctcggctggctggcgggatgacctggctcggcgagtggcagctggcgtggccgtagtggccagaggtgcccaggccctgctgcgtgattatggtttccttcctgagctcggccacgactgtcgcgcccagaaccgcacccaccgcggcgagagtctgcataggtacttcatgaacatcacgtgggataaccgggattactccttcaatgaggacggcttcctagtgaacccctccctggtggtcatctccctcaccagagacaggacgtgggaggtggtgggcagctgggagcagcagacgctccgcctcaagtacccgctgtggtcccgctatggtcgcttcctgcagccagtggacgacacgcagcacctcacggtggccacgctggaggaaaggccgtttgtcatcgtggagcctgcagaccctatcagcggcacctgcatccgagactccgtcccctgccggagccagctcaaccgaacccacagccctccaccggatgccccccgcccggaaaagcgctgctgcaagggtttctgcatcgacattctgaagcggctggcgcataccatcggcttcagctacgacctctacctggtcaccaatggcaagcacggaaagaagatcgatggcgtctggaacggcatgatcggggaggtgttctaccagcgcgcagacatggccatcggctccctcaccatcaacgaggagcgctccgagatcgtggacttctccgtccccttcgtggagaccggcatcagcgtcatggtggcgcgcagcaatggcacggtgtccccctcggccttcctcgagccctacagccccgccgtgtgggtgatgatgttcgtcatgtgcctcactgtggtcgccgtcactgttttcatcttcgagtacctcagtcctgttggttacaaccgcagcctggccacgggcaagcgccctggcggttcaaccttcaccattgggaaatccatctggctgctctgggccctggtgttcaataattcggtgcccgtggagaacccccggggaaccaccagcaaaatcatggtgctggtgtgggccttcttcgccgtcatcttcctcgccagctacacagccaacctggccgccttcatgatccaggaggagtacgtggatactgtgtctgggctcagtgaccgcaagttccagaggccccaggagcagtacccgcccctgaagtttgggaccgtgcccaacggctccacggagaagaacatccgcagcaactatcccgacatgcacagctacatggtgcgctacaaccagccccgcgtagaggaagcgctcactcagctcaaggcagggaagctggacgccttcatctacgatgctgcagtgctcaattacatggcccgcaaggacgagggctgcaagcttgtcaccatcggctccggcaaggtcttcgccacgacaggctatggcatcgccctgcacaagggctcccgctggaagcggcccatcgacctggcgttgctgcagttcctgggggatgatgagatcgagatgctggagcggctgtggctctctgggatctgccacaatgacaaaatcgaggtgatgagcagcaagctggacatcgacaacatggcgggcgtcttctacatgctcctggtggccatgggcctgtccctgctggtcttcgcctgggagcacctggtgtactggcgcctgcggcactgcctggggcccacccaccgcatggacttcctgctggccttctccaggggcatgtacagctgctgcagcgctgaggccgccccaccgcccgccaagcccccgccgccgccacagcccctgcccagccccgcgtaccccgcgccggggccggctcccgggcccgcacctttcgtgccccgcgagcgcgcctcagtggaccgctggcgccggaccaagggcgcggggccgccggggggcgcgggcctggccgacggcttccaccgctactacggccccatcgagccgcagggcctaggcctcggcctgggcgaagcgcgcgcggcaccgcggggcgcagccgggcgcccgctgtccccgccggccgctcagcccccgcagaagccgccggcctcctatttcgccatcgtacgcgacaaggagccagccgagccccccgccggcgccttccccggcttcccgtcgccgcccgcgccccccgccgccgcggccaccgccgtcgggccgccactctgccgcttggccttcgaggacgagagcccgccggcgcccgcgcggtggccgcgctcggaccccgagagccaacccctgctggggccaggcgcgggcggcgcggggggcacggggggcgcaggcggaggagccccggccgctccgcccccgtgctgcgccgcgccgcccccgtgcccttacctcgatctcgagccgtcgccgtcggactcggaggactcggagagcctgggcggcgcgtcgctgggcggcctggatccctggtggttcgccgacttcccttacccgtatgccgagcgcctcgggccgccgcccggccgctactggtcggtcgacaagctcgggggctggcgcgccgggagctgggactacctgcccccgcgcagcggtccggccgcctggcactgtcggcactgcgccagcctggagctgctgccgccgccgcgccatctcagctgctcgcacgatggcctggacggcggctggtgggcgccaccgcctccaccctgggccgccgggcccctgccccgacgccgggcccgctgcgggtgcccgcggtcgcacccgcaccgcccgcgggcctcgcaccgcacgcccgccgctgccgcgccccaccaccacaggcaccggcgcgccgctgggggctgggacctcccgccgcccgcgcccacctcgcgctcgctcgaggacctcagctcgtgccctcgcgccgcccctgcgcgcaggcttaccgggccctcccgccacgctcgcaggtgtccgcacgccgcgcactgggggccgccgctgcccacagcttcccaccggagacaccggggcggggacctgggcacccgcaggggctcggcgcacttctctagcctcgagtccgaggtatgacgcggccccgggggccccaccgcccccttggtcagcgcaggccacggcccgagggggcgcccgcagtggacaggacccgcgtgggttgggaaggaaagcagtggaactggccggaccccgcctggagcagcgtcctgcgccccctggttctggaggaaccgcaagccggagaggatttggtccctcaactatcacccagg

SEQ ID NO: 87604 - DNA, 238 bp, Homo sapiens
gtccctgcgtctcccgtctgtgcctccctctcctccccgtctctcccggcccgggcgctcagaggccgcccggcggggcccgcaggcgatgcgcggcgccggtggcccccgcggccctcggggccccgctaagatgctgctgctgctggcgctggcctgcgccagcccgttcccggaggaggcgccggggccgggcggggccggtgggcccggcggcggcctcggcggggcgcggccg

SEQ ID NO: 87605 - DNA, 1341 bp, Homo sapiens
agcggggggttagctgaactgagctgaaatcctaaaggccgcggagtcggcggtgttgtaggtagcggtaccttgagtggcaacagaattcgattaaattacaatgggaaacatttttgaaaagctctttaaaagtctacttgggaaaaaaaagatgcggattcttatattgagtttggatacagctggaaaaaccaccatcttgtataaattgaagctgggggagactgtgcctgccgtccctacagtaggtttctgtgtggagacagtagaatataaaaataacaccttcgctgtctgggatgttggcagccacttcaaaatcagacctctgtggcagcattttttccagaacacaaaaggtgccagaagcccaggaagcacacatcaaggctcacttgccagcggggtgctgccaataaaatgtagtcacgtggaatttggaatgtggaaaggaggtagaagtcatcctttcctcccccatagcagcaggtgtgcaggctctggtggtcagctggactccatactcccccaccagtcaccagcctggggaccgtggggctgcaaggacctcagcagcggtttcccaagtttcctgacttcttccatcctctggaaatcagctgtggttcgtgagccacacatctccccacaccaagctcctccatacaagacctcggactgcatcacgtaaatgctttttcaggggcaaaatctagagaatctgaaatgagctatcagcttcccagtttgcacaattcatcaagaaattatgcggggtcactggcacaaatgatgaggcatctcctggaagcttaacttcttatccatcccatctcttggacagatgatgccagttaattactttgaatgttctatattggctgtgatctttgtactaactgctattatggagaatgtgttggcatcgcagaaaaggaggctaagaaaatggatgtgtacatctgtaatgattgtaaatgggcacaagagggcagcagtgaggaattgtactgtatctgcagaacacctgcagtcacagtgagttctaataagagcatcacatttaataatttaggaagccaaattgctctgactggttacttatttactttaaaataaaaagcagattttttctacatttgttatacacttacattacaaattccttttcatttttttttctctttttccctttttacctacccttcaaaatttatcttgcttcatagtgaatgtttgagacacattggggaaaatgtggtttaatggtagatttgattcttcaatatgtaacatagaaattaatgagattaaactagcttgacttgtttggacttt

SEQ ID NO: 87606 - DNA, 1886 bp, Homo sapiens
agcggggggttagctgaactgagctgaaatcctaaaggccgcggagtcggcggtgttgtaggtagcggtaccttgagtggcaacagaattcgattaaattacaatgggaaacatttttgaaaagctctttaaaagtctacttgggaaaaaaaagatgcggattcttatattgagtttggatacagctggaaaaaccaccatcttgtataaattgaagctgggggagactgtgcctgccgtccctacagtaggtttctgtgtggagacagtagaatataaaaataacaccttcgctgtctgggatgttggcagccacttcaaaatcagacctctgtggcagcattttttccagaacacaaaagagctatcagcttcccagtttgcacaattcatcaagaaattatgcggggtcactggcacaaatgatgaggcatctcctggaagcttaacttcttatccatcccatctcttggacagatgatgccagttaattactttgaatgtctcacaacaacaaactgcagtctacagcttcctaaagttcagcatgttaacctaacataaaacacagcaagaatcttgttgcctgaactattttaaattaaggagccagatctttttagtgaggctatcctgacaagacttgacctaaactttgtttttattggtcataacagtccaattatattattggccaattttgtccaatggacaagaaaaaagcaaagttgccaggtgcggttgtcacgcctgtaatcccagcactttgggaggccaaggcgggcggatcatctgaggtcgggagttcgagaccagcctgaccaatatggagaaaccccgtctctaccaaaaatacaaaattagctgtgcatggtggcctatgcctgtaatcccagctacttgggaggctgaggcaggagaatcgctggaacccgggaggcagaggttgtattgagccgagattgagccattgcactccagcctgggtgacaagaacaaaactccgtttcaaaaacaaaaaaaggaagaaaagaaaaagaaaaaagaaaagtcaacgacaccattatcttgtcaagatcaaatggttttattattgtggcagaagcgagaaaattttgtttattaaaaaaaaaaaagaaaaagaaagcaagaaacaatgatactgtggggtcaagtataactccatggaaatgccacgtctgctcttcagtgaagaagctggtttagagtctcacagaaaacttttgactgtatttatttattgttgcaaaaaagacgcttttttattgctgccctcatttgtcagctaagtattttttcttataaaatccagccccggttacatataatcatctgtatcttatcatgattcctgtaggtaaaagtacaagacgacctctagatgtcttttctttctatgaaaggagctgctatgtacacatgtgcacacacacacaactgggaatcaacaatgagtttattgttcatggtagattaaaattaagcttgcataaaggttgggctaagtggtcctggactacagactctgttgccttgaatataacagtacaatttgtcaattactctgcaccaggctaaagtgagtaaaatctatttgaaggtatcttgtttgtaaacatttgtcagattctaatttttttcttttgtattaaaattcaactatggatgtatatgaaacaaaataaatggagataatttttctcccacagacagaggtgtctttgaatgtgtgctaatgattatctgtaagcctctgtggggagggagggctgcaaggtcatgaaaggcaaaagaatctaattgtacctggaattctcctggacagcagtggcccctcgttttatcattcccagtcaattgtcatc

SEQ ID NO: 87607 - DNA, 1096 bp, Homo sapiens
aggtgctcaattgttccctttttctatactctgtaggtctcacaacaacaaactgcagtctacagcttcctaaagttcagcatgttaacctaacataaaacacagcaagaatcttgttgcctgaactattttaaattaaggagccagatctttttagtgaggctatcctgacaagacttgacctaaactttgtttttattggtcataacagtccaattatattattggccaattttgtccaatggacaagaaaaaagcaaatcaacgacaccattatcttgtcaagatcaaatggttttattattgtggcagaagcgagaaaattttgtttattaaaaaaaaaaaagaaaaagaaagcaagaaacaatgatactgtggggtcaagtataactccatggaaatgccacgtctgctcttcagtgaagaagctggtttagagtctcacagaaaacttttgactgtatttatttattgttgcaaaaaagacgcttttttattgctgccctcatttgtcagctaagtattttttcttataaaatccagccccggttacatataatcatctgtatcttatcatgattcctgtaggtaaaagtacaagacgacctctagatgtcttttctttctatgaaaggagctgctatgtacacatgtgcacacacacacaactgggaatcaacaatgagtttattgttcatggtagattaaaattaagcttgcataaaggttgggctaagtggtcctggactacagactctgttgccttgaatataacagtacaatttgtcaattactctgcaccaggctaaagtgagtaaaatctatttgaaggtatcttgtttgtaaacatttgtcagattctaatttttttcttttgtattaaaattcaactatggatgtatatgaaacaaaataaatggagataatttttctcccacagacagaggtgtctttgaatgtgtgctaatgattatctgtaagcctctgtggggagggagggctgcaaggtcatgaaaggcaaaagaatctaattgtacctggaattctcctggacagcagtggcccctcgttttatcattcccagtcaattgtcatc

SEQ ID NO: 87608 - DNA, 1192 bp, Homo sapiens
cagagaaggatgatgaggagttgaagagggtgctccgttccttacaggcccataagatggcccagcctttccttgaaccagtagaccctaatgatgcaccagattattatggtgttattaaggaacctatgggtctcacaacaacaaactgcagtctacagcttcctaaagttcagcatgttaacctaacataaaacacagcaagaatcttgttgcctgaactattttaaattaaggagccagatctttttagtgaggctatcctgacaagacttgacctaaactttgtttttattggtcataacagtccaattatattattggccaattttgtccaatggacaagaaaaaagcaaatcaacgacaccattatcttgtcaagatcaaatggttttattattgtggcagaagcgagaaaattttgtttattaaaaaaaaaaaagaaaaagaaagcaagaaacaatgatactgtggggtcaagtataactccatggaaatgccacgtctgctcttcagtgaagaagctggtttagagtctcacagaaaacttttgactgtatttatttattgttgcaaaaaagacgcttttttattgctgccctcatttgtcagctaagtattttttcttataaaatccagccccggttacatataatcatctgtatcttatcatgattcctgtaggtaaaagtacaagacgacctctagatgtcttttctttctatgaaaggagctgctatgtacacatgtgcacacacacacaactgggaatcaacaatgagtttattgttcatggtagattaaaattaagcttgcataaaggttgggctaagtggtcctggactacagactctgttgccttgaatataacagtacaatttgtcaattactctgcaccaggctaaagtgagtaaaatctatttgaaggtatcttgtttgtaaacatttgtcagattctaatttttttcttttgtattaaaattcaactatggatgtatatgaaacaaaataaatggagataatttttctcccacagacagaggtgtctttgaatgtgtgctaatgattatctgtaagcctctgtggggagggagggctgcaaggtcatgaaaggcaaaagaatctaattgtacctggaattctcctggacagcagtggcccctcgttttatcattcccagtcaattgtcatc

SEQ ID NO: 87609 - DNA, 1832 bp, Homo sapiens
agcggggggttagctgaactgagctgaaatcctaaaggccgcggagtcggcggtgttgtaggtagcggtaccttgagtggcaacagaattcgattaaattacaatgggaaacatttttgaaaagctctttaaaagtctacttgggaaaaaaaagatgcggattcttatattgagtttggatacagctggaaaaaccaccatcttgtataaattgaagctgggggagactgtgcctgccgtccctacagtaggtttctgtgtggagacagtagaatataaaaataacaccttcgctgtctgggatgttggcagccacttcaaaatcagacctctgtggcagcattttttccagaacacaaaagagctatcagcttcccagtttgcacaattcatcaagaaattatgcggggtcactggcacaaatgatgaggcatctcctggaagcttaacttcttatccatcccatctcttggacagatgatgccagttaattactttgaatgtctcacaacaacaaactgcagtctacagcttcctaaagttcagcatgttaacctaacataaaacacagcaagaatcttgttgcctgaactattttaaattaaggagccagatctttttagtgaggctatcctgacaagacttgacctaaactttgtttttattggtcataacagtccaattatattattggccaattttgtccaatggacaagaaaaaagcaaagttgccaggtgcggttgtcacgcctgtaatcccagcactttgggaggccaaggcgggcggatcatctgaggtcgggagttcgagaccagcctgaccaatatggagaaaccccgtctctaccaaaaatacaaaattagctgtgcatggtggcctatgcctgtaatcccagctacttgggaggctgaggcaggagaatcgctggaacccgggaggcagaggttgtattgagccgagattgagccattgcactccagcctgggtgacaagaacaaaactccgtttcaaaaacaaaaaaaggaagaaaagaaaaagaaaaaagaaaagtcaacgacaccattatcttgtcaagatcaaatggttttattattgtggcagaagcgagaaaattttgtttattaaaaaaaaaaaagaaaaagaaagcaagaaacaatgatactgtggggtcaagtataactccatggaaatgccacgtctgctcttcagtgaagaagctggtttagagtctcacagaaaacttttgactgtatttatttattgttgcaaaaaagacgcttttttattgctgccctcatttgtcagctaagtattttttcttataaaatccagccccggttacatataatcatctgtatcttatcatgattcctgtagatgtacacatgtgcacacacacacaactgggaatcaacaatgagtttattgttcatggtagattaaaattaagcttgcataaaggttgggctaagtggtcctggactacagactctgttgccttgaatataacagtacaatttgtcaattactctgcaccaggctaaagtgagtaaaatctatttgaaggtatcttgtttgtaaacatttgtcagattctaatttttttcttttgtattaaaattcaactatggatgtatatgaaacaaaataaatggagataatttttctcccacagacagaggtgtctttgaatgtgtgctaatgattatctgtaagcctctgtggggagggagggctgcaaggtcatgaaaggcaaaagaatctaattgtacctggaattctcctggacagcagtggcccctcgttttatcattcccagtcaattgtcatc

SEQ ID NO: 87610 - DNA, 396 bp, Homo sapiens
gtaagtattttatctaaaagcacttatgtgtctaaacagacttctacaaatcagtaccaaaatggtaaataattccacagaaatatgggcaaaagcttatcattatcaacaaatgagaagaaagaaaccctatgccaggtaacaccaaagctttggcccagtgccctctgttgaaacatcctaggctttttctttccactcctattacaactgatctgatttggccccttcacacttcactcctagattttgctagacctttctattttgtctccctgaattaagcttttccttttggacactttacatatggattctaaaacaatcctctgcatgtctacacttgcacataatgcaaaaaacaaaataaaataatcttcctgttttgatcatgta

SEQ ID NO: 87611 - DNA, 324 bp, Homo sapiens
tgacaataagaatgcctactttttcattataggcccataagatggcccagcctttccttgaaccagtagaccctaatgatgcaccagattattatggtgttattaaggaacctatgggtacacatgagttgaatttgaagttttttcagaagtctcagtgtatattttattaaccataaaattaatatcttagaatacttttagcaaggctggtgggggtataaattggtatggtcactttggagggtaaattgatagtatctattacagttgaattgtgcatactcggttattttattttatttttttgagatggagtctcac

SEQ ID NO: 87612 - DNA, 1562 bp, Homo sapiens
agcggggggttagctgaactgagctgaaatcctaaaggccgcggagtcggcggtgttgtaggtagcggtaccttgagtggcaacagaattcgattaaattacaatgggaaacatttttgaaaagctctttaaaagtctacttgggaaaaaaaagatgcggattcttatattgagtttggatacagctggaaaaaccaccatcttgtataaattgaagctgggggagactgtgcctgccgtccctacagtaggtttctgtgtggagacagtagaatataaaaataacaccttcgctgtctgggatgttggcagccacttcaaaatcagacctctgtggcagcattttttccagaacacaaaagagctatcagcttcccagtttgcacaattcatcaagaaattatgcggggtcactggcacaaatgatgaggcatctcctggaagcttaacttcttatccatcccatctcttggacagatgatgccagttaattactttgaatgtctcacaacaacaaactgcagtctacagcttcctaaagttcagcatgttaacctaacataaaacacagcaagaatcttgttgcctgaactattttaaattaaggagccagatctttttagtgaggctatcctgacaagacttgacctaaactttgtttttattggtcataacagtccaattatattattggccaattttgtccaatggacaagaaaaaagcaaatcaacgacaccattatcttgtcaagatcaaatggttttattattgtggcagaagcgagaaaattttgtttattaaaaaaaaaaaagaaaaagaaagcaagaaacaatgatactgtggggtcaagtataactccatggaaatgccacgtctgctcttcagtgaagaagctggtttagagtctcacagaaaacttttgactgtatttatttattgttgcaaaaaagacgcttttttattgctgccctcatttgtcagctaagtattttttcttataaaatccagccccggttacatataatcatctgtatcttatcatgattcctgtaggtaaaagtacaagacgacctctagatgtcttttctttctatgaaaggagctgctatgtacacatgtgcacacacacacaactgggaatcaacaatgagtttattgttcatggtagattaaaattaagcttgcataaaggttgggctaagtggtcctggactacagactctgttgccttgaatataacagtacaatttgtcaattactctgcaccaggctaaagtgagtaaaatctatttgaaggtatcttgtttgtaaacatttgtcagattctaatttttttcttttgtattaaaattcaactatggatgtatatgaaacaaaataaatggagataatttttctcccacagacagaggtgtctttgaatgtgtgctaatgattatctgtaagcctctgtggggagggagggctgcaaggtcatgaaaggcaaaagaatctaattgtacctggaattctcctggacagcagtggcccctcgttttatcattcccagtcaattgtcatc

SEQ ID NO: 87613 - DNA, 169 bp, Homo sapiens
tcgaggataccttcgctattcatcggcacctgctaagagagagaaacccactaactccagcatccgagccccggttttatgaaatcctcaaagtcatgcaggaagctgcggacagacacacccagaccctgccagaggtgccgatgaatagcgaggtgccgatgaatag

SEQ ID NO: 87614 - DNA, 6315 bp, Homo sapiens
acattatctgcccaagcacagtgctgttggccaagcctccagcagctgacgggacccagctgtagtgaggttgcagtgattgagtaggattggcctgcttcaaagcagaggtttctcatgggaatatgcttattaaactcccactggtgcagaaaccatgaacagaggatgaacaagtgaagttgcaatctcctccatcacagctcagttccccaacaacaggatcacaagctggagatgcctttaaggaagatgaagatccctttcctcctactgttctttctgtgggaagccgagagccacgcagcatcaaggccgaacatcatcctggtgatggctgacgacctcggcattggagatcctgggtgctatgggaacaaaactatcaggactcccaatatcgaccggttggccagtgggggagtgaaactcactcagcacctggcagcatcaccgctgtgcacaccaagcagggcagccttcatgactggccggtaccctgtccgatcaggaatggcatcttggtcccgcactggagttttcctcttcacagcctcttcgggaggacttcccaccgatgagattacctttgctaagcttctgaaggatcaaggttattcaacagcactgatagggaaatggcaccttgggatgagctgtcacagcaagactgacttctgtcaccaccctttacatcacggcttcaattatttctatgggatctctttgaccaatctgagagactgcaagcccggagagggcagtgtcttcaccacgggcttcaagaggctggtcttcctccccctgcagatcgtcggggtcaccctccttacccttgctgcactcaattgtctggggctactccacgtgcctctaggcgtttttttcagccttctcttcctagcagccctaatcctgacccttttcttgggcttccttcattacttccggcccctgaactgcttcatgatgaggaactacgagatcattcagcagcccatgtcctatgacaatctcacccagaggctaacggtggaggcggcccagttcatacagcggaacactgagactccgttcctgcttgtcttgtcctacctccacgtgcacacagccctgttctccagcaaagactttgctggcaaaagtcaacacggagtctacggggatgctgttgaggaaatggactggagtgtggggcagatcttgaaccttctggatgagctgagattggctaatgataccctcatctacttcacatcggaccagggagcacatgtagaagaagtgtcttccaaaggagaaattcatggcggaagtaatgggatctataaaggaggaaaagcaaacaactgggaaggaggtatccgggttccaggcatccttcgttggcccagggtgatacaggctggccagaagattgatgagcccactagcaacatggacatatttcctacagtagccaagctggctggagctcccttgcctgaggacaggatcattgatggacgtgatctgatgcccctgcttgaaggaaaaagccaacgctccgatcatgagtttctcttccattactgcaacgcctacttaaatgctgtgcgctggcaccctcagaacagcacatccatctggaaggcctttttcttcacccccaacttcaaccccgtgggttccaacggatgctttgccacacacgtgtgcttctgtttcgggagttatgtcacccatcacgacccacctttactctttgatatttccaaagatcccagagagagaaacccactaactccagcatccgagccccggttttatgaaatcctcaaagtcatgcaggaagctgcggacagacacacccagaccctgccagaggtgcccgatcagttttcatggaacaactttctttggaagccctggcttcagctgtgctgtccttccaccggcctgtcttgccagtgtgatagagaaaaacaggataagagactgagccgctagcagcgcctggggaccagacagacgcatgtggcaaagctcaccatcttcactacaaacacgcctgagagtggcactggggaaacataactccatctacaccttggatttggactgattctccattttatcacctgaaggcttgggccagagctcaacagctactcaactggaggggtgagggggataaggtctgtagtatacagacaggaagatggtaggtttatgccttctgtggccagagtcttggactcatggaaatagaatgaatagaggggcattcacaaggcacaccagtgcaagcagatgacaaaaaggtgcagaaggcaatcttaaaacagaaaggtgcaggaggtaccttaactcacccctcagcaaatacctatgtcaacagtataagttaccatttactctataatctgcagtgatgcaataaccagcataataaaaaggcaatcacataaaaaagagtttagtcgtctaaacataagtaactttaaggtgaatgaaagatcttctttaggaataatagatgatggtaagttccactttggttattggaaggcaagtcattattactggtattagttaaaacacatatcaaatgcttgctcttcatcatatatatagttatgcatacatacacacacacacatacagtatattctttcctcaaaagggttaagatgtctaaaatagggacctagaagcttaacactatttaagtaaatacagtagaagctcacaaatagatttctttgcacaatgattttttgcaaaattttacagtaataataatcccaaggcaaatctctcctgaactgctttccattccataatttgtagtataattcttggattccactgttttctttggggaatggaagttctgaattaaaagcccactgtggagatgctgtggttcatggaatctcttccagtgtaattcagaatcattggcctagaaagtctctgatatttggaggggaacaaaaatcactcacaagcaatccatgatctatacacataagcataatttcctttagttctagttagtcatcagagaacagtcatgtatgcaagttttgtgactgagaaatttctgtgcttccaatccacaatgagatgcatgattttgttttcatcccatttcccccaagcccctgtaaatcagggaaaatgcgcaactgatcgcctaggagagggcctcgtagtggcacagctggagatagtttcaaagtctaaaccaccagcccatcctgaggaaagcctcctatggaatgtaaagtgcaatcatttcttcagatataagactttccccaacaatgtgattggattcctttatggcaaaatcgagagaagctgccatccacctgcttatgcatttatctcttttgtggacttgtctgaccaccttctatttgcccagagtttgctcaattccaagacagtgcccatgaatgggacacctgtaatgtaacccacacagcggtttgcagagaatgttagccatgacttgggctttctgaaagttggctataatttctctatccctacccacaaccctgggaagttggagcaagaggggcatactattgggctgggaggatttgacagcatttccccagttgccctttaagttcttctatttcaaacgttaattttgcttctctttctaaaaaaaaaaaaaaaaaagaaagagaagaaagaagtgattcctaccccctacctccagagttgttgaaagctgaaaagcatacaagattcttccttttaacttggatttctcgttccagaaattgtgggataatctgtattcttgctttagaaaacattcttagagagggtactagcttactgatgatgtgttaggattgctactgatgctgtcatgtggaaactatttaaaggcactattataaatttatcctataagatgacaatgtttactcaaagtctaacatattcaatgcaagtaagactttctgaaaacacttgatgatgtggaaatgctgcaggattaaataacttgaagagcctttatagattatatgaatgcctatttgtgtctagaaccagttatttaacctgtaaaatgtcaatagcaaatgaaggatgaagtatatctctagatgcaaatacattgagtttaaaagtgcctcaaaataattgagatcacatttcaggacatttggaaatcaggtcgatttgtggtaactgtagtcatcttaaatttcaaaccatttaccatctgaaagttttgatttgaatgtaaaacaggaaattggaattcctttgtccaggagaaacctcacaaaccttctttaaggcatagttttgttgtttgtttgcttgtttgttgcaggctgtaaggcatggctgcttgtttacaaagcatctcattcatattacctgtggagttgcatatccaaaccttagtgagttttgaagctttaagcaaattcttttaaaaaattcttgtatttctagcattactagatattaaaagttaagcaaatagattaatgacgtatacataggcatcatttcacaaggtcagtaatgctgcaggaaaagcaaaattgcaatctacgtatctatggtactaaggaagtcctgtttttcaaaaatggaagcccacttctcagatttttctgaagggcatacaatgaaaagtgaaggggaaacacacacacgcaaaaaaacaagtatttggcttgtcacaggaatctgattgcattaagtgaaaggattatttagaatatgttaatgcaaagctaaaataaaattttccttggcaattaaaaatgctgtgcgctaataccctgctttctatcgtgactcaattcaacaatgtggggaatgtttactacatttccaacttgatgtcaagcaatggggaatacaagttccagttctgcaaagattcgtcaactttcttagctcaagagagaggctgagaaatgcagagaagaataagacataaaatagctccgacctccatgatccgagagtgggaaaaggcccgattattacccataaggcacactctctaaggccttttaaggggcctacaaaaatgttttattttataatcagaagaaaaggaaatgaacattggggattgaaaatcatattggtatttgcaccaacatagtcataaaatagtatgttaatatgtttttactttatatatttatatattaaaatatatttaatatgttttgcctttgtggcccatgaaagtcttactgggccctggggaaggtatcctaccctggtgaagcagctgctttgctctacaaatacctggggcagaaatttgatttgaaaagtattattctctcttctctttgtttcaactggattcctttggaaaaccaaactagtatcagaacaaaccccgaaacagtaagaaattggagtgagaagggcatggtattgggactaggatcggctctcattcgatcgagctattctcttaaaatgacaaaaagtgtccataaagaggctgctggagagtgcgtggccatagggagccgacatgcccgggaggaaaggtgttgattacatggatacttctaaaagctaaagccttgttgccttctctttaatgcctagagaatgggatgtgtgatgcaaatgctcaaaacctcttaaatcatagctgtctgacctctacggacctcacatccatctgaggcttcatggacaaagattctccacttggccaaactttagccaagctcctcaaccttctcccaggcccaatctgggcacttccttccccccatatctgttcaacctcagtatctgatcaggctcctcagcctccaccatcccccaggtgatgtctggtcaactggcctaccttcagctagaatcctgttaggtcggtttagatgaatgctccctgatatttcctcttggtaatcttccatccactgcccctgaccctgttccctgtctataaatccccagttttccatggtgtattcagagctgagtccagtctctctcccctactacaagtccccattgctgtggtccccgtacctgtcatgatggtcctaaataaagtcttactgtgctttaataggtagcattgaaaaatttttttctttgacatcattcatgacaacatgaaacctattgggacagcatgactgtgcagggtctttagagctcagctttctgaggccctgagcattcttggttttccgacatcgtgaacctgttctgtgttgcaagatatcactcaagccagtgttgcttaataccatctctttgtgtaatagatctgaataaagtaattgtaatacaccaata

SEQ ID NO: 87615 - DNA, 4790 bp, Homo sapiens
acattatctgcccaagcacagtgctgttggccaagcctccagcagctgacgggacccagctgtagtgaggttgcagtgattgagtaggattggcctgcttcaaagcagaggtttctcatgggaatatgcttattaaactcccactggtgcagaaaccatgaacagaggatgaacaagtgaagttgcaatctcctccatcacagctcagttccccaacaacaggatcacaagctggagatgcctttaaggaagatgaagatccctttcctcctactgttctttctgtgggaagccgagagccacgcagcatcaaggccgaacatcatcctggtgatggctgacgacctcggcattggagatcctgggtgctatgggaacaaaactatcaggactcccaatatcgaccggttggccagtgggggagtgaaactcactcagcacctggcagcatcaccgctgtgcacaccaagcagggcagccttcatgactggccggtaccctgtccgatcaggaatggcatcttggtcccgcactggagttttcctcttcacagcctcttcgggaggacttcccaccgatgagattacctttgctaagcttctgaaggatcaaggttattcaacagcactgatagggaaatggcaccttgggatgagctgtcacagcaagactgacttctgtcaccaccctttacatcacggcttcaattatttctatgggatctctttgaccaatctgagagactgcaagcccggagagggcagtgtcttcaccacgggcttcaagaggctggtcttcctccccctgcagatcgtcggggtcaccctccttacccttgctgcactcaattgtctggggctactccacgtgcctctaggcgtttttttcagccttctcttcctagcagccctaatcctgacccttttcttgggcttccttcattacttccggcccctgaactgcttcatgatgaggaactacgagatcattcagcagcccatgtcctatgacaatctcacccagaggctaacggtggaggcggcccagttcatacagcggaacactgagactccgttcctgcttgtcttgtcctacctccacgtgcacacagccctgttctccagcaaagactttgctggcaaaagtcaacacggagtctacggggatgctgttgaggaaatggactggagtgtggggcagatcttgaaccttctggatgagctgagattggctaatgataccctcatctacttcacatcggaccagggagcacatgtagaagaagtgtcttccaaaggagaaattcatggcggaagtaatgggatctataaaggaggaaaagcaaacaactgggaaggaggtatccgggttccaggcatccttcgttggcccagggtgatacaggctggccagaagattgatgagcccactagcaacatggacatatttcctacagtagccaagctggctggagctcccttgcctgaggacaggatcattgatggacgtgatctgatgcccctgcttgaaggaaaaagccaacgctccgatcatgagtttctcttccattactgcaacgcctacttaaatgctgtgcgctggcaccctcagaacagcacatccatctggaaggcctttttcttcacccccaacttcaaccccgtgggttccaacggatgctttgccacacacgtgtgcttctgtttcgggagttatgtcacccatcacgacccacctttactctttgatatttccaaagatcccagagagagaaacccactaactccagcatccgagccccggttttatgaaatcctcaaagtcatgcaggaagctgcggacagacacacccagaccctgccagaggtgcccgatcagttttcatggaacaactttctttggaagccctggcttcagctgtgctgtccttccaccggcctgtcttgccagtgtgatagagaaaaacaggataagagactgagccgctagcagcgcctggggaccagacagacgcatgtggcaaagctcaccatcttcactacaaacacgcctgagagtggcactggggaaacataactccatctacaccttggatttggactgattctccattttatcacctgaaggcttgggccagagctcaacagctactcaactggaggggtgagggggataaggtctgtagtatacagacaggaagatggtaggtttatgccttctgtggccagagtcttggactcatggaaatagaatgaatagaggggcattcacaaggcacaccagtgcaagcagatgacaaaaaggtgcagaaggcaatcttaaaacagaaaggtgcaggaggtaccttaactcacccctcagcaaatacctatgtcaacagtataagttaccatttactctataatctgcagtgatgcaataaccagcataataaaaaggcaatcacataaaaaagagtttagtcgtctaaacataagtaactttaaggtgaatgaaagatcttctttaggaataatagatgatggtaagttccactttggttattggaaggcaagtcattattactggtattagttaaaacacatatcaaatgcttgctcttcatcatatatatagttatgcatacatacacacacacacatacagtatattctttcctcaaaagggttaagatgtctaaaatagggacctagaagcttaacactatttaagtaaatacagtagaagctcacaaatagatttctttgcacaatgattttttgcaaaattttacagtaataataatcccaaggcaaatctctcctgaactgctttccattccataatttgtagtataattcttggattccactgttttctttggggaatggaagttctgaattaaaagcccactgtggagatgctgtggttcatggaatctcttccagtgtaattcagaatcattggcctagaaagtctctgatatttggaggggaacaaaaatcactcacaagcaatccatgatctatacacataagcataatttcctttagttctagttagtcatcagagaacagtcatgtatgcaagttttgtgactgagaaatttctgtgcttccaatccacaatgagatgcatgattttgttttcatcccatttcccccaagcccctgtaaatcagggaaaatgcgcaactgatcgcctaggagagggcctcgtagtggcacagctggagatagtttcaaagtctaaaccaccagcccatcctgaggaaagcctcctatggaatgtaaagtgcaatcatttcttcagatataagactttccccaacaatgtgattggattcctttatggcaaaatcgagagaagctgccatccacctgcttatgcatttatctcttttgtggacttgtctgaccaccttctatttgcccagagtttgctcaattccaagacagtgcccatgaatgggacacctgtaatgtaacccacacagcggtttgcagagaatgttagccatgacttgggctttctgaaagttggctataatttctctatccctacccacaaccctgggaagttggagcaagaggggcatactattgggctgggaggatttgacagcatttccccagttgccctttaagttcttctatttcaaacgttaattttgcttctctttctaaaaaaaaaaaaaaaaaagaaagagaagaaagaagtgattcctaccccctacctccagagttgttgaaagctgaaaagcatacaagattcttccttttaacttggatttctcgttccagaaattgtgggataatctgtattcttgctttagaaaacattcttagagagggtactagcttactgatgatgtgttaggattgctactgatgctgtcatgtggaaactatttaaaggcactattataaatttatcctataagatgacaatgtttactcaaagtctaacatattcaatgcaagtaagactttctgaaaacacttgatgatgtggaaatgctgcaggattaaataacttgaagagcctttatagattatatgaatgcctatttgtgtctagaaccagttatttaacctgtaaaatgtcaatagcaaatgaaggatgaagtatatctctagatgcaaatacattgagtttaaaagtgcctcaaaataattgagatcacatttcaggacatttggaaatcaggtcgatttgtggtaactgtagtcatcttaaatttcaaaccatttaccatctgaaagttttgatttgaatgtaaaacaggaaattggaattcctttgtccaggagaaacctcacaaaccttctttaaggcatagttttgttgtttgtttgcttgtttgttgcaggctgtaaggcatggctgcttgtttacaaagcatctcattcatattacctgtggagttgcatatccaaaccttagtgagttttgaagctttaagcaaattcttttaaaaaattcttgtatttctagcattactagatattaaaagttaagcaaatagattaatgacgtatacataggcatcatttcacaaggtcagtaatgctgcaggaaaagcaaaattgcaatctacgtatctatggtactaaggaagtcctgtttttcaaaaatggaagcccacttctcagatttttctgaagggcatacaatgaaaagtgaaggggaaacacacacacgcaaaaaaacaagtatttggcttgtcacaggaatctgattgcattaagtgaaaggattatttagaatatgttaatgcaaagctaaaataaaattttccttggcaatta

SEQ ID NO: 87616 - DNA, 1131 bp, Homo sapiens
ccccccatgcctctgcacccttgtcgaccactgtctcacatgatctgcagcttccattgtgtcctggctcatatacctcctctctggcatcttcagctttgtcctcctcatcagcctcctcttcagatagttcagcctctcctttctcaatagcctcatgcgagtccagaattgccctcggggcaatactggactaggatcggctctcattcgatcgagctattctcttaaaatgacaaaaagtgtccataaagaggctgctggagagtgcgtggccatagggagccgacatgcccgggaggaaaggtgttgattacatggatacttctaaaagctaaagccttgttgccttctctttaatgcctagagaatgggatgtgtgatgcaaatgctcaaaacctcttaaatcatagctgtctgacctctacggacctcacatccatctgaggcttcatggacaaagattctccacttggccaaactttagccaagctcctcaaccttctcccaggcccaatctgggcacttccttgtaaaatctagttttggcaagaagtctattaggtcagtttagcaagaacacctaacccccccatatctgttcaacctcagtatctgatcaggctcctcagcctccaccatcccccaggtgatgtctggtcaactggcctaccttcagctagaatcctgttaggtcggtttagatgaatgctccctgatatttcctcttggtaatcttccatccactgcccctgaccctgttccctgtctataaatccccagttttccatggtgtattcagagctgagtccagtctctctcccctactacaagtccccattgctgtggtccccgtacctgtcatgatggtcctaaataaagtcttactgtgctttaataggtagcattgaaaaatttttttctttgacatcattcatgacaacatgaaacctattgggacagcatgactgtgcagggtctttagagctcagctttctgaggccctgagcattcttggttttccgacatcgtgaacctgttctgtgttgcaagatatcactcaagccagtgttgcttaataccatctctttgtgtaatagatctgaataaagtaattgtaatacaccaata

SEQ ID NO: 87617 - DNA, 6538 bp, Homo sapiens
acattatctgcccaagcacagtgctgttggccaagcctccagcagctgacgggacccagctgtagtgaggttgcagtgattgagtaggattggcctgcttcaaagcagaggtttctcatgggaatatgcttattaaactcccactggtgcagaaaccatgaacagaggatgaacaagtgaagttgcaatctcctccatcacagctcagttccccaacaacaggatcacaagctggagatgcctttaaggaagatgaagatccctttcctcctactgttctttctgtgggaagccgagagccacgcagcatcaaggccgaacatcatcctggtgatggctgacgacctcggcattggagatcctgggtgctatgggaacaaaactatcaggactcccaatatcgaccggttggccagtgggggagtgaaactcactcagcacctggcagcatcaccgctgtgcacaccaagcagggcagccttcatgactggccggtaccctgtccgatcaggaatggcatcttggtcccgcactggagttttcctcttcacagcctcttcgggaggacttcccaccgatgagattacctttgctaagcttctgaaggatcaaggttattcaacagcactgatagggaaatggcaccttgggatgagctgtcacagcaagactgacttctgtcaccaccctttacatcacggcttcaattatttctatgggatctctttgaccaatctgagagactgcaagcccggagagggcagtgtcttcaccacgggcttcaagaggctggtcttcctccccctgcagatcgtcggggtcaccctccttacccttgctgcactcaattgtctggggctactccacgtgcctctaggcgtttttttcagccttctcttcctagcagccctaatcctgacccttttcttgggcttccttcattacttccggcccctgaactgcttcatgatgaggaactacgagatcattcagcagcccatgtcctatgacaatctcacccagaggctaacggtggaggcggcccagttcatacagcggaacactgagactccgttcctgcttgtcttgtcctacctccacgtgcacacagccctgttctccagcaaagactttgctggcaaaagtcaacacggagtctacggggatgctgttgaggaaatggactggagtgtggggcagatcttgaaccttctggatgagctgagattggctaatgataccctcatctacttcacatcggaccagggagcacatgtagaagaagtgtcttccaaaggagaaattcatggcggaagtaatgggatctataaaggaggaaaagcaaacaactgggaaggaggtatccgggttccaggcatccttcgttggcccagggtgatacaggctggccagaagattgatgagcccactagcaacatggacatatttcctacagtagccaagctggctggagctcccttgcctgaggacaggatcattgatggacgtgatctgatgcccctgcttgaaggaaaaagccaacgctccgatcatgagtttctcttccattactgcaacgcctacttaaatgctgtgcgctggcaccctcagaacagcacatccatctggaaggcctttttcttcacccccaacttcaaccccgtgggttccaacggatgctttgccacacacgtgtgcttctgtttcgggagttatgtcacccatcacgacccacctttactctttgatatttccaaagatcccagagagagaaacccactaactccagcatccgagccccggttttatgaaatcctcaaagtcatgcaggaagctgcggacagacacacccagaccctgccagaggtgcccgatcagttttcatggaacaactttctttggaagccctggcttcagctgtgctgtccttccaccggcctgtcttgccagtgtgatagagaaaaacaggataagagactgagccgctagcagcgcctggggaccagacagacgcatgtggcaaagctcaccatcttcactacaaacacgcctgagagtggcactggggaaacataactccatctacaccttggatttggactgattctccattttatcacctgaaggcttgggccagagctcaacagctactcaactggaggggtgagggggataaggtctgtagtatacagacaggaagatggtaggtttatgccttctgtggccagagtcttggactcatggaaatagaatgaatagaggggcattcacaaggcacaccagtgcaagcagatgacaaaaaggtgcagaaggcaatcttaaaacagaaaggtgcaggaggtaccttaactcacccctcagcaaatacctatgtcaacagtataagttaccatttactctataatctgcagtgatgcaataaccagcataataaaaaggcaatcacataaaaaagagtttagtcgtctaaacataagtaactttaaggtgaatgaaagatcttctttaggaataatagatgatggtaagttccactttggttattggaaggcaagtcattattactggtattagttaaaacacatatcaaatgcttgctcttcatcatatatatagttatgcatacatacacacacacacatacagtatattctttcctcaaaagggttaagatgtctaaaatagggacctagaagcttaacactatttaagtaaatacagtagaagctcacaaatagatttctttgcacaatgattttttgcaaaattttacagtaataataatcccaaggcaaatctctcctgaactgctttccattccataatttgtagtataattcttggattccactgttttctttggggaatggaagttctgaattaaaagcccactgtggagatgctgtggttcatggaatctcttccagtgtaattcagaatcattggcctagaaagtctctgatatttggaggggaacaaaaatcactcacaagcaatccatgatctatacacataagcataatttcctttagttctagttagtcatcagagaacagtcatgtatgcaagttttgtgactgagaaatttctgtgcttccaatccacaatgagatgcatgattttgttttcatcccatttcccccaagcccctgtaaatcagggaaaatgcgcaactgatcgcctaggagagggcctcgtagtggcacagctggagatagtttcaaagtctaaaccaccagcccatcctgaggaaagcctcctatggaatgtaaagtgcaatcatttcttcagatataagactttccccaacaatgtgattggattcctttatggcaaaatcgagagaagctgccatccacctgcttatgcatttatctcttttgtggacttgtctgaccaccttctatttgcccagagtttgctcaattccaagacagtgcccatgaatgggacacctgtaatgtaacccacacagcggtttgcagagaatgttagccatgacttgggctttctgaaagttggctataatttctctatccctacccacaaccctgggaagttggagcaagaggggcatactattgggctgggaggatttgacagcatttccccagttgccctttaagttcttctatttcaaacgttaattttgcttctctttctaaaaaaaaaaaaaaaaaagaaagagaagaaagaagtgattcctaccccctacctccagagttgttgaaagctgaaaagcatacaagattcttccttttaacttggatttctcgttccagaaattgtgggataatctgtattcttgctttagaaaacattcttagagagggtactagcttactgatgatgtgttaggattgctactgatgctgtcatgtggaaactatttaaaggcactattataaatttatcctataagatgacaatgtttactcaaagtctaacatattcaatgcaagtaagactttctgaaaacacttgatgatgtggaaatgctgcaggattaaataacttgaagagcctttatagattatatgaatgcctatttgtgtctagaaccagttatttaacctgtaaaatgtcaatagcaaatgaaggatgaagtatatctctagatgcaaatacattgagtttaaaagtgcctcaaaataattgagatcacatttcaggacatttggaaatcaggtcgatttgtggtaactgtagtcatcttaaatttcaaaccatttaccatctgaaagttttgatttgaatgtaaaacaggaaattggaattcctttgtccaggagaaacctcacaaaccttctttaaggcatagttttgttgtttgtttgcttgtttgttgcaggctgtaaggcatggctgcttgtttacaaagcatctcattcatattacctgtggagttgcatatccaaaccttagtgagttttgaagctttaagcaaattcttttaaaaaattcttgtatttctagcattactagatattaaaagttaagcaaatagattaatgacgtatacataggcatcatttcacaaggtcagtaatgctgcaggaaaagcaaaattgcaatctacgtatctatggtactaaggaagtcctgtttttcaaaaatggaagcccacttctcagatttttctgaagggcatacaatgaaaagtgaaggggaaacacacacacgcaaaaaaacaagtatttggcttgtcacaggaatctgattgcattaagtgaaaggattatttagaatatgttaatgcaaagctaaaataaaattttccttggcaattaaaaatgctgtgcgctaataccctgctttctatcgtgactcaattcaacaatgtggggaatgtttactacatttccaacttgatgtcaagcaatggggaatacaagttccagttctgcaaagattcgtcaactttcttagctcaagagagaggctgagaaatgcagagaagaataagacataaaatagctccgacctccatgatccgagagtgggaaaaggcccgattattacccataaggcacactctctaaggccttttaaggggcctacaaaaatgttttattttataatcagaagaaaaggaaatgaacattggggattgaaaatcatattggtatttgcaccaacatagtcataaaatagtatgttaatatgtttttactttatatatttatatattaaaatatatttaatatgttttgcctttgtggcccatgaaagtcttactgggccctggggaaggtatcctaccctggtgaagcagctgctttgctctacaaatacctggggcagaaatttgatttgaaaagtattattctctcttctctttgtttcaactggattcctttggaaaaccaaactagtatcagaacaaaccccgaaacagtaagaaattggagtgagaagggcatggtattgggactaggatcggctctcattcgatcgagctattctcttaaaatgacaaaaagtgtccataaagaggctgctggagagtgcgtggccatagggagccgacatgcccgggaggaaaggtgttgattacatggatacttctaaaagctaaagccttgttgccttctctttaatgcctagagaatgggatgtgtgatgcaaatgctcaaaacctcttaaatcatagctgtctgacctctacggacctcacatccatctgaggcttcatggacaaagattctccacttggccaaactttagccaagctcctcaaccttctcccaggcccaatctgggcacttccttgtaaaatctagttttggcaagaagtctattaggtcagtttagcaagaacacctaacccccccatatctgttcaacctcagtatctgatcaggctcctcagcctccaccatcccccaggtgatgtctggtcaactggcctaccttcagctagaatcctgttaggtcggtttagatgaatgctccctgatatttcctcttggtaatcttccatccactgcccctgaccctgttccctgtctataaatccccagttttccatggtgtattcagagctgagtccagtctctctcccctactacaagtccccattgctgtggtccccgtacctgtcatgatggtcctaaataaagtcttactgtgctttaataggtagcattgaaaaatttttttctttgacatcattcatgacaacatgaaacctattgggacagcatgactgtgcagggtctttagagctcagctttctgaggccctgagcattcttggttttccgacatcgtgaacctgttctgtgttgcaagatatcactcaagccagtgttgcttaataccatctctttgtgtaatagatctgaataaagtaattgtaatacaccaatattttactttgttgagtattattttaatgggagcctttccaatgaaggaaacatcagctttccttgttagaatgcaagcagcttaaaaactacccatgtctttctggaaaggaaacattgccatgtaactatgtatcagttttctaagaacttcatgggccttccata

SEQ ID NO: 87618 - DNA, 6371 bp, Homo sapiens
acattatctgcccaagcacagtgctgttggccaagcctccagcagctgacgggacccagctgtagtgaggttgcagtgattgagtaggattggcctgcttcaaagcagaggtttctcatgggaatatgcttattaaactcccactggtgcagaaaccatgaacagaggatgaacaagtgaagttgcaatctcctccatcacagctcagttccccaacaacaggatcacaagctggagatgcctttaaggaagatgaagatccctttcctcctactgttctttctgtgggaagccgagagccacgcagcatcaaggccgaacatcatcctggtgatggctgacgacctcggcattggagatcctgggtgctatgggaacaaaactatcaggactcccaatatcgaccggttggccagtgggggagtgaaactcactcagcacctggcagcatcaccgctgtgcacaccaagcagggcagccttcatgactggccggtaccctgtccgatcaggaatggcatcttggtcccgcactggagttttcctcttcacagcctcttcgggaggacttcccaccgatgagattacctttgctaagcttctgaaggatcaaggttattcaacagcactgatagggaaatggcaccttgggatgagctgtcacagcaagactgacttctgtcaccaccctttacatcacggcttcaattatttctatgggatctctttgaccaatctgagagactgcaagcccggagagggcagtgtcttcaccacgggcttcaagaggctggtcttcctccccctgcagatcgtcggggtcaccctccttacccttgctgcactcaattgtctggggctactccacgtgcctctaggcgtttttttcagccttctcttcctagcagccctaatcctgacccttttcttgggcttccttcattacttccggcccctgaactgcttcatgatgaggaactacgagatcattcagcagcccatgtcctatgacaatctcacccagaggctaacggtggaggcggcccagttcatacagcggaacactgagactccgttcctgcttgtcttgtcctacctccacgtgcacacagccctgttctccagcaaagactttgctggcaaaagtcaacacggagtctacggggatgctgttgaggaaatggactggagtgtggggcagatcttgaaccttctggatgagctgagattggctaatgataccctcatctacttcacatcggaccagggagcacatgtagaagaagtgtcttccaaaggagaaattcatggcggaagtaatgggatctataaaggaggaaaagcaaacaactgggaaggaggtatccgggttccaggcatccttcgttggcccagggtgatacaggctggccagaagattgatgagcccactagcaacatggacatatttcctacagtagccaagctggctggagctcccttgcctgaggacaggatcattgatggacgtgatctgatgcccctgcttgaaggaaaaagccaacgctccgatcatgagtttctcttccattactgcaacgcctacttaaatgctgtgcgctggcaccctcagaacagcacatccatctggaaggcctttttcttcacccccaacttcaaccccgtgggttccaacggatgctttgccacacacgtgtgcttctgtttcgggagttatgtcacccatcacgacccacctttactctttgatatttccaaagatcccagagagagaaacccactaactccagcatccgagccccggttttatgaaatcctcaaagtcatgcaggaagctgcggacagacacacccagaccctgccagaggtgcccgatcagttttcatggaacaactttctttggaagccctggcttcagctgtgctgtccttccaccggcctgtcttgccagtgtgatagagaaaaacaggataagagactgagccgctagcagcgcctggggaccagacagacgcatgtggcaaagctcaccatcttcactacaaacacgcctgagagtggcactggggaaacataactccatctacaccttggatttggactgattctccattttatcacctgaaggcttgggccagagctcaacagctactcaactggaggggtgagggggataaggtctgtagtatacagacaggaagatggtaggtttatgccttctgtggccagagtcttggactcatggaaatagaatgaatagaggggcattcacaaggcacaccagtgcaagcagatgacaaaaaggtgcagaaggcaatcttaaaacagaaaggtgcaggaggtaccttaactcacccctcagcaaatacctatgtcaacagtataagttaccatttactctataatctgcagtgatgcaataaccagcataataaaaaggcaatcacataaaaaagagtttagtcgtctaaacataagtaactttaaggtgaatgaaagatcttctttaggaataatagatgatggtaagttccactttggttattggaaggcaagtcattattactggtattagttaaaacacatatcaaatgcttgctcttcatcatatatatagttatgcatacatacacacacacacatacagtatattctttcctcaaaagggttaagatgtctaaaatagggacctagaagcttaacactatttaagtaaatacagtagaagctcacaaatagatttctttgcacaatgattttttgcaaaattttacagtaataataatcccaaggcaaatctctcctgaactgctttccattccataatttgtagtataattcttggattccactgttttctttggggaatggaagttctgaattaaaagcccactgtggagatgctgtggttcatggaatctcttccagtgtaattcagaatcattggcctagaaagtctctgatatttggaggggaacaaaaatcactcacaagcaatccatgatctatacacataagcataatttcctttagttctagttagtcatcagagaacagtcatgtatgcaagttttgtgactgagaaatttctgtgcttccaatccacaatgagatgcatgattttgttttcatcccatttcccccaagcccctgtaaatcagggaaaatgcgcaactgatcgcctaggagagggcctcgtagtggcacagctggagatagtttcaaagtctaaaccaccagcccatcctgaggaaagcctcctatggaatgtaaagtgcaatcatttcttcagatataagactttccccaacaatgtgattggattcctttatggcaaaatcgagagaagctgccatccacctgcttatgcatttatctcttttgtggacttgtctgaccaccttctatttgcccagagtttgctcaattccaagacagtgcccatgaatgggacacctgtaatgtaacccacacagcggtttgcagagaatgttagccatgacttgggctttctgaaagttggctataatttctctatccctacccacaaccctgggaagttggagcaagaggggcatactattgggctgggaggatttgacagcatttccccagttgccctttaagttcttctatttcaaacgttaattttgcttctctttctaaaaaaaaaaaaaaaaaagaaagagaagaaagaagtgattcctaccccctacctccagagttgttgaaagctgaaaagcatacaagattcttccttttaacttggatttctcgttccagaaattgtgggataatctgtattcttgctttagaaaacattcttagagagggtactagcttactgatgatgtgttaggattgctactgatgctgtcatgtggaaactatttaaaggcactattataaatttatcctataagatgacaatgtttactcaaagtctaacatattcaatgcaagtaagactttctgaaaacacttgatgatgtggaaatgctgcaggattaaataacttgaagagcctttatagattatatgaatgcctatttgtgtctagaaccagttatttaacctgtaaaatgtcaatagcaaatgaaggatgaagtatatctctagatgcaaatacattgagtttaaaagtgcctcaaaataattgagatcacatttcaggacatttggaaatcaggtcgatttgtggtaactgtagtcatcttaaatttcaaaccatttaccatctgaaagttttgatttgaatgtaaaacaggaaattggaattcctttgtccaggagaaacctcacaaaccttctttaaggcatagttttgttgtttgtttgcttgtttgttgcaggctgtaaggcatggctgcttgtttacaaagcatctcattcatattacctgtggagttgcatatccaaaccttagtgagttttgaagctttaagcaaattcttttaaaaaattcttgtatttctagcattactagatattaaaagttaagcaaatagattaatgacgtatacataggcatcatttcacaaggtcagtaatgctgcaggaaaagcaaaattgcaatctacgtatctatggtactaaggaagtcctgtttttcaaaaatggaagcccacttctcagatttttctgaagggcatacaatgaaaagtgaaggggaaacacacacacgcaaaaaaacaagtatttggcttgtcacaggaatctgattgcattaagtgaaaggattatttagaatatgttaatgcaaagctaaaataaaattttccttggcaattaaaaatgctgtgcgctaataccctgctttctatcgtgactcaattcaacaatgtggggaatgtttactacatttccaacttgatgtcaagcaatggggaatacaagttccagttctgcaaagattcgtcaactttcttagctcaagagagaggctgagaaatgcagagaagaataagacataaaatagctccgacctccatgatccgagagtgggaaaaggcccgattattacccataaggcacactctctaaggccttttaaggggcctacaaaaatgttttattttataatcagaagaaaaggaaatgaacattggggattgaaaatcatattggtatttgcaccaacatagtcataaaatagtatgttaatatgtttttactttatatatttatatattaaaatatatttaatatgttttgcctttgtggcccatgaaagtcttactgggccctggggaaggtatcctaccctggtgaagcagctgctttgctctacaaatacctggggcagaaatttgatttgaaaagtattattctctcttctctttgtttcaactggattcctttggaaaaccaaactagtatcagaacaaaccccgaaacagtaagaaattggagtgagaagggcatggtattgggactaggatcggctctcattcgatcgagctattctcttaaaatgacaaaaagtgtccataaagaggctgctggagagtgcgtggccatagggagccgacatgcccgggaggaaaggtgttgattacatggatacttctaaaagctaaagccttgttgccttctctttaatgcctagagaatgggatgtgtgatgcaaatgctcaaaacctcttaaatcatagctgtctgacctctacggacctcacatccatctgaggcttcatggacaaagattctccacttggccaaactttagccaagctcctcaaccttctcccaggcccaatctgggcacttccttgtaaaatctagttttggcaagaagtctattaggtcagtttagcaagaacacctaacccccccatatctgttcaacctcagtatctgatcaggctcctcagcctccaccatcccccaggtgatgtctggtcaactggcctaccttcagctagaatcctgttaggtcggtttagatgaatgctccctgatatttcctcttggtaatcttccatccactgcccctgaccctgttccctgtctataaatccccagttttccatggtgtattcagagctgagtccagtctctctcccctactacaagtccccattgctgtggtccccgtacctgtcatgatggtcctaaataaagtcttactgtgctttaataggtagcattgaaaaatttttttctttgacatcattcatgacaacatgaaacctattgggacagcatgactgtgcagggtctttagagctcagctttctgaggccctgagcattcttggttttccgacatcgtgaacctgttctgtgttgcaagatatcactcaagccagtgttgcttaataccatctctttgtgtaatagatctgaataaagtaattgtaatacaccaata

SEQ ID NO: 87619 - DNA, 6137 bp, Homo sapiens
acattatctgcccaagcacagtgctgttggccaagcctccagcagctgacgggacccagctgtagtgaggttgcagtgattgagtaggattggcctgcttcaaagcagaggtttctcatgggaatatgcttattaaactcccactggtgcagaaaccatgaacagaggatgaacaagtgaagttgcaatctcctccatcacagctcagttccccaacaacaggatcacaagctggagatgcctttaaggaagatgaagatccctttcctcctactgttctttctgtgggaagccgagagccacgcagcatcaaggccgaacatcatcctggtgatggctgacgacctcggcattggagatcctgggtgctatgggaacaaaactatcaggactcccaatatcgaccggttggccagtgggggagtgaaactcactcagcacctggcagcatcaccgctgtgcacaccaagcagggcagccttcatgactggccggtaccctgtccgatcaggaatggcatcttggtcccgcactggagttttcctcttcacagcctcttcgggaggacttcccaccgatgagattacctttgctaagcttctgaaggatcaaggttattcaacagcactgatagggaaatggcaccttgggatgagctgtcacagcaagactgacttctgtcaccaccctttacatcacggcttcaattatttctatgggatctctttgaccaatctgagagactgcaagcccggagagggcagtgtcttcaccacgggcttcaagaggctggtcttcctccccctgcagatcgtcggggtcaccctccttacccttgctgcactcaattgtctggggctactccacgtgcctctaggcgtttttttcagccttctcttcctagcagccctaatcctgacccttttcttgggcttccttcattacttccggcccctgaactgcttcatgatgaggaactacgagatcattcagcagcccatgtcctatgacaatctcacccagaggctaacggtggaggcggcccagttcatacagcggaacactgagactccgttcctgcttgtcttgtcctacctccacgtgcacacagccctgttctccagcaaagactttgctggcaaaagtcaacacggagtctacggggatgctgttgaggaaatggactggagtgtggggcagatcttgaaccttctggatgagctgagattggctaatgataccctcatctacttcacatcggaccagggagcacatgtagaagaagtgtcttccaaaggagaaattcatggcggaagtaatgggatctataaaggaggaaaagcaaacaactgggaaggaggtatccgggttccaggcatccttcgttggcccagggtgatacaggctggccagaagattgatgagcccactagcaacatggacatatttcctacagtagccaagctggctggagctcccttgcctgaggacaggatcattgatggacgtgatctgatgcccctgcttgaaggaaaaagccaacgctccgatcatgagtttctcttccattactgcaacgcctacttaaatgctgtgcgctggcaccctcagaacagcacatccatctggaaggcctttttcttcacccccaacttcaaccccgtgggttccaacggatgctttgccacacacgtgtgcttctgtttcgggagttatgtcacccatcacgacccacctttactctttgatatttccaaagatcccagagagagaaacccactaactccagcatccgagccccggttttatgaaatcctcaaagtcatgcaggaagctgcggacagacacacccagaccctgccagaggtgcccgatcagttttcatggaacaactttctttggaagccctggcttcagctgtgctgtccttccaccggcctgtcttgccagtgtgatagagaaaaacaggataagagactgagccgctagcagcgcctggggaccagacagacgcatgtggcaaagctcaccatcttcactacaaacacgcctgagagtggcactggggaaacataactccatctacaccttggatttggactgattctccattttatcacctgaaggcttgggccagagctcaacatataagttaccatttactctataatctgcagtgatgcaataaccagcataataaaaaggcaatcacataaaaaagagtttagtcgtctaaacataagtaactttaaggtgaatgaaagatcttctttaggaataatagatgatggtaagttccactttggttattggaaggcaagtcattattactggtattagttaaaacacatatcaaatgcttgctcttcatcatatatatagttatgcatacatacacacacacacatacagtatattctttcctcaaaagggttaagatgtctaaaatagggacctagaagcttaacactatttaagtaaatacagtagaagctcacaaatagatttctttgcacaatgattttttgcaaaattttacagtaataataatcccaaggcaaatctctcctgaactgctttccattccataatttgtagtataattcttggattccactgttttctttggggaatggaagttctgaattaaaagcccactgtggagatgctgtggttcatggaatctcttccagtgtaattcagaatcattggcctagaaagtctctgatatttggaggggaacaaaaatcactcacaagcaatccatgatctatacacataagcataatttcctttagttctagttagtcatcagagaacagtcatgtatgcaagttttgtgactgagaaatttctgtgcttccaatccacaatgagatgcatgattttgttttcatcccatttcccccaagcccctgtaaatcagggaaaatgcgcaactgatcgcctaggagagggcctcgtagtggcacagctggagatagtttcaaagtctaaaccaccagcccatcctgaggaaagcctcctatggaatgtaaagtgcaatcatttcttcagatataagactttccccaacaatgtgattggattcctttatggcaaaatcgagagaagctgccatccacctgcttatgcatttatctcttttgtggacttgtctgaccaccttctatttgcccagagtttgctcaattccaagacagtgcccatgaatgggacacctgtaatgtaacccacacagcggtttgcagagaatgttagccatgacttgggctttctgaaagttggctataatttctctatccctacccacaaccctgggaagttggagcaagaggggcatactattgggctgggaggatttgacagcatttccccagttgccctttaagttcttctatttcaaacgttaattttgcttctctttctaaaaaaaaaaaaaaaaaagaaagagaagaaagaagtgattcctaccccctacctccagagttgttgaaagctgaaaagcatacaagattcttccttttaacttggatttctcgttccagaaattgtgggataatctgtattcttgctttagaaaacattcttagagagggtactagcttactgatgatgtgttaggattgctactgatgctgtcatgtggaaactatttaaaggcactattataaatttatcctataagatgacaatgtttactcaaagtctaacatattcaatgcaagtaagactttctgaaaacacttgatgatgtggaaatgctgcaggattaaataacttgaagagcctttatagattatatgaatgcctatttgtgtctagaaccagttatttaacctgtaaaatgtcaatagcaaatgaaggatgaagtatatctctagatgcaaatacattgagtttaaaagtgcctcaaaataattgagatcacatttcaggacatttggaaatcaggtcgatttgtggtaactgtagtcatcttaaatttcaaaccatttaccatctgaaagttttgatttgaatgtaaaacaggaaattggaattcctttgtccaggagaaacctcacaaaccttctttaaggcatagttttgttgtttgtttgcttgtttgttgcaggctgtaaggcatggctgcttgtttacaaagcatctcattcatattacctgtggagttgcatatccaaaccttagtgagttttgaagctttaagcaaattcttttaaaaaattcttgtatttctagcattactagatattaaaagttaagcaaatagattaatgacgtatacataggcatcatttcacaaggtcagtaatgctgcaggaaaagcaaaattgcaatctacgtatctatggtactaaggaagtcctgtttttcaaaaatggaagcccacttctcagatttttctgaagggcatacaatgaaaagtgaaggggaaacacacacacgcaaaaaaacaagtatttggcttgtcacaggaatctgattgcattaagtgaaaggattatttagaatatgttaatgcaaagctaaaataaaattttccttggcaattaaaaatgctgtgcgctaataccctgctttctatcgtgactcaattcaacaatgtggggaatgtttactacatttccaacttgatgtcaagcaatggggaatacaagttccagttctgcaaagattcgtcaactttcttagctcaagagagaggctgagaaatgcagagaagaataagacataaaatagctccgacctccatgatccgagagtgggaaaaggcccgattattacccataaggcacactctctaaggccttttaaggggcctacaaaaatgttttattttataatcagaagaaaaggaaatgaacattggggattgaaaatcatattggtatttgcaccaacatagtcataaaatagtatgttaatatgtttttactttatatatttatatattaaaatatatttaatatgttttgcctttgtggcccatgaaagtcttactgggccctggggaaggtatcctaccctggtgaagcagctgctttgctctacaaatacctggggcagaaatttgatttgaaaagtattattctctcttctctttgtttcaactggattcctttggaaaaccaaactagtatcagaacaaaccccgaaacagtaagaaattggagtgagaagggcatggtattgggactaggatcggctctcattcgatcgagctattctcttaaaatgacaaaaagtgtccataaagaggctgctggagagtgcgtggccatagggagccgacatgcccgggaggaaaggtgttgattacatggatacttctaaaagctaaagccttgttgccttctctttaatgcctagagaatgggatgtgtgatgcaaatgctcaaaacctcttaaatcatagctgtctgacctctacggacctcacatccatctgaggcttcatggacaaagattctccacttggccaaactttagccaagctcctcaaccttctcccaggcccaatctgggcacttccttgtaaaatctagttttggcaagaagtctattaggtcagtttagcaagaacacctaacccccccatatctgttcaacctcagtatctgatcaggctcctcagcctccaccatcccccaggtgatgtctggtcaactggcctaccttcagctagaatcctgttaggtcggtttagatgaatgctccctgatatttcctcttggtaatcttccatccactgcccctgaccctgttccctgtctataaatccccagttttccatggtgtattcagagctgagtccagtctctctcccctactacaagtccccattgctgtggtccccgtacctgtcatgatggtcctaaataaagtcttactgtgctttaataggtagcattgaaaaatttttttctttgacatcattcatgacaacatgaaacctattgggacagcatgactgtgcagggtctttagagctcagctttctgaggccctgagcattcttggttttccgacatcgtgaacctgttctgtgttgcaagatatcactcaagccagtgttgcttaataccatctctttgtgtaatagatctgaataaagtaattgtaatacaccaata

SEQ ID NO: 87620 - DNA, 688 bp, Homo sapiens
accattcatccgctcggccctccgggacagctctgcggcctcaggcgcactgccctctatagaacgcaccgcggctacccgccgcacctcggatgaaatccagactccttcccagagcctgcaagctcccgcatgatcctgctgccgtccgcctctccaaaccccccattccacccctctccctcgtctgctgcagccagactggcttgctgacagtttctcgaaaaccccacgctcattactctctcaagcacttaacttgttccctctgcttggggtgctttgcttccagcgtttcccgggctgcctctttctcatccttcaggtcttagctcaaatgtcacctcctcagagaggccttccctgaccaccatagctaaagttaccattcttaattccattcccttttattctctatcctgattattttcttcatggccccatcacagtttgtaataatgttattaatttgtttctttgcttagtgtctgcttcctccactaaacagaaagctcgatgagggcagggactgtgtctgttttgttccctgctgtatccccagcacctaaggcagtgcctcctaggaagagtattcaataaatatttatcctacgatggaatcaatgaatttaacaatgagtctttggtcacctagccaagggaatggatcgaaccctgccccttatgc

SEQ ID NO: 87621 - DNA, 350 bp, Homo sapiens
ggtctcttgtgagccctgtaaagaattaaacaaaaagtgatgaaggttttaattccaccatgggtctgcttgccatcactatatttctagatctcattgtacacattcatacattgatacaccattcattcccagcatttcccacatgcttacttttaatggtgtgataatctgattaatggctttctagaccattagaaaacccattgaaactcttttggtaaagagctaaaattaaatattttaggctttgtgcaccaaaagttatttgatgtaactactcaagttggacattataacatgaaaaacatcataggcaatatgtaaaagaataaggatggctatgttat

SEQ ID NO: 87622 - DNA, 394 bp, Homo sapiens
gacaatgaaataaacccaactcaaagaaagtaaaatgaaggtattattaaagacaaagcatatcctgaaatagaaaaaataataacaacaaaagtattccacattagcaaaatcaaaagctgtttttttgtccaaaaaaatagacaaacctgcagcaagcttcaacaagaaataaagaagagcgatgatgccaaaaaaacaacactagaaatactttttaaagaagtaccatacttatatgaagatttaaaatttataacatcttttgaactgggcatggttgctcatgcctgtaatcccaggactttaggaggctaaggcaagaagatccttgagcctaggagttcaagaccagcccagacaaggaagtaagaccttgtctccacaaaaaata

SEQ ID NO: 87623 - DNA, 413 bp, Homo sapiens
gggagaaaatgaagcacaatcaatgaaatttggaaattcagagaatgctgctaaatcatagcagattggccacaccagaaaagggctggaagaatgaaagaaaaatggcaggaaatatgaaagaaataagtgaaagtgagaaggttggacctacttttaatcagtctcagaaggtgtaaagagagaataatagatcaaagatgatatttgctgagaattttcgagaattggtgtggcaccaatccactgactcaagaagcccaaattccaggaaggataaataaaaagaattctgtgtaagtcataatgaaattaaaaaaaaaagacttaaaaatagactgaggaaaacctgacaagcacagcactgaggctgccaggtgactcttggcagtagcagcagagcccagcaggca

SEQ ID NO: 87624 - DNA, 444 bp, Homo sapiens
caatcttggtgcaatcttggattttttttttcatgtgaatgtccagttgtcccagcatgatttattgtaaagactattttttctccattgtattgccttttcatctttgtcaaagatgattttactgtatttgtgtgagtctatttctgagctttctattctgctctattgactattatttttgtcaataccacagtgtttggagtacgatacctttattgagtcttaaaattgatagtgtcagtcttccaacattgtttttctccttccatattaaattggttattcttggtcttttgcctctccatataaactttaaaattagtccatcaatatccacaaaataatttgcctagattttgattggggttgcattgaatctatagataagtttgagaagagcctacattttgacaatattgagtcttcctatccatgaatatg

SEQ ID NO: 87625 - DNA, 406 bp, Homo sapiens
gatccaaaaacctccaccatagagactgataaattgtagctattgaagctgtacttctttgtacataggtgctttgggagactcactctgattattgtaaatttgctcactagctacccaacattaaattcaaataacagagaatttctattgtacagccttgcaactttgctttaagtttaaacttttctttaaaataaaattttaagtggcaaaaataattattagaagagaaaatgtgtgctcatttttgaatattcttggcatcaaatataaatttgtatgtttactttattggcattcatactgccatttcaaaggactgcagcattcaaaaggggaaacaatattttgactgtgtattctgatttttataatgtaactctccatttcttcttttaaaagt

SEQ ID NO: 87626 - DNA, 5613 bp, Homo sapiens
  misc_feature (1)..(2): n is a, c, g, or t
  misc_feature (36)..(36): n is a, c, g, or t
  misc_feature (889)..(889): n is a, c, g, or t
  misc_feature (3773)..(3774): n is a, c, g, or t
nngcaactgtctatgcagctgaatctaagtatggtnttttgtcatattgcctctagattttcttctgtgcttctctctatctgctctggaatggatgagtgaatgtgttctgggtgttttagggaacatattgatagaaatgaccaccttgcagacaaaatctctctctctctttttgtttttatagaaaagaagtgatagtagttaattggcatcgatttttcagatattgcactaccttataatggttgtttttgatacctgaaaattgtgcaaatgccaaatattaattgtaagtcatatctgagaaatcattcttggctgtctttctaggtattccatagaatcaacacattttaaggctgaaagatactgtcgaaatcacccagtcccaaccccccaatttaaaattgattctagtaaaattaggtccagtaacacctgtatatatgtatatatttaataaagagtacttgtacaaaaaagcttatcataaattatttcatgaatgtgaatagatttctggccttgaggacgatgtttggaaatatggttggaagcacaattcattcgctactagttattcagagcgtactttgttccaggaactatgctggaaactgatagttcactattctgatgaaaaggctggttttgttgttgttgttgttgttgttgttgttgtttttggtgaggaactcttactctttgctaatctattggcctatcttaagaaataattatttggttattcattggcttcctttaaaaaaaagtgttcttctacaaatcttacagagtgtaaagagataaaaagaaatgattttttttcttacctttacatatgaaggtttaaaaatacatcatgtggccaaagaatgagaaaggncagaattaaccaaggattcttaattgttaatttgaagaacacattaaccagaaagcttaaacattattattaaaataaattatttcatttgcacacaatgataataatgatgataataataataataataataataataataataataataatatgttgtttgctttccttaactgaatttcatcaaattcattcagtgatttttattttggtcattatttctatcttcccaataacccagaggtacatcaagtaaaaacacttttgcaaagagccagtcacttttccctcttagaaaatctcagaagaatgattaggggcacccaaagttctggttatctatgaataataatgaataattttggctgagaatggtacctttatataactcttttaaagatgaaattcagaataattttattcaggacctagtatctgcagtccatgttggccactaactgctacataattactttcaatttcctccaggcatgactaggtataaacatatatttacatgattaatccacattttaaaatgacttgcacttgtgcatatacatagtactttgaataatgtatattttaaattggacctcacaaatcttgtattaaagtaggtagagagtagagtcacactttttttgatgaaatgagtcacagagaagttacatgacaaagataaaatcacagggttggaaagaactttgaaaggtcatttttcaataatctcaccttaaaagtgaccccttttcaaacaaagcataaacaatttatttgtggcttattttacccatgagctggccaatacttcctggcctagaaaaatatctccactctccccattcctgttcttaatggtcttctcttctcaatttgtaaatattctccagtaaaagacaccaggtgtggagatgggtcacttaatttcaagttctgagtgtcttgtggttttaaacaagtctcttaacctctctaagactgattcctcatttataacagggaggaggtggattatgtaatatctaagagcttttcagttttaatactctctgattctcatagtaaatacaagcatactcttgtaagaaaaacactgaatactttgaaccacaaataagtgtttatggacaaaaatttagttctactgcttgattactttaagttcattgcttgcttcaaactaaggtttccctaccttcaaaaatatatataacatctctccatttagataaagtatattcttccccagggaagactgtattctttaaagacagtagaatattggctatttctcttttctgggatttcctgggcttttattcactaaatgggctcctgcccagtttgggtactgtgctgatttttagatatacagagataaaaatagcccctttccttgcaggtagtcacagtccggaagagatgatagatgcatagacaaaaaattatgggatgtaactaatgcttcagtagaatacagcagggccaaaactagagtgatactcatctcaggcacaaatatatatggggacatcaaaacttcaataatcaagatacctaatatttaagtgaatatttttaaaactcaaaattaatgcaaaagatttatgatgaacagaatatacaaattttaaataaattaatagaatcagtagtaataatattttcttctgcctcaggctccaaaattgctcagcatagcactgatctagatagaggtggataaaagatccacataacttaattacattgttgaaggagaggaacaagagtgatagcagagaaggtttcacagatataatcttaagctaaattttatagaatgatttggagttcttatagcctccattcccacttccacaaacaaacaaaaaaatgaaagcgcaattttatcagcacctgaggcaggagaagagatgaggatgtggaaagtcaaggggaactcttactacaaattcttagttctgtgtttggaggtaagggtgaatgcagggaagtgagagttgttgatgttggaaagacctaaagagcctggattaggaagagttttgtgtaaattactgaaggaatggaatttgatcaggattagtggcaatttattaaaaatcttgaagaataatacgatgaaaactaacatccttatttttctgttttagagaaagcacctgattattgtgtgaactatggtttggagggccacaaatctagaggtagtggaacagttgagatctcttattttttctttcctgtcttaaactttgccttctattccttttttctttttttgaccgcaatgacttcattgtcatttgtaaaagtgatacatgactgttaaagatagacattgtagaaacttaaaaacaatctcaaaattctaccacccagaaatcagaaatattttgtatttggatatgtttgtctagaagagtagattgcttgattaaaagacagagttttataaatgtagaagccaatatgacatacatgctgccattaaataataaaaaattaaattgacttttatctcaagataagattaaaattggagggtaaaactgaagaaattgttgaaatttggatggtgcttctttaaagcaagagatttagagagtcagagctttttatcccaggtttcaatctttatttcaggaaaattttctgcaattttgtctaagttaattttttttttttaagaaatgccaattatgtcaaatcccttttgtctctatacaatagtccccaactgttttggcaacaggcacgggtgagggtgggggaatggttttcagatgaaattgttccatctcagatcatcaggcattagtcgattctcataaggagcggacaaccttgcatgccctcctatgagaatctaatgccnncgctaatctgacaggaggcagagctcaggcgataatgctcaatgggtgccactcacctcctgttgtgctgcccaattcctaacaggtcatggataagtactggtcagtggcccaggggttggggaccactgctctgtaactatttacagtattctttgtaactactttggtatctttaaaattttctttaacttttgtcaaccataaccctagtgagttttcagttgtgattattctattttgtaacttccaatgtacttttcaacttcataatggttaattttgttttccattgctttcttggtcactgtcatttcatttttcttctctttctctatttttaccattgctttattgaaatatcttctttgagcttctcatgtttctctattaatgagatcatgtctataatattttttgagactacagagacctatttatataaactcttcctctatttcttgaaaaagtttttatctggcgtgagcttcatctgctttttcattgaggttttatctcccttgcctatttttggggctggtttctttctattaatcactgagcagagccagctatttactgaactacagtgtgggaagtggtgggagggtgagtcagatcagcccacagaagctatttaaatttcaggtttcaagcccacctccccaaaaccgttttatgtgttttttcttctgcccaggcaccatatttttatatctatttttgacatttgggcggcctatgtagttcacagtgtaaaactctctgttttactttctttatgttattgctagtgattattgcttgtagtcccacccccttccccacattagccttagtattctatattattcagcaagcttgttcacaactctcaaatatagtctatcagaatttttatctttacctctacattccactattcggaagtatatagtaaaatcgtatgaagacagattttgtctttttcttgcctgtttacactctatcttacagaggtttcaaacaaaccatctttgtttgaaacatcgcaggataatgatacttattgaaatctacatcctgcccaagatatatgccagtcaatttcctttctcctattagtgcaaatggctacctacttaaaagctgctgactatagtttgtcatcaattacttgttaattacagatatggttttcatttttttttctcaatttttcattatgttatttttggagactgtcttaggtggggagtgaattataaatatttttatttcaccacctttaactgagtcaccatatgttatttgcacttccaatagaccagggattgaccagagtatcttttactgatatgaccaccagagctacatggcttttaccttctgtatatcagatgtcactggaatcaagcattaaacctagattaaatctggattaaaccagctgtatggcaccttagaaaattgagaaggactaggaagctgatagaaagaactcctgtataaaaaataaattctttttacattttccttggtagtatttctgcaagcttctttagtttctataggggaatcccagagttttcctctgagattgcttccctttcctttgtattttcatttttccctcttgggctttacttttcagtcgtgtatttctatcccaatgttaatttattacactgtttatattttcctgtccttcaattcatcagtagattagtgaagtacttattcctttaattataagtataaacgtttttaatttctttttggataacgatacatttaatggaaaatttttaaatgctatggtttcttaatagcttttctctaccactaattacttccgtt

SEQ ID NO: 87627 - DNA, 705 bp, Homo sapiens
cttgcaagaagcaagtgggaatcactaggccttagtacttgtaggtgggcgatgaagccacaaacacagtctgccctcagctaggaccaagcaggcagcaggcagctgacctgtgagaaaacagccacagcctggacaacagaccgcaggcagaaggcccagcaccatcgcgccagctccctccacagccccagccttcaaaggagcattgtcatgggaggcaagataccagttctgtgttaaaccctggacaccactgaagggaaaggcattgaaggagttaacactttttagttaagggttttgtattcattcagataggaggtttggctttgctgctgggacagtcctagagtaagagaagttttcccagttctctccagaggataggacactgcacacctcattttgttttgactacaaaaagccagtgcaattgcatgcagaaatcagtcaacaggatgaccaagcagaggcaaaaggagagaacacccagcccagcgctagttggaagctggcagtcagcacatggggctcgcaccccagtcagcagcttcttagctgtttaaacaaagagtctttttttttagaaatgaacaaacaaaaacccctccctatttgaaggcaagagtaagctcagttgaagttgaataaagccagtgtccaggttccccatgatcctggtggcaggttacctgaattacc

SEQ ID NO: 87628 - DNA, 463 bp, Homo sapiens
  misc_feature (350)..(350): n is a, c, g, or t
  misc_feature (445)..(445): n is a, c, g, or t
aacttagaatccctggctaccatttcaaaattgtaattgtaaatttggtacaagagggttttctaaaaagattaatgcatacagattttttttgttctacttcctgtggttacattcctaagaaaaactgctagaatatttgccagtgacttggacctgggttttatgacctggcagaatgtcctttaaggggccctaagcaatgctgtcaggactgagctgagtaagcccctggggttagggatgctgaggacccctggggtgccctggcttggctggcacaggaaggcaggagagggagtgggtttcagggaggatgggctcctggcctgtgcatctttgcaagggtnagatttgctaatcttacatcacagatgcctctccatgtgtgagtctatgttagctgtactctcaagcaatgagataaactgccccctccctggangcccggtgactgtcagca

SEQ ID NO: 87629 - DNA, 388 bp, Homo sapiens
cctaagatgcctggcacaatcaaagacctttggtggcttccagcatttataaggcagagtccaaacacacacttaagaatgacttactcctctggcggaccccaccattccctcaccccgctttggctctgtcctctcgtggagctgcccctgcccctaaacactgcctcctctctaccaacccggaccatatttcccctcctcccctcaccaggtccagcagtacccaccacgtttgtggacatctccccaaggagctctcacgtatcagaagcaaggagttagccttcagccccacctcttgtgcttaggtctacagtgagtgtccagtgatgcttcctaccgactgctggggtgcacaagagtgaggccagcagatcccagcgaa

SEQ ID NO: 87630 - DNA, 1098 bp, Homo sapiens
catggtggcgggtgtctgtaatcccagctacttgggaggctgagacagaagaatcggctgaacccgggaggcagaggttgcagtgagctgagattgcgccattgcgccccagcctgagcgacaagagcaaaactccgtctccaaaaaaaaaagggaattattacccttaatcaagtatttattacctgaactaccaaaacgtgcagtgtaaatatacagagaacatgatttaaggttgaaaatgaggtgctcaaatagaaatgtttaaaaggtctttcacaaaaggctggtaaaatacctattcgttaccttttttatcttaaaattgtaatctaaaaagtattggtagttttaattttaaaatttctgagtattttgaaaactatttttaaagagtacataagactgtaaaattgtgattcagttaaacatttgagggcattcttgtctaggaatatggtagagataccatttgcctttgtgagagcagtgtgtttatacttgtttatgaaaaaattctacagaagttttagtgttgaaagagtccctttctgaaacccaagtgtcattagatagtttagttcatttgtatatgggcacattaactggtctgtgatgatcttaacactccttaaatagaccatctcagattaatcacatctgaaattaaggataagattaatatgcagggttttggtttacagttttgtacacttaacctttctgagtaattgttaaagtgcctcatcctaagtattgctgaccttttcctatttatacttgatagtttgaaaacccagtgaaacaaatttcgtatttgtaaaggattggacatcagatttatattgtctatgtgactcttctataacaattagttgcagtatgcaagtattacataattcaaattgtaaatagtgaaaaatgaacgtttataggtaactataacgtttcacttaatgggaaatcttactattataaatgtgcataattggcatttaaaatatcaaactgaaatgctgttttctcctaaaacagtatatatatatacacacatatgtatatgtaacatttatatataacactgaattttccagatga

SEQ ID NO: 87631 - DNA, 317 bp, Homo sapiens
aaactacctcaacatataaaaggcattagtgaaaaattaacaacaaacatcatctccattggagaatgacaaagcttttcatctaagatcaggaacaaggcatgaatgcccacttcgacaattcttttcaacacagtactgtaagttctagccagagcaattaggcaaaaaaagaaatgaaaggcccccaaactggaaacaaacaagtaaaattatctctgttcacagatggtaagatattttatgtagactattccaccaaaaaaaaacctactagagctaacaaatgaattctgccaacaggaggacacaaagtc

SEQ ID NO: 87632 - DNA, 299 bp, Homo sapiens
ggatggaggagaggatcccggtcgcgagcaccgatgtgaagcgagatgcatgagtcgtaaaataccaaagataatgaaaataaatggacagaaccttgagatcaggagaaaatccccctaaaaattactccagaaaaccatccccctgtgtgccccgccatcctctgtagcatttcccctggggtcttgtgtgctggtcagccttctaaaggggacctgctcacagacaatgtcctgaccccatttcacagtatttcagtgtataacacctatcatttattgagtctctattatattcc

SEQ ID NO: 87633 - DNA, 165 bp, Homo sapiens
tctgtccaggattattaccagctaaaccaagtaatggaggtctatgcctgatgaagaacacctgtaaaagctggaaaatgtggctgtcttctcaaatgggcagataccagcacaaagatacaaggattgtaaagactcagaatcatgatacttccagaagaaact

SEQ ID NO: 87634 - DNA, 421 bp, Homo sapiens
gcgtgagaaataggagtatctcctggattcgagtagtctgcgtgcaagtgatgggaagtggccgtcgtaaatcaaggtcggtgacagcactgataatttaaacattgcaggcattccaaaatgctgtgatttgcaacaccagttttaattaatgcctgcaacctggctgtgaaaattgggacctgtaatttgtgagttacaataactgctagtgtttattaacctagcaggtcaaattctggtttcatggtcgcatatatacatatatatcatcacctattaaacttcaagttgaaagccaactggagagggaaattatcacccacaggtaatgcatcatcattgaaaacagaggtgagagcagaatggaaggttttctccttcccctccatcctgcctcacttggttaaccccttcctct

SEQ ID NO: 87635 - DNA, 341 bp, Homo sapiens
atcatacacagttcttttctttttaaagcacaacattaaaacctttaaaaggcatttaagggtttggtcaagtgaatatgataaaacatacttgtctgtataaagagaaaatgaaattgtagtcactgttatgtactgacattagttacaacctagttttaattcttaaaacaattttgattagcaaagctaaaaaaaatggatgtttcagttaaatgttttaaagaggtacagatttttacaaggacataatataagttattgttctgtagaaatatcctattaaatattgtatgtccctccctctgtacactttgtaaagaaagtaaatacataaaaag

SEQ ID NO: 87636 - DNA, 766 bp, Homo sapiens
cattttcagtgctctgcctcagtggggagcaggggtggggcaacacaaagacccaaataggctgctgggtaatcctagggaatgtacaaggatgtacaaggccccagagctgagtctaccctacacagccatgaggcaaaaagtgaattaggaacaagtatgctctatagcccaggtactctggaagttttatagcacaggtgaccttggcccctgtcaagtataggcccagggcacctggagaacacttaagtctgagggtgagtggtccctcctgcttctctgtggttattgtttcatgtagccagcttttctatgtgtatgggtagcatgaccattcatctagcctccctccatctctatcatccgtgccacccgaaacaggtattgctactcccagggacagaggtcctcagaggggcagcctgggacgtttggcctacattccttttccgaaggctggggagtttggatgtgggaattggactcttgctcaaataacgggtaccagtgtaaatagatgtctctcaccctctgttttgttactttttattatggaaaattttaacatacaaatgagaggagagtgtaatgacttacacatacaatatatgttcatttcatggttcatcttgtttcgtctatatcccctttcctcccccttcttctcccagaatgttttgaagcaaatctcagacatcttatcaccttattatttcatccaaaagtattttagtatccctgaaagatacagctcttcaaaaaa

SEQ ID NO: 87637 - DNA, 629 bp, Homo sapiens
aatgtacatgaaaatgaaaacaattgaaaaacctgtgagtggcagtaaaagttgtattggaagttttataacctaatatttgtgcatatattgtaatactaggaagaaaaaatatagaacccaaggaactaaaacaagctgaaatgaattgtgggaggaaggaggtagtattattttaaaaggcagaaataattgaaagaaaaaaactggatctgaatccaaaattgatatttgatggaagagaaaaaaaatgagacaaagtttagtgattccagaggtgaaataaggatgacaaataaacaatattgtatatgagaaattgaaatggctatatatgtaaacttaaaagaactgtgtcatttggggtaatgaaaatgtggcatgggtaaaggttgtacaattttgtttatatactacaggtcactcaactatacactttaaaagggtgaatattatgctgtgtgaatttgatctcaatttaaaaacttaaggctgggtgcagtggctcatgcctgtaattccagcactttgggaggctgaggtaggagaatggcttgaggccaggagttcaagaccagtctaggtaacataatgagatccccctcccctcatctctacagaaaaaaaaa

SEQ ID NO: 87638 - DNA, 490 bp, Homo sapiens
  misc_feature (9)..(9): n is a, c, g, or t
  misc_feature (18)..(18): n is a, c, g, or t
tgaaaatcnggaaaaagnctgtgatttttaataagttgacgacatcagaattaactggaggtgtaaaatcttaatagacctccctccagaataaacttatttaaaaaaataagactggccaggccatgtgtgtcacgcctgtaatcaggtgatccacctgcctcagcctcccaaagtgctgggattacaggcatgagcgattgcacctggctttattttttgttgagacggagtttcgctcttgttgcctaggctggaattgcaccactgcacactccagactgggtgacagagcgagactctgtcttacaaaataaaaaataaacggttaccaatctgaaaccctgaaaatatgatgagtagtagaaagcacagctgtcaaaaaagcaggaagagattataaaattttttctaatatttccccccaaaatgcagaaaacatactggcaacattatttgaccagaggaagcagtacaataggataaccat

SEQ ID NO: 87639 - DNA, 419 bp, Homo sapiens
  misc_feature (9)..(9): n is a, c, g, or t
  misc_feature (18)..(18): n is a, c, g, or t
tgaaaatcnggaaaaagnctgtgatttttaataagttgacgacatcagaattaactggaggtgtaaaatcttaatagacctccctccagaataaacttatttaaaaaaataagactggccaggccatgtgtgtcacgcctgtaatcaggtgatccacctgcctcagcctcccaaagtgctgggattacaggcatgagcgattgcacctggctttattttttgttgagactctgtcttacaaaataaaaaataaacggttaccaatctgaaaccctgaaaatatgatgagtagtagaaagcacagctgtcaaaaaagcaggaagagattataaaattttttctaatatttccccccaaaatgcagaaaacatactggcaacattatttgaccagaggaagcagtacaataggataaccat

SEQ ID NO: 87640 - DNA, 494 bp, Homo sapiens
ggattgcttgaacctgggagttggaggttatagtgagctgagattgcaccactgcacactccagactgggtgacagagcgagactctgtcttacaaaataaaaaataaacggttaccaatctgaaaccctgaaaatatgatgagtagtagaaagcacagctgtcaaaaaagcaggaagagattataaaattttttctaatatttccccccaaaatgcagaaaacatactggcaacattatttgaccagaggaagcagtacaataggataaccatcaaatatctgattattaattcaatattccctcttaattaacatgggttaaggaataaatccctaatatatacattatttaaatgtacatgaaaatgaaaacaattgaaaaacctgtgagtggcagtaaaagttgtattggaagttttataacctaatatttgtgcatatattgtaatactaggaagaaaaaatatagaacccaaggaactaaaacaagct

SEQ ID NO: 87641 - DNA, 393 bp, Homo sapiens
ctgtcacccaggcatgatctcggctcactggaacctccatcttccaggctcaagtaatcctcctgcctcagcctcctgagtagctgggatcaaacgtgcacaccaccatgcctgtgtaatttttatatttttggtagagacagggtttcaccatgttgcccaggctggtcttgaattcctgggttcaaatgatccacccacctcggcctcccaaagtgctgggattacaagcgtgagccactgtgcctggccaaacactttcaagttgttccaaacaaaaaccaaggctacatttcatgctgcaattacacaaccatctttgaaaacaggcaggatagcagggaaatcattgattgagaattactcaatttcctagactctcaggcaagtttg

SEQ ID NO: 87642 - DNA, 193 bp, Homo sapiens
gctcctgtcctcctgttcacctctggatttggtagttcctttagacttggtcctgatcctttttctcttctcgtgctacttttttttccatggctttgaatatatacttatgactccatatttagcaccaactcaatcctctcttctcaacctcagatccaaatacccaaatgctttcaaggcattcttactt

SEQ ID NO: 87643 - DNA, 486 bp, Homo sapiens
gacaggagcccgcctcccctcctgaggtgctgtagctggaaattgcttgtgcaacccgatgacaacttttctatatttagcagaaaaagtggtggcaaggatctgtccagctcaattttttttacagtttcaatgttcgaaatctctcagacaatctcctgaaaggcacattggccttgacagtatctgagcggaaggaaattttccccatctcacagggctgtccactggaagccgggacgtggagatccactgtagagcagagacttgacatgccaaacgctcctcccacaccttgctctacaccccacgaaacggggagacactggtcccgttgaagcttcgatggcttttaagtgttattctaagaagggaaaataagcatgaaagattcaagggggaaatggactatctcttaattgtttatgcctttaattgacatgtatggcgcttggtttttatttcttttcaatgtggcatgcaaaa

SEQ ID NO: 87644 - DNA, 284 bp, Homo sapiens
gagaaaggaaccaagaattgagacttaaccctctacaatttaacgaaaaggttaggaagaaaaggagaaccagcaaaagagaaagagaaggaccaatcagtgaagtaggaggaaacccaaaagaatgggtagtatgggccacaaataaagagtgtgcatcaatgagaataaagcgactggttgtgtcaagtgtttctgatgggtaataaaaggggaactgagaattgaccattgcattcaacaccatggagaccactggtggtgttgacaagcatagtttcagt

SEQ ID NO: 87645 - DNA, 149 bp, Homo sapiens
gggatagccatcaccttaaatatttatcttttctttatgctaggaacattctaattattctagcaaatgtttacttaatgtgttctcattacttctctcaggtagatttctggaataatggggatctaggtttaggttgggcttaagtt

SEQ ID NO: 87646 - DNA, 605 bp, Homo sapiens
acattgcaatgctacccaaaccttagtgacttaggaaaaaataaaacttgaaagtaagattcctgttaaggctttaaactgatgattatcattcatgtatttttttttcctctctccttacttccctggctatttattcaagacattctattctacactaaacatttaatttgaaacatgtggttcttggaaaatatgccgtcttccatgtttataattaatgctgacataattaatgacctcaaaattcaagaaagccttttacttttgagcatatccatgccatctttaaatacgcacactgtactctctggtatactatgctgctcaaatgtttttatccggtcagtaattagtttaatttggctttacaaaaaaattcacctttgaagtcatatattaacattaaaaaccatactacttcaaatgtacaatgcctatcatttttgcatcacacatgtgaaatacatgaactgacctcacctattcctttttcaaaataaccaccacttcaactgtgtaacactcagttgaaacaacagcaattcaaataatcaagaacatttcttgggaaagggagagttggggcacagatcttatgaaag

SEQ ID NO: 87647 - DNA, 687 bp, Homo sapiens
gtggtccagtaaaagaatgcattctcctcagctatctggagaagttcaagattgtctttgataaaagaatatttaccaggtgtctgaaaataccaagctggagaattagtctatggtgattaaaaactctcaaagcatgtcttaccaactggagaatttttcctatgtcaaccaaagggacctcccagtgccaagtgtataagtgtgtctggaattggtgggttcttggtctcactgacttcaagaatgaagctgcagaccctcctggcggaattctccacgagttttgagcagcctcggttttcccaccacctccaaatcatggaagacacagggcagagcccccggagccatggccagcccttcccgcagctccgaagccactggcaagccccgaggcagggatggccggcccaggagggaggaggacgacgtccctcccgaagagaagaggctgcggctcttgctggaggggggaagcgcacagccccaggacggcgaggacggggaggacgcgccgcggccgggcagggtggagaccggcacccagacaggtggcgacggcagaggatgatgttttgttctggggtgcatcacaagagacaaggttcctggccgggcatggtggctcaagccaataatcccagcactttgagaggccgaagggggacgatcgcttgagcccag

SEQ ID NO: 87648 - DNA, 847 bp, Homo sapiens
tccattcgaatcatcttattacttggcagttctgcatggcctacactccacagcaagctcaggaaaaggtgagatcagtcccattgaagacctcaagttctctgcataaaaaggagaggggccaagaaagtgggtgagagtagataccttttaccacaggtaggaatatcagtagaaaaggtaaggcagtactggagaaaatagctgtatattctgtcttccctcagctccaccccttgctttgctggtctttatatgtgctaatgtttgaaatttgcctataagtaataataatacttataaagtccctttaagaactatatccagagatatctgatgtctttcttctcaaggtggtcatcctcagtctcaaccctggctacacgttagaatgatccgcaaagcttttaaaagcatggatgcagggtctcatcacaagtcaattaacttagagctgagcagacagcgggcagccatcactactgttctcaagagtccccaggtcattctatttttgcagtcagtgcctttaagagcagttgtgatgtcccacattctctggtgttccccaaaaaggcactgctcttccccacaagtgctgggaagcatgaaatgtgagggggagactatttttcatgggtaggaacaagtttttctgtctcagattctatcttgttgacatgtgtgatgctgagataaggagaccactctttctggtggacgcccttaatgccttcgggagtttacatctcattcttcaaaatgtaccactcggcctataaggaaagccaggattgtaaatgcatttgctcacgtggaaataacctacctagcccatttgcagatt

SEQ ID NO: 87649 - DNA, 317 bp, Homo sapiens
aaaggaaatgagaaaggcaggagtcatggagcaaatgggtggcaggtggaaggatgatggagaaaagcaacagggaaggagagctatgtctgattcttggctaagatctaaatatgccatatgaatataactgccaggctctcaaaaggcacatatggattgcttttgagaatgaaagtccagcatgtggtttggagccttctgaaccaaattaacatggttgaggcataacttcagggacccttcatcatgactgagattagagctgaggacttggtgtgttcttaaatctagctgctgcccctttctctctccct

SEQ ID NO: 87650 - DNA, 349 bp, Homo sapiens
ggaccttcctctctgcattcttgctatttgttggtgtggcaagtcagtcagtgtgcgctgaggggtccttctcagcttcccacgttgcgtctttgtgcctgttgctggtacctcaggacagactcccagtcccggtccgtcatgatttccattctgcattttgatgtagtcatgtctcatgtctcagttggctagagtatattttgaagtaattcttttttggagaacagtagatggtggtacatttttctgagtcttccatacctgagaatagcctgctgtttccttgacacataagaaagctcctttgcctggtaggtgaagatggaggtgcgggaggagggggtga

SEQ ID NO: 87651 - DNA, 543 bp, Homo sapiens
cctccctctgggagcccccactgagtgcctctgaggacctcattccttggaccctggtgtctagggcaccccaagccccagcagagctcctggtactcctacaggctccttgcgccaacctccacatagcttcctttctcaggggctgcctgacaaagtatgtacttaactcttctgtttattccttgccctccttccgtccataacctctttagaatgtcagctctggccaggcgcagtggctcacgcccgtaatcccagcactttgggaggctgagatgggcagatcacctgaggtctcctaggagtttgagaccagcctgcgccaatgtggtgaaaccgtgtctctactaaaaattaaaaaaaattagcctggcttggtggcgcacgcctgtagtcccagctactcgggaggttgaggcaggggaattactggaacccaggagggggaggttgcaatgagccaagaccacaccactgcactccagcctgggtgacagggcaagactctgtctcaaaaacaaacaaacaaacaaacaaaaa

SEQ ID NO: 87652 - DNA, 404 bp, Homo sapiens
gtgtgtgccttgtcttttcacatagattgtaagccccttgatgataaggattctatatcttttccctatagttccaggcatgttattgaattgagtaacagtttgcctgaaatgtattaacctgggatggataaaatgggctagttttgagaaatataattgtcaaaaacattttgatttgacagatgaagcagaagtgatgtcttgggttttgaacttttgggagaatggtggtgcccgtgcgttttctagaaattagctgttcatgcacataggtttggatccccaaacaggagaattggatttcaccgttacatttaatatgatgttttagcttttcctaaaactgccttattgattatcttatagtaatcttgaagataatgtatttttaactatgagca

SEQ ID NO: 87653 - DNA, 437 bp, Homo sapiens
tctgtatcaaaagtagaggctgtgaattggttatggtactcttgcctgagtgtggcctcagaatccaacccatataccacactctagcagcagcaaaatccatcagagatgcctgcaagcgaaactaccggccatgtgtgggccctggagaaacccctatccacatcctatttagagctggcagagtggagctataaccaagcctggaggcaggataggaaaagaaaagtgaattcagggaaaatcacttatttacaaatccatctgcttaatcaacagtattgactctatgacatgccaggctcaagcctgatgcagatgtacatggtgatcataaaaagacctctgcccatgcctggctacaggttaccaacatacaattacaataccaccagctccctcttctatgacactagaaggctctggggggccacaaa

SEQ ID NO: 87654 - DNA, 535 bp, Homo sapiens
aaagtgcaggataaatgtttcaccaataggactagcctataccaagggcagtgcccagacaaagtgacataaactaagcccagaaagatgaagaggacttagggggaagaagggttgtccagtcaagggaatttaaaattgttctaagtgcaaagttaagccatcggaaggttgtacactggggaaggacatcagcccagctgcaatatggggatggatgagaagggacagtagccaataaggaatgaccagtgtccagatgggagaaaaaggagtacttggactagggcctactttttattttatctttttaatctcatgacagatgacaaggcctgctttttaaatgccagcattccccagaaagacagcccagttctgttagtagtggcgttcactagtatccaggtctttgccatgaatgtctcatccagcagtcttaagccaggcctctgcaagaagatgaggtcttccctctcatcgggttagaaatagaaatccttagcaggaacacatttcagatactaaattacac

SEQ ID NO: 87655 - DNA, 322 bp, Homo sapiens
ccttagctttgcaaagtggctgcagtaaaacctgccatgcttggattggcacggctcaaagctaactgtatttgaaacttcacatttcaaatctcgaagaagacttctgtattaaatttagagttttttatcctcaaaggagttgtacattttatttgtgtcaaaatttacagagcactgtcttaggcgctttctagcagttgctttaaagggttgtcagctccaggcatttcctctgcccacatacaggtgttgtcacatgttcccaggtgaggagttagcaagggtttgctgtagctcttggtttaaatgttggcaaaaa

SEQ ID NO: 87656 - DNA, 296 bp, Homo sapiens
ctttacgtatactttctggttatactgcaacataaatattttctagttgctgggccacaccgttgacattatttcctcatttttggacactccggagcagacttgtacattttcagaaaactgtcaataacattttttgccactttgcaccattaagtgttatctttgaatcaggtgttggccaaatcgtgtagactgttccgttttgttcatggttactatggaaactgtgcagtcataatgttttgaggagactagcaggaaatttaagagtgtacaataaaagttaacttatt

SEQ ID NO: 87657 - DNA, 488 bp, Homo sapiens
aaggactgccaacacgcatctccatttctgcgaagtgactttaaaaccacaagatttaaaagaccagggcattacataatggtaagggttccattcaacaagatctaactattctaaatatatatatatccccaacaggaacaccccagattcataaagcacagttcttagagaccctaatagaaacttaagactcccacacaataatagtgggagactttaacaaccccactgacaatattagatcattgagaccgaaaattaacaaagatactcaggaactgaactcagcactggatcaaatatatacacaacactggatcacagaatatacattcttctcattgccagattgcggtgtttgaagcacctgaaatcttgctactccaaatggagaaggggtgtaagtataaaatacaaaccatatcttgaagactcaacaccaaataaatgcagatcatctcattatttttgtattagttatatag

SEQ ID NO: 87658 - DNA, 164 bp, Homo sapiens
gatctgaaccaggacacgtttgaagtgaaggaggtgtgattagtagttaagctgggacaacacgtctaaaatggaccattctgtgcaaatcaggacatatctgtatgtaatgatttccaccatcaacctgtatacagcaagtaaaagaaactgctgtttaaaac

SEQ ID NO: 87659 - DNA, 406 bp, Homo sapiens
tcggcttccctacttctgaggttttgggacttggactgatccaccattggcttccgtgcttctcaacctgcagacagcctattgtgggactttaccttgtgatcgtgtgactcaattctccttaataaactccctttcacatatacatatatcctattagttctgtccctctagagaaccccgactaatacaggtatcttttgactctatggcaaaaaaataagctcaaaactaccaataataggaaaaaaatccggggggggggggtctcttttagagaatgtaatgtttcccatcacagtggtttcttaaaaggatgttctccacactcacggggtgtcttttggcataattgttatacatttggcatggacagcacacaggctggtgtcttcaaaaaggacaa

SEQ ID NO: 87660 - DNA, 244 bp, Homo sapiens
gtcatctcagaccaaagtggaataaaaccgtaaattaactccaaaaggaaccctcaaacctatataaatatatgaaaattaaataaactgctgttgaatgatccttgagtcaacagtgaaatcaagatggaaatttaaaaattatttgcacagaacagtaatagtgacacaacttaccaaaacctctgggatacagcaaaaacgttgctaagaagaaaggccatagcattaaatgcctacatca

SEQ ID NO: 87661 - DNA, 1055 bp, Homo sapiens
  misc_feature (69)..(69): n is a, c, g, or t
aggcgcgcagcggagggaggagtaataatacagacagtgtcggagcgcgtggagcttgtgatcaaagangcaggcgccgaaccacggggaaaaatatgttcaacaaaactaattcctgtagaccaaaataaggagcaaacgcagagtccatcaacatcccgcccgcaatccatttccaaggtgagagtgttaccccgtcataggaatgtgtcatcatttgtttaaccaaataactattgttggatagttaggggatttccagctttctgttgcatttttgaaagtttataaggttattaaaatgagaataatgcaaagaatatccttgtagatatctttttggcacatctctgaatatttctagaaagagaacaagatgaaggttaggaatgttgcctcctttagaaagggtgtggaattatccttaaaaataaaccaacatgcaaaccaatagataactttatcagtttggcaaaacaacattggtcatgcaaaatggttttctcatcgttttgatttgaattcatctcatcacgaataagattgagtatcttccacttttcaaccttctgtagatgttcttggtatgtgaaggcgattagtccttttcaatcatgttagttgcatgttatcttcctagtacatggccttctttataattttgtttttaacacaaagaagttttttgtttgcttgtaggcaaatctccttttcccgtataatttcttttgcttttatgcttcgagacttcttccttatcctgtgataggttaaatatccacattaattttcttctaatttttacttaacttttttttttttttccccttgagacagagtctcactctgtcacccaggctggagtaccatggcgcaatcttggttcactgcaacctccaccgcctaggttcaagcgattcttctgcctcagctactcaggaggttgagacaggagaatcccttgaacctgggaggtggagtttgcagtgagctgagatcgcgccactgcactccagcctgggcaatagagcaagcctctgtctcaaaccaacaac

SEQ ID NO: 87662 - DNA, 555 bp, Homo sapiens
caggtccctccgcagcgggttctcagttgctcgctgggcagacccaggtcgcgctcccactgccgagcccgcgagatgctccccagagctgcctggagcttggtgctgaggaaaggtggaggtggaagacgagggatgcacagctcagaaggcaccacccgtggtggggggaagatgtccccctacaccaactgctatgcccagcgctactaccccatgccagaagagcccttctgcacagaactcaacgctgaggagcaggccctgaaggagaaggagaagggaagctggacccagctgacccacgccgaaaaggtggccttatttcctccaaagccgatcaccttgacggacgagcggaaagcccagcagctgcagcgcatgctggacatgaaggtgaatcctgtgcagggcctggcctcccgctgggactatgagaagaagcagtggaagaagtgacttgcatccccagctgtctccctgaggctccgccctggctgggagcctctggcggcccctcccctcccctgcccttaaccccagtaaagctccaaa

SEQ ID NO: 87663 - DNA, 687 bp, Homo sapiens
caggtccctccgcagcgggttctcagttgctcgctgggcagacccaggtcgcgctcccactgccgagcccgcgagatgctccccagagctgcctggagcttggtgctgaggaaaggtggaggtggaagacgagggatgcacagctcagaaggcaccacccgtggtggggggaagatgtccccctacaccaactgctatgcccagcgctactaccccatgccagaagagcccttctgcacagaactcaacgctgaggagcaggccctgaaggagaaggagaagggaagctggacccagctgacccacgccgaaaaggtggccttgtaccggctccagttcaatgagacctttgcggagatgaaccgtcgctccaatgagtggaagacagtgatgggttgtgtcttcttcttcattggattcgcagctctggtgatttggtggcagcgggtctacgtatttcctccaaagccgatcaccttgacggacgagcggaaagcccagcagctgcagcgcatgctggacatgaaggtgaatcctgtgcagggcctggcctcccgctgggactatgagaagaagcagtggaagaagtgacttgcatccccagctgtctccctgaggctccgccctggctgggagcctctggcggcccctcccctcccctgcccttaaccccagtaaagctccaaa

SEQ ID NO: 87664 - DNA, 592 bp, Homo sapiens
  misc_feature (33)..(33): n is a, c, g, or t
cgactgtggagggccctggaattgagtgatgtnggggagatggcacagctcagaaggcaccacccgtggtggggggaagatgtccccctacaccaactgctatgcccagcgctactaccccatgccagaagagcccttctgcacagaactcaacgctgaggagcaggccctgaaggagaaggagaagggaagctggacccagctgacccacgccgaaaaggtggccttgtaccggctccagttcaatgagacctttgcggagatgaaccgtcgctccaatgagtggaagacagtgatgggttgtgtcttcttcttcattggattcgcagctctggtgatttggtggcagcgggtctacgtatttcctccaaagccgatcaccttgacggacgagcggaaagcccagcagctgcagcgcatgctggacatgaaggtgaatcctgtgcagggcctggcctcccgctgggactatgagaagaagcagtggaagaagtgacttgcatccccagctgtctccctgaggctccgccctggctgggagcctctggcggcccctcccctcccctgcccttaaccccagtaaagctccaaa

SEQ ID NO: 87665 - DNA, 572 bp, Homo sapiens
ttttactgctaagttatgtgttctcttactgttaagtttactggtaagttctttgttaacccaaaagccttattgtttttctaacccctcgttttgctttctaatatgaatatattatgaaccattaggctgaacaatctgtatttttgtaattcagtttttaaaggcatctttatttttgtctcccactcttaagtttatgaatctgtctctattgtttcaaaattaatttgggtcttcatcatttctcacctatgctatttcactatctttccagctgttctttctactttataataccctccatacaaaacccactgtgccatcggaaggatcttttaaaatatagctctagccacgtcactctccctgctttaaatccttcagtgacttctcattgctataggattaaattcgcagtcacctcaacctatgttttcagccagcctgctttcttcactccttcaaaacatattatgtagactttttcctccttcgggctagtcaaaggactggaaggaacaaatttgtctcacccaaattggaaaagaaatttaaaagtaaaaaaaaaa

SEQ ID NO: 87666 - DNA, 5491 bp, Homo sapiens
  misc_feature (435)..(435): n is a, c, g, or t
  misc_feature (509)..(509): n is a, c, g, or t
  misc_feature (1126)..(1126): n is a, c, g, or t
  misc_feature (1224)..(1224): n is a, c, g, or t
  misc_feature (1879)..(1879): n is a, c, g, or t
  misc_feature (1938)..(1938): n is a, c, g, or t
  misc_feature (1951)..(1951): n is a, c, g, or t
  misc_feature (2819)..(2819): n is a, c, g, or t
  misc_feature (4120)..(4120): n is a, c, g, or t
  misc_feature (4179)..(4179): n is a, c, g, or t
gcacagccatctgtggtgactaggaggtccccaagccgaggacacccatcaaggacctttagagtggcctcagaccaaggtcaccaatcaatggctaactgggggtcccaaaacctagcccagccatctatggacagtggggagccctcaagcctagcccagccatctcaagcccctggggtaacctcaaatctggcccagccatctcaagcctttggggtgtctccaagtccagactacccatctcagtctgttggggagtacccaatgctggctcagccatttcagcccactgaggtgtccccaagtccaacctacccatctcaggccattagggagtacccaaccctggcacagccatttcagcccactgaggtatctccaagcccagcccacccatatcagctcactgaggtgtccccaagtgcagcctantcatatcagcccactgaggtgtccccaaacccaggctacctatctatggccattgagatgtccccaagcccagnatacccatctgtggccactgaggtgtccccaagcccaacctacccatatcagcccactgagatatccccaagctcaggctacctatctgtggccactgaggtgtccccaagcccaggctacccatctcagctcactgaggtgtccccaagctcaggctacctatctgtggccactgaagtgtccccaagcccagactactcatctcagcctactgagatgtccccaagctcaggctacctatctatggccactgaggtgtccccaagcccaggctacccatttcagcccactgaggtgtccccaagcccagactatccatgtgtggccactggggagtcccctagccttgcccagccatctcagcccactgaggtgtccccaagctcagcctacccatctgtggtcactggggagtctccaagcctggcccagtcatatcagcgcactgaggtgttcccaagcccagcctacccatttatggccactgaggtgtccccaagcccaggcgacccatctgtggtcactggggagtccccaagcccagcctacccatctcagcccactggggagtctccaagcctgacccagccatctctgaccatcagagtgtccccangcctagccatgtcatctcagactattggagtgtccccaagcctagccatgccatctcagaccattggagtgtccccaagcctagccatgccatttcanaccattggagtgtccccaaccctagctcacccatctatggccattcgggagtctccaagcctggcccagcctcctcagtccactggggaatccccaagcttgacctggccatctcaggccactggggtgtccccaagtgtagcccaccaatctgtggccagtagggtttcctcaagcctagcccagccatctcaagccagtgggatgtcccctagacaagattacccaccagtggcctccagggtgtccccaaaccaagctcacgcatctataaccagcaggatgtcccctagcagagctcatgcatctatgacctgtatggtgtccccaagccaggttcatcgatctatgcccagtgaggtgtccccaagccttgcccagctatctcaggccaccactgcagtgcccttaagaccagctcatcaacctatggcctgtggtgtatccccaagcctagcccagccgtctcaagccacagggatgtcttcaaggctagcccaccaacctatgacctgtgtggtgtccttaagcccagcccagccatctcaagccattggtgtgtccccaagcctagcccacccatcaggaccccatgggttgtctccaagtctagctcacccatatgtggccagtggggcgggctccagcctagccnacccatctcagaccactgcagtatccccaaggcaagcccaaccatctgtggcctccagnccaggcaagacanattcatcctgtaccctagcctccagcctagccgagccagctatagcccccagcctattcccaccatctgtggcccacacggaagccctaagcctggctcagtcacccccggacactaggttggccccaagccgatcccagccatctgtggtcagtggtacatgtcatggcctcaatgagccatgctggggctctaggctggattcaaatctgcagtgttcaagggtggactcagtagccccgtgtctgtgtcacccatcagcgtttgtttcagttagcctgggtggaccatatccctctgtggctggaaatatggaccagggtctgaaccagccatccctgggtactggggtgaacctatgtgaagaacctctgatggttagtgagatggtatccagccccccggacttcaagttcaacgacgtgtcccttgggttccatcatccacccagggttggtgggaggcatgtgtgtccaccctctgtggttagtgtttcaacaccaaatctctctcatgctgatgaggaggcctgttgtgtaggccagtgaatcacgcctctgttcaggggtgtggctgtaagccatccccaggagcctttggctgatgctatgttccccagtgggtctcaggggaccacatctcctggcctagctgggaatctcccctggagaaccatagcaactggcatgggccaaagtcaatgtcaggtggccaatggcatggcttcccttgcatcccaggtcttagaggcaggtggccctttgacacatccctctggaaccacagggatggcccccagcccctctctggcttcagtgcccaacagactggccgtgactcagtctaatctttccctgaacagcatggnccccagcagctcccagatcagtgtggttattccaaaaaacatagactgctggcacccttctgaggcatccatggtcccacccagttaccagcagagagatgtgattccgcaggactctctgaagagcagggctggtcgtggtgcggcaggaggttttgtagccagtagaatgagcacgggcgcagtcccaggcactctgcctggtggcataacctccagccttcccccgggctccaccatccgaggcatgggtcacagccttcccgcaggctctgtgtccagttgggtggctcccagtctgatggcagacagaaagaagccaagtctatctgtaagaccctccgctagcttagctgctccaaacttgctcccaggttcagtagtgagtcgggtgagcccagttgtccccctggttctgtgccaatgatgggggcctctagtgtggctcagagctgctccaaggggcccatggtgattgacatcactgcccctccttacctcaaagcctggctggggagaggtctttagcccccttgcagatgccccacaccaccagtctggctccaggtcactcctcagccccggcagctagtggcacagtgaggagtctacaccgagtgcccacggttctatcaagagccttacaattgagccaagatgctaggataatgccatctggggtcacaggggaccaagccaagctaggagaattggatgaggctgtgttccaagtgtcaggatcaagtggatccaatgacctattcagcaaagccagggtcactggtgcaacccagtggatgtactccagtcctctgggagctgatgggggccatgatcataggtccctgtctgagaaagggtctcttccccaagggaggtggctcccagccatgctagtggcatggtccctgtccctttccaggccccgggtttagccactaagtccccctcagtttatcaacaggggtctgtcgttcacgtcataccccaaaatcactctcagggtacagtggcttctaatgtagtctcaggatcaccccagctggcccgtggcagtactgaggctttcagattgctttcagtgtctgtgggcaggatggggaatcctagtcttcttcagaggtcagggaccaccagcatggtctcacatgtgccactatatccgtcctcggctagaagggcattgtccagtcccttccagacagaagctgtccccaatccactccagaaaacagtgtctggaaacatggctccgagcagccgctgggacgccatgggccctaaaaattcctacagatccntgcatggtaggattgttccagaactgctagaaagttctgtggccagggttaggcccttncagtatgtgcaaagacaaccatcccaggcctcagcccgaagtggtgcaaaccccacccacaggccctctgcagaggtaaggcccgtcatccgcactggggagatgacacactcctcggtcattcctccgctggccccgggagttcggagggtgtctctaggctatgagtcttccccaagtggttccctgccacccctttttaaccaggagtcaccgtggagacggcaggactcctatagcccccagaatcctgccgttagtcacaaggcatccctgaactccactatactccagggccccgcggacgctggtgtggttggtggccaatcgtggaaccgcgcatgggagccagccaggggtgctgcgtcctgggacacctggcgcaacaaggcggtggtgcctcccaggcggtccggggagccaatggtgtccatgcaggctgcagaggagatccgcatcctcgcagtgatcactatccaggcgggcgtccgtggctacctggcgcgtcgcaggatccggctgtggcaccggggggccatggtcatccaagctacttggcgcggctaccgtgtgcggcggaacctggcacacctctgcagagccaccacgaccatccagtctgcctggcgcggctacagcacccgccgggaccaagcccggcactggcagatgctccaccccgtcacgtgggtggagctgggcagccgggccggggtcatgtctgaccgaagctggttccaggatggcagagccaggacagtatctgaccatcgctgcttccagtcctgccaggcacacgcttgcagcgtctgccactccctgagctccaggatcgggagcccgcccagcgtggtgatgctagtgggctccagccctcgcacctgtcatacctgtggacgcacacagcccacccgtgtggtgcagggcatgggccagggcactgagggccccggggcagtgtcttgggcctccgcctaccagctggctgccctgagtcccaggcagccgcatcgccaggacaaagcggccacagccatccagtccgcctggaggggctttaagatccgccagcagatgaggcagcagcaaatggcagcgaagatagttcaagccacctggcgaggccaccatacccggagctgtctgaagaacacagaggcgctcttgggaccagcagacccctcggccagctcacggcacatgcattggcctggcatctaggaccctggctccctgcagtggggacttcgtgggaggcactcatggctctctgggtctaatgaataaagtcctccacagcctaaaaaaaaaa

SEQ ID NO: 87667 - DNA, 3823 bp, Homo sapiens
  misc_feature (946)..(946): n is a, c, g, or t
ggctttgagtcacaaagctgctgcggcaccagggctccaagactggccgttcagactgctaggtttagcttcaggggcagcccagggcagtgttgctgcatattgcatggatgaaaggctgaaggctgcctcctcttgcaggctggcttctgagattgcaccttcttctcctgctactcctccaaatctatgacccttcaaggcagagctgacctgtccggtaatcaaggcaatgcagccggccgcctagctacagttcacgagccagttgtcacccagtgggcggtgcatcctccagcccccgctcaccccagtctcctggacaaaatggagaaagcgcctccacagccccagcacgagggcctcaagtccaaggagcatcttccgcaacagcctgccgaaggcaagacggcgtcccgccgcgtcccacgcctccgggctgtggtcgagagccaggccttcaagaacatcctggtagacgagatggacatgatgcacgcccgtgcagccacgctcatccaagccaactggaggggctattggctccggcagaagctgatttcccagatgatggcggccaaggccatccaggaggcctggcggcgcttcaacaagagacacatccttcactccagcaagtcgttggtaaagaaaacgagggcggaggagggggacataccttatcacgccccacagcaggtgcgcttccagcatccggaagagaaccgccttctgtccccgcccatcatggtgaacaaggagacccagttcccttcctgtgacaatctggtcctctgcagaccccagtcgtcccccctcctgcagcccccagcagctcagggtaccccagagccctgtgtgcagggtcctcatgctgccagagtccgggggctggccttcctgccacaccagacggtcaccatcagatttccctgcccagtgagtntggacgcaaaatgccagccatgcctgctgaccagaaccatcagaagcacctgcctcgtccacatagagggtgactcagtgaagaccaaacgtgtaagtgcccggaccaacaaagccagggctccggagacaccattgtccagaaggtatgaccaggcagttacgagaccatccagagcccaaacccagggccctgtgaaagcagagacccccaaagcccccttccagatatgtccagggcccatgatcaccaagactctactccagacatatccagtggtctccgtgaccctgccacagacatatccagcgtccacgatgaccaccaccccacccaagactagcccagttcccaaagtaacaataatcaagaccccagcccagatgtatccggggcccacagtgaccaaaactgcacctcacacatgccccatgcccacaatgaccaagatccaggtacaccccacagcctccagaactggcaccccacggcagacatgccctgcgaccatcacggcaaagaaccgacctcaggtttcccttctggcttccatcatgaagagcctgccccaggtatgcccggggcctgcgatggcaaagaccccaccccagatgcacccggtcaccaccccagccaaaaacccattgcaaacatgtctgtcagccacaatgtccaagacttcatcccagaggagcccagttggggtgaccaagccctcaccccagacccgcctgccagccatgataaccaagaccccagcccagttacgctcggtggccaccatcctcaagactctgtgtctggcctctccaacagtggcaaatgtcaaggctccaccccaagtggcggtagcagccggaactcccaacacctcaggctccatccatgagaacccacccaaggccaaggccaccgtgaatgtgaagcaggctgcaaaggtggtgaaagcctcatccccctcctatttggctgaggggaagatcaggtgcctggctcaaccacatccgggaactggggtccccagggctgcagctgagcttcctttggaagccgagaaaatcaagactggcacccagaaacaggcgaaaacagacatggcatttaagaccagtgtggcagtggaaatggctggggctccatcctggacaaaagttgctgaggaaggggacaagccacctcacgtgtatgtgcctgtagacatggctgtcaccctgccccggggacagctggctgccccactgaccaatgcctcatcccagagacatccaccctgcctgtcccagagaccactggccgccccgctgaccaaggcctcatctcagggacatctgcccactgagctgaccaagaccccatccctggcccatctggacacctgtctgagcaagatgcattcccagacacatctggccacaggtgccgtgaaggtccagtcccaagcgcctctagccacctgtctgaccaagacgcagtcccgggggcagccgatcacagacataaccacgtgcctcatcccagcgcaccaggctgctgatctcagcagcaacacccactcccaggtgctcctaacagggtccaaggtgtccaaccacgcctgccagcgcctcggtggcctcagcgccccaccctgggccaagccagaggacagacagacccagccacagccccacggacacgtgccggggaagaccactcaggggggaccatgcccggcagcctgtgaggtccagggtatgctggtgccgccgatggcacccaccggccattccacatgcaacgttgagtcctggggagacaacggagccacacgtgcccagccatcaatgcccggccaggcggtgccctgccaggaggacacgggccccgcggacgctggtgtggttggtggccaatcgtggaaccgcgcatgggagccagccaggggtgctgcgtcctgggacacctggcgcaacaaggcggtggtgcctcccaggcggtccggggagccaatggtgtccatgcaggctgcagaggagatccgcatcctcgcagtgatcactatccaggcgggcgtccgtggctacctggcgcgtcgcaggatccggctgtggcaccggggggccatggtcatccaagctacttggcgcggctaccgtgtgcggcggaacctggcacacctctgcagagccaccacgaccatccagtctgcctggcgcggctacagcacccgccgggaccaagcccggcactggcagatgctccaccccgtcacgtgggtggagctgggcagccgggccggggtcatgtctgaccgaagctggttccaggatggcagagccaggacagtatctgaccatcgctgcttccagtcctgccaggcacacgcttgcagcgtctgccactccctgagctccaggatcgggagcccgcccagcgtggtgatgctagtgggctccagccctcgcacctgtcatacctgtggacgcacacagcccacccgtgtggtgcagggcatgggccagggcactgagggccccggggcagtgtcttgggcctccgcctaccagctggctgccctgagtcccaggcagccgcatcgccaggacaaagcggccacagccatccagtccgcctggaggggctttaagatccgccagcagatgaggcagcagcaaatggcagcgaagatagttcaagccacctggcgaggccaccatacccggagctgtctgaagaacacagaggcgctcttgggaccagcagacccctcggccagctcacggcacatgcattggcctggcatctaggaccctggctccctgcagtggggacttcgtgggaggcactcatggctctctgggtctaatgaataaagtcctccacagcctaaaaaaaaaa

SEQ ID NO: 87668 - DNA, 2676 bp, Homo sapiens
  misc_feature (946)..(946): n is a, c, g, or t
ggctttgagtcacaaagctgctgcggcaccagggctccaagactggccgttcagactgctaggtttagcttcaggggcagcccagggcagtgttgctgcatattgcatggatgaaaggctgaaggctgcctcctcttgcaggctggcttctgagattgcaccttcttctcctgctactcctccaaatctatgacccttcaaggcagagctgacctgtccggtaatcaaggcaatgcagccggccgcctagctacagttcacgagccagttgtcacccagtgggcggtgcatcctccagcccccgctcaccccagtctcctggacaaaatggagaaagcgcctccacagccccagcacgagggcctcaagtccaaggagcatcttccgcaacagcctgccgaaggcaagacggcgtcccgccgcgtcccacgcctccgggctgtggtcgagagccaggccttcaagaacatcctggtagacgagatggacatgatgcacgcccgtgcagccacgctcatccaagccaactggaggggctattggctccggcagaagctgatttcccagatgatggcggccaaggccatccaggaggcctggcggcgcttcaacaagagacacatccttcactccagcaagtcgttggtaaagaaaacgagggcggaggagggggacataccttatcacgccccacagcaggtgcgcttccagcatccggaagagaaccgccttctgtccccgcccatcatggtgaacaaggagacccagttcccttcctgtgacaatctggtcctctgcagaccccagtcgtcccccctcctgcagcccccagcagctcagggtaccccagagccctgtgtgcagggtcctcatgctgccagagtccgggggctggccttcctgccacaccagacggtcaccatcagatttccctgcccagtgagtntggacgcaaaatgccagccatgcctgctgaccagaaccatcagaagcacctgcctcgtccacatagagggtgactcagtgaagaccaaacgtgtaagtgcccggaccaacaaagccagggctccggagacaccattgtccagaaggtatgaccaggcagttacgagaccatccagagcccaaacccagggccctgtgaaagcagagacccccaaagcccccttccagatatgtccagggcccatgatcaccaagactctactccagacatatccagtggtctccgtgaccctgccacagacatatccagcgtccacgatgaccaccaccccacccaagactagcccagttcccaaagtaacaataatcaagaccccagcccagatgtatccggggcccacagtgaccaaaactgcacctcacacatgccccatgcccacaatgaccaagatccaggtacaccccacagcctccagaactggcaccccacggcagacatgccctgcgaccatcacggcaaagaaccgacctcaggtttcccttctggcttccatcatgaagagcctgccccaggtatgcccggggcctgcgatggcaaagaccccaccccagatgcacccggtcaccaccccagccaaaaacccattgcaaacatgtctgtcagccacaatgtccaagacttcatcccagaggagcccagttggggtgaccaagccctcaccccagacccgcctgccagccatgataaccaagaccccagcccagttacgctcggtggccaccatcctcaagactctgtgtctggcctctccaacagtggcaaatgtcaaggctccaccccaagtggcggtagcagccggaactcccaacacctcaggctccatccatgagaacccacccaaggccaaggccaccgtgaatgtgaagcaggctgcaaaggtggtgaaagcctcatccccctcctatttggctgaggggaagatcaggtgcctggctcaaccacatccgggaactggggtccccagggctgcagctgagcttcctttggaagccgagaaaatcaagactggcacccagaaacaggcgaaaacagacatggcatttaagaccagtgtggcagtggaaatggctggggctccatcctggacaaaagttgctgaggaaggggacaagccacctcacgtgtatgtgcctgtagacatggctgtcaccctgccccggggacagctggctgccccactgaccaatgcctcatcccagagacatccaccctgcctgtcccagagaccactggccgccccgctgaccaaggcctcatctcagggacatctgcccactgagctgaccaagaccccatccctggcccatctggacacctgtctgagcaagatgcattcccagacacatctggccacaggtgccgtgaaggtccagtcccaagcgcctctagccacctgtctgaccaagacgcagtcccgggggcagccgatcacagacataaccacgtgcctcatcccagcgcaccaggctgctgatctcagcagcaacacccactcccaggtgctcctaacagggtccaaggtgtccaaccacgcctgccagcgcctcggtggcctcagcgccccaccctgggccaagccagaggacagacagacccatggggacttcgtgggaggcactcatggctctctgggtctaatgaataaagtcctccacagcctaaaaaaaaaa

SEQ ID NO: 87669 - DNA, 506 bp, Homo sapiens
ggctttgagtcacaaagctgctgcggcaccagggctccaagactggccgttcagactgctaggtttagcttcaggggcagcccagggcagtgttgctgcatattgcatggatgaaaggctgaaggctgcctcctcttgcaggctggcttctgagattgcaccttcttctcctgctactcctccaaatctatgacccttcaaggtaagaagatggtctatgggcaaggggtctggctagtccaacctgaagagaggggcttctgccaaacaagtgtgctgtgctccaggctatgcatcagggtggcttgacagtgtcccagctctctctgcatcctagttacttctgaaagccacagtcaccactttttcttccttctttccatccttccatatgccatttacctacccatcccctaatccacccacccacccatccacccatcagtctacctcctgttgggttatctcttcaccagtctttccagctctctttaatttccctccct

SEQ ID NO: 87670 - DNA, 5036 bp, Homo sapiens
  misc_feature (435)..(435): n is a, c, g, or t
  misc_feature (509)..(509): n is a, c, g, or t
  misc_feature (1126)..(1126): n is a, c, g, or t
  misc_feature (1224)..(1224): n is a, c, g, or t
  misc_feature (1879)..(1879): n is a, c, g, or t
  misc_feature (1938)..(1938): n is a, c, g, or t
  misc_feature (1951)..(1951): n is a, c, g, or t
  misc_feature (2819)..(2819): n is a, c, g, or t
  misc_feature (4120)..(4120): n is a, c, g, or t
  misc_feature (4179)..(4179): n is a, c, g, or t
gcacagccatctgtggtgactaggaggtccccaagccgaggacacccatcaaggacctttagagtggcctcagaccaaggtcaccaatcaatggctaactgggggtcccaaaacctagcccagccatctatggacagtggggagccctcaagcctagcccagccatctcaagcccctggggtaacctcaaatctggcccagccatctcaagcctttggggtgtctccaagtccagactacccatctcagtctgttggggagtacccaatgctggctcagccatttcagcccactgaggtgtccccaagtccaacctacccatctcaggccattagggagtacccaaccctggcacagccatttcagcccactgaggtatctccaagcccagcccacccatatcagctcactgaggtgtccccaagtgcagcctantcatatcagcccactgaggtgtccccaaacccaggctacctatctatggccattgagatgtccccaagcccagnatacccatctgtggccactgaggtgtccccaagcccaacctacccatatcagcccactgagatatccccaagctcaggctacctatctgtggccactgaggtgtccccaagcccaggctacccatctcagctcactgaggtgtccccaagctcaggctacctatctgtggccactgaagtgtccccaagcccagactactcatctcagcctactgagatgtccccaagctcaggctacctatctatggccactgaggtgtccccaagcccaggctacccatttcagcccactgaggtgtccccaagcccagactatccatgtgtggccactggggagtcccctagccttgcccagccatctcagcccactgaggtgtccccaagctcagcctacccatctgtggtcactggggagtctccaagcctggcccagtcatatcagcgcactgaggtgttcccaagcccagcctacccatttatggccactgaggtgtccccaagcccaggcgacccatctgtggtcactggggagtccccaagcccagcctacccatctcagcccactggggagtctccaagcctgacccagccatctctgaccatcagagtgtccccangcctagccatgtcatctcagactattggagtgtccccaagcctagccatgccatctcagaccattggagtgtccccaagcctagccatgccatttcanaccattggagtgtccccaaccctagctcacccatctatggccattcgggagtctccaagcctggcccagcctcctcagtccactggggaatccccaagcttgacctggccatctcaggccactggggtgtccccaagtgtagcccaccaatctgtggccagtagggtttcctcaagcctagcccagccatctcaagccagtgggatgtcccctagacaagattacccaccagtggcctccagggtgtccccaaaccaagctcacgcatctataaccagcaggatgtcccctagcagagctcatgcatctatgacctgtatggtgtccccaagccaggttcatcgatctatgcccagtgaggtgtccccaagccttgcccagctatctcaggccaccactgcagtgcccttaagaccagctcatcaacctatggcctgtggtgtatccccaagcctagcccagccgtctcaagccacagggatgtcttcaaggctagcccaccaacctatgacctgtgtggtgtccttaagcccagcccagccatctcaagccattggtgtgtccccaagcctagcccacccatcaggaccccatgggttgtctccaagtctagctcacccatatgtggccagtggggcgggctccagcctagccnacccatctcagaccactgcagtatccccaaggcaagcccaaccatctgtggcctccagnccaggcaagacanattcatcctgtaccctagcctccagcctagccgagccagctatagcccccagcctattcccaccatctgtggcccacacggaagccctaagcctggctcagtcacccccggacactaggttggccccaagccgatcccagccatctgtggtcagtggtacatgtcatggcctcaatgagccatgctggggctctaggctggattcaaatctgcagtgttcaagggtggactcagtagccccgtgtctgtgtcacccatcagcgtttgtttcagttagcctgggtggaccatatccctctgtggctggaaatatggaccagggtctgaaccagccatccctgggtactggggtgaacctatgtgaagaacctctgatggttagtgagatggtatccagccccccggacttcaagttcaacgacgtgtcccttgggttccatcatccacccagggttggtgggaggcatgtgtgtccaccctctgtggttagtgtttcaacaccaaatctctctcatgctgatgaggaggcctgttgtgtaggccagtgaatcacgcctctgttcaggggtgtggctgtaagccatccccaggagcctttggctgatgctatgttccccagtgggtctcaggggaccacatctcctggcctagctgggaatctcccctggagaaccatagcaactggcatgggccaaagtcaatgtcaggtggccaatggcatggcttcccttgcatcccaggtcttagaggcaggtggccctttgacacatccctctggaaccacagggatggcccccagcccctctctggcttcagtgcccaacagactggccgtgactcagtctaatctttccctgaacagcatggnccccagcagctcccagatcagtgtggttattccaaaaaacatagactgctggcacccttctgaggcatccatggtcccacccagttaccagcagagagatgtgattccgcaggactctctgaagagcagggctggtcgtggtgcggcaggaggttttgtagccagtagaatgagcacgggcgcagtcccaggcactctgcctggtggcataacctccagccttcccccgggctccaccatccgaggcatgggtcacagccttcccgcaggctctgtgtccagttgggtggctcccagtctgatggcagacagaaagaagccaagtctatctgtaagaccctccgctagcttagctgctccaaacttgctcccaggttcagtagtgagtcgggtgagcccagttgtccccctggttctgtgccaatgatgggggcctctagtgtggctcagagctgctccaaggggcccatggtgattgacatcactgcccctccttacctcaaagcctggctggggagaggtctttagcccccttgcagatgccccacaccaccagtctggctccaggtcactcctcagccccggcagctagtggcacagtgaggagtctacaccgagtgcccacggttctatcaagagccttacaattgagccaagatgctaggataatgccatctggggtcacaggggaccaagccaagctaggagaattggatgaggctgtgttccaagtgtcaggatcaagtggatccaatgacctattcagcaaagccagggtcactggtgcaacccagtggatgtactccagtcctctgggagctgatgggggccatgatcataggtccctgtctgagaaagggtctcttccccaagggaggtggctcccagccatgctagtggcatggtccctgtccctttccaggccccgggtttagccactaagtccccctcagtttatcaacaggggtctgtcgttcacgtcataccccaaaatcactctcagggtacagtggcttctaatgtagtctcaggatcaccccagctggcccgtggcagtactgaggctttcagattgctttcagtgtctgtgggcaggatggggaatcctagtcttcttcagaggtcagggaccaccagcatggtctcacatgtgccactatatccgtcctcggctagaagggcattgtccagtcccttccagacagaagctgtccccaatccactccagaaaacagtgtctggaaacatggctccgagcagccgctgggacgccatgggccctaaaaattcctacagatccntgcatggtaggattgttccagaactgctagaaagttctgtggccagggttaggcccttncagtatgtgcaaagacaaccatcccaggcctcagcccgaagtggtgcaaaccccacccacaggccctctgcagaggtaaggcccgtcatccgcactggggagatgacacactcctcggtcattcctccgctggccccgggagttcggagggtgtctctaggctatgagtcttccccaagtggttccctgccacccctttttaaccaggagtcaccgtggagacggcaggactcctatagcccccagaatcctgccgttagtcacaaggcatccctgaactccactatactccagggccccgcggacgctggtgtggttggtggccaatcgtggaaccgcgcatgggagccagccaggggtgctgcgtcctgggacacctggcgcaacaaggcggtggtgcctcccaggcggtccggggagccaatggtgtccatgcaggctgcagaggagatccgcatcctcgcagtgatcactatccaggcgggcgtccgtggctacctggcgcgtcgcaggatccggctaccagctggctgccctgagtcccaggcagccgcatcgccaggacaaagcggccacagccatccagtccgcctggaggggctttaagatccgccagcagatgaggcagcagcaaatggcagcgaagatagttcaagccacctggcgaggccaccatacccggagctgtctgaagaacacagaggcgctcttgggaccagcagacccctcggccagctcacggcacatgcattggcctggcatctaggaccctggctccctgcagtggggacttcgtgggaggcactcatggctctctgggtctaatgaataaagtcctccacagcctaaaaaaaaaa

SEQ ID NO: 87671 - DNA, 1675 bp, Homo sapiens
  misc_feature (116)..(116): n is a, c, g, or t
  misc_feature (1567)..(1567): n is a, c, g, or t
  misc_feature (1570)..(1570): n is a, c, g, or t
  misc_feature (1572)..(1572): n is a, c, g, or t
  misc_feature (1612)..(1612): n is a, c, g, or t
  misc_feature (1631)..(1631): n is a, c, g, or t
gcttactcactatagggctcgagcggccgcccgggcaggtcagaggtccacagacatccaggaagatgcagccagcagacaaagaatggcagccacccaagtgctgaggggagccntcccggccatttctgtcccagctccaagggtctctccacgatggcctgcaacagcacgtcccttgaggcttacacatacctgctgctgaacaccagcaacgcctcagactcggggtccacccagttgcccgcacccctcaggatctccttggccatagtgatgctgctgatgaccgtggtggggttcctgggcaacactgtggtctgcatcatcgtgtaccagaggccggctatgcgctcggccatcaacctgctgctggccaccctggccttctccgacatcatgctgtccctctgctgcatgcccttcaccgccgtcaccctcatcaccgtgcgctggcactttggggaccacttctgccgcctctcagccacgctctactggttttttgtcctggagggcgtggccatcctgctcatcatcagcgtggaccgcttcctcatcatcgtccagcgccaggacaagctgaacccgcgcagggccaaggtgatcatcgcggtctcctgggtgctgtccttctgcatcgcggggccctcgctcacgggctggacgctggtggaggtgccggcgcgggccccacagtgcgtgctgggctacacggagctccccgctgaccgcgcctacgtggtcaccttggtggtggccgtgttcttcgcgccctttggcgtcatgctgtgcgcctacatgtgcatcctcaacacggtccgcaagaacgccgtgcgcgtgcacaaccagtcggacagcctggacctgcggcagctcaccagggcgggcctgcggcgcctgcagcggcagcaacaggtcagcgtggacttgagcttcaagaccaaggccttcaccaccatcctgatcctcttcgtgggcttctccctctgctggctgccccactccgtctacagcctcctgtctgtgtttagccagcgcttttactgcggttcctccttctacgccaccagcacctgcgtcctgtggctcagttacctcaagtccgtcttcaaccccatcgtctactgctggagaatcaaaaaattccgcgaggcctgcatagagttgctgccccagaccttccaaatcctccccaaagtgcctgagcggatccgaaggagaatccagccaagcacagtctacgtgtgcaatgaaaaccagtctgcggtttagggggtcagggggccacagagaaggggcagctgagccccagtcccagggtggatctgtcctgctctgttccctggcatgttggtcatagtctgcactttgtggtggcaatttaagcacaaaggtactcatttgtaatcagatgagctgcagctcccaaatttcaaattttggcacgatgaattatttttgtttctctttgcagagagccaaatatggggctgatgggaactgcaacgtcattaagtcaaaaatggagtgggctggggagtgcagaagttgggcagaaagggangangngggcaacagggaatgaagctggttgagtgtggggcaggangactggtcagtcacaagancttcaacctgccctgcgagccctctctgcacctgctcaagaaaa

SEQ ID NO: 87672 - DNA, 383 bp, Homo sapiens
ggacaaaacagccttacagagttgtcagggggactcctcattaaataagcatttatttgaagattattagatggcagaacatgtgattatcctgaacgacttaagacctgacattagtcatactgttctgtgcaatacacttatgagaacaagcattctctgcattgatattattgaagtcaaaataggaaatcttattacaaatataaccagattaaaggctgtgtctttccattgttaaacctaactctggtgattttgtttcagcaaaacaatgttatctgtcacgttgaataatgttcatttgcggttttctgattttgttactttgattatttagcttacactagggttgtattaaagtacttaaacatgaggactta

SEQ ID NO: 87673 - DNA, 377 bp, Homo sapiens
gcattctaaggaaattgtggagaaggttgctgttgtaatcactctactttccagaattacctgtcttatggatttcagaagatcagaaagggttagccacctaaatctatttacttattaatttcctatgggaacagtgcctacaaagttggcactttttttcctcattcacatcagtagggaatcttcaactttcacaatttaactaatctttttctttaacaccctttcttagaaaaaaaaaaatttcggccgggcgcagtggctcacacctgtaatcccagcactttgggaggccgaggcgggtggctcacttgaggtcggcggtttgagaccagcctggtcaacatggtgaaaccttgtctctactaaaaata

SEQ ID NO: 87674 - DNA, 348 bp, Homo sapiens
agtgccttgcccatagtaacaacttattttaactgaatgaacaagtgaatgtagcctattgtctaccattttctgcattgattccacaagtattatttgagctctgctgatgaaatggaagagttccctgatccccctcacaggacctgtgacagtggtttggctcaccactgctcaaacccctgacaggagggggagcatgcagacaggcaggagcaggagctagggtgagtgctttgggctctggccccatagtagtatctaggggtgggtgcctgcagcctcagtgttacagtgttcttttaaccttgccatccacagatggtttaagtgttaaccagctcagtg

SEQ ID NO: 87675 - DNA, 387 bp, Homo sapiens
ggtctcgctgttacccagtctggtctccagctcctaggcttaagcaatcctcctgcctcagcctcccaagtagccggggctagaggcatgagccagcacgtgtagcttctgatctttttgtcctcaattctcttttacctaattgctttctctagaggtaaggttatgaagtggagatggtcaggacccctcaaataaaatttgggaatacaggaaacaaagactgggtcaatacacgtattctttttgtttgtttgtttttgtattttgttttcagatggagtctcgctctgtggtccaggatggagtgcagtggcacgatttcagctcactgcaaactccgcctcctgggttcacgccattcttctgcctcagcctcccaagtag

SEQ ID NO: 87676 - DNA, 435 bp, Homo sapiens
tagattatgttttgtaagaacacaaagctcctgtttcttgttagtctttgactgaacttgacactagttaacagtctggggaccagtgaaaggttaatatgtactgtaaaattcaattctcagatattcattgtcatgcttctaattacacttctttttcgccaccaggccaaattcaattgtaacagtacatggaggttcacaatatgtattcacactggagacgtcggcattgtttctattgatgctaatattctaggttgtaatagtgcactacttttgacagctcaatgaactagccaaatatctattttgggcagttgaagatacaaagcagtatagtcattgacatagttcggatgtttgcccttgtccaaatctcatgttgaaatgtaatccccagtgttgaacgtggggcctggtaagaggtgattg

SEQ ID NO: 87677 - DNA, 459 bp, Homo sapiens
atgacaggatttcatgctttttaatgacaaaatattattccattatgtgtatatactgcattttctttatccactcatgtgttgatggacacttaggatgattctgtgtcttggctattacaaataatgctgcagtcaacatgggagtgcatatttccctttgacatattcattttctttggatacatacccagcagtgagatttctgggtcatatgccacttctacttttaattttttgaggcatctccatactgttttccataatggctagattcgtgtatatacccacctagagtgtataagggctccatttctccatatctacaccacaatttgttattttttctctttaaaaacatttttagattgaggtgtacacgtgtaggtttgttacatgggagttaaaacataatcctttctttttctttttcataaattgagacaggatgttgctatg

SEQ ID NO: 87678 - DNA, 839 bp, Homo sapiens
cattttacaaagaataaaatatgaagaaggaaaaaacaagattggtctgaatcgtttgcttaccaatggctcctatgaagctgcgtttcccctgcatgagggaagttatagaagtaaaaactccattcgaacccatggagcagaaaaccaccgacatctactctatgagtgctgggcctcctggggcgtgtggtataaataccaacctttggatcttgtaaggcggtactttggagagaagattgggttatattttgcctggttgggctggtacaccggcatgctcttcccagctgccttcattggattgtttgtctttttgtatggcgtcaccactctggatcacagccaagtcagtaaagaagtctgccaagctacagatatcatcatgtgtcctgtgtgtgataaatactgtccattcatgaggctgtcagacagctgtgtatatgccaaggtaacccacctttttgacaatggagccactgtcttctttgctgttttcatggcagtctgggcaacagttttcctggagttttggaaaagacggcgagcagtaattgcttatgactgggatttgatagactgggaagaagaggaggaagaaatacgaccccagtttgaagccaagtattccaagaaagagcggatgaatccaatttctggaaagccagaaccttatcaagcatttacagataaatgcagcagacttatcgtttctgcatctggaatattttttatgatctgcgtggtgattgctgccgtgttcgggatcgtcatttaccgggtggtgactgtcagcactttcgctgcctttaagtgggcgttaatcaggaataact

SEQ ID NO: 87679 - DNA, 457 bp, Homo sapiens
ttggctggtgggatggggtggtggctcagccagctcagcctctgatgtgctagccctgccctcttctgcctggatcagaagcctggccatccttccccagggtctagtctatactggggtcctttacttgtaatttatctttctgcttgaagtcaagtggtcacgcctgggacaagtgggaacaaagagggtgctcttgccctgatctccctgagatgagattgtcccaaactgctggtgaggatagcctagcatagaggcctccacagtgtaatggcatgatctcggctcactgcaaccttcacctcctgggttcaagcgattctcatgcctcagcctcctgagtagctaggactataggtgtgcgtcaccacactcagctaatttttgtatttttagtagagacgaggtttcgccatgttgaccaggctggtcttgagctcctggcctcaggtga

SEQ ID NO: 87680 - DNA, 312 bp, Homo sapiens
ttcccagcatttgcgattctgtgagaacaaagcaagaggtgtgagtttttccacttttctcctctttcttgggttcccccaggccagctgctggctgctgtgagaggtgcaggctcccaggtatgctcaggtacacccaggtccttccagggcattgacctggcccagtcacttggggtatgctactatggcattctccctgatactctgcccagtgaaagctcctttagctctatgggtaaacttgttttttcctatgagattttatttggcgggagctcccacactgaagttgccttcaacacagtgact

SEQ ID NO: 87681 - DNA, 256 bp, Homo sapiens
tctaatctttcaattatcttacttgctgttatgggggaaaatgctttaaccataggaatgtctaaagaaataacttagaattcattgaagaattcatacaagaattaagaataatatgcaaaaagtaaaaatataaattagaagtgaaaatgttcattagattaatttgatgattcttatgttgagaatctataagttattttctgcattgccctcatttttaaagtctcaaactggtcaattatgtgtgtatagc

SEQ ID NO: 87682 - DNA, 754 bp, Homo sapiens
agtccctccatgcctccagcacatgctgttctgcctgtctgaaatgtccttggtctcttctgaccctgacagactcctactcatcctttaataccctattcaagtggctcctgttctggagagccttcctgggtacccctagctaatcatactctctctcccctgctagacggtgagcctcaaggccagggactatgtcttattcaactctgtgcctagtgcctgacacagagctgggcacaaagtgatcattgagaaacagcttgttgagtttttatggagtaagtctatcctcaaatcaagggcaggccctcatggaaccacacacacgatctcaaatcctcagtgtccaggagggcttagatttggaggtaggagccaagtgagattaagaagagaactcatacttcttagggatccagactagggaattttccaggacaagtaggcctccagaactctgctgtgtgcccgtgactgctgctgagagaattcatacctgggacctcaccccgatccactccagcaccactcagagatagtggaaaacaagctggaggcctgagatggcctgtccactatcgctcggtggacctccttaaaatgtggagcccaaaactagccctgcctgagctaccaggaggatgctggctgtcactctacttctactcttacagcctacaatcacattggctttttcagcagcttttggcttgtggtcaactcaaacccccaggtctttttcactggggtg

SEQ ID NO: 87683 - DNA, 390 bp, Homo sapiens
ctcaaaaaaagaaaaaaagtaaagttctgagtagtaatttcattactctgtggggatttattttttttctaattattgtttaaatatttctcatggtgatatggtttggctctgtgtccccactcaaatctcatgttggattgtaatccaaccagggacctgctggatagtgactggaccatggtggtggatttcccccttgctgttctcatgatagtgagtgagttctcatgaggtctggtcgtttgaaagtgtagcacctccctctttgctctctctctctctcctgctctggccatgtgaagaccatgcctccttcccctttgacttctgcaatgattgtaagttttctgaggcctgcccagaagcagaagcctgtacagcccacag

SEQ ID NO: 87684 - DNA, 845 bp, Homo sapiens
cagtgtcaccagtttctcaaggaggcaatatggttacctctagtagcaagagtcatgaaacttcttcagagttataacatccaaagcccattctcctagcaactgtattttccctggcaggagaaactccacctaaccacaatagatcaagcctggctttctgtgggatgtcagtaggagagctggccatctgcaaactttctcaagcttaacaccatcggtcaatgactccgtttggctttcaggttgatctttgtccccgcccccacgctcattctaattcaaagtccacatggaatgttttatgccacagctgagcgtctaagaggaatacatgccttctggggcagatcatcctaacactgattttatgcaattctccccttccatcaccccaccctaccttgcttcatttgccccactagtaatgatcaaaaagagaaagaataaaatgttcaccaaatctgtgacttagaaaaacatgtggagggttctgccatcttctgaattctgatcctcactgagtcctcattgaaatgttatttggggaagaatgtttacctggggcctccttcccagaaactttttttcagatgaatttctagtcaaagactaagacttgcctttggaaatgcctggataaatctggatgctaaatgacttgaggacacctaataaaggaatggggtactattggggaattgtctgtcattgcattacaaatgctgctcagtctccctgctatttgcagacatcatcaccagagagtttcactaggctcgttgggattgggtctcagcaaggtcccatgtgactcaataagagcccacctttgctgctaaatt

SEQ ID NO: 87685 - DNA, 412 bp, Homo sapiens
tttcttagaacatatccctgtcgttaagcaacacagaactacatacacaaagcagtgctaagccctgtggtgctcaatcctgcaagggtggtgagcacatcactcggaaggtcagctctcccaccaaggggcagggcacactgggaatctggcttacaacaatcaactgcactggggcatgcacagaaaaaaatatgaatagcatcttcaacacggttgtctttaggaggtgggttcgttcaacttcactgtagatttccataaagcgtgaattgaggataattaatgtaaattatttctaagatcagaaaaatactacttaaaaagtaaaagaaaaaaagcttagtattaaagaacaaaaatattaatggagaaatgtaaacacatcatgcatctacaatcagagtataat

SEQ ID NO: 87686 - DNA, 484 bp, Homo sapiens
ctggagccgggggtggctgagggagccttcccttgtgagccctgcctgggaacagtccctgaggcccaggtcagggtgctgggtgcagagtcaggccaggaatggccaatgctagaaactcaggtatctggtaaacagatacagagtgggtatttcataaatattccctaagtgaatcaatgggctttggaatcatcaactggctgtgcatccctgtacacggcacacagcctttctgattctcattttcacctctaaaaaggtgatgataatgtcttcctgttggggttgttgcaaagttaaaatgcagtaagtaaaatacctggcacacagtaagtgttcaataaatggtagccattgaattacactgtgaactaggagcaggaaccagaaaataaatgagtcataactgaagggaaataactctacttaggtgtgtaacctcaggcaagtcattttcctttattaaagtctcagttgcctc

SEQ ID NO: 87687 - DNA, 417 bp, Homo sapiens
tcaaatgttgaaataaattaaaattttaaaataaaataaatattatcagtagattaattaaaggtttctgttttttgttttctctttgaaataagacagaaacacatgaggtccagcaataacttatttccttcaaagtttcattaaataatgattaaatctagccctatctagagattagaaatgttggcacgttacattataaccactcagagaaatataaggcattatcttcccttacaaatcattaacaaaaacatctgatcatacagaccacaacagaaatagaaatgctatcagtgatcacactgtttggtggtaagacaggatgaatggagatttaagtctgtttttcctccccatctttagtcagaaccagatgttaaatattgagactgggggtaggggaagtaaact

SEQ ID NO: 87688 - DNA, 110 bp, Homo sapiens
gatctgcttgccttggcctcccaaaatattgggattacagacatgagccactgcgcccagccagagggtgtttttttaatgtggcatttgaaaataaaaagttggaatat

SEQ ID NO: 87689 - DNA, 883 bp, Homo sapiens
gatccaaattgtgaagccgttggtcaggtgcctggctacacacaaaatggtggaggcttagcctaaacagtttcttcatttcacattaaaatcctaatttctggctcctctcaaaatgagttctagaagcactggatgtagattcccatgtggacacagccttcaggaggtgagcagcagctccctgcagccagctggagcctgccagttttccctagtgcccagcactcctgagcttctgccctccgagggattcccgcagctctctctaatgggatagtggagcgcctgtcggctgccttggcttgccttgctcaggtccactgacttaaatcaaccagccccatcctaggccctcacagtcacttaagaaggctgctgcaggggatgtggggcttgcatttccccggtggaaagttcaggtgtgaaagggagcgggtaagcagggaatggagaagacaggaagttctgccgccatggagagtgtggagaatagaaaccagcacttgaagattctaaacaattcacacctcagctgtgaagtcgggattttgaattaaattgttatttccatatgttttttactttcagttattttctagttaatgtattatcataggaccctccccaggagtccggcagatcacttcatcagttatatataaagaagtaattagattcaacactcagatcactacttagtttagattacattaagattgttttgtttttgaatgggggatagaaaaccattttccttttattttatttacttatttttgagacagagtctcgctctgtcccccaggctggagttgcagtgagccgagactgagccattgcattccagcctgggtgaaagagcaagactccatccatcttt

SEQ ID NO: 87690 - DNA, 460 bp, Homo sapiens
tcagtgccctttatttctgcatttaaattctagttacttgccagcatcctttcatttcagtctgaagagctttctttagtgtttcttgtatgacaagttcggtagtaatgaattctttgtttcctccttcatttttaaaggatagttttgctggatttaaattttttaattaaaagtctttttaaaaatttcctctgtcttctatgctttctgatgagaaatcagctgataatattattcagaatcccttgtttgtgataagccacttctatcttgctgctttcaagactatctgtgtctttggctttagagagttttattataatgtaccttggcatagatatctacaaattatagtacttgggtttattgagcctctgggatgtgtagactagtggtttttgttttgttttatcaaaattgtgaagttttcagccattatttctttgcatattctttc

SEQ ID NO: 87691 - DNA, 456 bp, Homo sapiens
ggtaggtttttggtagtgagagaaaagggaagagtgcttttggcagggataaaatctgggtaaaatcactaaggtgaggcttaaacaacatactcaagaattaaaagcctgcctgactctttattatgaggacaagatgatcaggaagaaatggtgcaagttcaggaaggtcttctgtactagtgtctcatatgtcagcatatacttattggtcacctgtgtgccaggcactcttctcattgcacagatactttagagaacaaagcatgaaagttttctgctttcttggagcttacattctaggagagggccacacataattaacggaataggttacaagttaattatttaatatgttacaaaagtagtaagtgctgtgaaaaaaaaaaggaaaagcagaggtgaggctggggagggtgcaggcttgcgggggagcaaggcacaagaaggctacag

SEQ ID NO: 87692 - DNA, 851 bp, Homo sapiens
tccaattcggcatacagactacagagctgatgtgtattttttaagtaggttttaaaaataagtaagtcacagtgtcatatgccctcacatgccatccatatacaaagaatacataaccacctacgtacttccatttcacaaacaccaagtgggttgagcttctccccataactcccccaaaaaacgcttatgatacttgaaaactcaccatttaggtcaattcctttatttatggtataaatcccctatttaatataaatagccctggtaggcataatagttaagaattgttagtctcttttcccttggtataaatatggttatcaataccttatctaagagcaattttaatttggaaaacagcgtgaagaagaaagaaatggaaaaaggtggaccctggagattcaaaagacaagatttttttagtcaaaattttgaacagagtaagacatgacagaaaaattcaggcaacattatgtccatctgcttaatgtaaatataacatattcataggataaagctcaatgccagacacttccaccattgcatggccccagccagctttgcatgggaactcactgctacccctaccaatcagggggtagtagttggctttctttggtagtcctcaccaacctattcttgtacttccagctctattctgtcctcttagaggtgtcagtggcattccaggatgaagtggtggggatctcagctctgggagttcatatgctactggtgctgattgccaacctgcaacagccattagagtccaagggataatgagagtaaggagacttctatcaagttcagccagctgaaaccatgcatctaaaatgctatgggaagaa

SEQ ID NO: 87693 - DNA, 830 bp, Homo sapiens
tgtccttaacattcatcttattggggttcaagcagagaaaactagggggagacggtgtgtgcacatgcatccaatgtattctgaagaatgggcataggtgattgtgggggctggctgggactcagggctcaggttgaagctgctgttcccagtgggtacttggagggagcctcagccctgtgcttaagacttacagctgattggatcgggccttctgggattacccaggataatctcccctaaagttacctgatgagggtctttaatttcatctgcaaaatggttccacatcactacccaaatgtgtttgaataacttgaagatttgacacaagggaaaagcagccatggctgatgaagtgccacaggcctataaccccagctactgggaggccgaggcaggaggatggcttgagcccaggagttaaagtgtagcctgggcaacatagtgaggcctcatctcaaaaaaatgagaagggccatagtgtggctatgttagctgttcaggggacactagcacgtgtgtggcaaaagtaaacctttaatgtcagcagctacgtgtgtggctagtggctgctctgttggacagcagaactctagggggttagccaatgtgaaaaggacgaatgcccagccgatgccagcaggagtgagggatgtgggaggacaaagactttcctgcttccaagtaccctccagggctggccctcattgtccaggatctttctgcagtcctctgcccacctgcaggggcctggggccctgtgacctcagaatcccccataccatgggccacttgttacctgttcagtcttcccccactaggctggg

SEQ ID NO: 87694 - DNA, 895 bp, Homo sapiens
tgttttgaactggggcacatttttaacctaagaagggaatacaggttgtctcgtgaggtggttgtgcagttcaaatgagattacaaacgtgaaagcttgtgaagctcaatgatgtacattcatggagtcctcattgtacaaactggcccttcttggtaacctttagagttccctcccaggctgtaagctgcaagagggcagggaccaggtctgattgtattcatcatgtatcacaatgtttagcagaagggttcatgtgggtgttcaataaagttttgctgagtaggtaaataaatgaattaatgaatcctgttatgctctgaacagttcctattatttgttccttaagcagttccttcaatagtggtcttattgtatggctggctcagtgaaaaacactctaactcaacctcctgtgacttactagtgtgccaggagactgggagaattctggatggtactgtcagaggcattcaaaccagagaaactccattttgaatgagggctaggaaaatgagactgagactggctgggctgcattctcgggaagttaggctttcttagcctctagatgtttacagctaagggaacaaattaatagtgtttactaaacaaacccagacttgggagtgtccagatatcccgatatctggagaacaaaggcattcctaattttgctttaaagataatattgattcttgcaaaatatagtaatttatttatttatcacaaactcttgtagcagagcacatctccctatatatacgagcgatgtacctagcatggaatcgttcctcctcttactttcggcaacatcctactttgtctatggagtaggtgtcctttcaccactttactttcttaataaactggcttttactttacactgcggact

SEQ ID NO: 87695 - DNA, 2257 bp, Homo sapiens
gagatgaggagttctccagaactcgggtggcggggcgctcccgggctctggcgcggggaaatggggctttggcagtgggggcggggcttaagggtggggagaggccggggagcctggaggcggagcttggggagctcgccccacgcggggcggggctccggcggcagcgggatctgcagttcggactccgcgcgccacagtcgctgcagttcgctccactctggtggccccgccgccctgcggggatcccgggggtcggcgggctgctcggacttggcgcggggccggcccggcctctctcttcctcggtggggcctagacggtcggggcaccgggaacatggagccctctccagccgctgggggcttggagaccactcgcctggtgagcccccgggaccgcggtggcgccggaggcagcctgcgtttgaagagtctcttcacagagccctcagagcccctccctgaggagtccaaacctgtggagatgcccttccaccactgccacagggacccccttccgccgccgggccttacccctgagaggctgcatgcacggaggcagctatatgctgcctgtgccgtttgctttgtcttcatggctggggaggtggtcggcgggtatctggcacacagcctggccatcatgaccgatgcagcccacttgctggcggatgtgggcagcatgatgggcagcctcttctccctctggctctccacccgtccagccacccgcaccatgacctttggctggcaccgttcagagactctgggggctttggcctctgtggtctccctctggatggtcactggcatcctcctgtacctggccttcgtccgcctgctgcacagcgactaccacatcgaggggggtgccatgctgctgaccgccagcatcgcagtctgtgccaacctgttaatggcctttgtgctgcaccaggctgggcccccccacagccacgggtctaggggagcagagtatgcaccgctggaggaggggcctgaacagcccctgcccctggggaacaccagcgtccgggcggcatttgtgcacgtgctgggggacctcctgcagagctttggggtactggctgcctccatcctcatctacttcaagcctcaatacaaggcagccgaccccatcagcaccttcctcttctccatctgtgcccttggatccaccgctcccaccctccgagacgttcttcgaatcctcatggaaggtaccccccgcaatgtggggttcgaacctgtgcgggatacgctgttgtcggtgccaggagtccgggcaacccatgagctgcacctgtgggcccttacgctcacttaccatgttgcctctgcacacctggccatcgactccaccgctgaccctgaagccgtcctggctgaagcctcatcccggctctactcccggtttggattctccagctgcaccctgcaggtcgagcagtatcagccggagatggcccagtgcctgcgctgccaggaacccccccaagcctgagccatggccctgccctcaccccactgccaggccgaggctcagccccagactctcagcatctgctgccctgatcacagagacgggaccgagccaggtccataccccttccctctctcccctccctaccacctgccagtttccccagcctcagccccagccccagccccagtgggcaagaccaaagtgtggcggggagtggggtgggagtcaggggaatagatgtgactagttcaggggcggggactcccaggcctcagtgtggcagggtgtgttgaaggcctgtggtgccatctccccatggttcatgtggagccacgaacatcctttccctgcagtccatttgtctgtgtggcaggctggctggctgggggcatctgcctgtctatgtgctgttggtgtgcctatgcctgggggaggtcagtaggggccccctccccacatggccctcgctctgtctatgcaggggccccaaagcccgcactttgtccgtgtgtcttagccctgtggttttgtctgtgtgtgtgtgtgtgtgtgtgtgtgtgtgtgtgtgtgttcttggtgctgtggcctgtgtgtctctgtgcctatgtggctgtgctatggtttctatgagtctgctccatccatgtgtctgtttgggggtctatctctccatccctctgttggtgctgtgcccttggctatccctgaaagagggaggactccgctgcagctccaccaataaacttgtgtctcactgcaaaaaaaaaaa

SEQ ID NO: 87696 - DNA, 1933 bp, Homo sapiens
ggcctggggaaggagatggtctgatgaggccagcactggggactaaggacgtggagtgagcaggccagcctgtgggccaggcccaggttgaaccatgttgcttgcctcagtctcttcacagagccctcagagcccctccctgaggagtccaaacctgtggagatgcccttccaccactgccacagggacccccttccgccgccgggccttacccctgagaggctgcatgcacggaggcagctatatgctgcctgtgccgtttgctttgtcttcatggctggggaggtggtcggcgggtatctggcacacagcctggccatcatgaccgatgcagcccacttgctggcggatgtgggcagcatgatgggcagcctcttctccctctggctctccacccgtccagccacccgcaccatgacctttggctggcaccgttcagagactctgggggctttggcctctgtggtctccctctggatggtcactggcatcctcctgtacctggccttcgtccgcctgctgcacagcgactaccacatcgaggggggtgccatgctgctgaccgccagcatcgcagtctgtgccaacctgttaatggcctttgtgctgcaccaggctgggcccccccacagccacgggtctaggggagcagagtatgcaccgctggaggaggggcctgaacagcccctgcccctggggaacaccagcgtccgggcggcatttgtgcacgtgctgggggacctcctgcagagctttggggtactggctgcctccatcctcatctacttcaagcctcaatacaaggcagccgaccccatcagcaccttcctcttctccatctgtgcccttggatccaccgctcccaccctccgagacgttcttcgaatcctcatggaaggtaccccccgcaatgtggggttcgaacctgtgcgggatacgctgttgtcggtgccaggagtccgggcaacccatgagctgcacctgtgggcccttacgctcacttaccatgttgcctctgcacacctggccatcgactccaccgctgaccctgaagccgtcctggctgaagcctcatcccggctctactcccggtttggattctccagctgcaccctgcaggtcgagcagtatcagccggagatggcccagtgcctgcgctgccaggaacccccccaagcctgagccatggccctgccctcaccccactgccaggccgaggctcagccccagactctcagcatctgctgccctgatcacagagacgggaccgagccaggtccataccccttccctctctcccctccctaccacctgccagtttccccagcctcagccccagccccagccccagtgggcaagaccaaagtgtggcggggagtggggtgggagtcaggggaatagatgtgactagttcaggggcggggactcccaggcctcagtgtggcagggtgtgttgaaggcctgtggtgccatctccccatggttcatgtggagccacgaacatcctttccctgcagtccatttgtctgtgtggcaggctggctggctgggggcatctgcctgtctatgtgctgttggtgtgcctatgcctgggggaggtcagtaggggccccctccccacatggccctcgctctgtctatgcaggggccccaaagcccgcactttgtccgtgtgtcttagccctgtggttttgtctgtgtgtgtgtgtgtgtgtgtgtgtgtgtgtgtgtgtgttcttggtgctgtggcctgtgtgtctctgtgcctatgtggctgtgctatggtttctatgagtctgctccatccatgtgtctgtttgggggtctatctctccatccctctgttggtgctgtgcccttggctatccctgaaagagggaggactccgctgcagctccaccaataaacttgtgtctcactgcaaaaaaaaaaa

SEQ ID NO: 87697 - DNA, 2103 bp, Homo sapiens
gagatgaggagttctccagaactcgggtggcggggcgctcccgggctctggcgcggggaaatggggctttggcagtgggggcggggcttaagggtggggagaggccggggagcctggaggcggagcttggggagctcgccccacgcggggcggggctccggcggcagcgggatctgcagttcggactccgcgcgccacagtcgctgcagttcgctccactctggtggccccgccgccctgcggggatcccgggggtcggcgggctgctcggacttggcgcggggccggcccggcctctctcttcctcggtggggcctagacggtcggggcaccgggaacatggagccctctccagccgctgggggcttggagaccactcgcctggtgagcccccgggaccgcggtggcgccggaggcagcctgcgtttgaagagtctcttcacagagccctcagagcccctccctgaggagtccaaacctgtggagatgcccttccaccactgccacagggacccccttccgccgccgggccttacccctgagaggctgcatgcacggaggcagctatatgctgcctgtgccgtttgctttgtcttcatggctggggaggtggtcggcgggtatctggcacacagcctggccatcatgaccgatgcagcccacttgctggcggatgtgggcagcatgatgggcagcctcttctccctctggctctccacccgtccagccacccgcaccatgacctttggctggcaccgttcagaatggcctttgtgctgcaccaggctgggcccccccacagccacgggtctaggggagcagagtatgcaccgctggaggaggggcctgaacagcccctgcccctggggaacaccagcgtccgggcggcatttgtgcacgtgctgggggacctcctgcagagctttggggtactggctgcctccatcctcatctacttcaagcctcaatacaaggcagccgaccccatcagcaccttcctcttctccatctgtgcccttggatccaccgctcccaccctccgagacgttcttcgaatcctcatggaaggtaccccccgcaatgtggggttcgaacctgtgcgggatacgctgttgtcggtgccaggagtccgggcaacccatgagctgcacctgtgggcccttacgctcacttaccatgttgcctctgcacacctggccatcgactccaccgctgaccctgaagccgtcctggctgaagcctcatcccggctctactcccggtttggattctccagctgcaccctgcaggtcgagcagtatcagccggagatggcccagtgcctgcgctgccaggaacccccccaagcctgagccatggccctgccctcaccccactgccaggccgaggctcagccccagactctcagcatctgctgccctgatcacagagacgggaccgagccaggtccataccccttccctctctcccctccctaccacctgccagtttccccagcctcagccccagccccagccccagtgggcaagaccaaagtgtggcggggagtggggtgggagtcaggggaatagatgtgactagttcaggggcggggactcccaggcctcagtgtggcagggtgtgttgaaggcctgtggtgccatctccccatggttcatgtggagccacgaacatcctttccctgcagtccatttgtctgtgtggcaggctggctggctgggggcatctgcctgtctatgtgctgttggtgtgcctatgcctgggggaggtcagtaggggccccctccccacatggccctcgctctgtctatgcaggggccccaaagcccgcactttgtccgtgtgtcttagccctgtggttttgtctgtgtgtgtgtgtgtgtgtgtgtgtgtgtgtgtgtgtgttcttggtgctgtggcctgtgtgtctctgtgcctatgtggctgtgctatggtttctatgagtctgctccatccatgtgtctgtttgggggtctatctctccatccctctgttggtgctgtgcccttggctatccctgaaagagggaggactccgctgcagctccaccaataaacttgtgtctcactgcaaaaaaaaaaa

SEQ ID NO: 87698 - DNA, 381 bp, Homo sapiens
gttttctttctcacctgggtatccccagagcttagcacaggatttggcactttgtagtcactctgtaaatatttgttgaccaactgctaatatttggtatatgtgatcagaaatctgaggtttgagggagtatgaaaaactgaaaccaaggatgactagtttaaaatagcaaattgagattaggggagaaggagtaaaagagaagggaagaaagaaaatgggaatagagaaagaatcaagttagataagaggatatgggcaagacttcagaatgtgcaaggggattggctcaataggatgtattatgctaagatggaactctctagttatattattatatttcataatattctgtttaatactgtagttagcaatgggcag

SEQ ID NO: 87699 - DNA, 413 bp, Homo sapiens
tgtaacattgcacaagtgacatagtattgccaagcctcattttcctaccaagaatgggagagattacctctaatccatagagttgtgatgagaataagaaggaaataatttactcttactgcttagtatagtttttggtacattatttgttctcaaaaaaataccagctgttatgattcaatttaatacttttatttatgctctggttttgtgaggtgtattgggacagcatcctgacaaggctttataatgtgcagtgaacatttcaaattcagaagtggaaaattgagatgggatttatcaggttgcctatgcagttgggacaatgttttaaattgtatattagacagagttagtgactttctgaatggagaatagggggattatgtaagaaagtagggattgtcacacat

SEQ ID NO: 87700 - DNA, 142 bp, Homo sapiens
tgctgggattacaggcatgagccaccgcacctggccgacgaattattaatgtctctgaaatagctttggaggccactctctttctagaagggttccggggcaggggaggatgtggcttcctgaggagctctcagtccttctc

SEQ ID NO: 87701 - DNA, 574 bp, Homo sapiens
gcaccatgcctagggccgccactttccagtgctgcagccagagggaaaggcgtccaccaaaggctgctcgggaagggtcaacacacttgagcagccttagctagactgaccagggagaaagagagaagactcagaagccagaatggtgaaagaacgagggcactttgctaagcagacgccacggacgactgcacagcagcacgccagataactcagaagaagcaagcacgcggctgtgcacgcttccgaaatgcactccagaagaaaatctcagtacatctataggaagtgaagaggctgagttagtcccttagaaacgtcccagtggccgggccgggtgtggtggctcacgcctgtaatcccaacacttcaggtggccgaggtgggcggatctgagtccaggagtttgagaccagcctgggcaacatagcaagaccccatctatataaaacattaaaaagggccaggcgcggtggctcacgcctgtaatcccagcactttgggaggccgaggcgggcagatcacttgaggtcaggagttcgagaccagcctggccaacacaatgaaaccccga

SEQ ID NO: 87702 - DNA, 354 bp, Homo sapiens
ccccgggattgtggggaagggcctcacgctctgggacccccaggattgtggggaagagcctcacgctctgggacccccgggattgtggggaagagcctcacgctctgggacccccgggattgtggggaagggcctcacgctctggacccccctggggtttacgtggtctgtgccgcccacacttagtgagtccagcccattcttggaacaaagtacaatatatcttacagaagaaaatattttatctttttctgaaaatataatgattgagtcctaattaaacttcaagcatggttgaccagaaattgaatgttttaaagaaaacctaggccttatagagaaggattgctttcc

SEQ ID NO: 87703 - DNA, 587 bp, Homo sapiens
gcctcccaaagtactgagattacaggcatgagctaccatgccctgatgagaaacatttcttaatgaaatggacagccgtatagtgaataggggatgaagagcaagaatttctgtcactccagtcctcagctttttttttttttttttttttttttaaattcaagagtttttggggaaacaggtgttgttgggtcacatggaaaatttcttaagagggggattcccgaaatttgggggcccccttcccccggagcagggttacaactttaatacccagattgttgtatgtctttattactccctaaccccaccatcacaacactttttccccaaagtgtgtggaaaaggctcaatgtggataccacactactttcttgcccttatggagaatcccacaagatatcgtggtaggaactgggataacataacaacagatgtaggtatactgatcactgcagcaagtcatcaaccactcctatcactggggaacggcaagtgtcgaggtccaccgcgacgcggccccccggggtggaaaacatctgtgaaaaacgacttaagtggggcaggaggcgcaggtaaccaagacg

SEQ ID NO: 87704 - DNA, 672 bp, Homo sapiens
ctgatatttagatgaactttatagaatgcaaattataaaactgaatctgacccaagttttatagatccttttaattcaaaggagagaagcatcttttcttcattcgtgcagtaaacctttatgaagcccttgcaatgggtaggaattattctgagagctgtaggggatggatggccaaggcatagtgcctagtacataataggagtgaaacagatatttcaataaataaatcaatgaatgatgggacaactttggcgaccaaaaaagttttagacattgggtttggtggtaatgcatagaaaaaaaaaaatagaaatctattttacttgaaagcatctccctgtcattccatacagttttacttctcacatgtttacctctattcaaaggggtagtggagtggaaggttgcagggagtagggagaaaattgctcagatagaaaacaaaagagcagccgggcgcagtggctcacgcctgtaatcccagcactttgtgccgctgaggtgggcagatcacctaaggtcaggagttcgagaccagcctggccaatatggcgaaaccccatctctactaaaagtaaaaaaaaaaaaaaaaaaaatagccggtcatggtgttgtgtgcctataatcccagctactcgggacgctgaattaggagaatcgcttgaatcc

SEQ ID NO: 87705 - DNA, 403 bp, Homo sapiens
tggggtgcagtggtgcaatcacagatcactgcagcctcaacttcccaggctccagtgatcctcccacctcagcctcccaagtagctgggactataggtatgtgtcaccacacccagctaattttttaattttttatagagatggggtttcgccacattgtctaagctggtcttggactcttgggctcaagcaatccacctacctcggcctcccaaagtactgggattataggcatgagtcactgtgcccagcctgatttttttctattttatgtttgtttatttatttatttactgagacaagagtttcactcttgtcacccaggctggagtgcagtggcgcgatctcagatcactgcaacctctgtctcctgggttcaagtgattctcctgcctcagcctcc

SEQ ID NO: 87706 - DNA, 149 bp, Homo sapiens
  misc_feature (3)..(3): n is a, c, g, or t
  misc_feature (148)..(148): n is a, c, g, or t
acngccagtctgggatagttgtagaaatacaggcaggtagaggcctggcattgctcgctagctacagggcccaggccatgtggccctgtgggcagaccatggcagtgtttgagctgagcatcagagcacactgcacacagaggccgcnt

SEQ ID NO: 87707 - DNA, 385 bp, Homo sapiens
gtggtttcgtgtttgggagcttgaactagactttagaaggcctaggacccccttccatgtgtgcctgagcagtatattggcagaccattcacattttccatctcattatctcacatcgagaaagcagacttaaatcactcttcacacactcattacagactgagggactatacttacttgagcaggctgctttgggattttctttagtgacttttggttatatgcttttgtaatcaactgagcgtctttctttaaggctatttttcaatacgaaattctttaaaatgaaatctcttaaaatctgagggaaaggtatagacataaaaacaattcctatcatatacagataaataagaacttaataaaaatttattgctattgtttc

SEQ ID NO: 87708 - DNA, 434 bp, Homo sapiens
tttgaggcatttttatcaattaaaatgtactcatcagattacttgataaatatatattgagcatcagcaagtgccagtgcttgtgtggcctctgaagatgggattctgcctcatgaagtctagagggaaggcactaatatgtgtaaaattacaatgttgataagagctgttagaggtataatggtgctataaaattttaaaataggaggattttgacttattcagggaggaagggaaggcttctctgaagaatcgatgattctgttgagtgtgatatctgaaaggaagaatgaaagtagacaatgaaagagaccagccatggggtgaggaaaggagagcatccgggatcagattgcttcagaagcccaggcaaaatatgatggtgtttagagtaatggatttgtagtagagatgaaaagaagagagcttaagtt

SEQ ID NO: 87709 - DNA, 200 bp, Homo sapiens
atccgcccaccttagccttgttgttgttgctgtgattacaggtatgagccaccacgcctgggctgaagcagtggttttcaaggcactgattatcaggcagtagagttatctatgagtgatgggaaataaacaaggtgaaccaatcaacttctgccttgagcgtttccaggccatggagcagggaagaagaaccgaggcag

SEQ ID NO: 87710 - DNA, 315 bp, Homo sapiens
gatcttcattccaaattttactgcatggaaatgactaataatgtgcataaaaagttaactataaggatgctcactgcagggtggcttatattaacacaaattcacaaacaactccactgttccagcacagcagtgtttggtaaatcatgacatgtttctatgctcaattactatccaacttttcaaaattaggttggagatatgtaattaccaatatgaaaataaatttcctatatactatttagtaaaaataattcataaattttcattttttcaaacacttcatgaatttattccaaaatacaaatgttatct

SEQ ID NO: 87711 - DNA, 569 bp, Homo sapiens
tggtttagacaaaggttcttggaggtctcactcccatgccctctcatgggccgagggtccctggacatttaggagctagccagagctctgagcagtggggtccttgtcttgagggcggggccaggcactaatgctgatttcctggctgtggcagggagatggcagaggcaggagcatgtctcctctgagcaagggagtgaagtcattgtaggctgaagggccggataaatgagctaggggcttggtccaagacccagaaagcaagagagtgaagggatatccccaggaggaggcagctgagcactcccagattttggggggtcttccagatcagcttcccccttccccctagtcattagaagggagagccccaatgaagactagcttggttgtcacatctgtccaccctcctgccaagggcatatgtggttccacatgagtcaccaggagcccctcacgggtgtcctaccaaagagctcaagaaaggtgaggttaaactggccctggccacagaggctggagggccggggtgcctggaccccagggttggccagcaggggtcgggggag

SEQ ID NO: 87712 - DNA, 136 bp, Homo sapiens
gacagggtcagctgtggccagctgacctctcagagggagtttctttcaagacttgtaagcctggtgtgcccagagcccttgctctgctggggtggcccctggtgtgttgagatcagttctaatccatcccagatgc

SEQ ID NO: 87713 - DNA, 446 bp, Homo sapiens
ttcaaatcagttccaagcacttcctcagcaagtggcccggcagcaattaccctgctgctgaagacacttcgcatcacaggcctcagtttttgagacaagcaagcaaggctgtaagaaatgataacatatgtttcagcctccattcaccagcgatttatacccccataagaagggtgaatcaattttcatgcaaattcaacaggcatattcaacaacgttgctctcttctctaattcacacaaactcagcattcatcggctgcattacttgcctcaaatgggcactcacagttgctaaatgattcgggcgggggtggagttgctctgtgtcaaaaaggggcaaagaacaaggaaaggacatgaatccatcagggcaatgagagctgaactgattcactgagacaaaatagtgaggttttgaaaagccagtgcaaaaggagatggctt

SEQ ID NO: 87714 - DNA, 477 bp, Homo sapiens
ctgatactttctttctcttataattgtgactgacagttgattaacaacttgaaaaaaaagaaaagcacaagatttttacctcataccatataccaaagtagagtctagatgtagtaaataataaaataataattcaatgagaaaaaaatttggtgaaaaacttagatttaagaattatacaagaggccgggtgcggtggctcacgcctgtaatcccagcactttgggaggccgaggcgggtggatcatgaggtcaggagatcgagaccatcctggctaacaaggtgaaaccccgtctctactaaaaatacaaaaaattagccgggcgcggtggcgggcgcctgtagtcccagctactcgggaggctgaggcaggagaatggcgtgaacccgggaagcggagcttgcagtgagccgagattgcgccactgcagtccgcagtccggcctgggcgacagagcgagactccgtctcaaaaa

SEQ ID NO: 87715 - DNA, 1615 bp, Homo sapiens
ggctggcatggagcgggtgccccctgagcctggagagaagcgtgtggcctgttcccggctgccgtgctcctccccagctctgtctgccacgtacagggcccttgaggcacttagagggtgactctggcaggcatggtctgtctgggagccccaggtgagcccgggacggggaggcaggtgtgagtgcctcctgggcttccccagcaggctccgccccctccgtggccacccatgtaatccgctgaccgcctgtctctggttcagcttccaggccgagcggcccgcgttaaacgtcgtcatcttccctctgctccacgagggcctgaccgacgtcatccgggacgtccccctggtgcacctggatgagatcaccttatttaagagcagagtggccgaggaaccgccgaacctgtggtggtgagaggcggagccgccgcccatcggtctcagtcacctcgagaagctgcaggagcctgggacgccagggacccttggtttgtcacaagaggaagggggcctctctcccggccagccacgccccacctggctcctggggctcccggcgtctccacggctctctcatggggactgttgctctgtgaagtttgggtcgaggggatgcgttctgggtgacatgagggggctcgggggacggtcgatgtggggggctggctgaaccaggctgacccttggggcctggctggggggtttgtatactgagccgcaatccctgggggccctgtccacgggcctggagggcccgaaccccctgccacttccgaccgggaagcgtgtcccttggctgttgtgtttgtggtcacctgccaccggggccccgtggatgggcggccacatgctgtccccctgaagtccagtcggccgggctggtcaccgtgtatctgagtgtccccttgcatggtcaagtgtgacatggggaagggcctgccagtttagtggctgcagacttgggactctccatcccattaggacacacttgagcccactcatgtctctggggcttttctagccagatgatgcctgtggccccagagaggtcccctgaggttgggactgctggttggagcctctcctgtgacttttcagcccaaccagcagggcccgtttctaacgagagaggcctcctccccctcccacccaccccacggccttcagcttccctgggaaggtccatgcgcgttcctggggaaatcgatacacattcggctttgttagaataacgcgaaacattaaaacccagaaaggattcttaaggctggagtagcaatcacatgaccccatttcaaatgacttcatttaagactttaaaaatactcagctgggcgcgatggctcacgcctgtaatcccggcactttgggaggctgaggtgggtggatcacgaggtcaggagttcaagaccagcctggccaacatggtgaaaccccatctctactaaaaatacaaaaattagctgggcgtggtggcgggcgcctgtaatcctagctactcaggaggctgaggcaggagaatcgtttgaacctgggaggcggaggttgcagtgagccgagatcacaccattgcactccagcctggacaacagggtgagactccgcctca

SEQ ID NO: 87716 - DNA, 617 bp, Homo sapiens
ggttgagcggtggacgcgccggcttcgagcatccctagccgggcaggtgggaggcacggggttgcggatcccgcggccgcggttcggacccgccggcgacatggccagctccggagaggtactgtccgcgactgtctccgctctgcttctgcctcggcggcctcggtctccctgggttcttccatcccgacccgggttcccttgcatcctttctatcccgacccctaccccgccccgtccttcccatcctgaccctggccttgcccctgctcccgtccttcccgcatcctgtccccaagactcctaccctgtctcggaaggcacaagctgtctcccccttcgctcgtgcattcctgatcgccagagttgtccccgtctctccgtcccctgagggtccaggctcctccgagacccctttctcagtgccccggttccttggctgggcccctgcagccctgggacattccccctccgtgcccacgtcccactccatcttctatctctggatgctcagtttcagccccagcccacttctccctggagcctgcttgctgaatgacgtggggggtgggtgatggaggaaaagccatttcacctgagggacttacgacgtaccc

SEQ ID NO: 87717 - DNA, 3268 bp, Homo sapiens
ggttgagcggtggacgcgccggcttcgagcatccctagccgggcaggtgggaggcacggggttgcggatcccgcggccgcggttcggacccgccggcgacatggccagctccggagaggacatatccaatgatgatgatgacatgcaccctgcagcagccgggatggcagacggggtccacctcctagggttctctgatgagatcctccttcacatcctgagtcacgtccccagcacagatctgattctgaacgtccggcgtacctgtcggaagcttgcagccctgtgccttgacaagagcctcatccacaccgtgttgctgcaaaaggactatcaggcgagcgaggacaaagtgaggcagctggtgaaggagatcggccgggagatccagcagctgagcatggctggctgctactggctgcctggctccaccgtggaacacgtggcccgctgccgcagcctggtgaaggtgaacctctcgggctgccacctcacttccctgcgcctctccaagatgctctcggccctgcagcacctgcgctcgctggccatcgacgtgagccccggcttcgacgccagccagctgagcagcgagtgcaaggccaccctgagccgcgtgcgggagctcaagcagacgctgttcactccctcctacggcgtggtgccctgctgcaccagcctagagaagctgctgctctacttcgagattctggaccgcacgcgcgagggcgccatcctctcgggccagcttatggtgggccagagcaacgtgccgcactaccagaacctgcgggtcttctatgcgcgcctggcccccggctacatcaaccaggaggtggtgcggctctacctggctgtgcttagcgaccgcactcctcagaacctccacgccttcctcatctccgtccctggcagcttcgcggagagcggcgccaccaagaacctcctggactccatggcgcgcaatgtcgtgctggatgccctgcagctgcccaagtcctggctgaacggctcttccctcctgcagcacatgaaattcaacaacccgttctacttcagtttcagccgctgtaccctgtcaggcggccatctgatccagcaggtcatcaacggcgggaaggacctgcggagcctggccagcttgaacctcagcggctgcgtccactgcctgtccccagactcgctgtctgtcgctgactccgcgccgcgcgccgaccgcgcgcccgcccagccggccatgcacgcagtgccgcgcggctttggcaagaaagtgcgtgtgggcgtgcagtcctgtcccagccccttctcgggccaggcgtgcccccagccctcctccgtgttctggtctctgctgaagaacctgcccttcctggaacacctcgagctgattgggtccaacttctcctccgccatgccccgcaacgagcccgccatccgcaactcgctcccaccctgcagccgcgcacagagtgtcggggactcggaggtggccgccatcggccagctggccttcctgcggcacctgacgctcgcacagctgcccagcgtccttacgggctccgggctggtcaatatcggcctgcagtgccagcagttgcggtccctgtcgctggccaacctgggcatgatggggaaggtggtgtacatgcccgcgctctcagacatgttgaagcactgcaagcggctgagggacctcaggctggagcagccctacttcagcgccaacgcccagttcttccaggcgctgagccagtgcccctcgctgcagcgcctgtgcctggtctctcgcagcggcaccctccagcccgatgccgtgctggccttcatggctcgctgcctgcaggttgtcatgtgccacctgttcaccggggagtccctcgccacctgcaagagcctgcagcagtcgcttctccgcagcttccaggccgagcggcccgcgttaaacgtcgtcatcttccctctgctccacgagggcctgaccgacgtcatccgggacgtccccctggtgcacctggatgagatcaccttatttaagagcagagtggccgaggaaccgccgaacctgtggtggtgagaggcggagccgccgcccatcggtctcagtcacctcgagaagctgcaggagcctgggacgccagggacccttggtttgtcacaagaggaagggggcctctctcccggccagccacgccccacctggctcctggggctcccggcgtctccacggctctctcatggggactgttgctctgtgaagtttgggtcgaggggatgcgttctgggtgacatgagggggctcgggggacggtcgatgtggggggctggctgaaccaggctgacccttggggcctggctggggggtttgtatactgagccgcaatccctgggggccctgtccacgggcctggagggcccgaaccccctgccacttccgaccgggaagcgtgtcccttggctgttgtgtttgtggtcacctgccaccggggccccgtggatgggcggccacatgctgtccccctgaagtccagtcggccgggctggtcaccgtgtatctgagtgtccccttgcatggtcaagtgtgacatggggaagggcctgccagtttagtggctgcagacttgggactctccatcccattaggacacacttgagcccactcatgtctctggggcttttctagccagatgatgcctgtggccccagagaggtcccctgaggttgggactgctggttggagcctctcctgtgacttttcagcccaaccagcagggcccgtttctaacgagagaggcctcctccccctcccacccaccccacggccttcagcttccctgggaaggtccatgcgcgttcctggggaaatcgatacacattcggctttgttagaataacgcgaaacattaaaacccagaaaggattcttaaggctggagtagcaatcacatgaccccatttcaaatgacttcatttaagactttaaaaatactcagctgggcgcgatggctcacgcctgtaatcccggcactttgggaggctgaggtgggtggatcacgaggtcaggagttcaagaccagcctggccaacatggtgaaaccccatctctactaaaaatacaaaaattagctgggcgtggtggcgggcgcctgtaatcctagctactcaggaggctgaggcaggagaatcgtttgaacctgggaggcggaggttgcagtgagccgagatcacaccattgcactccagcctggacaacagggtgagactccgcctca

SEQ ID NO: 87718 - DNA, 2990 bp, Homo sapiens
ggttgagcggtggacgcgccggcttcgagcatccctagccgggcaggtgggaggcacggggttgcggatcccgcggccgcggttcggacccgccggcgacatggccagctccggagaggacatatccaatgatgatgatgacatgcaccctgcagcagccgggatggcagacggggtccacctcctagggttctctgatgagatcctccttcacatcctgagtcacgtccccagcacagatctgattctgaacgtccggcgtacctgtcggaagcttgcagccctgtgccttgacaagagcctcatccacaccgtgttgctgcaaaaggactatcaggcgagcgaggacaaagtgaggcagctggtgaaggagatcggccgggagatccagcagctgagcatggctggctgctactggctgcctggctccaccgtggaacacgtggcccgctgccgcagcctggtgaaggtgaacctctcgggctgccacctcacttccctgcgcctctccaagatgctctcggccctgcagcacctgcgctcgctggccatcgacgtgagccccggcttcgacgccagccagctgagcagcgagtgcaaggccaccctgagccgcgtgcgggagctcaagcagacgctgttcactccctcctacggcgtggtgccctgctgcaccagcctagagaagctgctgctctacttcgagattctggaccgcacgcgcgagggcgccatcctctcgggccagcttatggtgggccagagcaacgtgccgcactaccagaacctgcgggtcttctatgcgcgcctggcccccggctacatcaaccaggaggtggtgcggctctacctggctgtgcttagcgaccgcactcctcagaacctccacgccttcctcatctccgtccctggcagcttcgcggagagcggcgccaccaagaacctcctggactccatggcgcgcaatgtcgtgctggatgccctgcagctgcccaagtcctggctgaacggctcttccctcctgcagcacatgaaattcaacaacccgttctacttcagtttcagccgctgtaccctgtcaggcggccatctgatccagcaggtcatcaacggcgggaaggacctgcggagcctggccagcttgaacctcagcggctgcgtccactgcctgtccccagactcgctgtctgtcgctgactccgcgccgcgcgccgaccgcgcgcccgcccagccggccatgcacgcagtgccgcgcggctttggcaagaaagtgcgtgtgggcgtgcagtcctgtcccagccccttctcgggccaggcgtgcccccagccctcctccgtgttctggtctctgctgaagaacctgcccttcctggaacacctcgagctgattgggtccaacttctcctccgccatgccccgcaacgagcccgccatccgcaactcgctcccaccctgcagccgcgcacagagtgtcggggactcggaggtggccgccatcggccagctggccttcctgcggcacctgacgctcgcacagctgcccagcgtccttacgggctccgggctggtcaatatcggcctgcagtgccagcagttgcggtccctgtcgctggccaacctgggcatgatggggaaggtggtgtacatgcccgcgctctcagacatgttgaagcactgcaagcggctgagggacctcaggctggagcagccctacttcagcgccaacgcccagttcttccaggcgctgagccagtgcccctcgctgcagcgcctgtgcctggtctctcgcagcggcaccctccagcccgatgccgtgctggccttcatggctcgctgcctgcaggttgtcatgtgccacctgttcaccggggagtccctcgccacctgcaagagcctgcagcagtcgcttctccgcagcttccaggccgagcggcccgcgttaaacgtcgtcatcttccctctgctccacgagggcctgaccgacgtcatccgggacgtccccctggtgcacctggatgagatcaccttatttaagagcagagtggccgaggaaccgccgaacctgtggtggtgagaggcggagccgccgcccatcggtctcagtcacctcgagaagctgcaggagcctgggacgccagggacccttggtttgtcacaagaggaagggggcctctctcccggccagccacgccccacctggctcctggggctcccggcgtctccacggctctctcatggggactgttgctctgtgaagtttgggtcgaggggatgcgttctgggtgacatgagggggctcgggggacggtcgatgtggggggctggctgaaccaggctgacccttggggcctggctggggggtttgtatactgagccgcaatccctgggggccctgtccacgggcctggagggcccgaaccccctgccacttccgaccgggaagcgtgtcccttggctgttgtgtttgtggtcacctgccaccggggccccgtggatgggcggccacatgctgtccccctgaagtccagtcggccgggctggtcaccgtgtatctgagtgtccccttgcatggtcaagtgtgacatggggaagggcctgccagtttagtggctgcagacttgggactctccatcccattaggacacacttgagcccactcatgtctctggggcttttctagccagatgatgcctgtggccccagagaggtcccctgaggttgggactgctggttggagcctctcctgtgacttttcagcccaaccagcagggcccgtttctaacgagagaggcctcctccccctcccacccaccccacggccttcagcttccctgggaaggtccatgcgcgttcctggggaaatcgatacacattcggctttgttagaataacgcgaaacattaaaacccagaaaggattcttaaggctggccttgaactcctgacctcaagtgattctcctgcctcggcctcccaaagtgctaggataac

SEQ ID NO: 87719 - DNA, 1152 bp, Homo sapiens
gcgattctcctgccttggcttcctgagtagctgggattacaggcctgcgccaccagcatgtattttgtattttagtaaagatagggtttcaccatgttggtcaggctggtctcgaactcccgacctcaggtgatccgcctgcctcggcctcccaaagtgctgggattacaggcatgagccaccgcacccagcctgcaaccatctttaactctggatttttcacatctctgcccgttgtttggatctagaagcagtgcttacttgggcagttgtgggtaaaggcggtagattgaacagagaacctttccttctccctctccctcgccacctgctgtcaggccctttctggaaggcccacatagtctggcccctcttcccttagctagctagcatctccgcttcccctcgtgacagggcatcctggagtttgatgctctgctgctgcgcaggaagtcaggtgagcacctagaattgaacacaaattaggaggaggcgattcctggagagagctggagcttggtaggcgatgtggggagtgacgcatttcaagacctctcaggaggacgggctgactgctggagtgatcagggctcctgagagaggcgtgcgcccggccaagggggcagcaggacatgaacgccctgagtgttcgtgtccctgcaggtggggagaggtgacaggaaggaggccccagctgttcacagagttgcgagaagagccatcagccaggacgtctcgagccactgggcgccgacaaccctgcttgccagactctggggtagtctgttgtccttgcggtcggccgctggctgtctcaggaataatcctggttggggtttccccctctctggttgtaaaaacaacttgtgtttatagagtactttttaaaaatttagactatgcatcaatcttttttcttgtttgtttgtttgagacagagtctcactctgtcgtccaggctggagtgcagtggcgggatctcagctcactgcaacctctgctttctgggttgcaacctcagcctcctgagcagctggagaatgaactggagatagggttctcatattgttttgtaatctgatttttaaaaatgtaacactacaccgtggagtcctcttgtgtcagtaaataaagccctaagtgattattctc

SEQ ID NO: 87720 - DNA, 1806 bp, Homo sapiens
ggttgagcggtggacgcgccggcttcgagcatccctagccgggcaggtgggaggcacggggttgcggatcccgcggccgcggttcggacccgccggcgacatggccagctccggagaggacatatccaatgatgatgatgacatgcaccctgcagcagccgggatggcagacggggtccacctcctagggttctctgatgagatcctccttcacatcctgagtcacgtccccagcacagatctgattctgaacgtccggcgtacctgtcggaagcttgcagccctgtgccttgacaagagcctcatccacaccgtgttgctgcaaaaggactatcaggcgagcgaggacaaagtgaggcagctggtgaaggagatcggccgggagatccagcagctgagcatggctggctgctactggctgcctggctccaccgtggaacacgtggcccgctgccgcagcctggtgaaggtgaacctctcgggctgccacctcacttccctgcgcctctccaagatgctctcggccctgcagcacctgcgctcgctggccatcgacgtgagccccggcttcgacgccagccagctgagcagcgagtgcaaggccaccctgagccgcgtgcgggagctcaagcagacgctgttcactccctcctacggcgtggtgccctgctgcaccagcctagagaagctgctgctctacttcgagattctggaccgcacgcgcgagggcgccatcctctcgggccagcttatggtgggccagagcaacgtgccgcactaccagaacctgcgggtcttctatgcgcgcctggcccccggctacatcaaccaggaggtggtgcggctctacctggctgtgcttagcgaccgcactcctcagaacctccacgccttcctcatctccgtccctggcagcttcgcggagagcggcgccaccaagaacctcctggactccatggcgcgcaatgtcgtgctggatgccctgcagctgcccaagtcctggctgaacggctcttccctcctgcagcacatgaaattcaacaacccgttctacttcagtttcagccgctgtaccctgtcaggcggccatctgatccagcaggtcatcaacggcgggaaggacctgcggagcctggccagcttgaacctcagcggctgcgtccactgcctgtccccagactcgctgtctgtcgctgactccgcgccgcgcgccgaccgcgcgcccgcccagccggccatgcacgcagtgccgcgcggctttggcaagaaagtgcgtgtgggcgtgcagtcctgtcccagccccttctcgggccaggcgtgcccccagccctcctccgtgttctggtctctgctgaagaacctgccttccctgggaaggtccatgcgcgttcctggggaaatcgatacacattcggctttgttagaataacgcgaaacattaaaacccagaaaggattcttaaggctggagtagcaatcacatgaccccatttcaaatgacttcatttaagactttaaaaatactcagctgggcgcgatggctcacgcctgtaatcccggcactttgggaggctgaggtgggtggatcacgaggtcaggagttcaagaccagcctggccaacatggtgaaaccccatctctactaaaaatacaaaaattagctgggcgtggtggcgggcgcctgtaatcctagctactcaggaggctgaggcaggagaatcgtttgaacctgggaggcggaggttgcagtgagccgagatcacaccattgcactccagcctggacaacagggtgagactccgcctca

SEQ ID NO: 87721 - DNA, 2406 bp, Homo sapiens
ggttgagcggtggacgcgccggcttcgagcatccctagccgggcaggtgggaggcacggggttgcggatcccgcggccgcggttcggacccgccggcgacatggccagctccggagaggacatatccaatgatgatgatgacatgcaccctgcagcagccgggatggcagacggggtccacctcctagggttctctgatgagatcctccttcacatcctgagtcacgtccccagcacagatctgattctgaacgtccggcgtacctgtcggaagcttgcagccctgtgccttgacaagagcctcatccacaccgtgttgctgcaaaaggactatcaggcgagcgaggacaaagtgaggcagctggtgaaggagatcggccgggagatccagcagctgagcatggctggctgctactggctgcctggctccaccgtggaacacgtggcccgctgccgcagcctggtgaaggtgaacctctcgggctgccacctcacttccctgcgcctctccaagatgctctcggccctgcagcacctgcgctcgctggccatcgacgtgagccccggcttcgacgccagccagctgagcagcgagtgcaaggccaccctgagccgcgtgcgggagctcaagcagacgctgttcactccctcctacggcgtggtgccctgctgcaccagcctagagaagctgctgctctacttcgagattctggaccgcacgcgcgagggcgccatcctctcgggccagcttatggtgggccagagcaacgtgccgcactaccagaacctgcgggtcttctatgcgcgcctggcccccggctacatcaaccaggaggtggtgcggctctacctggctgtgcttagcgaccgcactcctcagaacctccacgccttcctcatctccgtccctggcagcttcgcggagagcggcgccaccaagaacctcctggactccatggcgcgcaatgtcgtgctggatgccctgcagctgcccaagtcctggctgaacggctcttccctcctgcagcacatgaaattcaacaacccgttctacttcagtttcagccgctgtaccctgtcaggcggccatctgatccagcaggtcatcaacggcgggaaggacctgcggagcctggccagcttgaacctcagcggctgcgtccactgcctgtccccagactcgctgtctgtcgctgactccgcgccgcgcgccgaccgcgcgcccgcccagccggccatgcacgcagtgccgcgcggctttggcaagaaagtgcgtgtgggcgtgcagtcctgtcccagccccttctcgggccaggcgtgcccccagccctcctccgtgttctggtctctgctgaagaacctgcccttcctggaacacctcgagctgattgggtccaacttctcctccgccatgccccgcaacgagcccgccatccgcaactcgctcccaccctgcagccgcgcacagagtgtcggggactcggaggtggccgccatcggccagctggccttcctgcggcacctgacgctcgcacagctgcccagcgtccttacgggctccgggctggtcaatatcggcctgcagtgccagcagttgcggtccctgtcgctggccaacctgggcatgatggggaaggtggtgtacatgcccgcgctctcagacatgttgaagcactgcaagcggctgagggacctcaggctggagcagccctacttcagcgccaacgcccagttcttccaggcgctgagccagtgcccctcgctgcagcgcctgtgcctggtctctcgcagcggcaccctccagcccgatgccgtgctggccttcatggctcgctgcctgcaggttgtcatgtgccacctgttcaccggggagtccctcgccacctgcaagagcctgcagcagtcgcttctccgcaggtggggagaggtgacaggaaggaggccccagctgttcacagagttgcgagaagagccatcagccaggacgtctcgagccactgggcgccgacaaccctgcttgccagactctggggtagtctgttgtccttgcggtcggccgctggctgtctcaggaataatcctggttggggtttccccctctctggttgtaaaaacaacttgtgtttatagagtactttttaaaaatttagactatgcatcaatcttttttcttgtttgtttgtttgagacagagtctcactctgtcgtccaggctggagtgcagtggcgggatctcagctcactgcaacctctgctttctgggttgcaacctcagcctcctgagcagctggagaatgaactggagatagggttctcatattgttttgtaatctgatttttaaaaatgtaacactacaccgtggagtcctcttgtgtcagtaaataaagccctaagtgattattctc

SEQ ID NO: 87722 - DNA, 2180 bp, Homo sapiens
ggttgagcggtggacgcgccggcttcgagcatccctagccgggcaggtgggaggcacggggttgcggatcccgcggccgcggttcggacccgccggcgacatggccagctccggagaggacatatccaatgatgatgatgacatgcaccctgcagcagccgggatggcagacggggtccacctcctagggttctctgatgagatcctccttcacatcctgagtcacgtccccagcacagatctgattctgaacgtccggcgtacctgtcggaagcttgcagccctgtgccttgacaagagcctcatccacaccgtgttgctgcaaaaggactatcaggcgagcgaggacaaagtgaggcagctggtgaaggagatcggccgggagatccagcagctgagcatggctggctgctactggctgcctggctccaccgtggaacacgtggcccgctgccgcagcctggtgaaggtgaacctctcgggctgccacctcacttccctgcgcctctccaagatgctctcggccctgcagcacctgcgctcgctggccatcgacgtgagccccggcttcgacgccagccagctgagcagcgagtgcaaggccaccctgagccgcgtgcgggagctcaagcagacgctgttcactccctcctacggcgtggtgccctgctgcaccagcctagagaagctgctgctctacttcgagattctggaccgcacgcgcgagggcgccatcctctcgggccagcttatggtgggccagagcaacgtgccgcactaccagaacctgcgggtcttctatgcgcgcctggcccccggctacatcaaccaggaggtggtgcggctctacctggctgtgcttagcgaccgcactcctcagaacctccacgccttcctcatctccgtccctggcagcttcgcggagagcggcgccaccaagaacctcctggactccatggcgcgcaatgtcgtgctggatgccctgcagctgcccaagtcctggctgaacggctcttccctcctgcagcacatgaaattcaacaacccgttctacttcagtttcagccgctgtaccctgtcaggcggccatctgatccagcaggtcatcaacggcgggaaggacctgcggagcctggccagcttgaacctcagcggctgcgtccactgcctgtccccagactcgctgtctgtcgctgactccgcgccgcgcgccgaccgcgcgcccgcccagccggccatgcacgcagtgccgcgcggctttggcaagaaagtgcgtgtgggcgtgcagtcctgtcccagccccttctcgggccaggcgtgcccccagccctcctccgtgttctggtctctgctgaagaacctgcccttcctggaacacctcgagctgattgggtccaacttctcctccgccatgccccgcaacgagcccgccatccgcaactcgctcccaccctgcagccgcgcacagagtgtcggggactcggaggtggccgccatcggccagctggccttcctgcggcacctgacgctcgcacagctgcccagcgtccttacgggctccgggctggtcaatatcggcctgcagtgccagcagttgcggtccctgtcgctggccaacctgggcatgatggggaaggtggtgtacatgcccgcgctctcagacatgttgaagcactgcaagcggctgagggacctcaggctggagcagccctacttcagcgccaacgcccagttcttccaggcgctgagccagtgcccctcgctgcagcgcctgtgcctggtctctcgcagcggcaccctccagcccgatgccgtgctggccttcatggctcgctgcctgcaggttgtcatgtgccacctgttcaccggggagtccctcgccacctgcaagagcctgcagcagtcgcttctccgcaggtgagtgatgtgggttgcgtacagcttcaggggccgcagaaatcaccagcatcccgtgacctggtccccagccttcaccgagtgcctaccagtggtttcttggaattgacgagcaccaggcagtgacagggtgaaagcaaggggtttggtctcccacggcccagcctctgctccttgagcattccctagccacatggtaaattttctagatagttcaagctctcctctcccacaagtacaacctgccggtgggtaccgactaa

SEQ ID NO: 87723 - DNA, 815 bp, Homo sapiens
gggagctcaagcagacgctgttcactccctcctacggcgtggtgccctgctgcaccagcctagagaagctgctgctctacttcgagattctggaccgcacgcgcgagggcgccatcctctcgggccagcttatggtgggccagagcaacgtgccgcactaccagaacctgcgggtcttctatgcgcgcctggcccccggctacatcaaccaggaggtggtgcggctctacctggctgtgcttagcgaccgcactcctcagaacctccacgccttcctcatctccgtccctggcagcttcgcggagagcggcgccaccaagaacctcctggactccatggcgcgcaatgtcgtgctggatgccctgcagctgcccaagtcctggctgaacggctcttccctcctgcagcacatgaaattcaacaacccgttctacttcagtttcagccgctgtaccctgtcaggcggccatctgatccagcaggtcatcaacggcgggaaggacctgcggagcctggccagcttgaacctcagcggctgcgtccactgcctgtccccagactcgctgctccgcaaggcggaggacgacatcgacagcagcatcctggagactctggtggcgtcctgctgcaacctgcgccacctgaacctctcggccgcccaccaccacagctcggagggcctgggccgccacctctgccagctcctggcccggctgcgtcacctgcgctccctctccctgcctgtctgctctgtcgctgactccgcgccgcgcgccgaccgcgcgcccgcccagccggccatgcacgcagtgccg

SEQ ID NO: 87724 - DNA, 2648 bp, Homo sapiens
tcgcggccccgcgcgccggatcggcgtgcgtgcggctggagccttaagcgtttcccccgcccggcttcatccctgctggcggcccagcgtcgttctcctcctgcgcgaggcggccaaggcctgctggcccggagccgcgcctccacccgcgcgaggtatcgtccttggagaagatggaagcggagaggcggccggcgccgggctcgccctccgagggcctgtttgcggacgggcacctgatcttgtggacgctgtgctcggtcctgctgccggtgttcatcaccttctggtgtagcctccagcggtcgcgccggcagctgcaccgcagggacatcttccgcaagagcaagcacgggtggcgcgacacggacctgttcagccagcccacctactgctgcgtgtgcgcgcagcacattctgcagggcgccttctgcgactgctgcgggctccgcgtggacgagggctgcctcaggaaggccgacaagcgcttccagtgcaaggagattatgctcaagaatgacaccaaggtcctggacgccatgccccaccactggatccggggcaacgtgcccctgtgcagttactgtatggtttgcaagcagcagtgtggctgtcaacccaagctttgcgattacaggtgcatttggtgccagaaaacagtacatgatgagtgcatgaaaaatagtttaaagaatgaaaaatgtgattttggagaattcaaaaacctaatcattccaccaagttatttaacatccattaatcagatgcgtaaagacaaaaaaacagattatgaagtgctagcctctaagcttggaaagcagtggaccccattaataatcctggccaactctcgtagtggaactaatatgggagaaggactgttgggagaatttaggatcttgttgaatccagtccaggtttttgatgtaactaaaactcctcctatcaaagccctacaactctgtactcttctcccatattattcagctcgagtacttgtttgtggaggggatgggactgtagggtgggtcctggatgcagttgatgacatgaagattaagggacaagaaaagtacattccacaagttgcagttttgcctctgggaacaggcaacgatctatccaatacattgggttggggtacaggttatgctggagaaattccagttgcgcaggttttgcgaaatgtaatggaagcagatggaattaaactagatcgatggaaagttcaagtaacaaataaaggatactacaacttaagaaaacccaaggaattcacaatgaacaactatttttctgttggacctgatgctctcatggctctcaattttcatgctcatcgtgagaaggcaccatctctgttttctagcagaattcttaataaggcggtttacttattctatggaaccaaagattgtttagtgcaagaatgtaaagatttgaataaaaaagttgagctagaactggatggtgagcgagtagcactgcccagcttggaaggtattatagttctgaacatcggatactggggcggtggctgcagactatgggaagggatgggggacgagacttaccctctagccaggcatgacgatggtctgctggaagtcgttggagtatatgggtctttccactgtgctcagattcaagtaaaactggctaatccttttcgaataggacaggcacatacagtgaggctgattttgaagtgctccatgatgccaatgcaggtggatggggagccttgggcccaagggccctgcactgtcaccataactcacaagacacatgcaatgatgttatatttctctggagaacaaacagatgatgacatctctagtacttcggatcaagaagatataaaggcgactgaatagatggatgagggagtgaaaactttgcatagaatcctcacgcaagtagatacatgttcatccaaaagtattaatagaaattctctatcagctattcagtcttaatttcactagtagtataatgggtatacatttttgtaaatagcatccccaaaccagccagccttcagttatttacaaatgtttgtccttttttcagcaaaatacttcaaatgaatagtattaacttacaaaaagtcacgaaaaacttacatgagagtgaaaatttgttatgactgttttgagagtgggactcactctgaagtatgtgctgtctcatgtcttatttttgaaccatgcatatgatggacacacaatggatggacacattatatctccaacaaggtgtgggtggaaagatcaaattaacctgcttttttgaaaggaaatgattactgtcaaaccagcatggttaattgtgagcatcctctgcagcatgccccttaagattttctacaacccaaaccaagtgtatgtattgatttctaggaacccccaaaaggagaatagtaaaaaaagatcatacttaaaatttgtattacaatttttattttaggaacttattcagacacgtaaatgttgtttaattctgtaggtaaccatttgagctgcaattcaggatcttttttataacaccagtgtagccaaaagagaaacagataagtgaattggtaagaaataagattcagagcacttgggattgtaagttataggttctgagctgaactgtttatc

SEQ ID NO: 87725 - DNA, 1734 bp, Homo sapiens
tcgcggccccgcgcgccggatcggcgtgcgtgcggctggagccttaagcgtttcccccgcccggcttcatccctgctggcggcccagcgtcgttctcctcctgcgcgaggcggccaaggcctgctggcccggagccgcgcctccacccgcgcgaggtatcgtccttggagaagatggaagcggagaggcggccggcgccgggctcgccctccgagggcctgtttgcggacgggcacctgatcttgtggacgctgtgctcggtcctgctgccggtgttcatcaccttctggtgtagcctccagcggtcgcgccggcagctgcaccgcagggacatcttccgcaagagcaagcacgggtggcgcgacacggacctgttcagccagcccacctactgctgcgtgtgcgcgcagcacattctgcagggcgccttctgcgactgctgcgggctccgcgtggacgagggctgcctcaggaaggccgacaagcgcttccagtgcaaggagattatgctcaagaatgacaccaaggtcctggacgccatgccccaccactggatccggggcaacgtgcccctgtgcagttactgtatggtttgcaagcagcagtgtggctgtcaacccaagctttgcgattacaggtatggtcttcgtggacactcactgtcccagaatgcgccgtgggaatcaggatttcatagagtggtgtagaggcctgctttaatctctgctgatgacctaaactcattttgaggaaacaagctaataaataaacatccctgagtttgtgcaagcgtggcagctttgcagtagtcatttgctgagacgatgcatccagcctccactcctcagccagcctgcccttttgggtaataaaacttggctcctaacgttaatacagaggtttctaagtggtgcctgcttcatggccactgtatattttagcttttgttcctatcgattatctccttattttaaataaggaaaaatgaaatatggacaaattaacttttcccttcagccgcaaaactgatgggtcacaggtttgtactatgaatgtgcagtgaaaacaagtgtcattccaaggcagcacttttatgtcttttgctaatatagctgttggtaccatagcgaaatatactcaaaaagaacactgaaaggaatattccttttgacgcttggtctttcaggacatgtagaatcttagataagtgaccttgattaagccaagaatattttaatgtcttttatatacacactggacaacacatttttgtccttaaatattgtttgaaaataggtgaagatgtcctttgctgatgttggaaatgtggtaaaggagaatgctgctttgcaaatgatctattctaactcagttcacagttgagaaaattaaagcccgttaggtccactctggtaaaataggactggcctccaggatttccagctctggactaacacttagcctcctttgagccttaagtctggacatcttcattgtaatgggttttatttctgacaagtagaaaggcgcataaacatgcttaagaaatgaaataggcagtaaataggaagctgctttttaatttttgtaattttttttgcagaaattctttcattagcatgaacgctattataatgtcaatacctgtttttaagtcttattttaaataattttacacattatcaaagaggcttaagaataaatgttcaaaataatgtattctagacaactaca

SEQ ID NO: 87726 - DNA, 488 bp, Homo sapiens
aataatttgatgtagcagtgtaatgggctgcattactagtgagttccttatgtgagtgtgcgagcatatgctggatgacttatctagaataatgtagaagagaattaaacattgaatgggagcttaaattagttaatttctgaggttcccttccattcttagaattctttgatttttatattgaattgagagaactagtatagtttttatttcagcaaattatagcaccattgttctcaaggcatggaaaatgtgcttttcatctttaagatactaaaccttttcactcatggcaattttttttagctagcctctaagcttggaaagcagtggaccccattaataatcctggccaactctcgtagtggaactaatatgggagaaggactgttgggagaatttaggatcttgttgaatccagtccagggcgacagagtgagactccatctcaaaaaaaaaaaagggaaacctcttacccttttagcagt

SEQ ID NO: 87727 - DNA, 489 bp, Homo sapiens
gccaataacttaggatttagctgttttcattaactaaacaatattaaatgccttatttatgaaattttacatagagataattttcctttgggctgcattcattgttttataaccctcatgccaaattttggcatctagcagagataaatatgaaaccactgttccaataaatttaaacaatagtgtatgttgacaattctgaagccattctaattctaattttatttcatgactactttcaaaaccagcttatttattaaagatatacttaagtcacatgaacttgaaaagacatttggcttaaaatctctattttctctgatacagtatttgatttaaagcccctttttttctttaagccaattaattagagcacttttacatgtttctagtagtgaaacatcatatacatgacacataaatacatagatgtattatacatgcagatagaagtagagcttatcatttcacaagacctctttttttcct

SEQ ID NO: 87728 - DNA, 1596 bp, Homo sapiens
ttcattctacttatctttattttctgaactttctacaatgaacatgttttatttttacttttgttaaaataaataacatttaatttgacggaaaattctaaaaatcaacatttggtaacttaaatattcattggcacatgattctgtgcctgtttctgggggtcattcccatgagaagagcaggtagaacttatgagaatagagcagtcgaaatattataggtttcatattttacggctttattgaaaacattgatatattgaatattcataaattttaatttaactttcttttataatccttaatgtgaggctaaggtataaggagaaaggagattggtaaggaagtgtgatacatattgaatcaggtgtcaaggtaccatttgtgcctggatctgaccaatagaccaaggtaaaaatctcaaagaatgagacttgtaatgagaatgccacaaacttgaataccttatgcacaaaacacaaacattgttatgcataatgtacatgaaccctgaaacaaagataatgatttggaccacccaactgaagtggcatgttatgtttttggcatgaacaaaagaaacaagagagaaaaaaatcaaaataattaaaataaattgttagagaaaagttactttaaaaatagctataacgctttgcaatttcagtaacagttctgcctctgatgcaatgtaaaacatgtattagacattcaggctccacaataaattttaatgagcactacaaatttagaatatataaaaatatcagtaacctatgaattcatcaacataactcacttttcagttaagttaggctgagttgaaattctactaagttttcccatattcttgataaaggctaaatttgaaataatttatttagatgactaattggcaatttgatagtagttacattttatgtaacacttgatataataacccaaattaattagctcaatattatcttctgtggtttattgatccaaaagtacatatttgttatgtaaacttatactatgtaaacttgaattagttttttgcttccttgaattaataaagcccattaatgcaaatctaagccttcatagacttttccaatccttagttaaatattaaaaactgagtattgtagttatttgctaggtataaaaggtgactcagagtagagagtaagatgtcagcaaatagacaataagatgtcagcaaaagtgcctcaaattttaactgcgtcaagttaagggcattgtaaatactgtagttttatgtagcttgcaacttctactgaaatgagtttaatcatgtctttcacatagctgaagtttgtgtcaagatttaagctgattttctcattcttatcaaagtctcacctgggggtagggaggggtaggcctacctcccacctctatactatcattttaggaacagacaggcataaatctgttcatatggtagaacacatgatgttagagtatattttgttgaatgctatggaatattaatataattaattctaaaatatcacctaaaatatgtcaactgaagatctgactgtactaaatatgaaaaataaagcagcacatactttctctactgtt

SEQ ID NO: 87729 - DNA, 153 bp, Homo sapiens
aatactatctgatacacagtaagcactcaataaatatttactgggtaaatgaacccataagcaaacccatctagtcccttctcctccagaagccctaaggatttgctttattttgttctcctctagagtgggggcccctgaggaagatgtaca

SEQ ID NO: 87730 - DNA, 870 bp, Homo sapiens
ggtggtacggcctgggagttaaggcatgtggcagtcaggtggcgaccactatctagcccaacgttgctggagttgttgcagctctgccgggcccacatatcagcgttcgtgcatgacgcctcctgtggatgggtcacaaaatgactgtgcagcagccgaaggcccctggaacccagacagatgtgctactggctgaccttcagcactgcaggtacctgtgccagcccccagccccgcctcctgttggccctcccacggaagacaagggtgtgtggccgtagtcatggccagaatcttcacttctgggccagcacccggcatggagcccttctgctggggcgatccccccactggaaagtgggtgggtaccagttgtgtgtgcaatgccctgtaggcctgagaggaggtgggggtgtggaaggcaccaggatgaggtaggcggtgggtgctggccctcccactgctgggctgcgtgacctgggatcagtctttcctctgtctgatggcaggtgcagattgcctgccctggcacgtggtgggcagtctgggcccaggagcatctcccaccctgtgtggctggggcctgctcgtgagtggcctgctgtcctcctgcccagcaagctgcaccaccctggcctgttgctgctgatggcactgagtccctctgcagatctgtcggggctgtgccttctctttgagcctgtgtggctgggctccctgcagggggtgctgcacccaccgagaccaagtgaggaggcacctgggactgtgctgggcctgccgccccggccccctgctgcagcaggtgctaaaggccctgctgttcctgcaggcccactggcgagctcacagtggcttcagctctcacac

SEQ ID NO: 87731 - DNA, 372 bp, Homo sapiens
gggcgccggtgatcttggggtcccccgacgacgtgctcgagttcctgaaggtgtatgagaagcactctgcccagtgagcacctgccctgcctgcatccggagaattgcctctacctggaccttttgtctcacacagcagtaccctgacctgctgtgcaccttacattcctagagagcagaaataaaaagcatgactatttccaccatcaaatgctgtagaatgcttggcactccctaaccaaatgctgtctccataatgccactggtgttaagatatattttgagtggatggaggagaaataaacttattcctccttaaaaaaaagtctcccttgctttgtgtcaaataataatgatgatgacaataataac

SEQ ID NO: 87732 - DNA, 404 bp, Homo sapiens
ttactggtatataggaaagcaattaattgacttttgtatattaagaaatcctgtatcctgcaaccatgctataatcacatattagttccagtggattttgtgtgttatttagaagtgtgttgtttaatcttcacatactctgagatttttcagctagctttctgttgttgagttctaattccattgtgatctgaaagcatactttatatgatacctattatttcaaatttaaggttttatgacccagaatgttgtctaacttggttaatagtccatgagaacctgagaataatatataaagttcaaaacaggtttcactggacccaaatcagaatgtctgcagggctgcgtttactttggaggctctagggagaatatattcccttgcgtttcccagtttctag

SEQ ID NO: 87733 - DNA, 1146 bp, Homo sapiens
cagctgagagcaggcccagggcagaagggaggcaggggcattaagagctcaggcctccagctgagggactgcagatgttgggaagcctctgattagggcccggaaccaacttccttttcgcatctgcagactcatggaggcaaccactcaaggccactctgagaagggttgaacgtgctttaaattaaaaggactgaggatcatgtgtgttggtgtgtcctggactctgctctaagagctgcacgggggcttggatcaatgcctgaatccagtgttcctgagtgcagagcatctttgctctgggtgagctttgaccatcctggagaagaaggctgctgcgggggtgggacaaagccaagaccaatgcccagcggccaaggccagccagatggctctgtgctggcagccagtgtacacggattttacctgaaggaaaatgtcacattttccacagacaactgaagaaaaagagctctttggattaccctaattgtgatttactcattggaaccactgttttggattgtccaaaattaagtctcaaagcttaaatatgaggcttcagggagttatcctgaaatcagtgcttggtatcttcttgttttttgcttgttttttaaaaccttaattctcatatttttctgtcatatttctcagtgcctggtacattatcaccattaatccatgccagttatgtacagttttgcatgtttgttttttattttactcttttctctccttcattccctattcctgttcccccataggtgcccagtctaatgtatttgatatctgtccttagagcctccgtatctgtgaagactagagtcatgcacttcatcacatttcagtaacgatgggccgcatgtaccacagtcccatgagatgatagaggtgcagaaaaattcctgtcatctagtgacatcgtagccatcataacatcacaacacgactctcatttgtggtgaccctggtgtacacaaacctactgtactgccagttgtataaaagtctagcacatccagctacgcacagtacatacttgaaaattataataaatgaccatgttactggtttatgtaattactatattatactttttaatcattattttagagtgtacaacttctacttgtaaaaaaaaaa

SEQ ID NO: 87734 - DNA, 426 bp, Homo sapiens
ggcccagccctaggagggggcagtcccacagcaggctcacaccctgcccttcagagttgcagcagctaatgctgatgccaggaccttgtcctgccaggaagcctctgattagggctgtgaaccaacttccttttcacatctgcaaggactctgctctaagctcaaattttgcagtttctgctgtcatcacagctgggaatgagaaagggaaggggctccagttggtctccctctgcctctggagcacacgtggaggacatgaggcttccgcaggaacagctctgaaagctgagttctcgggtccctgtgaaggagggaagcttgcctgccttggagcgtgaaaaagtcttgctggacagaagtctcacggtttaaaactgggaagggagaggattgagatcacactagaatgcacagaaaattctt

SEQ ID NO: 87735 - DNA, 1266 bp, Homo sapiens
ggcccagccctaggagggggcagtcccacagcaggctcacaccctgcccttcagagttgcagcagctaatgctgatgccaggaccttgtcctgccaggaagcctctgattagggctgtgaaccaacttccttttcacatctgcaaggaccttggaggcaactgcccaaggccactctgaggagggttgaatgttctttattaaaaggactgaggatcatgtgtgttggtgggccttggactctgctctaagactcatggaggcaaccactcaaggtcactctgagaagggttgaacgtgctttattaaaaggactgaggatcatgtgtgttggtgtgtcccggagtctgctctaagagctgcacgggggcttggatcaatgcctgaatccagtgttcctgagtgcagagcatctttgctctgggtgagctttgaccatcctggagaagaaggctgctgcgggggtgggacaaagccaagaccaatgcccagcggccaaggccagccagatggctctgtgctggcagccagtgtacacggattttacctgaaggaaaatgtcacattttccacagacaactgaagaaaaagagctctttggattaccctaattgtgatttactcattggaaccactgttttggattgtccaaaattaagtctcaaagcttaaatatgaggcttcagggagttatcctgaaatcagtgcttggtatcttcttgttttttgcttgttttttaaaaccttaattctcatatttttctgtcatatttctcagtgcctggtacattatcaccattaatccatgccagttatgtacagttttgcatgtttgttttttattttactcttttctctccttcattccctattcctgttcccccataggtgcccagtctaatgtatttgatatctgtccttagagcctccgtatctgtgaagactagagtcatgcacttcatcacatttcagtaacgatgggccgcatgtaccacagtcccatgagatgatagaggtgcagaaaaattcctgtcatctagtgacatcgtagccatcataacatcacaacacgactctcatttgtggtgaccctggtgtacacaaacctactgtactgccagttgtataaaagtctagcacatccagctacgcacagtacatacttgaaaattataataaatgaccatgttactggtttatgtaattactatattatactttttaatcattattttagagtgtacaacttctacttgtaaaaaaaaaa

SEQ ID NO: 87736 - DNA, 367 bp, Homo sapiens
ttatcaataatccttgtacctaatgtgccttgactctgaaggacatggtaactgcctgtggtttagaaaatgttttggctaaaagacaagttctcctccctcctctcatttttatatcacagagctgcacgggggcttggatcaatgcctgaatccagtgttcctgagtgcagagcatctttgctctgggtgagctttgaccatcctggagaagaaggctgctgcgggggtgggacaaagccaagaccaatgcccagcggccaaggccagccagatggctctgtgctggcagccagtgtacacggattttacctgaaggaaaatgtcacattttccacagacaactgaagaaaaagagctctttgga

SEQ ID NO: 87737 - DNA, 406 bp, Homo sapiens
attttactcttttctctccttcattccctattcctgttcccccataggtgcccagtctaatgtatttgatatctgtccttagagcctccgtatctgtgaagactagagtcatgcacttcatcacatttcagtaacgatgggccgcatgtaccacagtcccatgagatgatagaggtgcagaaaaattcctgtcatctagtgacatcgtagccatcataacatcacaacacgactctcatttgtggtgaccctggtgtacacaaacctactgtactgccagttgtataaaagtctagcacatccagctacgcacagtacatacttgaaaattataataaatgaccatgttactggtttatgtaattactatattatactttttaatcattattttagagtgtacaac

SEQ ID NO: 87738 - DNA, 179 bp, Homo sapiens
tcaatttggcatagagttgcttataatattcccttatcatattttacaatgtgtactaaaaatcattgatatagtatcctacaagcacgatgggtctgatggaaggggaaaatgtagagttgcatgttgaatgctgtcttgcaattgtgagtgcatttctgagactgtactagctattt

SEQ ID NO: 87739 - DNA, 1214 bp, Homo sapiens
tgtcgtgtctatgttagcaccttgaaatctgtgcatagaaagctgaaaatgatggctactctgaaacattgcccaagatacaaccttcttgattagctcctcaatatgcccaagacagagccatactgacttatttcgtggctcttagctggtgcctaatgcagtgaaaaccccttttaaacagcactgactaggtatggctgggagagtttctaggagggaaacacgctcagacatctccaagttttctcgtaatttgggaaaatataaccattaggaagtgttctcttaagcgtctggagaccttgcacaagttacccccaaaagcacaataaaatctaggtgaaagaatagaagaaatcaaaagctatcacaaaatagaggcctaagcacctctttaaaaagcaggaacagctagaaaagtagatttagcatttggacattcagggtttaccagacctatttgcaatactaattagtcttaagttggccctcctttgcagtcctttagctggtaaactgctagaaaacatggattacaccttgttattaatatagaaaagccctggtgcaggtggcagagccatgagcaacctgaatgccatgattagggtcatgacgagagcaattccagtatctgaaactcacacagaagcaagcctcacaggcaaatacccagatgatagaggccctatatccaatgccaagagtcagatgctacagcgcagaagcaacaaattcttccaaaagaaatgattcatacaaattaattgttttctaatgtcctttaattataattaaagagtttgagcatcgactttggttttttaattaagcccaactttagcttatttttctatattctgaaatttagacattcaattcatgtatgttctattaaaagacatgtcaacttatatcagaatataaattaatattaacacatataaatgatatatactgaataaaagaacattttaaaataaaagctactcaaatgtgtataatatgaaacaatgaagaattcaccacaaaaagtaatttattggagccaggtgcagtggtacatgcctgtagtcccagctacttgggaggctgaggcaggaggattgcttgagcccaggagttcaagattgcagtggcatgatcagtgcttacccaactcttgaactcaagcagtcctcccacctctgcctctcaagtacacagacaca

SEQ ID NO: 87740 - DNA, 779 bp, Homo sapiens
caaaaagaagcgcttggcactacagggttacaaccctatgccaatatattattcttagtgggctccctgccagccctaatgggtaatggctaaaacatggattacaccttgttattaatatagaaaagccctggtgcaggtggcagagccatgagcaacctgaatgccatgattagggtcatgacgagagcaattccagtatctgaaactcacacagaagcaagcctcacaggcaaatacccagatgatagaggccctatatccaatgccaagagtcagatgctacagcgcagaagcaacaaattcttccaaaagaaatgattcatacaaattaattgttttctaatgtcctttaattataattaaagagtttgagcatcgactttggttttttaattaagcccaactttagcttatttttctatattctgaaatttagacattcaattcatgtatgttctattaaaagacatgtcaacttatatcagaatataaattaatattaacacatataaatgatatatactgaataaaagaacattttaaaataaaagctactcaaatgtgtataatatgaaacaatgaagaattcaccacaaaaagtaatttattggagccaggtgcagtggtacatgcctgtagtcccagctacttgggaggctgaggcaggaggattgcttgagcccaggagttcaagattgcagtggcatgatcagtgcttacccaactcttgaactcaagcagtcctcccacctctgcctctcaagtacacagacaca

SEQ ID NO: 87741 - DNA, 395 bp, Homo sapiens
tctcagattaattataatttaatgtcaatggtatacaaaaactttgcgcatatatagctctgttcccctcctcctcctctgtgctatcactgtcatataatttaaatgtttacacatcatttgactaccagcacagatgtctaatcatcactctctgcagttgtcttttaaatcaggtaggagaaaaaagagctacacacataaactatttatttttacactgccctttgaaaatgttttccccaattttttattgtaataaaatacacataacaggccaggcacagcaacacacgcctataatcccagcactttgggaggccaaggctagtggatctcctgaggtcaggaatttaagacaagcctggccaacacgatgaaacaccgtctctact

SEQ ID NO: 87742 - DNA, 337 bp, Homo sapiens
gccttccattacccacagtaacgagccttctgatttctaagtccattcttccctcgggtccttttttatatggttttattgcatctctctatgtttctaaaatgccctttttattatagaaaattttaaaggtacacaaaaacagaaaaagtatgaattcctgtgtacttaccatccagcactttgggaggccgaggcgggcggatcacctgagatcaggagtttgagaccaacctgggcagcgtagtcaaactctgtctctactaaacatagaaaaaaaattagccgggtgtggtggtgcatgcccatagccccagttaacttgggcgtacgggga

SEQ ID NO: 87743 - DNA, 335 bp, Homo sapiens
ttacaggcgtgagccactgcgcccaaccaatgttttaatatatttttaaggagaggacagagaaagcacacaggctaccttatatttggatatgctgacattattttggtcatagatatcaaaaagcaaacaaatctcccacattccttttcttattaaattacataaaaccatttaatcagtacaaatttcttctctgaaccctataaaagggattatattctattacttgaatagtcgatagaaatttttatttagtgccagatactgtgctttacacaatttttaaaattttatttttaattgacacataataattgtgcagatttgtggtt

SEQ ID NO: 87744 - DNA, 401 bp, Homo sapiens
gttactcatagtattagatgtcaagatactagagaagacaagtgacaaaagcatgaatatttcttaagtatctcaacaacatgtcaaagctgcatgtgtaggatgtatgctgtttgtacaaactatttcagaatattttgtaagctataacatatttattgtgcattaaaattaaatactttttccccaaaggcatgcagtcatgagaattacagaaaatttgcaacatataaagtagtttgatctaagaggattcaacacctttgttttgttgctcagtgtgtaatgactgagatttgtaaatctttgtgaacattctgtactggttcccaagagctattcattccctgctacctgatttcagcacaataaatatacttctgctgtgggaaaaataaaat

SEQ ID NO: 87745 - DNA, 2973 bp, Homo sapiens
tcctcgtctttctcccgggaaccttgacgacgccttccgcttggccctgccttctgccgcatccccgccgccgcggcgccttgaggagcaggagaagacgcagccgggccgccgccgttagaggggttcccggccgccgctcgccccgtcggccgccaccgcctccggggtcagccctctctctgggtctccgctttctcctgccgccagcgcccgctcatcgccgcgatggggctcctggactcggagccgggtagtgtcctaaacgtagtgtccacggcactcaacgacacggtagagttctaccgctggacctggtccatcgcagataagcgtgtggaaaattggcctctgatgcagtctccttggcctacactaagtataagcactctttatctcctgtttgtgtggctgggtccaaaatggatgaaggaccgagaaccttttcagatgcgtctagtgctcattatctataattttgggatggttttgcttaacctctttatcttcagagagttattcatgggatcatataatgcgggatatagctatatttgccagagtgtggattattctaataatgttcatgaagtcaggatagctgctgctctgtggtggtactttgtatctaaaggagttgagtatttggacacagtgttttttattctgagaaagaaaaacaaccaagtttctttccttcatgtgtatcatcactgtacgatgtttaccttgtggtggattggaattaagtgggttgcaggaggacaagcattttttggagcccagttgaattcctttatccatgtgattatgtactcatactatgggttaactgcatttggcccatggattcagaaatatctttggtggaaacgatacctgactatgttgcaactgattcaattccatgtgaccattgggcacacggcactgtctctttacactgactgccccttccccaaatggatgcactgggctctaattgcctatgcaatcagcttcatatttctctttcttaacttctacattcggacatacaaagagcctaagaaaccaaaagctggaaaaacagccatgaatggtatttcagcaaatggtgtgagcaaatcagaaaaacaactcatgatagaaaatggaaaaaagcagaaaaatggaaaagcaaaaggagattaaattgaactgggccttaactgttgttgacagtgaggaaaaactcccatatcatataaaatttcagggaaaacagaagcaaaggagagcttgggggtggggagaaaagacaaatgtgctctatgtcctagtaactcttagactgagtaaagtgttaataccatacccagatgttttatttatgaagtttttattttaaacattttttttaaaaattagccttgatattctccagaccaaagcaatcattaagtgactttggggattctccccctgttcacatccagttgtctaaaggatgagatttttcatgtatcttatagtcactcattcttcggtctgaattttagacgatcacagaaacggtctttatgaattattttgataaattactaattatcttatctactgactgaaatcagtggtgttacattttcttgtccaaagctgaaaatgtgtatacacttaaacttgcacatttgaattcatttgctgaccggaatggtcaaatctctccacctctagtcagagtataattttggttgtaattaaatttttaaaatctgctgatctctgtagaatcttagaggcttgatgatgatggtgttggtgaaaataagaaagaattgcagtaaagtcttgtctggtgacccagagatcaccatgacttgaggcacaaatcactgtggggaaacaattttttgtgatgaaaaggcagcatttgaatactcctgttagtagcagaaatatattatgaaaattaagattattgtctgattgaaacatgaaacaactcatgtctttattagtaacatcataagatagttacatttatgtgctgttagaatatgttgatttttatcaggctttccttgttttgatttatggctgttcctgatttttcatatgtggaaatatacctacctcttccgttggaaagaacatttaaaattaaataaattttaattaaaaaatcaaggagtcttctaatgtaaattttaatgttaactttcaaatccactagtattttttttgcttttatgacaaatagcatacaccaaacatttctgtgaaactatccttctctttcaatgtgtttaattttggagtaacgttttccttgtgactaagttgcaagatcttatttattaactaggtatgaagtataaacccattttggtgcaatattcttgactccttggtgctaaagattgttaaattcaatgcttgatgttacaaggtgttgttaaaacacaaaatgaataaaagtgagagtagtcagaactataacattcaatttgctatttacaaatgaagtatttcatgtaatataagtgaacaactggaaataaagtaggaaagaatttgtatcatgttttactacataggttaattttttaagggatgttgcaaagggattactagagaaagacaaaatgtgaccaaaaaaaagcatgaatatttcttaagtatctcaacaacatgtcaaagctgcatgtgtaggatgtatgctgtttgtacaaactatttcagaatattttgtaagctataacatatttattgtgcattaaaattaaatactttttccccaaaggcatgcagtcatgagaattacagaaaatttgcaacatataaagtagtttgatctaagaggattcaacacctttgttttgttgctcagtgtgtaatgactgagatttgtaaatctttgtgaacattctgtactggttcccaagagctattcattccctgctacctgatttcagcacaataaatatacttctgctgtgggaaaaataaaat

SEQ ID NO: 87746 - DNA, 368 bp, Homo sapiens
attttttaatggctccctggtgccaagtgcagccagggttgggaatcactgggtaggagggcaaggaccatgtctgctgcttatccatgacttcatcccccgtgctgagcactcagcagtgtctgcacagagtaggcactcgataaatggcaactgtacttatgattgttgtttttgttatggttgatagggttatgattacaaagatcattaagccatatgactttttttttcacatttttggcctctgtgattctttgctacagaactctaaaaaataataataataaaactgtagtagccaaatcatctttttaaaattcaatgagtttctattttcctgtcaacatagagcttcaattaaggat

SEQ ID NO: 87747 - DNA, 719 bp, Homo sapiens
gacatggaagatagaacagaacttacccgacatatagccaagagagctaaagatatggaaaatatgaaatagaacttaaagagacatggaagatagactgagaaggtctgtgatatggtttggctgtgtcttcactcaaatctcatcttgaattatagctcccataattcccacatgctgtgggagggacctggtgggagataattgaattatgggggtggtttccctcatactgttcttgtggtagtgaataggtctcacgagatctgatggttttataaggggaaaccccctttgcttgcgtctcattcgcttgcttctcattcgtttgcttctcattcgctttttgcctgctgccatgtaagacgtgcctttgccttccaccatggattgtgaggcctccccagccatgtgggaactgtgagtccattaaacctcttttcctttataaattacccagtttcgggtatgtctttatcagcagcatatagtctaatgaaggattactttctataaatgacaaagggtcctaatccacaggttcgagaagccaaaaaactttcgactataataaataaaaagaaatgtgcacccagaataatcatagtgaagacacataacatagtatactaaatattaaaatattaaataatatatggtattttatagcatattggaaactgagtatatgtaacttccaaactgttagagaaaagaga

SEQ ID NO: 87748 - DNA, 709 bp, Homo sapiens
tgaagatattcactacagacttatgatagtaataactatctacagacaatgtttaaatactttatttcaattaatgcaggttaatcctcacaacaatctatggtgctagtgaacattactatcctcattgtacagatgagaaaactgaaacattgagaagtcaagtaacttgctcaagattatatagctagtgcatagaggggcaaagatttgaaccagattgcctggttccacatgcactttaacctgctttatttaggcttttgaaagcaacctaaatagctaacattgactaaataagtgcagtatacctggtctgtgtgacattttgcaggtattaaaaagtgaacattctgaacccttttagcaatatggcaaatacttctgatgtgatgtatgcatataaatatgatcgaaagcaaatatcccaaaaggttgatggcagttatgtcaggttagtagcacaatagtttcttttctcattttctcacatttttagtaatgtgtgttgcctatattaaaaaacaaatattaaaaagtagtagcatgtattagatcagagcatgggctcagactgcctgtgtcatctcttattagatgtatgaccagggacaagttattgaccttttgtttctaagtctctaagtttatcctgtaaaatgaagataattgtagtaactacctaataacatgattgtaaggattaaat

SEQ ID NO: 87749 - DNA, 303 bp, Homo sapiens
ggggctgggaagagaatgatgtcattgcttttctctgaatcttttccctgtagctggattctttgggccttctatagaggcctgacccagggcagggggtagaaagctgttctactttgagaatcctgaatgttccagcctagaaggaatcatctcttacagcatagtctcttatgttttatgtttgaggaaaccgaaacataagagagggcaagtgacttgctagagtcacacagccagctcagtgcagagttaggagcggaagcctgccctgctaactccctgcctgccattcttcccacc

SEQ ID NO: 87750 - DNA, 355 bp, Homo sapiens
tacccaaaagccctccaggagcaggttgtttaactcttatgtaattttacgattttgatagatcttggtgttgtttctacttttattgcactgtgctttgagactgtggttagtatgatttcatttttttttttaatttgttaaggtgtgctttatggacgactgtgtgttcagtcttagagtatgtgtcatgtgttgatgagaagtgtgtatattctgttgtcgttgggtggagttttccatagatgtctcttacatccaattagtcaaatgtctagtttatgtccataatttctttgttagttttctgcctcaataatctgtctaatgctgtcagtggggtgttgaagtcttg

SEQ ID NO: 87751 - DNA, 657 bp, Homo sapiens
gaggggtcaggcccagtgcctggaacctggtaggaagaaagaccaagttgtagcagctgccacgtgttgggcgctgtgctgagtgctgtctttgtgtggtctcatctcttccctactctcaccctgtgaagtcagtatcaccctcttcactttcacggaagaagctgatcgaaatcacccagctgatattcaattgaccgaggattcaaaaccaagatggggctgggcgcggtggctcatgcctgtaatcccagcactttgggaggctgaggcaggcagatcatgaggtcgggagttagagaccagcctggccaatatgatgaaaccccatctctactaaaaatacaaaaattagctgggtgttgtggcacgtgcctgtaatcccagctactcaagaggctgagacaggagaatcacttgaacccaggaggtggaggttccagtgagccaagatcacaccactgcactccagcctgggtgacagagtgaaactccatctcaaaaaaacaaaccaagatggcccgaattttgaaactttatactcctcactactctgcaaaaatatctgtgaccactcttctgttcggtgcccagatggtacacaatgaagtattgagcaaatgcttttagcgttggttttggcatccagcccctttt

SEQ ID NO: 87752 - DNA, 499 bp, Homo sapiens
cagtggaaggacagacagaaaggtgggtggatgcatgtttgcatgcacaagttaatggatgcttagattgatgcatggatgggtggtggatggatggatagaaaggtgggtggatgcgtgtacgcatgcacaggtgaatggatggatgcatggatgggtgtgtggatggatgggatggagaaggggtgaatggacaggtggatggttgctcagaacataagcagagggactgtgtactgtgcagaggagcaagaggtacacagaggcagggtctgagcctggagccaagacgggaggcctaaggacaacaagcccagagaagcaagacatgcgccaagcagagccaagagccaggagtaattaagcctgcgtgcacagccctggagccccagcagccctgtcttcattaagatgctgaccagggaaatctcatcagagatagaaattctggcttgagctgcttccagccctggccctgtcaccttccccataaagtgtc

SEQ ID NO: 87753 - DNA, 434 bp, Homo sapiens
gccatgccttggggtgaattcttccccactagctctctcacccagcctacaagtccttctctcatagatcccagagcaatgggcaccgtccaggaggtacaggagaggactttatgatgcaggaaagaaggaagaagtgggtcccttgcaagtggccagacagggaatgatggtttgactccagaaatcaggaatcaggttcaggtttggataacttctctttaaaatatctccacattgagactcttattttaacaaaatccaaacaaaattaactcagggcttgtgacctaacctttgtaagaaggtgatcaaagagatcctacattaataagcactgcctgtagcaccagctttgtctttttgtcttttgttgtttctttcctgaaccaccctgtacatcatagccaggtctaccccaaatagagcagcag

SEQ ID NO: 87754 - DNA, 363 bp, Homo sapiens
gagtcattgatgctgagagattgtgaagaatatactgacagcatccttgtagctgcatcacagtaaatcggacttctgaatcaagcagcccagcctagcagctgataagagtgaatgtaggtgagaagcattaccttattcctgtaacaagagaactgttttgtgataagtgaaactaggaatgtagaagaagaaatatcctatggctattataaaagaagaaggacttgcctgaatgacttggtggtgcaccagaaaataactttcagaagaatgctttctgttaagctgctgcattgttcctggaggaaatgttatttctaatgcatgttatttcttcaaaagataggataacaaagaatg

SEQ ID NO: 87755 - DNA, 730 bp, Homo sapiens
gacaatatttttgagatgatgggctgtgaagggaagatgagtaataaggtgatatctagagagggattcagagatcttattataagtcatatattacagttttgaaatcctcgtgtgttttatgtagaagaactatgatacaatatgctctttacatctcattatttgagaaatgtcctctttaaccccaattataggatgggtatagtttctgtatatccttcattactttgtgtgttcagaagatacccttttgatcctttattaaagacttgaaacaactagtatgcgaatgctttattttgaattttaatgctgtgttttttaatagttttatttttcttacggcagttctgttgagtggaaatgttaaataatctatttctaaagagaaatgatattgaattggtcttgattttttaatatgcatgtaatgcttattgtgtgccaaagtacaagtgccttatatacatcacttttttgatcatcacacaaacatgtgagatagatactctattctctacattttacagataaggaaactaaggtaaactaacacaggaatagaaaaccaaacaccacatgttctcactcgtaagtgagagttgaacagtgagaacacatggacacagggagggaaacatcacatacctgggcctgtcgggggatggggggaaggggagggagagcaatagggcaaatacccaatgcatacggggcttaaaaccta

SEQ ID NO: 87756 - DNA, 545 bp, Homo sapiens
aatcttgtttctttgcagtagtgggggtaccttgagatattttgcacttgacacctacatataaaaacaaagtctgccaatgagggctatgttccttattatgcctctgccttgcatttgtattttgggcttgcatccctaaataaatgagcaactaatcttcacaaaacttgggtcttctgccaagtatagatattatacgtaagtatagatgttatacttaaagagtcattgcatgctactacaatgtttatgaagcctttacattctctggttgtggtttctaaatgcctctagttaaagtgctgaaatttcaagcaaattggaaattgttacttccatataggtctcttgggctccattcattaagtaaacacctgctatgtgccaggcacaattcaaagcattaagaatacaatgagaaggccgggcgcggtggctcacacctgcaatcctagctactcaggagtctgaggcaggagaatcccttgaacccaggcggcggaggttgcggtgcctgcgcaacaagagtgaaactctgtctt

SEQ ID NO: 87757 - DNA, 416 bp, Homo sapiens
taaagaaacccattgatgtttaagggctacctgagagagataaaagtcacattcgcatcaaagttctactggaaatgaaagaaatgctgcttcgtgcgtcattctactgaaggaagagtagaattactctgtcttttaaactgattacctggacaattctattttgcccccaaaaagcatctctgactttagaaattatcatttttagaaagaaattttgaccctagggactatatgtggaagtaaatgaagagagatgaacgatttcacagcattgccagaatgctaactttaccaagtcaaaattgtctaattcactgtttttaacacaaatgtgaaagaatctatgcttctttgagtaaaagaacttccagatgctttccagttccatgattttctataacctcacaaagtct

SEQ ID NO: 87758 - DNA, 449 bp, Homo sapiens
attacatttgctcaccttgcttccttacccccaccatgtgaacatgcccaagcccgcctgctggagggacatgagaaacacagaatgaagggtaagtcaccgcagttacactggtggaggttgtcctcagccagccaccatgccaacttgctgctttaatcacaggagagagcccagccaacatcagcagacctgctcagccaacccataaacagactgaggagcagcaagaaagtatcatttttcagacactgagtttcaggagttatttgttatgaagcatttatttgtagcaattgctgatggatacaacaaccaaagtatggtcaacattctgcattggactgcaacaatttggaatgtaaaaagaaagaattttgatctcaatttcttctgagatatcaggataataaattctgtactacttgaataaagttttttcctgatag

SEQ ID NO: 87759 - DNA, 2175 bp, Homo sapiens
aggatgacagacagccaggcctgatttggccaaatcatcatgcaaatattattctgggctgacaggcccaagttgcagtcagcagaggcaacacgggcttataatttgccatttgtgaatgtcctgaggactggagaatcagctaggaagcaaatcttccttctgctgcataagacagccaaaagcacctctgaggataggcatctcagggatttcagagcaggtaacgccttttggttgttttgaatatgctgacagaagaaccaaagctttcaggaaaacaaagcccaaccccttaatgaaacaggaaaggaaaaacagtttcaaatgcttgcttgctttccttgttttctgagaagaaagatgccttgcctgttgaaggtggcagatgcaggttgctctgtgggcctcgggaaggttcactgcagctgtcacctgcccaacccacgtgtcctgaggcactgtgacatcttgacaggtgtcctgactcttggccttgacatgtcctgtcacgcctgcctgtcagctgggactgggcttggggaagagcttgtgggcctggggcctggtagtacttgcttagtaaacatctgtggctgctatttccctgtcacaggctggcaagtcagaactactcagattcacttgcacagcaatgtccttcagtcttctgattatgtggctctgcaacagggagagggagatattcatgagcaagtgtgcaaaatgcatttaatgcctgctaatggtgtacagccatccattgctttggtctgcccagtgtctgtctccctatcttttgataccaggggccaagtttctctggggaattcctttcagtttttgcagttctgggacagttacccttcacccagcactatgtcaatatgggcacatgactcaagccagccaatcagagttcactttccctagacttggtcactcagagggagctatcccttaggccacagtgattggttcagaaatgggcacataatcaaactagaccaatgagtctcagttctgaaattttgagttaagattgcttggaaaaagaactgtttactctatggaaatagaagctggagtgatgaaatttggggtaccgggagcgacagggccatagtgagaagagaaccctacctgaaaatgaagtcagaaggaaaaggaaagtagacaagtttgatggagagagaggcagagacagatccctgaagacatcatttaagatcccgaattcacctgtgcccaaagccagactagtcctgaatgatttagttacaagaactaataaatgcctttttccataagtcagtttgaggccagatgaatagaaattgcatcccttattgagtcctggctcaagtcaatttagcaagcatttgttaagatccacggtgggagctatacctcagagctccagggagcacaggaggtgtgctacaatcacagccattgccagtattgttattattccatttattagacatttcagacactcctcagcactttacacacattatttcatttcaccctttgagcacatcctttaattaaaaattgttatctacactttacagggaaagaaacctagaccagagaagttaagaaatacatccaggggtgggtgcggtggcttacacctgtaatcccaacactttgcgaggccaaggtgggaggattgcttgagcctaggagttgaaggccagcctgggaaacatggcaaaatcctctctctattttcaaaaaatacaaaaattagccgggcatggtggtgtgtgcttgtagtcccagctacttaggaggctgaggtgggagaattacctgagcccaggaagcagagattccagtgagttgagatcatgcccctgcattccagcctaggcgacagagtgagaccctgtctcaaaaaagaaagaaaaaaagaaatatgtctaatatagtaataatagtgacagaggatgtgagttatcgtctacacactggcaggcaaaagaggttacttcctcccatctcaaggacttggaagtaagggaaataagactgtacacccaagaaagcaaaatggaatagatcggagtagagatctgccaagttgccttacagagccaggacagcttccagccagccaggctagatctagctgcctgaatgtattgacagcaaaaaaaaaaa

SEQ ID NO: 87760 - DNA, 139 bp, Homo sapiens
ccaggctgtctcttggacatctcctctgggaacaacccgtaggtccctcaaatattgaacatccaatacaccttttgttactattaaaggcatcagcaaacttcttagttttttgttttttgggtttttgttttgtttt

SEQ ID NO: 87761 - DNA, 618 bp, Homo sapiens
ctcagctgtatctcagagaaaccatgtcagcttcaccaaactctcaacttgtcatacacagaatgaatcttactatcttctcccaagagccaagctcactgataattttgctttaggtaaatctctccctatgcacaaaatgcataaaatgacatgaaaaaatcaggctcaaaagcatgtacaaatgatgtactacaggacgatcactttgtctggacagatttaagttagtgccttggcctcctttggaccttaagccttccaccagcctttcagggcttgtgttccagctagctcagctgacttccccaggctctgtgagaaatgttaccctcagcctctctcttctgctctgcaggtctcatttcctacttggatccaagaaacacctgccatttcctcttcctgggaaggttgctgactatatgcagccacatccctgtatatcagatatgtaccctcttccccttgctctgtccctggcttatttatactataccttttttttcctatctttggtctcctatgaatgtatgcctaggtgttaccctaccagaacctagtttaatatatcctgttattatgctttctccattcaagaatttacaaaacacatcc

SEQ ID NO: 87762 - DNA, 129 bp, Homo sapiens
aagatcacgcctctgcactccagtctgggcgacagagcaagactccgtctccaaataaataaataaataaataaataaataaatagtttggtaggctgggcgtggtggtttgtccctgtaatcctagca

SEQ ID NO: 87763 - DNA, 384 bp, Homo sapiens
  misc_feature (366)..(366): n is a, c, g, or t
tgattgctgctggtgaatttttgctggtttttattatttttgattcttttctgtagttaactgggggaggagagattctgttgaggcagtaatggtgcaatggttagatacctggattcgaatgccggctgtaccgcttagtatctgtatgactttgagcaagttacctaacttcatggggcttcactgtcctcatcaaggaagtggggatgatgacagtagtaccttccttggagggttgtgagaattaaatgagttaacacttgtaaagcatttacaatagagatacacaaagcagtaagtaaatgttagctgtcatttatgtattgtttttgagatggagtttcactcttgtcaccaaggttnggagtgcaatggcgtgat

SEQ ID NO: 87764 - DNA, 420 bp, Homo sapiens
  misc_feature (393)..(393): n is a, c, g, or t
tgattgctgctggtgaatttttgctggtttttattatttttgattcttttctgtagttaactgggggaggagagattctgttgaggcagtaatggtgcaatggttagatacctggattcgaatgccggctgtaccgcttagtatctgtatgactttgagcaagttacctaacttcatggggcttcactgtcctcatcaaggaagtggggatgatgacagtagtaccttccttggagggttgtgagaattaaatgagttaacacttgtaaagcatttacaatagagatacacaaagcagtaagtaaatgttagctgtcatttatgtattgtttttgagaattgcttgagcccgggaggcagaggttgcagtgagccgagatcacgccattgcanctccatcctggatgatagagcaagact

SEQ ID NO: 87765 - DNA, 616 bp, Homo sapiens
gcatgttcagacctttatttgctacatttggtaggaaagattttttttttcccctcttaactacaagaagccagagttttctgtgcaaacgaaacaggcgttgcaagaatcagattcactttggacgactcttcacattccaagtcatcattgcgttaggcagcacaattccatctctggttgatgggcagaaaaagtgggcagcttgccaggtagacgtttccatgactcccagcccccaaaggtgatgcgtttttcagctaattcaatgaagagtgggctgaactttgggtctaaacgagacaatagctgccttcgcagtatcagcagaatggttgatgggagtgcactctacatttggcagagaatcatgtgaccttacgactgagattttgtgatggtgccaacggagacttggaaagcagcaaccgtcctgacttttttcttcttttctaacatggctcagaaaatggtggatcttaatacttgactttagccagactcagcaagcgactgagctttgaagcacaacttcgcctttattctgggtttttggcaggccaccaggaggctgtccctttcacgcctgataaattctgctgcttatctctaaata

SEQ ID NO: 87766 - DNA, 518 bp, Homo sapiens
tgctgggaatacaggcgtgaacgaccgtgcccggctagaacatgggtttttgaagtaacccaattagagaccagaggagaaaaatcaggggtcagaattgaggaaattgttcttcctttatagctcacccctactgtgagccgtctctggggaacactcagttaagaaaggaaaacttattatgattatgttctgtttcagaatgttgggaccctttttttcttggaacctttaggtcctaaagcaggaatgcctttgaacagaccacaggtgtctctagagagggagacttgggggtactctgggaggttgaactgagacctcccaggttcagggacggagcgctgctgagcccattacatgagttggcagcgagcctgggccaccgaatgtccactttggcagttcaagcatgaagccaacaaagatagatgcaactggtttcgagaggacagaacccacctcccttgttttctgccatccattatattttgtggccatttatgaaagttgcagtg

SEQ ID NO: 87767 - DNA, 576 bp, Homo sapiens
tgaaagtttgcaggtcgtgaagaccaattagttgctatggtgtcaataagtgcaaattgctgtaggttgttggtgaatagggaaatctccactgggtcagtgcccagggcaatgaggtactaaaggcacggcaggtggtttgaaggcagacaccttaaaaaaaaaaaaaagccacaactgtgctggactttggtgttccacccataaacagtgatacgttccagctcctttctcagtctctgcatgtatatcaaggtgctgatctcagctggtacatcactgtgtggtctgaattaattttattctaaggattatattctctttagacatggtacagcaattgagattagaccaaattgcttattctgtggaactctggattatcagtaaaacatcaagatttgactaattaatgatccttccaaacagtcttcattttaaaggattccattttagagttaacagaaaagaaaagagataatctctgagtggaaatgtggaaaccaaatgttcagccttttttaaaacccaattcagaactcaacctagacatgccattatgttacagtaacagtg

SEQ ID NO: 87768 - DNA, 234 bp, Homo sapiens
tgacaaaacacttgtgtactatgtgatgtgaaatgggggcaaaatcaggttataaaaaagagggccaactcttttttatattttaaatgtaaaatatacacacactctccctcattttatctggacagatatttaccaaaatgcaaacagtatatagctcagcatggtggggatttatggtattttccttttgcttatttgtattttctaattttctctataataagtgagtca

SEQ ID NO: 87769 - DNA, 431 bp, Homo sapiens
tctttaattccccaagcagcaaatttgatggagcactacatccaaggcatttctggatgtgaaaggggtccctcaccttcaaggaatgtgcgccaggttgaggagttcagcacatactcctgaaaagatgagtggtgcagacaatgatttcccgagtggttgagaggaaagagagaaggttggagactggacctgatgacagctttcatggaggaagtgaggactgagctgagccttgaaaattgggagttgctgtcttcccatctcagtaaatggcggcaccattcacccaggtatttaatcccaaaacctagaaatcatacttgcttcctctttccctcacccccaaatccaaactctcagcaactcctacctattctgcctccaaaatagatcctgagtctgcacactcccaccatctccatttctgt

SEQ ID NO: 87770 - DNA, 459 bp, Homo sapiens
ccttgagatccatttaccctatgcctaggaatgggcaggccagcagttgcagagatactggagtctattgagaccatatctacggggaggagccgaggctcaggtaatctgaagcaagttaacaggtttcaagtcagggtcagagacttaagaaatcagatgtgggtgttaagatcagacaaaagcaaattatagggaacaggagaaaattaaacgagcagttgtcataaacgccagtttgtctttgaatcatgtctttctaggtggttggcttggttcaaattttgttatttattatcctgctatgaattgtggtttcataaatattttatttatagtagtagtattttttagatgtttagatgtggaaacataataacgttatattttctgctggtaaaattgttccttgcttgtataatgttatgctggaattaaatacatcagtaaatcatggtg

SEQ ID NO: 87771 - DNA, 407 bp, Homo sapiens
cctaaggtattgaggttcagacacttctggatcttaggccaaactgtgccacaggatgtcatagttattgtcatgaaacaaagcattttttaaaaagctaacatggggccgggcgaggtggctcactcctgtaaatcctagcactttgggaggctgaggcaggtggatcacttgaggtcagaagtttgagaccagcctggccaacatggtgaaaccctgtctgtactaaaaatacaaaaattagccgggtatgatgacacacgcctgtaatcccagctactagggaggctgaggcacaagaatcacttgaacctgggaggcagaaattgcagtgagctgagatcacgccactgtactccagcctgggcaacagagtgagactctttctcaaaaaacaaaacaaaaca

SEQ ID NO: 87772 - DNA, 439 bp, Homo sapiens
tccatctcaaaaaaaaaaagaaaaaagaaaacaacgggcttatttacagcaggagctgtggtgcccttgggggatgtgtgagctccagggatgacagcaaccaccatctgttcatctcagcacttgggagacaagccctgtaggattcattcagtaaaaataaaatcctacgaagtgaatttgtaggcttggggaagtgtggacaatgcagtttgggcatcacctacgtacaagcagaattcgcaggaacagctcctgggcattgggatgaaacatggcccctgccatctgcttcttggtgtcaggccggcctcctgcttcccgcctttgttgccagcgtggaggaagcagaggtcagggaggcagtcactgcttgtccctgacacgggactcagtctccagacaaggcggctgctctcagtgtcctgtctcatgactc

SEQ ID NO: 87773 - DNA, 961 bp, Homo sapiens
agaattcttgccatgtggatgaactcattcaaacacaatgactgctttatgagacaatagatagatttctacctcttctcacatgtacagagaaaatatttccaaagtctccggaatatttacatgtattactatttaatataaacttgcaagtctttttaaatgtgtttaaaactatcacagtactaaacatgaactagatgcataataaatgctgaaagtaaaaagcctgaattatttaagtgaaaagagaaaaagatttagatcccaaataaatgtatgcgtttgtgtgtttgtgtgtgtgcgcgcatgtttgctgggcatgtacttgtaaaaagtaaaataatagaaaagtattattcttggtacccagcattctaggaataatgtcttccacaagattattagaaaactctgctactttgtaggaggagctttggataactatgaataagtccctttacagacttaactttaaaaaaccatctgatttttctttattttctttatttttattgtaaattgacatattttacttgcatacatttatgaggtatcaggtgttgttatgatttatgactactatgtggaataattaaatgaaactaattaacgtattcaaatgataataaatataacagataacaggtaacaaatatttttttatggtgagaatatttgaaagttactttttcagcaattttgtaatgtacaatacactattattaaccatattcacaatgctgttcaatagatctcagaaaagcagaacaaaacttattcctcttgtctaactgaggttctgtaaactttcaccatcatctccccatttttctccacccaaacacggaagtatgtaaaaattctcagtgcttacaaagtttcatataccaatttttgtaatgatacttccccagaactcaatttgacagactgaagtatgtagataagacaaaaaaaa

SEQ ID NO: 87774 - DNA, 507 bp, Homo sapiens
ataacatacaccctgtctagggacactcttcaaataattggaacatataaaaacaaaataaagtactgaaacgatactgagcatagtcaaatgagacaattggatctttgatggtttcccgagccctttcattattacaaatgtgttatttcatgcactaccatttaatcaaatgtaccattgactttaataaatggtataacactaattttcagaacatcagtaaaaatgtaggtcattgtattataattattgttcagattttaaaactcaggacccattacgtctgtttaatatcagtatttttgtgaaaatcatcctgagagtgcacttatgttcttttgtattatctttgctttattattttatctttggtttcccaactttgaaagaagatgttacaatttacaatcagattgttattccagggggagatataacaattctggttttattttttggcattctctcctgtaacttcatttcatcatctaagaaaacacattt

SEQ ID NO: 87775 - DNA, 460 bp, Homo sapiens
agctaatttttttacatagtgagaaaaacagttgttcaagtctctaatttttgacttaatacaaaatagctttattctcattatcagcatctgccttcagtctattgcaatatgttgtttcagttgaacaatatgaaggaaatgcagccaggcacaaacatgcagttggaaagagtgttttaatagtcttttcagatatgtgtagctattttttgatattacactaaaactaggtaagtagtagtttcttgaacgtttgtagcaatgtgagatctgaaaccctaacaatgaacttttcattactttgttaacattaaaatgcattggtcaggctgggtgtggtagctcacacctgtaatcccagcactttgggagatcgaggtgggcagtcacctgaggtcaggagtttgagaccagcctggccaacatggtgaaaccctgtctctactaaaaaaaaaaa

SEQ ID NO: 87776 - DNA, 251 bp, Homo sapiens
aaatgatagtctaaaaaattaaattacatgaaaaaaagcacgaagagaggaacagagaagcaaaaaatagatgagataaacagaaaacaagtagtgaaaatggaaatcctaaatttaatcatcttagtagttacattaattataagtgaattaaacacttaaaaagcaaaaattttcagaatatataaaattgaaaacacaacaaaaccagtcctcactgatttctatatattaatggtttataatatata

SEQ ID NO: 87777 - DNA, 526 bp, Homo sapiens
ccttatttctcagttgccctgatgcattccatccatcatataaaataaataatttaaatgaaaagttaattgaacgcttagagcactaaaagtcattctaagttcttctttcagagaattaaagatgcaaaaggaaaaactaatttcaacattatgcattcaaagaaatctaaattgtaacaaattatttatgtatatatttagtctctatttcctgttcaaatacttcaaatacatttataaccatttggaactgttattaccaatattttaagatgttacacgatccaataggaaatattaactgttttattgttaaagagtcatattaaaataatgccatgacatatgtgttatcaattaggcaatgagctaccagtcaatatgttttgccttataaagaattttagccaagataaagcttgtttgtttgacttagaaagccaaagttgaacctgtgtgataactctttgatcacatgtaataactgaagcataagaaaattggtttttagtataatcaccaa

SEQ ID NO: 87778 - DNA, 323 bp, Homo sapiens
tgaattctttttcctcagcgggcaccaagagtgagaaaacagcacataccgaaaggttttgaggtggagaagagggcagttatagttctgctgagaagaagagaaatagaagtggggttgagaagttggatggtctttggagactgtagaaaggagacaaccaaaagcattgtgcagtagtagtaacaacctgaatcattagcaggtacaggccttgaatctagcaccaaagtgtccaaaaatggctcccagaacctgtggctcagcaaagtgagactgcagagaatctggcatttttaaaagatttaaggagaagaggtatc

SEQ ID NO: 87779 - DNA, 407 bp, Homo sapiens
gtttccccaatgggcgtattactatctgggattacaggcaggaaccatggtccaaagtgactttaaacaagtgccccagggtaagggtggtatggatatgtcactgaagtcctctactcgagtcttcctgggcctgatcacttttgcatacaccacaaagcttagactgctcagagctagttttcttctcacattatatagcactgagttcatacatttgcccttaggtgaaaatagctttgtttcttaacacttttcttcctagccaacctggttcctccctcctcccctttctaccccacaaataacggaaatttgactgtggccaaatctctttcctcgttgctgtgcctcttttttcataataactcacatacattggctaattcagctgctgaggcctggcc

SEQ ID NO: 87780 - DNA, 268 bp, Homo sapiens
atccctggagcctccccttccctacagcagtgtgcacacaccccatccactccccttgagcactaagctccctaatttatggtgctggcagacctgagacagtaaagcaggggatactgccaagaccacagatgggccagaaaacaggtcagtacaagtgggacagtcaggaaagcagctgctgacagcaggccctggacgtggtgcaggtaacacgtgtttctgggtaggcccatgggaagagagtaaactgctgatcacagatcag

SEQ ID NO: 87781 - DNA, 310 bp, Homo sapiens
tgggacactatccacaaaataaggaagcatagaaatcactgtccctaaaaggcatatttaacatggtgaccaacaactcattctgacctgcctctccaagcagtccaacccaggttttatcaagtggtgccagtgctaacgtcttgtgggtggaactggcactgaatgtaaagaaaatcatagccaggcatggtggctcatgcctataatcccaacactttgggaggctgaggcgggaagctcacttgagctcaggagttcgagaccagcctgggcaacatcaacaccgtccttacaaaaaatgtaaaaa

SEQ ID NO: 87782 - DNA, 385 bp, Homo sapiens
ttaaaataaatccaactacgtagagtgaagcaacaggtgtatcaggatctgagagactccaaatttcgtgggcaagacactacaccactgtcctctaaatactacgaggtatttgcacaccagtggaaagaaatctttttaaatggagagctaagccaagggaaaaaataaatggagactaaatttttttaatattgtattttaaaattaggaaatgcaataacacatctgtggttaaatgttgtttattattttctcattattaaagagtctctctgtttttttgaaaaaaaaatttggttaaaacttcaaaaattgtgtaaccggcaaatgttacagtctctgaatataatactgctatagtgagcaaattttgttcttgaat

SEQ ID NO: 87783 - DNA, 794 bp, Homo sapiens
caaaacacagtggctttactcagatcttttaaacagctacaaaagtgaaaaagctgaggatggagtggaaaaagagaaaggatactttgttttagggacctgttttatttatttatttttttgtatccattgatcacaggacatcagtggctgcttcagggacttgggttagtagtctccagggtttactttactctgtatctagggcaaacctgacagtctggagtagagcaagaaaaatatgtaatacagtcaactagattatttaaaaagccacctttctgttattcttatggggttgaggaaattgtttctctatatgagtataaaatttatcaccaatgttcaaggctttaaagcagagttgaaggcaacctgagaatcactcagtattctttcttcccttacgttttatatctgctactgaattattagtgatggctcactgtgcttccagtgagggcagagggtgttgggctcctcctaaacagggagaaaaaagaacaacaaggatatatatttgtttcatgctgcctactggttttgaatgttttaggctatttaattggaagaagaaggaattgttaaagttactttaaaactctacaattgcttgattaacaaggaggagaaaaactattggataaaacatacagttatttaaataaggtttagcaattcagcaacatctatcaaaatctttattattttcatgtttaaaaaatactttaggctgggcgtagtggctcaggcctgtaatcccagaactttgggaggccgaggcgggtggatcc

SEQ ID NO: 87784 - DNA, 1088 bp, Homo sapiens
tatataaataagtaaacatagtatttgtacttcaggatcatttttaaaaaccttgccataaatatttgaggcatttttttttctctgtgtgatgcatagaaaatatccagatattttctatgtcagtttgttggtaagtatagttattatggcctaatgttttgcgttgatatgaaatcacctacttatataaagtaaacctgagtaaaatcctcttaaatgagatgttagagtcaccattggaacaaatagtgttgaaaattgtcttaacactagattaactgttatttggtatattgttttttaaaatgtgagtaatttttatgattaatacattgtgactggtagataagtgtttagtctaacatttttaagtgtagccatgtttgatgcccccctcaccatttgtgtatattttatttcaaaagcttgtactttcatagaaaactttaagatttagaagaggctgttgtggcctggtgtgatggctcatgcctgtaatcccagcactatgggaggctgaggagggaggatcgcttgagcccagaactttgagaccagcctgggaaacatagtgcgataccatctctgttaaaaaaaaatttaaaaaagaggttgttgatcattaagatggcatagtgatataggtaaagggtttttttgtttgcttagcaaaatattttcttagttttatttcttagggaggctgaggtaagaatctgaatgtggaaaattgaagaaaaggtttaaatattggtagaatttagggcctaaataattcgagaaagaattatatattagaacattaacattgaatggagtagagctacacatttatagggaataacaccttctgcttataagcaaattcattgctgacgtgtataaatggcattaggttggttgtactgttcacattattttatataggagatgaaataaaaattccctaaaataaaactagggttttcttaggaaagaggaagtggggaatggatcttagtgggtcatgaacgagtgtcctcttctgcagtgggaccctgtctctgcagaaaagaaaagcagtagttgggcatggttggtgttcg

SEQ ID NO: 87785 - DNA, 502 bp, Homo sapiens
ttaaaatattcaggaaaccatgctgcacacacatatgtggtcatccagacttcagtgttccatttatagagcagaggcagagtagatttagcataattcttaagggctctggcttttttggaatagtaaatgagcactggcttcaatttaaagtcactaggtacattatctcctaacaagagagtcaacctgccctttgaggctttgaaacagtgaagccaggcattcacttcccctctccagccttgagtcctagatggcatcttctcccaacagaaggctattttgtctacactgacaatctgttgtttggtgtagccaccttcattaattatcttagctagatcttctggataacttggtgcaccttctacatcagcacctgctgcttcaccttgcacttttatgtttcggagatctttcctcaagcttcatgaatgaacttctactaactttccaacttttcttctgcagcttcctcacctctctccaccttcataga

SEQ ID NO: 87786 - DNA, 424 bp, Homo sapiens
cgagaccccattttccaccaaaagggaaaaaaaaattctcatctaagaaaggcagatactagtttactcacctaaggtggctggaataagaaatgtacatttcatgcctggcacatagtaaggactgaattaaggtcaaatggtaaggactgaatcaaggtcaattgccttctgctctcttccctaatgcgctcagacaaactgatgctctgcttcctcaaagtggtaaggtgggattttctctgcatttccctgagttgaactggacaagacccatcatcctatgctttgacgttagaccagactggcgggcagacaggggacgggtgatgtagtacggagggggaaacagtgaacggcaactaaacaaacttgcgtgactgtgtcaacaccttcctgtggctcattgccccattccctatca

SEQ ID NO: 87787 - DNA, 386 bp, Homo sapiens
ccacctcagcctccagagtagctgggactacagatgtatgccaccacatccggctagttttgcattttgttggtagagatgtagtttcaccatgatgcccaggctggtctcaaactcttgggctcaggccatcctctcaccttgtcttcccaaagtactgggattacaagcgtagccattgtacctggctgccctacctgcttgttgaagcccaacatctagacctttccagctttccatacttaattctctccattctttaactcaaattctcttttccagtcaggcctgtttcttttatgccagtcatcacatgtccattcccatctcgtgccttgattttccacattcagttttcttcgcatttcctttaccagttgtattag

SEQ ID NO: 87788 - DNA, 529 bp, Homo sapiens
atcagcaatcctgcttccctctgcatttaccgtgtcatggcacagcagatacgtctgcagcatctgcaacgttgtgtgaatcataacaaacttcccaaatgcaacctgaccccaggcccctcactgtgcttcccgttaacttttacttcacctccgaaagaccttcctgggaaatgtggttttaaaggtgttggaagaatttgtcatcggggacctctttagtttcagaacccaagtgaagtaaccaaggcaggaaatacatctgttccacagcactgggttgccccactgggtacacagccctccaactccaggggaactttcacacaccagcatcctatatcatagccatctgccccaataaatccgacacctatcactagttaaaacccatgatatccaggaatgcaatgcttgattcatttgctactgatgaggctaggaatcagaagacctgccttctgttttccacttcattacattcaagagcaattaagaaaagtgattttgtcatcatgctcttggcaat

SEQ ID NO: 87789 - DNA, 393 bp, Homo sapiens
tcagtttcatctgcaaataagaatatggcaaataaaacaagaaacttcataaatagattgggtgttaggactaatggtggaatcctaattagggaaaaggagtcaggctggtgggagcaggggagcataaaaagaaaaaacagataaactgtaagtctgcctttcttcacagtccaggacacatagccctcctgtgcaaaaatctcacagtcctcctgtgcaaaaaactcacagtcttcctatacgcaacttatcaccagaccctctgctaatagaaaagtgcaggttagctcactgcaaccttggcgttaccagtactgcacatagccctctccagcacaagaacgatcctataaaatccccaccaagccttagtctcttttcagtcagctc

SEQ ID NO: 87790 - DNA, 419 bp, Homo sapiens
ttaaaccttgtagaatctgtaagcattcacaatccccttgacttgtagtgcctgattgtaaaaagaacagttgaatgagctcattgttttctggtttttttctttaatgtattttacaaacactctggtgacaggcctgacatgctgatttctatgtactggcacttcagtttgggattacagcattaataacagagttccatgcatcatgccatttttaagcatgatcgttatgataaagggcatatacttaattacaggcctgcttaataacagctctgttgaagctcgtttgtttaggagaatgctaattgcgccacagagccagcggcacatccttgctttcatctgctggaggtagctcgatgctgtggatcagcattttgttaaaactgccaccaaaaataaaaaaaaaattt

SEQ ID NO: 87791 - DNA, 1288 bp, Homo sapiens
cggctggccgagctcaatcagttccatctccgtgggcatgtaacccatagtcctcatgagattccccagatccttacaagagatgaacccatctcggtccttatcgaactcaagaaatgcttcccgcagctcttcaatctcatcttgtcccagtggtctttcccgctgtttctcagcaatgcctttcctcaagaagatgcaggcggggcccatggggaactgcatggaggggtggggtggagctcgcagggcaccagtctcaagatggcccctcctccctgctccctgtcggagctcagcctccttatcttctccagcactcctttgccacctcttcctgcctctcttggcttctccttcggtcccggtgtcttagagctgtgacagctgggctggaaatccgcatgaacttgggtggccgtgtagactttgatgactttgtggagctgatgacccccaaattgcttgcagaaacagctgggatgatcggtgtccaggagatgcgggatgccttcaaggagtttgacacgaatggagatggggagatcaccctggtggagctacagcaggccatgcagagactcctgggggagcggctcaccccccgggagatctctgaggttgtccgggaggctgatgttaatggagacggcacagttgactttgaagagtttgtgaagatgatgtctcgctgaggaggtcctggaagctccagaccctctccacctggtcaacatggagcaagcgcttgtggagaaccaaagcccaaaagccccagatccccttaaagcagagagggagggcaggcgggagggagggcattggcatgcggcgctgtgcatggggtgagacccagagcggtatctttgccaggatgggggcgtctgcagaactaggttaagaaggaagagtctgtggatggaaataggaagcgtgggagggtccagttgccacccccaaaaattccaatgattcttgacatcttttcacttcacgtagtcctaagtccctgtgacctgccagagtctcttccccagcttccccttgggtgaaaatagtctcttctcctgttgggtatcaaaaggttcagaacgtagtctctactcttcccctgcctgcatcaactgttgcaaatcccgtttctctctcccggtaaggggacaaattatactttattcaggtgatggttacatgaacagcccagacttcaccactacgcaatatatccatgtaacaaaaccgcacttgtactccctaaatctatagaaatacaaaatgaaataaaacg

SEQ ID NO: 87792 - DNA, 344 bp, Homo sapiens
gaggtagctctattaaacatgccaacttgacagatgagaaactgaggcacagggttaagtaacttgccacagagatctgattcccatttcatagatggagaaatggaagcatagagggattaagtaatttcccagggatcaccagcagtgcctgccacataggaagggctcaaaaaataatgttgggggcttttacaacgagatgccttactggggattttttttttctttgcagagtttgtgaagatgatgtctcgctgaggaggtcctggaagctccagaccctctccacctggtcaacatggagcaagcgcttgtggagaaccaaagcccaaaagccccag

SEQ ID NO: 87793 - DNA, 343 bp, Homo sapiens
aaattccaatgattcttgacatcttttcacttcacgtagtcctaagtccctgtgacctgccagagtctcttccccagcttccccttgggtgaaaatagtctcttctcctgttgggtatcaaaaggttcagaacgtagtctctactcttcccctgcctgcatcaactgttgcaaatcccgtttctctctcccggtaaggggacaaattatactttattcaggtgatggttacatgaacagcccagacttcaccactacgcaatatatccatgtaacaaaaccgcacttgtactccctaaatctatagaaatacaaaatgaaataaaacggatgcaaatcagtca

SEQ ID NO: 87794 - DNA, 1247 bp, Homo sapiens
ggagaagccaagagaggcaggaagaggtggcaaaggagtgctggagaagataaggaggctgagctccgacagggagcagggaggaggggccatcttgagactggtgccctgcgagctccaccccacccctccatgcagttccccatgggccccgcctgcatcttcttgaggaaaggcattgctgagaaacagcgggaaagaccactgggacaagatgagattgaagagctgcgggaagcatttcttgagttcgataaggaccgagatgggttcatctcttgtaaggatctggggaatctcatgaggacgatgggttacatgcccacggagatggaactgattgagctcggccagcaaatccgcatgaacttgggtggccgtgtagactttgatgactttgtggagctgatgacccccaaattgcttgcagaaacagctgggatgatcggtgtccaggagatgcgggatgccttcaaggagtttgacacgaatggagatggggagatcaccctggtggagctacagcaggccatgcagagactcctgggggagcggctcaccccccgggagatctctgaggttgtccgggaggctgatgttaatggagacggcacagttgactttgaagagtttgtgaagatgatgtctcgctgaggaggtcctggaagctccagaccctctccacctggtcaacatggagcaagcgcttgtggagaaccaaagcccaaaagccccagatccccttaaagcagagagggagggcaggcgggagggagggcattggcatgcggcgctgtgcatggggtgagacccagagcggtatctttgccaggatgggggcgtctgcagaactaggttaagaaggaagagtctgtggatggaaataggaagcgtgggagggtccagttgccacccccaaaaattccaatgattcttgacatcttttcacttcacgtagtcctaagtccctgtgacctgccagagtctcttccccagcttccccttgggtgaaaatagtctcttctcctgttgggtatcaaaaggttcagaacgtagtctctactcttcccctgcctgcatcaactgttgcaaatcccgtttctctctcccggtaaggggacaaattatactttattcaggtgatggttacatgaacagcccagacttcaccactacgcaatatatccatgtaacaaaaccgcacttgtactccctaaatctatagaaatacaaaatgaaataaaacg

SEQ ID NO: 87795 - DNA, 690 bp, Homo sapiens
caataatactgttaattttttagatagcatgtcaaatttagggcaaatgatgctaaaaatatgttaaaatagtccctagtctctgctcttataaaaaaatgatcatagcagttctttcttaccatcaaagcagatggctctaatgatttttcaagccatagttaattcatttgcaaacaacagagatcagttggcaaatgtgtactgagagtgagacattactgttcataaatgctcccaaagtttgttttgtcctgtcattactggaaaatggtgtttacctaagttaaattatttgtgtgaaccattcctgagacagtgctgcagttataataaattacctgtaaagtaagtgaacatcacttggttaatgtggtcgtggtggtgcaattgacctcatggagtaagtgagtgcatctgtgttctttaaattaaaattttataaaagaaacatcatgtctttttctattttggaaatatatttacttggatatgtttagtgtctcctccaagacacagaaagtagtatatgtattatcaataattttgaattagaaatgttatcatataattaataaaagttatttaatagtacaaatatcaaataagagattattgaaaacttctagcacatgtcattcaggataaagccaaataagctaattcattaaaggttttgaaacatactaa

SEQ ID NO: 87796 - DNA, 395 bp, Homo sapiens
gaccatctaccccattgagccctggggcattccagtatttaaaggacagaaagataagaagttttcagcaaagagaatgtgaaattgtggccaacaaagtaagagaaggataagctctgagcactttagccttcaccttactctatttcctatatgtagaattattatatattccccctgttgcttttctaggcagaccagagcaatgctaaaaggtctgtctatggggaggagaagggaggatgaagagaagtgggttaaagggtacaaacattgtaagatgcaaggaataaattcaatatttgataccagagtggggtaactatgcttaacaaaaatactctggtgaccaacaccctaaatatcctggcttgatcactacacattatatacat

SEQ ID NO: 87797 - DNA, 204 bp, Homo sapiens
ggtggaccaagaaatagtgtgttttagaagccaacagaaagagcggccttcagaagtagtcagtcaatttgtggtcccatggccaactggaggaaacataaaataggcaatggactcgataggtcattggtgagtttgagagaacagtgttgtcagcatggggtgaggtggtccactggaagttcaaaagaattgtggcatacg

SEQ ID NO: 87798 - DNA, 338 bp, Homo sapiens
ttgttctcccaatttagggtcagaaaaatctcataacatctccttctccaaggctgtccctttagcccctttgttgtgctctcatccttgctccaaactctgctagtcttctgtgtgcactgtgattgctgtttgccctggatcacaaattacttctatgtgtaaacacagctcagggtgtggtgggcaactttagacatgggaaacctgcgtcctgttgttctctctgcctggcctctttctcttctcagtcccataatttctcttctttctcttatttctcctttgctgatattttaggcctcccagtggtgtcaaaaagcattgcatacaacctt

SEQ ID NO: 87799 - DNA, 694 bp, Homo sapiens
agacgcccctctcggaacctcagtgactcgccgataatcgaggacctgccaataacgcgatgaggtagcattttcacccatcaaaaaggcatttttctttggcagtgataatgcccaaatattcccttttgtcggagaagggacaccatcgtattctactggaattgtaagaaagaattaaggaaattctctgcagtttcaaagttattgctatagctcgcaacgttattagtaattgtgagtaaagtggaattaaccaaaatggccaacatcaggaaatttgttgtgtatcttgtggtacatccaaatgccatgcagccgtttaaaataattctgcaggtgaatatttattaatgagatgttgcgactatttgttaggagacatagttacaaaacagtatatatccgttttttcaaaaataattctttaaaggtctgcaagatgtatactgattgtgatctttccctccttatttttgcttagctttatttaataaagcttttctacaataaacaaatgtttttgtaataaagtttttactttttaaaagttgtcaccaggctgttctgcctatggagtagtcattctttgttcctttactttcctaataaacttcctttcacttaaaaaaaaattatcaccagatttgagacagtgctcaaaaattgtctccattgtcacaatggagacatt

SEQ ID NO: 87800 - DNA, 2023 bp, Homo sapiens
tgctcccggcccatgcggcccccgcgggctcccggccccggcttcagaactcagccctgcacctgagcgcggggcccggcggggcgtggcggcggcgatggggaaactgcagtcgaagcacgccgccgccgcccgcaagcggagagagagcccggaaggggacagcttcgtggcgtccgcgtacgcgagcggccgcaaaggcgcggaggaagcggagcggcgcgcgcgggacaagcaggagctgcccaatggggaccccaaggaggggcctttccgggaggaccagtgtcccctacaggtggcactccccgctgagaaagctgagggccgcgagcacccgggacaactcctcagcgcagatgacggagagagggcagcaaaccgcgagggcccgcgaggaccgggcgggcagcgcctcaacattgacgcactccagtgcgatgtctcggtggaggaggacgaccgccaggagtggacgttcacgctctatgactttgacaactgcgggaaggtcaccagggaggacatgtccagcctcatgcacaccatctatgaggtcgtggatgcctcggtcaaccactcctcgggcagcagcaagaccctccgtgtgaagctaaccgtcagccctgagccctccagcaagaggaaggagggtcctcctgctggccaggaccgggagcccacccgttgcaggatggagggtgaactggcagaggagccaagggtggctgacaggaggttgtctgcacacgtcaggaggcccagtactgacccccagccctgctcggagcgggggccctactgcgtggacgagaacacggagcgcagaaaccactacctggacctcgccgggattgagaactacacgtccagattcggccctgggtcccctcctgtgcaagcaaagcaggagccccagggcagggcctcgcacctccaggcccggtcccgctcccaggagccagatacacatgccgtacaccaccgcaggtcacaggtgctggtggaacacgtcgtgccagcctcggagcctgctgcccgggccctggacacgcagccccggccgaaggggccggagaagcagttcctcaagtcccccaagggctccgggaagccgcctggggtgccagccagcagcaagtccgggaaagccttcagctactacctgccggccgtcctgccgccccaggcccctcaggacggccaccacctcccgcagcccccaccgccaccctacggccacaagcggtaccgccaaaagggcagggagggccactcgccactcaaggccccacacgctcagcctgccacagtggagcacgaggtggtgcgggacctgccgcccacgccagcaggagagggctacgcggtgccagtgatccagcggcacgagcaccaccaccaccacgagcaccaccaccaccaccaccaccaccacttccacccgtcctagcgccactgccaagcacacctcgctcccagcacaccacggcccgcgacctcagggcagggagcagagcagctgccggctgtgtgcccatggggagcccagcccccaccccccacctccgacagcaaacagcaactgactgcaggtgctggcatgatggaggtggtgcaccttggacacgtggacaaggcccaggcgccctctgctcttctgccctcgatgccacatggcggtgaacacatctgaagccactatgtttcctggctctaaggctcgtctgtgtaacccataaaacctgctttgattccaaaatgaggccctggagtgcgcaaggagtgcccggatgcttggggtgggtgttcctcccggggcttcaaggggtgactgctgtaggctgtcccagtgcgaggccgggagcgaatggaaaagctgaggctttgcctggcttgtgcatcatgaagtgagaggggacagggccggtggggggaagcagcttgtgcttagcagggagcatccgcggctccccgcaggaggccaagcagcagaaggcagcagtgctagaaagagaagtgc

SEQ ID NO: 87801 - DNA, 308 bp, Homo sapiens
gaggatctttgcaatcctactcctggtttcccgctgccggcggtcatgggaataacgccgccgagcgcctcaacattgacgtgggtctctctccggcctcacttgcgggaacacgtccctggggccgggggctcagggacaggcatgtgttgccctaaactgggcatctgtggacacggcgtagttcactcagtcttccccacagttcaccccgtttaaggcattgaagcagaacttgaatgtgcaagccaaagtcagcaggagccagagagtgcaggatgttgctgtgaatttggccaaaactgact

SEQ ID NO: 87802 - DNA, 1758 bp, Homo sapiens
tgctcccggcccatgcggcccccgcgggctcccggccccggcttcagaactcagccctgcacctgagcgcggggcccggcggggcgtggcggcggcgatggggaaactgcagtcgaagcacgccgccgccgcccgcaagcggagagagagcccggaaggggacagcttcgtggcgtccgcgtacgcgagcggccgcaaaggcgcggaggaagcggagcggcgcgcgcgggacaagcaggagctgcccaatggggaccccaaggaggggcctttccgggaggaccagtgtcccctacaggtggcactccccgctgagaaagctgagggccgcgagcacccgggacaactcctcagcgcagatgacggagagagggcagcaaaccgcgagggcccgcgaggaccgggcgggcagcgcctcaacattgacgcactccagtgcgatgtctcggtggaggaggacgaccgccaggagtggacgttcacgctctatgactttgacaactgcgggaaggtcaccagggaggacatgtccagcctcatgcacaccatctatgaggtcgtggatgcctcggtcaaccactcctcgggcagcagcaagaccctccgtgtgaagctaaccgtcagccctgagccctccagcaagaggaaggagggtcctcctgctggccaggaccgggagcccacccgttgcaggatggagggtgaactggcagaggagccaagggtggctgacaggaggttgtctgcacacgtcaggaggcccagtactgacccccagccctgctcggagcgggggccctactgcgtggacgagaacacggagcgcagaaaccactacctggacctcgccgggattgagaactacacgtccagattcggccctgggtcccctcctgtgcaagcaaagcaggagccccagggcagggcctcgcacctccaggcccggtcccgctcccaggagccagatacacatgccgtacaccaccgcaggtcacaggtgctggtggaacacgtcgtgccagcctcggagcctgctgcccgggccctggacacgcagccccggccgaaggggccggagaagcagttcctcaagtcccccaagggctccgggaagccgcctggggtgccagccagcagcaagtccgggaaagccttcagctactacctgccggccgtcctgccgccccaggcccctcaggacggccaccacctcccgcagcccccaccgccaccctacggccacaagcggtaccgccaaaagggcagggagggccactcgccactcaaggccccacacgctcagcctgccacagtggagcacgaggtggtgcgggacctgccgcccacgccagcaggagagggctacgcggtgccagtgatccagcggcacgagcaccaccaccaccacgagcaccaccaccaccaccaccaccaccacttccacccgtcctagcgccactgccaagcacacctcgctcccagcacaccacggcccgcgacctcagggcagggagcagagcagctgccggctgtgtgcccatggggagcccagcccccaccccccacctccgacagcaaacagcaactgactgcaggtgctggcatgatggaggtggtgcaccttggacacgtggacaaggcccaggcgccctctgctcttctgccctcgatgccacatggcggtgaacacatctgaagccactatgtttcctggctctaaggctcgtctgtgtaacccataaaacctgctttgattcc

SEQ ID NO: 87803 - DNA, 1915 bp, Homo sapiens
agcgtcagagggagccgggccgccgtcgctgccgccggtgtccccgggccctgcgcccgttgctggcttgagggacccctgggaaaggccccagaagatccttccccctgtggagttgggcgtgttggcgtgggtaggaggcgaggtcccggcccccacgtccccccacaggcactccagtgcgatgtctcggtggaggaggacgaccgccaggagtggacgttcacgctctatgactttgacaactgcgggaaggtcaccagggaggacatgtccagcctcatgcacaccatctatgaggtcgtggatgcctcggtcaaccactcctcgggcagcagcaagaccctccgtgtgaagctaaccgtcagccctgagccctccagcaagaggaaggagggtcctcctgctggccaggaccgggagcccacccgttgcaggatggagggtgaactggcagaggagccaagggtggctgacaggaggttgtctgcacacgtcaggcgtccactctccttcctgctctgcgaggaggtgggtgctggtccaggatgcaccccggacccctgccgcctgctgtaggcaccccgtcatcaggggtgcgccacccagtctgtgcgggggtcaggcccttctctgtgctccaagcaggaggcccagtactgacccccagccctgctcggagcgggggccctactgcgtggacgagaacacggagcgcagaaaccactacctggacctcgccgggattgagaactacacgtccagattcggccctgggtcccctcctgtgcaagcaaagcaggagccccagggcagggcctcgcacctccaggcccggtcccgctcccaggagccagatacacatgccgtacaccaccgcaggtcacaggtgctggtggaacacgtcgtgccagcctcggagcctgctgcccgggccctggacacgcagccccggccgaaggggccggagaagcagttcctcaagtcccccaagggctccgggaagccgcctggggtgccagccagcagcaagtccgggaaagccttcagctactacctgccggccgtcctgccgccccaggcccctcaggacggccaccacctcccgcagcccccaccgccaccctacggccacaagcggtaccgccaaaagggcagggagggccactcgccactcaaggccccacacgctcagcctgccacagtggagcacgaggtggtgcgggacctgccgcccacgccagcaggagagggctacgcggtgccagtgatccagcggcacgagcaccaccaccaccacgagcaccaccaccaccaccaccaccaccacttccacccgtcctagcgccactgccaagcacacctcgctcccagcacaccacggcccgcgacctcagggcagggagcagagcagctgccggctgtgtgcccatggggagcccagcccccaccccccacctccgacagcaaacagcaactgactgcaggtgctggcatgatggaggtggtgcaccttggacacgtggacaaggcccaggcgccctctgctcttctgccctcgatgccacatggcggtgaacacatctgaagccactatgtttcctggctctaaggctcgtctgtgtaacccataaaacctgctttgattccaaaatgaggccctggagtgcgcaaggagtgcccggatgcttggggtgggtgttcctcccggggcttcaaggggtgactgctgtaggctgtcccagtgcgaggccgggagcgaatggaaaagctgaggctttgcctggcttgtgcatcatgaagtgagaggggacagggccggtggggggaagcagcttgtgcttagcagggagcatccgcggctccccgcaggaggccaagcagcagaaggcagcagtgctagaaagagaagtgc

SEQ ID NO: 87804 - DNA, 428 bp, Homo sapiens
gcggccgcaaaggcgcggaggaagcggagcggcgcgcgcgggacaagcaggtaggcggcggggcggaggctggggtcgcgctgcgcacccgcccgggggcggggagcggtgtcagagctgttcctggtgcccgcccgcggacaggcgagacgtgggccgccatggccgcacgagtgaccgggggccaggagagccagtctctccccagcctccacgacgtctggggctcccgtggggcgagcccttgctagtgtcccatgctgagtggcgggtaggggaatcggaattccttgtcctaggctgggagccgtgtgggggctccatgtttcgggctggaggagctgggcgagtgggaggggctggacctagacgtcccgggctgggggtcccggggagcgggaatgcagtaccccggctggatgagctgg

SEQ ID NO: 87805 - DNA, 1937 bp, Homo sapiens
tgctcccggcccatgcggcccccgcgggctcccggccccggcttcagaactcagccctgcacctgagcgcggggcccggcggggcgtggcggcggcgatggggaaactgcagtcgaagcacgccgccgccgcccgcaagcggagagagagcccggaaggggacagcttcgtggcgtccgcgtacgcgagcggccgcaaaggcgcggaggaagcggagcggcgcgcgcgggacaagcaggagctgcccaatggggaccccaaggaggggcctttccgggaggaccagtgtcccctacaggtggcactccccgctgagaaagctgagggccgcgagcacccgggacaactcctcagcgcagatgacggagagagggcagcaaaccgcgagggcccgcgaggaccgggcgggcagcgcctcaacattgacgcactccagtgcgatgtctcggtggaggaggacgaccgccaggagtggacgttcacgctctatgactttgacaactgcgggaaggtcaccagggaggacatgtccagcctcatgcacaccatctatgaggtcgtggatgcctcggtcaaccactcctcgggcagcagcaagaccctccgtgtgaagctaaccgtcagccctgagccctccagcaagaggaaggagggtcctcctgctggccaggaccgggagcccacccgttgcaggatggagggtgaactggcagaggagccaagggtggctgacaggaggttgtctgcacacgtcaggaggcccagtactgacccccagccctgctcggagcgggggccctactgcgtggacgagaacacggagcgcagaaaccactacctggacctcgccgggattgagaactacacgtccagattcggccctgggtctcagctgtgcgagaagagaagctccgctcccaggacacacagtggggacaaggctagaggagtcggcctttgcagggagctgtggagccaggcaggtcacccacagtggccaggccccttcccttcagggctggtggccgtctgactgcagacttggctaacagactggcctcagggtcccctcctgtgcaagcaaagcaggagccccagggcagggcctcgcacctccaggcccggtcccgctcccaggagccagatacacatgccgtacaccaccgcaggtcacaggtgctggtggaacacgtcgtgccagcctcggagcctgctgcccgggccctggacacgcagccccggccgaaggggccggagaagcagttcctcaagtcccccaagggctccgggaagccgcctggggtgccagccagcagcaagtccgggaaagccttcagctactacctgccggccgtcctgccgccccaggcccctcaggacggccaccacctcccgcagcccccaccgccaccctacggccacaagcggtaccgccaaaagggcagggagggccactcgccactcaaggccccacacgctcagcctgccacagtggagcacgaggtggtgcgggacctgccgcccacgccagcaggagagggctacgcggtgccagtgatccagcggcacgagcaccaccaccaccacgagcaccaccaccaccaccaccaccaccacttccacccgtcctagcgccactgccaagcacacctcgctcccagcacaccacggcccgcgacctcagggcagggagcagagcagctgccggctgtgtgcccatggggagcccagcccccaccccccacctccgacagcaaacagcaactgactgcaggtgctggcatgatggaggtggtgcaccttggacacgtggacaaggcccaggcgccctctgctcttctgccctcgatgccacatggcggtgaacacatctgaagccactatgtttcctggctctaaggctcgtctgtgtaacccataaaacctgctttgattcc

SEQ ID NO: 87806 - DNA, 1566 bp, Homo sapiens
ggggaaccgaatcacagggcacaaagctgggtccccccaagaagggctggagctgggcaagaaggggtctgctggttcagggcttgagctccagccacgctgccctctaggctccgcctttcctagctggcttgagggacccctgggaaaggccccagaagatccttccccctgtggagttgggcgtgttggcgtgggtaggaggcgaggtcccggcccccacgtccccccacaggcactccagtgcgatgtctcggtggaggaggacgaccgccaggagtggacgttcacgctctatgactttgacaactgcgggaaggtcaccagggaggacatgtccagcctcatgcacaccatctatgaggtcgtggatgcctcggtcaaccactcctcgggcagcagcaagaccctccgtgtgaagctaaccgtcagccctgagccctccagcaagaggaaggagggtcctcctgctggccaggaccgggagcccacccgttgcaggatggagggtgaactggcagaggagccaagggtggctgacaggaggttgtctgcacacgtcaggaggcccagtactgacccccagccctgctcggagcgggggccctactgcgtggacgagaacacggagcgcagaaaccactacctggacctcgccgggattgagaactacacgtccagattcggccctgggtcccctcctgtgcaagcaaagcaggagccccagggcagggcctcgcacctccaggcccggtcccgctcccaggagccagatacacatgccgtacaccaccgcaggtcacaggtgctggtggaacacgtcgtgccagcctcggagcctgctgcccgggccctggacacgcagccccggccgaaggggccggagaagcagttcctcaagtcccccaagggctccgggaagccgcctggggtgccagccagcagcaagtccgggaaagccttcagctactacctgccggccgtcctgccgccccaggcccctcaggacggccaccacctcccgcagcccccaccgccaccctacggccacaagcggtaccgccaaaagggcagggagggccactcgccactcaaggccccacacgctcagcctgccacagtggagcacgaggtggtgcgggacctgccgcccacgccagcaggagagggctacgcggtgccagtgatccagcggcacgagcaccaccaccaccacgagcaccaccaccaccaccaccaccaccacttccacccgtcctagcgccactgccaagcacacctcgctcccagcacaccacggcccgcgacctcagggcagggagcagagcagctgccggctgtgtgcccatggggagcccagcccccaccccccacctccgacagcaaacagcaactgactgcaggtgctggcatgatggaggtggtgcaccttggacacgtggacaaggcccaggcgccctctgctcttctgccctcgatgccacatggcggtgaacacatctgaagccactatgtttcctggctctaaggctcgtctgtgtaacccataaaacctgctttgattcc

SEQ ID NO: 87807 - DNA, 1570 bp, Homo sapiens
ttcagtagagcggtgttatcggagagggagtccagctctatgacttgacactgcgggaaggtaccaggaggacatgtccagcctcatgcacaccatctatgaggtcgtggatgcctcggtcaaccactcctcgggcagcagcaagaccctccgtgtgaagctaaccgtcagccctgagccctccagcaagaggaaggagggtcctcctgctggccaggaccgggagcccacccgttgcaggatggagggtgaactggcagaggagccaagggtggctgacaggaggttgtctgcacacgtcaggaggcccagtactgacccccagccctgctcggagcgggggccctactgcgtggacgagaacacggagcgcagaaaccactacctggacctcgccgggattgagaactacacgtccagattcggccctgggtcccctcctgtgcaagcaaagcaggagccccagggcagggcctcgcacctccaggcccggtcccgctcccaggagccagatacacatgccgtacaccaccgcaggtcacaggtgctggtggaacacgtcgtgccagcctcggagcctgctgcccgggccctggacacgcagccccggccgaaggggccggagaagcagttcctcaagtcccccaagggctccgggaagccgcctggggtgccagccagcagcaagtccgggaaagccttcagctactacctgccggccgtcctgccgccccaggcccctcaggacggccaccacctcccgcagcccccaccgccaccctacggccacaagcggtaccgccaaaagggcagggagggccactcgccactcaaggccccacacgctcagcctgccacagtggagcacgaggtggtgcgggacctgccgcccacgccagcaggagagggctacgcggtgccagtgatccagcggcacgagcaccaccaccaccacgagcaccaccaccaccaccaccaccaccacttccacccgtcctagcgccactgccaagcacacctcgctcccagcacaccacggcccgcgacctcagggcagggagcagagcagctgccggctgtgtgcccatggggagcccagcccccaccccccacctccgacagcaaacagcaactgactgcaggtgctggcatgatggaggtggtgcaccttggacacgtggacaaggcccaggcgccctctgctcttctgccctcgatgccacatggcggtgaacacatctgaagccactatgtttcctggctctaaggctcgtctgtgtaacccataaaacctgctttgattccaaaatgaggccctggagtgcgcaaggagtgcccggatgcttggggtgggtgttcctcccggggcttcaaggggtgactgctgtaggctgtcccagtgcgaggccgggagcgaatggaaaagctgaggctttgcctggcttgtgcatcatgaagtgagaggggacagggccggtggggggaagcagcttgtgcttagcagggagcatccgcggctccccgcaggaggccaagcagcagaaggcagcagtgctagaaagagaagtgc

SEQ ID NO: 87808 - DNA, 656 bp, Homo sapiens
ggtccaatatggcggcgcccagtggcggtgtgaactgtgaggagttcgccgagttccaggaattactcaaggtgatgaggacaattgatgacagaatagtacatgaattaaacactacggttccaacagcttcctttgcagggaaaattgatgccagccaaacctgtaaacaactttatgagtctttgatggcagctcatgccagtagagacagagtcataaaaaactgtatagcccagacttcagcagtagtaaaaaacctccgagaagagagagaaaagaatttggacgatttaacgttattaaaacaacttagaaaagagcagacaaagttgaaatggatgcagtcagaactgaatgttgaagaagtggtaaatgacaggagctggaaggtgtttaatgaacgctgccgaattcacttcaagcctccaaagaatgaataaagagagattcttttttttttttttttttaaggactgggtcatctcataagagctaagcatgacagatatcaacagggcgggctttctaggatgatttctgagccaacagtccaagaccttttgttgatttcagccccacttagccaagacctcaagtataaataattctgataattatggagaaatcaactgctattttatactgattctgta

SEQ ID NO: 87809 - DNA, 712 bp, Homo sapiens
ggagagcaaagttcaaaactctactgagtgtttgggaatgattgtgacacacaatttgctcagccttgagatctgcccttgtgtctttagggcccagatagaatcaccaggatgaccactgcaaggagggtttagaaaccaatcagtgagttgcatgaggtttgctttctagcttgataacatatagggttgggggtaaccatggggtagtacataagcaaataaggaaatgtgaattttttttttcaattttcaagtttgctatgaagattatggaatcagagagagctcttggagatggtacagctctacctcttcattttctatctgaggaaaaagactcagagatacttgagatactaactgacacccccaaagccacaagctattgaaatggatgcagtcagaactgaatgttgaagaagtggtaaatgacaggagctggaaggtgtttaatgaacgctgccgaattcacttcaagcctccaaagaatgaataaagagagattcttttttttttttttttttaaggactgggtcatctcataagagctaagcatgacagatatcaacagggcgggctttctaggatgatttctgagccaacagtccaagaccttttgttgatttcagccccacttagccaagacctcaagtataaataattctgataattatggagaaatcaactgctattttatactgattctgta

SEQ ID NO: 87810 - DNA, 637 bp, Homo sapiens
aaaggagttggtttcagtcatggatttaagtttggcaaaggaattactcaaggtgatgaggacaattgatgacagaatagtacatgaattaaacactacggttccaacagcttcctttgcagggaaaattgatgccagccaaacctgtaaacaactttatgagtctttgatggcagctcatgccagtagagacagagtcataaaaaactgtatagcccagacttcagcagtagtaaaaaacctccgagaagagagagaaaagaatttggacgatttaacgttattaaaacaacttagaaaagagcagacaaagttgaaatggatgcagtcagaactgaatgttgaagaagtggtaaatgacaggagctggaaggtgtttaatgaacgctgccgaattcacttcaagcctccaaagaatgaataaagagagattcttttttttttttttttttaaggactgggtcatctcataagagctaagcatgacagatatcaacagggcgggctttctaggatgatttctgagccaacagtccaagaccttttgttgatttcagccccacttagccaagacctcaagtataaataattctgataattatggagaaatcaactgctattttatactgattctgta

SEQ ID NO: 87811 - DNA, 244 bp, Homo sapiens
cttttggagcctactaaattgaatttagttccaggcctgatttacgcaggataactcaaagacttttgtttttgtttcaatattttaggtgtttaatgaacgctgccgaattcacttcaagcctccaaagaatgaataaagagagattcttttttttttttttttttaaggactgggtcatctcataagagctaagcatgacagatatcaacagggcgggctttctaggatgatttctgagcca

SEQ ID NO: 87812 - DNA, 861 bp, Homo sapiens
  misc_feature (646)..(646): n is a, c, g, or t
  misc_feature (653)..(653): n is a, c, g, or t
  misc_feature (655)..(655): n is a, c, g, or t
  misc_feature (666)..(666): n is a, c, g, or t
  misc_feature (670)..(670): n is a, c, g, or t
  misc_feature (674)..(674): n is a, c, g, or t
  misc_feature (676)..(676): n is a, c, g, or t
  misc_feature (683)..(683): n is a, c, g, or t
  misc_feature (694)..(694): n is a, c, g, or t
  misc_feature (696)..(696): n is a, c, g, or t
  misc_feature (699)..(699): n is a, c, g, or t
  misc_feature (707)..(707): n is a, c, g, or t
  misc_feature (721)..(722): n is a, c, g, or t
  misc_feature (726)..(726): n is a, c, g, or t
  misc_feature (732)..(732): n is a, c, g, or t
  misc_feature (734)..(734): n is a, c, g, or t
  misc_feature (739)..(739): n is a, c, g, or t
  misc_feature (742)..(742): n is a, c, g, or t
ggtccaatatggcggcgcccagtggcggtgtgaactgtgaggagttcgccgagttccaggaattactcaaggtgatgaggacaattgatgacagaatagtacatgaattaaacactacggttccaacagcttcctttgcagggaaaattgatgccagccaaacctgtaaacaactttatgagtctttgatggcagctcatgccagtagagacagagtcataaaaaactgtatagcccagacttcagcagtagtaaaaaacctccgagaagagagagaaaagaatttggacgatttaacgttattaaaacaacttagaaaagagcagacaaagttgaaatggatgcagtcagaactgaatgttgaagaagtggtaaatgacaggagctggaaggtgtttaatgaacgctgccgaattcacttcaagcctccaaagaatgaataaagagagattcttttttttttttttttttaaggactgggtcatctcataagagctaagcatgacagatatcaacagggcgggctttctaggatgatttctgagccaacagtccaagaccttttgttgatttcagccccacttagccaagacctcaagtataaataattctgataattatggagacaccacgggtatttaatcgnggttcgngncacacaaacancaantcgngncttaaanattgcggccgntnaanacaaaaanaaaaaaattggcgnncggnccgaantnaacantcngggggggcaggtagaagggactggcagacgggaagagggtgcccaaagcgggcggcgacccggtggtccgtcagcacagccccgcgggcactccagagccgtagaacgagagcagcacg

SEQ ID NO: 87813 - DNA, 839 bp, Homo sapiens
tgccgggcattttttcctggtttgggggcaaggtctcatgggaaaggtcatgtctctcgaagaaaggttataaaccctgagatatgagggttgggcgagacatccgagcctgtttcgttccgtgttgggaccaggaataaccctgacttctgagctttcataaccccaggatcctccagaaaatttgcggcgcgctgagggaaaaccttgctggcaagtcgggactgtgtggcagcggctatttttcttttcccacccagcacgttttcgggctggggacatagggttcagttgagatacggaggcttccttcgggatattgggttctctgaagtgcggatggactagggcagggctgagaccccattcattcactcatttgtttagctctcctttatgcccggcgcagaagataccccttagggtcccaaggcccttcctgtagttaagttccttccttaaggtcattcagctggggcaaagctggggactcgacacctttctatgctaaccattgagctgcctccactttgagcagctcagtggatgaatatagtatcttgaggatacctttgatttgtgcagggttttcttgtgcaggtttgtgacccaggtcagcttaggtcaggatgctgtactgcttgccacaaaatagcctgtactgtcgcgtcgttttttcttgtgaacagactgtttggcatagccgtagagaggggtctgagacatgaatttagtgatacagcgttgatttgtttgtgtaatgaagctgttcaagtggaaagaactgagttgtagtccctgcttcactagtactagaaggattttttaaacctttttga

SEQ ID NO: 87814 - DNA, 2926 bp, Homo sapiens
tgccgggcattttttcctggtttgggggcaaggtctcatgggaaaggtcatgtctctcgaagaaaggttataaaccctgagatatgagggttgggcgagacatccgagcctgtttcgttccgtgttgggaccaggaataaccctgacttctgagctttcataaccccaggatcctccagaaaatttgcggcgcgctgagggaaaaccttgctgaagctgtacattggaatgcgtttacagtcattgtaatggaagcaaaatacatgaaggaaaaactgttatttgtatccctgcttattgcacctgacgactagttgcagatggttttgtttacctaagaaaacttgtgatataaatgaaaaaaacacctgttttcctagagtcattggttacaaatatgcttcgtctaagagctatttgtccattctcctggagagtgtttcaatttcgacccatcagttgtgaaccactaattattcagatgaataagtgtacagatgaggagcaaatgtttggttttattgaaagaaacaaagccatactttcagaaaagcaagtgggatgtgcatttgatatgctttggaagcttcaaaagcagaagaccagcctgttaactacaaataaattcaaattaatgaatgacgataccctggtgaatgtgttatacgtcacacaacagtttgctggtgaggcccatgacccgctagttgaagcactagttacagaagcatggagaaggctagaaaggtttgatattaaactgctctcagaattttcctcttgcctagcagatcagcatttgtattttagtccattaatgggaaaaatagctgatattgttcataggaacttggaaaccacacaggacttaagttccttgtctgtcttgatggtcaacatatcttctttaatatcacgacattttcaacaacaactggtgaacaaaacagaacttctttttgacaccatagattcttctgaggtcaacgttgcaaaaagcatagcaaagtttcttcgaaatgttagatatcgttatcaaccactattagaaagatgtaataacgtatttttaagtaatgtggaccaccttgatttggattccatcagtaaaatacttagtgtatacaaatttctacaatttaatagttttgaatttattataatggctaaaaagaagctaactgaaatgattcctctgtgtaatcatcctgctagctttgtaaaattgtttgtagcattgggacccattgcaggacctgaagaaaagaaacaacttaaatcaactatgttattgatgtcagaggacctaactggcgagcaagccctggcagtgttgggagcaatgggagatatggaaagcagaaactcatgtctgattaaaagagttacttcagttctgcataaacatttggatggctataaaccattagagttgttgaagataactcaagaattgacttttctgcatttccaaaggaaggagttttttgcgaaacttagagaattactgcttagttatttgaaaaatagtttcataccaactgaggtgtctgttctggtccgtgctatttccctgctcccttctcctcacttggacgaagtggggatatcccgaattgaagccgttttaccacagtgtgacctaaataacctgagtagttttgccacatctgttttaagatggattcagcatgatcacgtgtatttggataatatgactgcgaaacaactgaaactacttcaaaaattagatcactatggtcgtcagagactacaacacagcaacagtttggatctgttacggaaggaacttaaatctctcaaaggaaacacgtttcctgagtcacttcttgaagaaatgattgctactttacagcatttcatggatgatattaattacataaatgttggggagattgcatcttttatttctagtactgattacctcagtactttgctactagataggatagcctcagtggctgttcagcagattgaaaagatccatccttttacaatccctgctattattcgtccattcagcgtattgaactatgatccacctcaaagggatgaatttttgggaacttgcgtgcaacatcttaattcttacttaggtatattggatccttttatattagtgtttcttggtttctctttggccacacttgaatattttccagaagatctgctaaaggcaatttttaacatcaaattcttagctagattggattctcaacttgaaattttatctccatctcgaagtgcaagagtccagtttcatcttatggagttaaatagatcagtctgcttggaatgccctgagtttcagattccatggtttcatgaccgcttctgtcaacaatataataaaggtattggtggcatggatggaacacaacagcagatttttaaaatgttagcagaggtactaggaggaatcaattgtgtaaaagcctcggttcttacgccttattaccacaaagtagattttgagtgtatcttggataaaagaaaaaaacctcttccgtatggaagccataatatagcattgggacaactaccagaaatgccctgggaatcaaatatcgaaatagttggatcaaggctgccaccaggggctgaaaggattgctttggaatttttggattcaaaagcactttgtagaaatatccctcacatgaaaggaaaatctgctatgaaaaaacgacatttggaaattctggggtatcgtgtaattcagatttcccagtttgaatggaactctatggcactgtcaacaaaggatgctcggatggactacctgagagaatgtatatttggagaagtcaagtcatgtttgtagtttttatttaaaatgaatgttatcgtgtgttacatttggacctattttaataaagtggcctgtctcaattaaaaaaaaaaa

SEQ ID NO: 87815 - DNA, 2406 bp, Homo sapiens
tacagtggcacaatcttggctcactgcaacctccgcctcccaggttcaagcaattctcctttaacaactgtaatactattgttaactgtgggcatttgaaattggattattgtggagttttgtgaaaatgtggttggctgcagatgaggatatagtaggtttgctggtgaggcccatgacccgctagttgaagcactagttacagaagcatggagaaggctagaaaggtttgatattaaactgctctcagaattttcctcttgcctagcagatcagcatttgtattttagtccattaatgggaaaaatagctgatattgttcataggaacttggaaaccacacaggacttaagttccttgtctgtcttgatggtcaacatatcttctttaatatcacgacattttcaacaacaactggtgaacaaaacagaacttctttttgacaccatagattcttctgaggtcaacgttgcaaaaagcatagcaaagtttcttcgaaatgttagatatcgttatcaaccactattagaaagatgtaataacgtatttttaagtaatgtggaccaccttgatttggattccatcagtaaaatacttagtgtatacaaatttctacaatttaatagttttgaatttattataatggctaaaaagaagctaactgaaatgattcctctgtgtaatcatcctgctagctttgtaaaattgtttgtagcattgggacccattgcaggacctgaagaaaagaaacaacttaaatcaactatgttattgatgtcagaggacctaactggcgagcaagccctggcagtgttgggagcaatgggagatatggaaagcagaaactcatgtctgattaaaagagttacttcagttctgcataaacatttggatggctataaaccattagagttgttgaagataactcaagaattgacttttctgcatttccaaaggaaggagttttttgcgaaacttagagaattactgcttagttatttgaaaaatagtttcataccaactgaggtgtctgttctggtccgtgctatttccctgctcccttctcctcacttggacgaagtggggatatcccgaattgaagccgttttaccacagtgtgacctaaataacctgagtagttttgccacatctgttttaagatggattcagcatgatcacgtgtatttggataatatgactgcgaaacaactgaaactacttcaaaaattagatcactatggtcgtcagagactacaacacagcaacagtttggatctgttacggaaggaacttaaatctctcaaaggaaacacgtttcctgagtcacttcttgaagaaatgattgctactttacagcatttcatggatgatattaattacataaatgttggggagattgcatcttttatttctagtactgattacctcagtactttgctactagataggatagcctcagtggctgttcagcagattgaaaagatccatccttttacaatccctgctattattcgtccattcagcgtattgaactatgatccacctcaaagggatgaatttttgggaacttgcgtgcaacatcttaattcttacttaggtatattggatccttttatattagtgtttcttggtttctctttggccacacttgaatattttccagaagatctgctaaaggcaatttttaacatcaaattcttagctagattggattctcaacttgaaattttatctccatctcgaagtgcaagagtccagtttcatcttatggagttaaatagatcagtctgcttggaatgccctgagtttcagattccatggtttcatgaccgcttctgtcaacaatataataaaggtattggtggcatggatggaacacaacagcagatttttaaaatgttagcagaggtactaggaggaatcaattgtgtaaaagcctcggttcttacgccttattaccacaaagtagattttgagtgtatcttggataaaagaaaaaaacctcttccgtatggaagccataatatagcattgggacaactaccagaaatgccctgggaatcaaatatcgaaatagttggatcaaggctgccaccaggggctgaaaggattgctttggaatttttggattcaaaagcactttgtagaaatatccctcacatgaaaggaaaatctgctatgaaaaaacgacatttggaaattctggggtatcgtgtaattcagatttcccagtttgaatggaactctatggcactgtcaacaaaggatgctcggatggactacctgagagaatgtatatttggagaagtcaagtcatgtttgtagtttttatttaaaatgaatgttatcgtgtgttacatttggacctattttaataaagtggcctgtctcaattaaaaaaaaaaa

SEQ ID NO: 87816 - DNA, 2911 bp, Homo sapiens
tgccgggcattttttcctggtttgggggcaaggtctcatgggaaaggtcatgtctctcgaagaaaggttataaaccctgagatatgagggttgggcgagacatccgagcctgtttcgttccgtgttgggaccaggaataaccctgacttctgagctttcataaccccaggatcctccagaaaatttgcggcgcgctgagggaaaaccttgctgaagctgtacattggaatgcgtttacagtcattgtaatggaagcaaaatacatgaaggaaaaactgttatttgtatccctgcttattgcacctgacgactagttgcagatggttttgtttacctaagaaaacttgtgatataaatgaaaaaaacacctgttttcctagagtcattggttacaaatatgcttcgtctaagagctatttgtccattctcctggagagtgtttcaatttcgacccatcagttgtgaaccactaattattcagatgaataagtgtacagatgaggagcaaatgtttggttttattgaaagaaacaaagccatactttcagaaaagcaagtgggatgtgcatttgatatgctttggaagcttcaaaagcagaagaccagcctgttaaaaaatgctgagtatgtcagagaccatcctcaatttcttactcttcataatttagctacaaataaattcaaattaatgaatgacgataccctggtgaatgtgttatacgtcacacaacagtttgatattaaactgctctcagaattttcctcttgcctagcagatcagcatttgtattttagtccattaatgggaaaaatagctgatattgttcataggaacttggaaaccacacaggacttaagttccttgtctgtcttgatggtcaacatatcttctttaatatcacgacattttcaacaacaactggtgaacaaaacagaacttctttttgacaccatagattcttctgaggtcaacgttgcaaaaagcatagcaaagtttcttcgaaatgttagatatcgttatcaaccactattagaaagatgtaataacgtatttttaagtaatgtggaccaccttgatttggattccatcagtaaaatacttagtgtatacaaatttctacaatttaatagttttgaatttattataatggctaaaaagaagctaactgaaatgattcctctgtgtaatcatcctgctagctttgtaaaattgtttgtagcattgggacccattgcaggacctgaagaaaagaaacaacttaaatcaactatgttattgatgtcagaggacctaactggcgagcaagccctggcagtgttgggagcaatgggagatatggaaagcagaaactcatgtctgattaaaagagttacttcagttctgcataaacatttggatggctataaaccattagagttgttgaagataactcaagaattgacttttctgcatttccaaaggaaggagttttttgcgaaacttagagaattactgcttagttatttgaaaaatagtttcataccaactgaggtgtctgttctggtccgtgctatttccctgctcccttctcctcacttggacgaagtggggatatcccgaattgaagccgttttaccacagtgtgacctaaataacctgagtagttttgccacatctgttttaagatggattcagcatgatcacgtgtatttggataatatgactgcgaaacaactgaaactacttcaaaaattagatcactatggtcgtcagagactacaacacagcaacagtttggatctgttacggaaggaacttaaatctctcaaaggaaacacgtttcctgagtcacttcttgaagaaatgattgctactttacagcatttcatggatgatattaattacataaatgttggggagattgcatcttttatttctagtactgattacctcagtactttgctactagataggatagcctcagtggctgttcagcagattgaaaagatccatccttttacaatccctgctattattcgtccattcagcgtattgaactatgatccacctcaaagggatgaatttttgggaacttgcgtgcaacatcttaattcttacttaggtatattggatccttttatattagtgtttcttggtttctctttggccacacttgaatattttccagaagatctgctaaaggcaatttttaacatcaaattcttagctagattggattctcaacttgaaattttatctccatctcgaagtgcaagagtccagtttcatcttatggagttaaatagatcagtctgcttggaatgccctgagtttcagattccatggtttcatgaccgcttctgtcaacaatataataaaggtattggtggcatggatggaacacaacagcagatttttaaaatgttagcagaggtactaggaggaatcaattgtgtaaaagcctcggttcttacgccttattaccacaaagtagattttgagtgtatcttggataaaagaaaaaaacctcttccgtatggaagccataatatagcattgggacaactaccagaaatgccctgggaatcaaatatcgaaatagttggatcaaggctgccaccaggggctgaaaggattgctttggaatttttggattcaaaagcactttgtagaaatatccctcacatgaaaggaaaatctgctatgaaaaaacgacatttggaaattctggggtatcgtgtaattcagatttcccagtttgaatggaactctatggcactgtcaacaaaggatgctcggatggactacctgagagaatgtatatttggagaagtcaagtcatgtttgtagtttttatttaaaatgaatgttatcgtgtgttacatttggacctattttaataaagtggcctgtctcaattaaaaaaaaaaa

SEQ ID NO: 87817 - DNA, 979 bp, Homo sapiens
tccttatttatatttttgaaatttaattacagttagtgcagaaggttgttcaactatccatccttttacaatccctgctattattcgtccattcagcgtattgaactatgatccacctcaaagggatgaatttttgggaacttgcgtgcaacatcttaattcttacttaggtatattggatccttttatattagtgtttcttggtttctctttggccacacttgaatattttccagaagatctgctaaaggcaatttttaacatcaaattcttagctagattggattctcaacttgaaattttatctccatctcgaagtgcaagagtccagtttcatcttatggagttaaatagatcagtctgcttggaatgccctgagtttcagattccatggtttcatgaccgcttctgtcaacaatataataaaggtattggtggcatggatggaacacaacagcagatttttaaaatgttagcagaggtactaggaggaatcaattgtgtaaaagcctcggttcttacgccttattaccacaaagtagattttgagtgtatcttggataaaagaaaaaaacctcttccgtatggaagccataatatagcattgggacaactaccagaaatgccctgggaatcaaatatcgaaatagttggatcaaggctgccaccaggggctgaaaggattgctttggaatttttggattcaaaagcactttgtagaaatatccctcacatgaaaggaaaatctgctatgaaaaaacgacatttggaaattctggggtatcgtgtaattcagatttcccagtttgaatggaactctatggcactgtcaacaaaggatgctcggatggactacctgagagaatgtatatttggagaagtcaagtcatgtttgtagtttttatttaaaatgaatgttatcgtgtgttacatttggacctattttaataaagtggcctgtctcaattaaaaaaaaaaa

SEQ ID NO: 87818 - DNA, 2257 bp, Homo sapiens
tgccgggcattttttcctggtttgggggcaaggtctcatgggaaaggtcatgtctctcgaagaaaggttataaaccctgagatatgagggttgggcgagacatccgagcctgtttcgttccgtgttgggaccaggaataaccctgacttctgagctttcataaccccaggatcctccagaaaatttgcggcgcgctgagggaaaaccttgctgaagctgtacattggaatgcgtttacagtcattgtaatggaagcaaaatacatgaaggaaaaactgttatttgtatccctgcttattgcacctgacgactagttgcagatggttttgtttacctaagaaaacttgtgatataaatgaaaaaaacacctgttttcctagagtcattggttacaaatatgcttcgtctaagagctatttgtccattctcctggagagtgtttcaatttcgacccatcagttgtgaaccactaattattcagatgaataagtgtacagatgaggagcaaatgtttggttttattgaaagaaacaaagccatactttcagaaaagcaagtgggatgtgcatttgatatgctttggaagcttcaaaagcagaagaccagcctgttaaaaaatgctgagtatgtcagagaccatcctcaatttcttactcttcataatttagctacaaataaattcaaattaatgaatgacgataccctggtgaatgtgttatacgtcacacaacagtttgctggtgaggcccatgacccgctagttgaagcactagttacagaagcatggagaaggctagaaaggtttgatattaaactgctctcagaattttcctcttgcctagcagatcagcatttgtattttagtccattaatgggaaaaatagctgatattgttcataggaacttggaaaccacacaggacttaagttccttgtctgtcttgatggtcaacatatcttctttaatatcacgacattttcaacaacaactggtgaacaaaacagaacttctttttgacaccatagattcttctgaggtcaacgttgcaaaaagcatagcaaagtttcttcgaaatgttagatatcgttatcaaccactattagaaagatgtaataacgtatttttaagtaatgtggaccaccttgatttggattccatcagtaaaatacttagtgtatacaaatttctacaatttaatagttttgaatttattataatggctaaaaagaagctaactgaaatgattcctctgtgtaatcatcctgctagctttgtaaaattgtttgtagcattgggacccattgcaggacctgaagaaaagaaacagtaagttcagtttaaaatgcattactttttttgttgtgaatacgtggagccttcaagcttaggtctccttgcagctctggaaggtacaaatatcaccctattaggttgtggaagggaaaataatctcttatgctctgctccttgattctttttctgattattctaatttacatctcaaactcttagtctgttgctgtgttctgaaaggtaaacctctgatactgggccaacatgaaaaaaaatgaggggaaacgccatgtgtttttattctcccttttgtgctacatgactggatttacacatataagactcccccacccagtgtaagtctgtggaatatttagaattatagtagtcatagcagagggccattttatgctttgctgtcttcatcacaataatcatcaaagcatttattatgcactgggcatatgttcccatgtcaggtttgagcaaattttgtgtggcgcctctcatttaggaatttccagttttgctagatactgatgtaggtagtaatatttgaaatataatgatgagcaaatattaaattaacatacaaatacggttaatagataagagtttctcttcctaggccatgtgactggatttatactagacataaacttcccccacccagcataattgtatgaaatatttagaattacaagctgggcacggcgttgcacgcctttaatcccatcactttgggaggccgaggcaggtggatccctggatcccaggaatttgagaccagcctaggcaagatgatgaaaccttgtctgtacaaaaaaatacaaaattagccagatgtggtggtgcccacctagattcccagctactcatgaggatcacctgagcccaaggaggttgagcctgcagtgaactgacattgcgccattgaattccagcctgggcacagaatgaaacc

SEQ ID NO: 87819 - DNA, 1113 bp, Homo sapiens
attacaggtgtgagccactgtgcctggcctggttgtcttttatacattaagactcatcagtgggttcgtatgttgtcagctgattcattcaacagaaagttcccctgtcagcttttcacctgctgattttagcagttattaatgatcactcattgcctaaatccatcattcagaggggtggtaaagtagcgatattctacatctatcatgccttctacatttattagctggaatttgtctaaaaaggactttcccatatcaactgtttagttactcttatgtacaattcatgtagaaaagacaggataaatgcttgtatctttttctttattaattttcagatgagttggtttagctttctccaaatgtaatcaagagccttaaagagattgaaactctttaatgtgatttggcctagcccagcgctaaatgtagcctagtacttaatattgttttgtaattcttctggttgatttttttattgattgatttccaaagagaggtgccattggaccagatcttataaaaataacttggataatctgagaggttcgtcattcttttgtgagtgtgtgtgtgtacaaatattatatgcatatatatttcaaatatatcttaaacttttatctgtaagactttacctaattcatactaccagtttctatgcttccttaagattttgagtgtatcttggataaaagaaaaaaacctcttccgtatggaagccataatatagcattgggacaactaccagaaatgccctgggaatcaaatatcgaaatagttggatcaaggctgccaccaggggctgaaaggattgctttggaatttttggattcaaaagcactttgtagaaatatccctcacatgaaaggaaaatctgctatgaaaaaacgacatttggaaattctggggtatcgtgtaattcagatttcccagtttgaatggaactctatggcactgtcaacaaaggatgctcggatggactacctgagagaatgtatatttggagaagtcaagtcatgtttgtagtttttatttaaaatgaatgttatcgtgtgttacatttggacctattttaataaagtggcctgtctcaattaaaaaaaaaaa

SEQ ID NO: 87820 - DNA, 1227 bp, Homo sapiens
tgccgggcattttttcctggtttgggggcaaggtctcatgggaaaggtcatgtctctcgaagaaaggttataaaccctgagatatgagggttgggcgagacatccgagcctgtttcgttccgtgttgggaccaggaataaccctgacttctgagctttcataaccccaggatcctccagaaaatttgcggcgcgctgagggaaaaccttgctgaagctgtacattggaatgcgtttacagtcattgtaatggaagcaaaatacatgaaggaaaaactgttatttgtatccctgcttattgcacctgacgactagttgcagatggttttgtttacctaagaaaacttgtgatataaatgaaaaaaacacctgttttcctagagtcattggttacaaatatgcttcgtctaagagctatttgtccattctcctggagagtgtttcaatttcgacccatcagttgtgaaccactaattattcagatgaataagtgtacagatgaggagcaaatgtttggttttattgaaagaaacaaagccatactttcagaaaagcaagtgggatgtgcatttgatatgctttggaagcttcaaaagcagaagaccagcctgttaaaaaatgctgagtatgtcagagaccatcctcaatttcttactcttcataatttagctacaaataaattcaaattaatgaatgacgataccctggtgaatgtgttatacgtcacacaacagtttgctggtgaggcccatgacccgctagttgaagcactagttacagaagcatggagaaggctagaaaggtttgatattaaactgctctcagaattttcctcttgcctagcagatcagcatttgtattttagtccattaatgggaaaaatagctgatattgttcataggaacttggaaaccacacaggacttaagttccttgggtctggtctgcatggccaacagtatctctctcacactatgaggacattccacaacaactgctggacgaaaagagacactcacttgtggacacacaacatctcctgggccaggcgcaacaagcatagcgaaagtcctcgacatgtccgatatcgctaccagcggtccccaagagcatcacggacccgcagccagtggacccctggcaggggctcaacgcagcaccgcggagaacatgcaacacacaacacaacacacaggccagaacaccccaaccgggcaacccacgcaacg

SEQ ID NO: 87821 - DNA, 2980 bp, Homo sapiens
tgccgggcattttttcctggtttgggggcaaggtctcatgggaaaggtcatgtctctcgaagaaaggttataaaccctgagatatgagggttgggcgagacatccgagcctgtttcgttccgtgttgggaccaggaataaccctgacttctgagctttcataaccccaggatcctccagaaaatttgcggcgcgctgagggaaaaccttgctgaagctgtacattggaatgcgtttacagtcattgtaatggaagcaaaatacatgaaggaaaaactgttatttgtatccctgcttattgcacctgacgactagttgcagatggttttgtttacctaagaaaacttgtgatataaatgaaaaaaacacctgttttcctagagtcattggttacaaatatgcttcgtctaagagctatttgtccattctcctggagagtgtttcaatttcgacccatcagttgtgaaccactaattattcagatgaataagtgtacagatgaggagcaaatgtttggttttattgaaagaaacaaagccatactttcagaaaagcaagtgggatgtgcatttgatatgctttggaagcttcaaaagcagaagaccagcctgttaaaaaatgctgagtatgtcagagaccatcctcaatttcttactcttcataatttagctacaaataaattcaaattaatgaatgacgataccctggtgaatgtgttatacgtcacacaacagtttgctggtgaggcccatgacccgctagttgaagcactagttacagaagcatggagaaggctagaaaggtttgatattaaactgctctcagaattttcctcttgcctagcagatcagcatttgtattttagtccattaatgggaaaaatagctgatattgttcataggaacttggaaaccacacaggacttaagttccttgtctgtcttgatggtcaacatatcttctttaatatcacgacattttcaacaacaactggtgaacaaaacagaacttctttttgacaccatagattcttctgaggtcaacgttgcaaaaagcatagcaaagtttcttcgaaatgttagatatcgttatcaaccactattagaaagatgtaataacgtatttttaagtaatgtggaccaccttgatttggattccatcagtaaaatacttagtgtatacaaatttctacaatttaatagttttgaatttattataatggctaaaaagaagctaactgaaatgattcctctgtgtaatcatcctgctagctttgtaaaattgtttgtagcattgggacccattgcaggacctgaagaaaagaaacaacttaaatcaactatgttattgatgtcagaggacctaactggcgagcaagccctggcagtgttgggagcaatgggagatatggaaagcagaaactcatgtctgattaaaagagttacttcagttctgcataaacatttggatggctataaaccattagagttgttgaagataactcaagaattgacttttctgcatttccaaaggaaggagttttttgcgaaacttagagaattactgcttagttatttgaaaaatagtttcataccaactgaggtgtctgttctggtccgtgctatttccctgctcccttctcctcacttggacgaagtggggatatcccgaattgaagccgttttaccacagtgtgacctaaataacctgagtagttttgccacatctgttttaagatggattcagcatgatcacgtgtatttggataatatgactgcgaaacaactgaaactacttcaaaaattagatcactatggtcgtcagagactacaacacagcaacagtttggatctgttacggaaggaacttaaatctctcaaaggaaacacgtttcctgagtcacttcttgaagaaatgattgctactttacagcatttcatggatgatattaattacataaatgttggggagattgcatcttttatttctagtactgattacctcagtactttgctactagataggatagcctcagtggctgttcagcagattgaaaagatccatccttttacaatccctgctattattcgtccattcagcgtattgaactatgatccacctcaaagggatgaatttttgggaacttgcgtgcaacatcttaattcttacttaggtatattggatccttttatattagtgtttcttggtttctctttggccacacttgaatattttccagaagatctgctaaaggcaatttttaacatcaaattcttagctagattggattctcaacttgaaattttatctccatctcgaagtgcaagagtccagtttcatcttatggagttaaatagatcagtctgcttggaatgccctgagtttcagattccatggtttcatgaccgcttctgtcaacaatataataaaggtattggtggcatggatggaacacaacagcagatttttaaaatgttagcagaggtactaggaggaatcaattgtgtaaaagcctcggttcttacgccttattaccacaaagtagattttgagtgtatcttggataaaagaaaaaaacctcttccgtatggaagccataatatagcattgggacaactaccagaaatgccctgggaatcaaatatcgaaatagttggatcaaggctgccaccaggggctgaaaggattgctttggaatttttggattcaaaagcactttgtagaaatatccctcacatgaaaggaaaatctgctatgaaaaaacgacatttggaaattctggggtatcgtgtaattcagatttcccagtttgaatggaactctatggcactgtcaacaaaggatgctcggatggactacctgagagaatgtatatttggagaagtcaagtcatgtttgtagtttttatttaaaatgaatgttatcgtgtgttacatttggacctattttaataaagtggcctgtctcaattaaaaaaaaaaa

SEQ ID NO: 87822 - DNA, 2998 bp, Homo sapiens
agcgggcgtcaccacgccctcctaggacttctaggattttggtgccttttaaattcctagtttataggtggcctaatgctttgtggatgcgttgactgggaacgcttgtaaccgttaaaatgccatatcctttgtgaaagacagggtctcattatgttgctcaggatggacttgaactcctggagtcaagcgattctcccaccttagtctccagagtagctgggactacagaagctgtacattggaatgcgtttacagtcattgtaatggaagcaaaatacatgaaggaaaaactgttatttgtatccctgcttattgcacctgacgactagttgcagatggttttgtttacctaagaaaacttgtgatataaatgaaaaaaacacctgttttcctagagtcattggttacaaatatgcttcgtctaagagctatttgtccattctcctggagagtgtttcaatttcgacccatcagttgtgaaccactaattattcagatgaataagtgtacagatgaggagcaaatgtttggttttattgaaagaaacaaagccatactttcagaaaagcaagtgggatgtgcatttgatatgctttggaagcttcaaaagcagaagaccagcctgttaaaaaatgctgagtatgtcagagaccatcctcaatttcttactcttcataatttagctacaaataaattcaaattaatgaatgacgataccctggtgaatgtgttatacgtcacacaacagtttgctggtgaggcccatgacccgctagttgaagcactagttacagaagcatggagaaggctagaaaggtttgatattaaactgctctcagaattttcctcttgcctagcagatcagcatttgtattttagtccattaatgggaaaaatagctgatattgttcataggaacttggaaaccacacaggacttaagttccttgtctgtcttgatggtcaacatatcttctttaatatcacgacattttcaacaacaactggtgaacaaaacagaacttctttttgacaccatagattcttctgaggtcaacgttgcaaaaagcatagcaaagtttcttcgaaatgttagatatcgttatcaaccactattagaaagatgtaataacgtatttttaagtaatgtggaccaccttgatttggattccatcagtaaaatacttagtgtatacaaatttctacaatttaatagttttgaatttattataatggctaaaaagaagctaactgaaatgattcctctgtgtaatcatcctgctagctttgtaaaattgtttgtagcattgggacccattgcaggacctgaagaaaagaaacaacttaaatcaactatgttattgatgtcagaggacctaactggcgagcaagccctggcagtgttgggagcaatgggagatatggaaagcagaaactcatgtctgattaaaagagttacttcagttctgcataaacatttggatggctataaaccattagagttgttgaagataactcaagaattgacttttctgcatttccaaaggaaggagttttttgcgaaacttagagaattactgcttagttatttgaaaaatagtttcataccaactgaggtgtctgttctggtccgtgctatttccctgctcccttctcctcacttggacgaagtggggatatcccgaattgaagccgttttaccacagtgtgacctaaataacctgagtagttttgccacatctgttttaagatggattcagcatgatcacgtgtatttggataatatgactgcgaaacaactgaaactacttcaaaaattagatcactatggtcgtcagagactacaacacagcaacagtttggatctgttacggaaggaacttaaatctctcaaaggaaacacgtttcctgagtcacttcttgaagaaatgattgctactttacagcatttcatggatgatattaattacataaatgttggggagattgcatcttttatttctagtactgattacctcagtactttgctactagataggatagcctcagtggctgttcagcagattgaaaagatccatccttttacaatccctgctattattcgtccattcagcgtattgaactatgatccacctcaaagggatgaatttttgggaacttgcgtgcaacatcttaattcttacttaggtatattggatccttttatattagtgtttcttggtttctctttggccacacttgaatattttccagaagatctgctaaaggcaatttttaacatcaaattcttagctagattggattctcaacttgaaattttatctccatctcgaagtgcaagagtccagtttcatcttatggagttaaatagatcagtctgcttggaatgccctgagtttcagattccatggtttcatgaccgcttctgtcaacaatataataaaggtattggtggcatggatggaacacaacagcagatttttaaaatgttagcagaggtactaggaggaatcaattgtgtaaaagcctcggttcttacgccttattaccacaaagtagattttgagtgtatcttggataaaagaaaaaaacctcttccgtatggaagccataatatagcattgggacaactaccagaaatgccctgggaatcaaatatcgaaatagttggatcaaggctgccaccaggggctgaaaggattgctttggaatttttggattcaaaagcactttgtagaaatatccctcacatgaaaggaaaatctgctatgaaaaaacgacatttggaaattctggggtatcgtgtaattcagatttcccagtttgaatggaactctatggcactgtcaacaaaggatgctcggatggactacctgagagaatgtatatttggagaagtcaagtcatgtttgtagtttttatttaaaatgaatgttatcgtgtgttacatttggacctattttaataaagtggcctgtctcaattaaaaaaaaaaa

SEQ ID NO: 87823 - DNA, 2851 bp, Homo sapiens
tgccgggcattttttcctggtttgggggcaaggtctcatgggaaaggtcatgtctctcgaagaaaggttataaaccctgagatatgagggttgggcgagacatccgagcctgtttcgttccgtgttgggaccaggaataaccctgacttctgagctttcataaccccaggatcctccagaaaatttgcggcgcgctgagggaaaaccttgctgaagctgtacattggaatgcgtttacagtcattgtaatggaagcaaaatacatgaaggaaaaactgttatttgtatccctgcttattgcacctgacgactagttgcagatggttttgtttacctaagaaaacttgtgatataaatgaaaaaaacacctgttttcctagagtcattggttacaaatatgcttcgtctaagagctatttgtccattctcctggagagtgtttcaatttcgacccatcagttgtgaaccactaattattcagatgaataagtgtacagatgaggagcaaatgtttggttttattgaaagaaacaaagccatactttcagaaaagcaagtgggatgtgcatttgatatgctttggaagcttcaaaagcagaagaccagcctgttaaaaaatgctgagtatgtcagagaccatcctcaatttcttactcttcataatttagctacaaataaattcaaattaatgaatgacgataccctggtgaatgtgttatacgtcacacaacagtttgctggtgaggcccatgacccgctagttgaagcactagttacagaagcatggagaaggctagaaaggtttgatattaaactgctctcagaattttcctcttgcctagcagatcagcatttgtattttagtccattaatgggaaaaatagctgatattgttcataggaacttggaaaccacacaggacttaagttccttgtctgtcttgatggtcaacatatcttctttaatatcacgacattttcaacaacaactggtgaacaaaacagaacttctttttgacaccatagattcttctgaggtcaacgttgcaaaaagcatagcaaagtttcttcgaaatgttagatatcgttatcaaccactattagaaagatgtaataacgtatttttaagtaatgtggaccaccttgatttggattccatcagtaaaatacttagtgtatacaaatttctacaatttaatagttttgaatttattataatggctaaaaagaagctaactgaaatgattcctctgtgtaatcatcctgctagctttgtaaaattgtttgtagcattgggacccattgcaggacctgaagaaaagaaacaacttaaatcaactatgttattgatgtcagaggacctaactggcgagcaagccctggcagtgttgggagcaatgggagatatggaaagcagaaactcatgtctgattaaaagagttacttcagttctgcataaacatttggatggctataaaccattagagttgttgaagataactcaagaattgacttttctgcatttccaaaggaaggagttttttgcgaaacttagagaattactgcttagttatttgaaaaatagtttcataccaactgaggtgtctgttctggtccgtgctatttccctgctcccttctcctcacttggacgaagtggggatatcccgaattgaagccgttttaccacagtgtgacctaaataacctgagtagttttgccacatctgttttaagatggattcagcatgatcacgtgtatttggataatatgactgcgaaacaactgaaactacttcaaaaattagatcactatggtcgtcagagactacaacacagcaacagtttggatctgttacggaaggaacttaaatctctcaaaggaaacacgtttcctgagtcacttcttgaagaaatgattgctactttacagcatttcatggatgatattaattacataaatgttggggagattgcatcttttatttctagtactgattacctcagtactttgctactagataggatagcctcagtggctgttcagcagattgaaaagatccatccttttacaatccctgctattattcgtccattcagcgtattgaactatgatccacctcaaagggatgaatttttgggaacttgcgtgcaacatcttaattcttacttaggtatattggatccttttatattagtgtttcttggtttctctttggccacacttgaatattttccagaagatctgctaaaggcaatttttaacatcaaattcttagctagattggattctcaacttgaaagtattggtggcatggatggaacacaacagcagatttttaaaatgttagcagaggtactaggaggaatcaattgtgtaaaagcctcggttcttacgccttattaccacaaagtagattttgagtgtatcttggataaaagaaaaaaacctcttccgtatggaagccataatatagcattgggacaactaccagaaatgccctgggaatcaaatatcgaaatagttggatcaaggctgccaccaggggctgaaaggattgctttggaatttttggattcaaaagcactttgtagaaatatccctcacatgaaaggaaaatctgctatgaaaaaacgacatttggaaattctggggtatcgtgtaattcagatttcccagtttgaatggaactctatggcactgtcaacaaaggatgctcggatggactacctgagagaatgtatatttggagaagtcaagtcatgtttgtagtttttatttaaaatgaatgttatcgtgtgttacatttggacctattttaataaagtggcctgtctcaattaaaaaaaaaaa

SEQ ID NO: 87824 - DNA, 2768 bp, Homo sapiens
tgccgggcattttttcctggtttgggggcaaggtctcatgggaaaggtcatgtctctcgaagaaaggttataaaccctgagatatgagggttgggcgagacatccgagcctgtttcgttccgtgttgggaccaggaataaccctgacttctgagctttcataaccccaggatcctccagaaaatttgcggcgcgctgagggaaaaccttgctgaagctgtacattggaatgcgtttacagtcattgtaatggaagcaaaatacatgaaggaaaaactgttatttgtatccctgcttattgcacctgacgactagttgcagatggttttgtttacctaagaaaacttgtgatataaatgaaaaaaacacctgttttcctagagtcattggttacaaatatgcttcgtctaagagctatttgtccattctcctggagagtgtttcaatttcgacccatcagttgtgaaccactaattattcagatgaataagtgtacagatgaggagcaaatgtttggttttattgaaagaaacaaagccatactttcagaaaagcaagtgggatgtgcatttgatatgctttggaagcttcaaaagcagaagaccagcctgttaaaaaatgctgagtatgtcagagaccatcctcaatttcttactcttcataatttagctacaaataaattcaaattaatgaatgacgataccctggtgaatgtgttatacgtcacacaacagtttgctggtgaggcccatgacccgctagttgaagcactagttacagaagcatggagaaggctagaaaggtttgatattaaactgctctcagaattttcctcttgcctagcagatcagcatttgtattttagtccattaatgggaaaaatagctgatattgttcataggaacttggaaaccacacaggacttaagttccttgtctgtcttgatggtcaacatatcttctttaatatcacgacattttcaacaacaactggtgaacaaaacagaacttctttttgacaccatagattcttctgaggtcaacgttgcaaaaagcatagcaaagtttcttcgaaatgttagatatcgttatcaaccactattagaaagatgtaataacgtatttttaagtaatgtggaccaccttgatttggattccatcagtaaaatacttagtgtatacaaatttctacaatttaatagttttgaatttattataatggctaaaaagaagctaactgaaatgattcctctgtgtaatcatcctgctagctttgtaaaattgtttgtagcattgggacccattgcaggacctgaagaaaagaaacaacttaaatcaactatgttattgatgtcagaggacctaactggcgagcaagccctggcagtgttgggagcaatgggagatatggaaagcagaaactcatgtctgattaaaagagttacttcagttctgcataaacatttggatggctataaaccattagagttgttgaagataactcaagaattgacttttctgcatttccaaaggaaggagttttttgcgaaacttagagaattactgcttagttatttgaaaaatagtttcataccaactgaggtgtctgttctggtccgtgctatttccctgctcccttctcctcacttggacgaagtggggatatcccgaattgaagccgttttaccacagtgtgacctaaataacctgagtagttttgccacatctgttttaagatggattcagcatgatcacgtgtatttggataatatgactgcgaaacaactgaaactacttcaaaaattagatcactatggtcgtcagagactacaacacagcaacagtttggatctgttacggaaggaacttaaatctctcaaaggaaacacgtttcctgagtcacttcttgaagaaatgattgctactttacagcatttcatggatgatattaattacataaatgttggggagattgcatcttttatttctagtactgattacctcagtactttgctactagataggatagcctcagtggctgttcagcagattgaaaagatccatccttttacaatccctgctattattcgtccattcagcgtattgaactatgatccacctcaaagggatgaatttttgggaacttgcgtgcaacatcttaattcttacttaggtatattggatccttttatattagtgtttcttggtttctctttggccacacttgaatattttccagaagatctgctaaaggcaatttttaacatcaaattcttagctagattggattctcaacttgaaattttatctccatctcgaagtgcaagagtccagtttcatcttatggagttaaatagatcagtctgcttggaatgccctgagtttcagattccatggtttcatgaccgcttctgtcaacaatataataaaggtattggtggcatggatggaacacaacagcagatttttaaaatgttagcagaggtactaggaggaatcaattgtgtaaaagcctcggttcttacgccttattaccacaaagtaggtaagttattgggtaggttattagttactttcagaaaatcaaactaatttgaatagaatcatcttatcagttggaattttttaaagttttttgaatttttttcaagttgttattattattaaaattttcaaacggagatagaaagagcaatagaataaatcctcaagttcccgtggcccagtgttgataaccaagagcgttttctattctttagaaaaaaaaaaa

SEQ ID NO: 87825 - DNA, 766 bp, Homo sapiens
gtccagcctgcagatttgtttttttgaattgaaggatagttaacaaagaaaatgcacagatcttaatgttccttctataggcatgttttttaaattatttatttccttaacatttaaacattgagagatctcacataaaaacccagacttctggttccttttgagaagccagaaattggccacacagaccctcattcttgcattcttgcaagacagccgtgagctggaggcacacttcagccaaactgctggttggcactccacatgttccccacagccacagtccctagccaggcccctttcctctttgcctgccaggtccctggaatccattcctctctgtctcagctgagacaatacttcctcaggtaagccttctggaccccttcagactagatgaggtcatttggttataaactggcatagtcccacgaactttcttcattgtaattaactcattatttgattgatatccatgtttttgggcaggagtggtggctcatgcctataatccctgcactttgggaagccaaggcaggcagatcacctgagatcaggagtttgagactagccttggccaacatggcgaaaccttggctctactaaaaatacaaaaattagccaggcgtggtggcgaacacctgtagtcccagctactcgggaggctgaggcaggagaatcacttgaacctgggaggcagaggttgcagtgagccaagatcgtgccattgcactccagcctgggcaacagagcgagactccatctc

SEQ ID NO: 87826 - DNA, 396 bp, Homo sapiens
ttaacttacaggcctttaatccatgtggtaattttttgtttacatctagttgattttcttattatggaaaatttagttattccaagacagtttactaactagtctatcacttgccttctagtttatgatgcctttgctctcatacccaggttctcatacaagtagagaattgtatctgtgctttgtagtctgctgcattgacttaaaaaaagttcctgcctagatactaccatgtttttattcatttatttatttttgagacagagtcttgctctgttgcccaggctggagtggagggaccacaggcacacaccaccacgcccagctaatttttgtgtaatttttgtacttttaatagaggcggggtttcaccacgttggccaggctggtctcgaa

SEQ ID NO: 87827 - DNA, 394 bp, Homo sapiens
aatgtagaaagagagatcaaaatatcttgagttataaattcaaatagaaagaaaattatgatgagtttaggccaggatatggtgaaactggcatcgtcatatgccaggttattgagtaaccttcctcaaaagttctttactatctttgaaccactacaaatgcataatcgttcaacagtgtcaaaaagtatttatttgaatgtggtgggagaatgaaacttcttctttgggttataacctggagtatgcttccagatggtgattgtgcccatttgtacaaatagaaagctacaagaccagtcttccgagcccatgtctgtgatctgcctatgtaagaagaatagttttgtaatagagtttgcttccaagggaatctctatggcatagtattctt

SEQ ID NO: 87828 - DNA, 308 bp, Homo sapiens
tgaaccattgtgcccagcccagtatctggggctttctttttaaatttttaaaaaatgtgtaccacactacacagatgtagtatcttgggctaaaaaaaatcttaaatagacaaaggaactattcatttggactagtaatactgttactatgcattcttgcatatctcctcaattaggaattgttatctaataacgaataattgtgctggcaaaattagaagattgcattcaaggactttttttgagataggtgctatatgcagtctttcttcctttgcacctttactttgggttgctgtttgtttaaa

SEQ ID NO: 87829 - DNA, 236 bp, Homo sapiens
gacaaaataggaagattctttttaaaaccagaatctctaaaatgagtttgtttgtgatgcaagtagggtctggatcctacaaaccacggaagacttgcagacaaggcagtttcttctggaagcttccccagggaagagcaggaacccccagaatggcagagctgcacgtgtgccgctgtgtgacattcctggtgctaaaaagaaacagtgatggatctttgccatagtggggaaaa

SEQ ID NO: 87830 - DNA, 481 bp, Homo sapiens
actacatgatttggtacttatggaaatatttcatgtatatgtttataggaaaagaatatactcaacttagtagaacatatcttagttaagatacatggagatatgagataagtaataggttctacattcttcctgcaaaagtcatagagctaagaatgctctgcataaggataactcctattgttagagccatggaatcctcacctcatgctactaacattctaatgtgcaaaaatcacaaataagtaaaccctcaggggcagagcaacagtaatcttgtgaatttcaccttggaagacagaagagctagggaggcatgaaaggaagggacaaaaagtgagatggtatcaggggggaatatggtagcaaagaaaagcagtctaagaaaatggtgaccagaataaaataaacctaagtgctcatgaatccacatagccttgtctacccaacttggtcgacaaggttaaacaggacagcctga

SEQ ID NO: 87831 - DNA, 418 bp, Homo sapiens
  misc_feature (402)..(402): n is a, c, g, or t
  misc_feature (409)..(409): n is a, c, g, or t
  misc_feature (411)..(411): n is a, c, g, or t
  misc_feature (414)..(414): n is a, c, g, or t
aataaactataactagatgagctctattttttagggcaatggaagaacatgggctttggatccacacacagagagccaggttcaatccttgctccatcactcactagctgtgcaactctgggaaattacgtattgagccttagtctccttatctgggaaaatgggaataatgatattttccttactcagttgtgaagaccagataggtaacgtgtaaagtgcatttgctgggtgttcaatgagggtagttcttttccttctctctttcctgtctcccgtcacagagtggagcatggtgtttgcacagaggctgacagctttccttctgttcacccctttttcttttttctctcttttttttttgagacagagtgagaccctgtctaaaaacaaacacatcanaaaaaanantancaga

SEQ ID NO: 87832 - DNA, 201 bp, Homo sapiens
ctccgtcaaaaaaaaaaaaaaaaagaagaaaagaaaagaaaagaaaacaggatatttattttagcttcttagttaacatcattaattttgtgtagttgagcgactcgttgactgcctcctccctgcagttttttacggtgcctccggctgtcgacaggcccactgtgagccgcaggtctgtgggtgcaagtgacaacagcc

SEQ ID NO: 87833 - DNA, 469 bp, Homo sapiens
tttttttctattagtttctgacttaactcatcttgtgttttatggtttttcccattagttaggaatgtaacccaactcaagccaacagcctcagggtactagccaagtgacccatgtgcttaatgtgaaaaagataggaccccaagagattgtatccatgtggacatgtaaaaaagatgtcttttgacataaagcatcacagaggtgaagatgacattaagcaactctggttcaaaaaagcactgccttcagcaatggaccaatgtacaagacacacaaaacaagatagactaataccttctgaaaaccttttcttatgaccttaatctgcatcatacaccatactatacattgcagggcattcagagatcaaaactgtggtcccagttctcagactgtttacagactaactctgacacaaatatgatctggaagagtacagttatgtttgaaaagccaaaaataaatt

SEQ ID NO: 87834 - DNA, 422 bp, Homo sapiens
gattgtgattgatgtgatggttgatagcacctctactgagagagtagttccactaatgtaacttaggcttgaaagatttattttgaaggaagagggtatatgcactcatgggttgcaaataacagcagagtttgggtttttgctagtaggtctacagtatgctctgtgcgtctctgcttctgtctgaagattaccatcctttcttttttgttggttgttctgtttgaaatggcaattgggaaaggagtttagtaagagataggaagtagaaaggagttttaaatctctattctgcctggaactttagctgtctcaatatgggagtaaacaattcaaattaacctttttaggaaaatctcacaacagattatattctatcaggtgaaagaaagtgaaatagaactagggtacatttttaaagc

SEQ ID NO: 87835 - DNA, 4017 bp, Homo sapiens
  misc_feature (1044)..(1044): n is a, c, g, or t
tgcaaacgttcccaaatcttcccagtcggcttgcagagactccttgctcccaggagataaccaggtaaaggagtatgaaagtttgggtacaaactcattgctgcaaattgaaaaccatgcaaaggctgtcttcctctggggagttcaatgcctctctttttcttatcactttaccattggttggactttgattccagggatcctacgattactcaataccctacaggatatacatggttaaccatttgcatttgggcaaataggcgttacttttcaataggaagtggcaatccagaacttgcttttgggcaattctagtagctcaccgcttttttcttaatgactgctagaagctgcatcttattgacagatggtcatcacattggtgagctggagtcatcagattgtggggcccggagtgaggctgaagggagtggatcagagcactgcctgagagtcacctctactttcctgctaccgctgcctgtgagctgaaggggctgaaccatacactcctttttctacaaccagcttgcattttttctgcccacaatgagcggggaatcaatgaatttcagcgatgttttcgactccagtgaagattattttgtgtcagtcaatacttcatattactcagttgattctgagatgttactgtgctccttgcaggaggtcaggcagttctccaggctatttgtaccgattgcctactccttgatctgtgtctttggcctcctggggaatattctggtggtgatcacctttgctttttataagaaggccaggtctatgacagacgtctatctcttgaacatggccattgcagacatcctctttgttcttactctcccattctgggcagtgagtcatgccactggtgcgtgggttttcagcaatgccacgtgcaagttgctaaaaggcatctatgccatcaactttaactgcgggatgctgctcctgacttgcattagcatggaccggtacatcgccattgtacaggcgactaagtcattccggctccgatccagaacactaccgcgcagnaaaatcatctgccttgttgtgtgggggctgtcagtcatcatctccagctcaacttttgtcttcaaccaaaaatacaacacccaaggcagcgatgtctgtgaacccaagtaccagactgtctcggagcccatcaggtggaagctgctgatgttggggcttgagctactctttggtttctttatccctttgatgttcatgatattttgttacacgttcattgtcaaaaccttggtgcaagctcagaattctaaaaggcacaaagccatccgtgtaatcatagctgtggtgcttgtgtttctggcttgtcagattcctcataacatggtcctgcttgtgacggctgcaaatttgggtaaaatgaaccgatcctgccagagcgaaaagctaattggctatacgaaaactgtcacagaagtcctggctttcctgcactgctgcctgaaccctgtgctctacgcttttattgggcagaagttcagaaactactttctgaagatcttgaaggacctgtggtgtgtgagaaggaagtacaagtcctcaggcttctcctgtgccgggaggtactcagaaaacatttctcggcagaccagtgagaccgcagataacgacaatgcgtcgtccttcactatgtgatagaaagctgagtctccctaaggcatgtgtgaaacatactcatagatgttatgcaaaaaaaagtctatggccaggtatgcatggaaaatgtgggaattaagcaaaatcaagcaagcctctctcctgcgggacttaacgtgctcatgggctgtgtgatctcttcagggtggggtggtctctgataggtagcattttccagcactttgcaaggaatgttttgtagctctagggtatatatccgcctggcatttcacaaaacagcctttgggaaatgctgaattaaagtgaattgttgacaaatgtaaacattttcagaaatattcatgaagcggtcacagatcacagtgtcttttggttacagcacaaaatgatggcagtggtttgaaaaactaaaacagaaaaaaaaatggaagccaacacatcactcattttaggcaaatgtttaaacatttttatctatcagaatgtttattgttgctggttataagcagcaggattggccggctagtgtttcctctcatttccctttgatacagtcaacaagcctgaccctgtaaaatggaggtggaaagacaagctcaagtgttcacaacctggaagtgcttcgggaagaaggggacaatggcagaacaggtgttggtgacaattgtcaccaattggataaagcagctcaggttgtagtgggccattaggaaactgtcggtttgctttgatttccctgggagctgttctctgtcgtgagtgtctcttgtctaaacgtccattaagctgagagtgctatgaagacaggatctagaataatcttgctcacagctgtgctctgagtgcctagcggagttccagcaaacaaaatggactcaagagagatttgattaatgaatcgtaatgaagttggggtttattgtacagtttaaaatgttagatgtttttaattttttaaataaatggaatacttttttttttttttaaagaaagcaactttactgagacaatgtagaaagaagttttgttccgtttctttaatgtggttgaagagcaatgtgtggctgaagacttttgttatgaggagctgcagattagctaggggacagctggaattatgctggcttctgataattattttaaaggggtctgaaatttgtgatggaatcagattttaacagctctcttcaatgacatagaaagttcatggaactcatgtttttaaagggctatgtaaatatatgaacattagaaaaatagcaacttgtgttacaaaaatacaaacacatgttaggaaggtactgtcatgggctaggcatggtggctcacacctgtaatcccagcattttgggaagctaagatgggtggatcacttgaggtcaggagtttgagaccagcctggccaacatggcgaaacccctctctactaaaaatacaaaaatttgccaggcgtggtggcgggtgcctgtaatcccagctacttgggaggctgaggcaagagaatcgcttgaacccaggaggcagaggttgcagtgagccgagatcgtgccattgcactccagcctgggtgacagagcgagactccatctcaaaaaaaaaaaaaaaaaaaaaggaaagaactgtcatgtaaacataccgacatgtttaaacctgacaatggtgttatttgaaactttatattgttcttgtaagctttaactatatctctctttaaaatgcaaaataatgtcttaagattcaaagtctgtatttttaaagcatggctttggctttgcaaaataaaaaatgtgttttgtacatgaagtaggaatcgtatttcagcttcaaggttcagattgaggggcccactgtttggagaggatggtattcaggctttctcatgtccttcaaatctgttagcgtttgactctagaaatcaaagcaaaggagtggttacccagacacttcttttggtgtgatcaatgcgctgatgtgatctatgaagatgattcatgcttgaaaactagcacagaaacatcttgcttatttgccaaagctgggagatgagcttctctgcataatttaaatgttcagataaatgaagctgacttatttaagcaataaccttttaaacattttagctaagatgtataaaaatgtttccaaaatataccacatactttatttcttcttaaatgtagtacattaggttacatcatttttcttgctgtcttgggcatcaaaacaggtgccatggtaacctgacactctcaggagacattaagatagaaggggctgttcttcagtggttcccattgattctccccatatctttttgctctcaggctctggccgtctcttcctgagccttaactgtgt

SEQ ID NO: 87836 - DNA, 3731 bp, Homo sapiens
  misc_feature (758)..(758): n is a, c, g, or t
tgcaaacgttcccaaatcttcccagtcggcttgcagagactccttgctcccaggagataaccagaagctgcatcttattgacagatggtcatcacattggtgagctggagtcatcagattgtggggcccggagtgaggctgaagggagtggatcagagcactgcctgagagtcacctctactttcctgctaccgctgcctgtgagctgaaggggctgaaccatacactcctttttctacaaccagcttgcattttttctgcccacaatgagcggggaatcaatgaatttcagcgatgttttcgactccagtgaagattattttgtgtcagtcaatacttcatattactcagttgattctgagatgttactgtgctccttgcaggaggtcaggcagttctccaggctatttgtaccgattgcctactccttgatctgtgtctttggcctcctggggaatattctggtggtgatcacctttgctttttataagaaggccaggtctatgacagacgtctatctcttgaacatggccattgcagacatcctctttgttcttactctcccattctgggcagtgagtcatgccactggtgcgtgggttttcagcaatgccacgtgcaagttgctaaaaggcatctatgccatcaactttaactgcgggatgctgctcctgacttgcattagcatggaccggtacatcgccattgtacaggcgactaagtcattccggctccgatccagaacactaccgcgcagnaaaatcatctgccttgttgtgtgggggctgtcagtcatcatctccagctcaacttttgtcttcaaccaaaaatacaacacccaaggcagcgatgtctgtgaacccaagtaccagactgtctcggagcccatcaggtggaagctgctgatgttggggcttgagctactctttggtttctttatccctttgatgttcatgatattttgttacacgttcattgtcaaaaccttggtgcaagctcagaattctaaaaggcacaaagccatccgtgtaatcatagctgtggtgcttgtgtttctggcttgtcagattcctcataacatggtcctgcttgtgacggctgcaaatttgggtaaaatgaaccgatcctgccagagcgaaaagctaattggctatacgaaaactgtcacagaagtcctggctttcctgcactgctgcctgaaccctgtgctctacgcttttattgggcagaagttcagaaactactttctgaagatcttgaaggacctgtggtgtgtgagaaggaagtacaagtcctcaggcttctcctgtgccgggaggtactcagaaaacatttctcggcagaccagtgagaccgcagataacgacaatgcgtcgtccttcactatgtgatagaaagctgagtctccctaaggcatgtgtgaaacatactcatagatgttatgcaaaaaaaagtctatggccaggtatgcatggaaaatgtgggaattaagcaaaatcaagcaagcctctctcctgcgggacttaacgtgctcatgggctgtgtgatctcttcagggtggggtggtctctgataggtagcattttccagcactttgcaaggaatgttttgtagctctagggtatatatccgcctggcatttcacaaaacagcctttgggaaatgctgaattaaagtgaattgttgacaaatgtaaacattttcagaaatattcatgaagcggtcacagatcacagtgtcttttggttacagcacaaaatgatggcagtggtttgaaaaactaaaacagaaaaaaaaatggaagccaacacatcactcattttaggcaaatgtttaaacatttttatctatcagaatgtttattgttgctggttataagcagcaggattggccggctagtgtttcctctcatttccctttgatacagtcaacaagcctgaccctgtaaaatggaggtggaaagacaagctcaagtgttcacaacctggaagtgcttcgggaagaaggggacaatggcagaacaggtgttggtgacaattgtcaccaattggataaagcagctcaggttgtagtgggccattaggaaactgtcggtttgctttgatttccctgggagctgttctctgtcgtgagtgtctcttgtctaaacgtccattaagctgagagtgctatgaagacaggatctagaataatcttgctcacagctgtgctctgagtgcctagcggagttccagcaaacaaaatggactcaagagagatttgattaatgaatcgtaatgaagttggggtttattgtacagtttaaaatgttagatgtttttaattttttaaataaatggaatacttttttttttttttaaagaaagcaactttactgagacaatgtagaaagaagttttgttccgtttctttaatgtggttgaagagcaatgtgtggctgaagacttttgttatgaggagctgcagattagctaggggacagctggaattatgctggcttctgataattattttaaaggggtctgaaatttgtgatggaatcagattttaacagctctcttcaatgacatagaaagttcatggaactcatgtttttaaagggctatgtaaatatatgaacattagaaaaatagcaacttgtgttacaaaaatacaaacacatgttaggaaggtactgtcatgggctaggcatggtggctcacacctgtaatcccagcattttgggaagctaagatgggtggatcacttgaggtcaggagtttgagaccagcctggccaacatggcgaaacccctctctactaaaaatacaaaaatttgccaggcgtggtggcgggtgcctgtaatcccagctacttgggaggctgaggcaagagaatcgcttgaacccaggaggcagaggttgcagtgagccgagatcgtgccattgcactccagcctgggtgacagagcgagactccatctcaaaaaaaaaaaaaaaaaaaaaggaaagaactgtcatgtaaacataccgacatgtttaaacctgacaatggtgttatttgaaactttatattgttcttgtaagctttaactatatctctctttaaaatgcaaaataatgtcttaagattcaaagtctgtatttttaaagcatggctttggctttgcaaaataaaaaatgtgttttgtacatgaagtaggaatcgtatttcagcttcaaggttcagattgaggggcccactgtttggagaggatggtattcaggctttctcatgtccttcaaatctgttagcgtttgactctagaaatcaaagcaaaggagtggttacccagacacttcttttggtgtgatcaatgcgctgatgtgatctatgaagatgattcatgcttgaaaactagcacagaaacatcttgcttatttgccaaagctgggagatgagcttctctgcataatttaaatgttcagataaatgaagctgacttatttaagcaataaccttttaaacattttagctaagatgtataaaaatgtttccaaaatataccacatactttatttcttcttaaatgtagtacattaggttacatcatttttcttgctgtcttgggcatcaaaacaggtgccatggtaacctgacactctcaggagacattaagatagaaggggctgttcttcagtggttcccattgattctccccatatctttttgctctcaggctctggccgtctcttcctgagccttaactgtgt

SEQ ID NO: 87837 - DNA, 1596 bp, Homo sapiens
  misc_feature (6)..(6): n is a, c, g, or t
  misc_feature (1486)..(1486): n is a, c, g, or t
gtgggngtggggtggacgtgggcatgggtgtggcagtgggctgtggacgtgggcatggatgtgggggtctcacacccttcgctctcttcctgcccagtgctgacggggacttcgcggtcacccacctgaccaaggcccacctgttccatgacgggcgggtgcagtggactcccccggccatttacaagagctcctgcagcatcgacgtcaccttcttccccttcgaccagcagaactgcaccatgaaattcggctcctggacctacgacaaggccaagatcgacctggtgaacatgcacagccgcgtggaccagctggacttctgggagagtggcgagtgggtcatcgtggacgccgtgggcacctacaacaccaggaagtacgagtgctgcgccgagatctacccggacatcacctatgccttcgtcatccggcggctgccgctcttctacaccatcaacctcatcatcccctgcctgctcatctcctgcctcaccgtgctggtcttctacctgccctccgagtgtggcgagaagatcacgctgtgcatctccgtgctgctgtcgctcaccgtcttcctgctgctcatcaccgagatcatcccgtccacctcactggtcatcccactcatcggcgagtacctgctgttcaccatgatcttcgtcaccctgtccatcgtcatcacggtcttcgtgctcaacgtgcaccaccgctcgccacgcacgcacaccatgcccacctgggtacgcagggtcttcctggacatcgtgccacgcctgctcctcatgaagcggccgtccgtggtcaaggacaattgccggcggctcatcgagtccatgcataagatggccagtgccccgcgcttctggcccgagccagaaggggagccccctgccacgagcggcacccagagcctgcacccgccctcaccgtccttctgcgtccccctggatgtgccggctgagcctgggccttcctgcaagtcaccctccgaccagctccctcctcagcagcccctggaagctgagaaagccagcccccacccctcgcctggaccctgccgcccgccccacggcacccaggcaccagggctggccaaagccaggtccctcagcgtccagcacatgtccagccctggcgaagcggtggaaggcggcgtccggtgccggtctcggagcatccagtactgtgttccccgagacgatgccgcccccgaggcagatggccaggctgccggcgccctggcctctcgcaacacccactcggctgagctcccacccccagaccagccctctccgtgcaaatgcacatgcaagaaggagccctcttcggtgtccccgagcgccacggtcaagacccgcagcaccaaagcgccgcccccgcacctgcccctgtcgccggccctgacccgggcggtggagggcgtccagtacattgcagaccacctgaaggccgaagacacagacttctcggtaagtcccgcccntggctgtgttgggcgcctctgacccagacggaaccggcggacgccctttcttcctggtgtgtaatccaggagccgggcccaggcctcaggctgcttcgctttggggtgca

SEQ ID NO: 87838 - DNA, 411 bp, Homo sapiens
tcccagccggctgaggcgggcagggccgggcggggccgcgccacggagtccacagcccggcgctccctgccgcgccgccgccgcaccgcgccccacaggagaagacgaaccgggcccggcggccgaagcggcccgcgaggcgcgggaggcatgaagttgggcgcgcacgggcctcgaagcggcggggagccgggagccgcccgcatctagagcccgcgaggtgcgtgcgccatggagctagggggccccggagcgccgcggctgctgccgccgctgctgctgcttctggggaccggcctcctgcgcggtaagttacggggcgcggatgggccccctttcgcccgcgttcgatggcctgggacccccagagccagagggaggcaggctcctgactgcgtcccaagccgcggg

SEQ ID NO: 87839 - DNA, 3880 bp, Homo sapiens
  misc_feature (2369)..(2369): n is a, c, g, or t
  misc_feature (2646)..(2646): n is a, c, g, or t
  misc_feature (2657)..(2658): n is a, c, g, or t
tcccagccggctgaggcgggcagggccgggcggggccgcgccacggagtccacagcccggcgctccctgccgcgccgccgccgcaccgcgccccacaggagaagacgaaccgggcccggcggccgaagcggcccgcgaggcgcgggaggcatgaagttgggcgcgcacgggcctcgaagcggcggggagccgggagccgcccgcatctagagcccgcgaggtgcgtgcgccatggagctagggggccccggagcgccgcggctgctgccgccgctgctgctgcttctggggaccggcctcctgcgcgccagcagccatgtggagacccgggcccacgccgaggagcggctcctgaagaaactcttctccggttacaacaagtggtcccgacccgtggccaacatctcggacgtggtcctcgtccgcttcggcctgtccatcgctcagctcattgacgtggatgagaagaaccagatgatgaccacgaacgtatgggtgaagcaggagtggcacgactacaagctgcgctgggacccagctgactatgagaatgtcacctccatccgcatcccctccgagctcatctggcggccggacatcgtcctctacaacaatgctgacggggacttcgcggtcacccacctgaccaaggcccacctgttccatgacgggcgggtgcagtggactcccccggccatttacaagagctcctgcagcatcgacgtcaccttcttccccttcgaccagcagaactgcaccatgaaattcggctcctggacctacgacaaggccaagatcgacctggtgaacatgcacagccgcgtggaccagctggacttctgggagagtggcgagtgggtcatcgtggacgccgtgggcacctacaacaccaggaagtacgagtgctgcgccgagatctacccggacatcacctatgccttcgtcatccggcggctgccgctcttctacaccatcaacctcatcatcccctgcctgctcatctcctgcctcaccgtgctggtcttctacctgccctccgagtgtggcgagaagatcacgctgtgcatctccgtgctgctgtcgctcaccgtcttcctgctgctcatcaccgagatcatcccgtccacctcactggtcatcccactcatcggcgagtacctgctgttcaccatgatcttcgtcaccctgtccatcgtcatcacggtcttcgtgctcaacgtgcaccaccgctcgccacgcacgcacaccatgcccacctgggtacgcagggtcttcctggacatcgtgccacgcctgctcctcatgaagcggccgtccgtggtcaaggacaattgccggcggctcatcgagtccatgcataagatggccagtgccccgcgcttctggcccgagccagaaggggagccccctgccacgagcggcacccagagcctgcacccgccctcaccgtccttctgcgtccccctggatgtgccggctgagcctgggccttcctgcaagtcaccctccgaccagctccctcctcagcagcccctggaagctgagaaagccagcccccacccctcgcctggaccctgccgcccgccccacggcacccaggcaccagggctggccaaagccaggtccctcagcgtccagcacatgtccagccctggcgaagcggtggaaggcggcgtccggtgccggtctcggagcatccagtactgtgttccccgagacgatgccgcccccgaggcagatggccaggctgccggcgccctggcctctcgcaacacccactcggctgagctcccacccccagaccagccctctccgtgcaaatgcacatgcaagaaggagccctcttcggtgtccccgagcgccacggtcaagacccgcagcaccaaagcgccgcccccgcacctgcccctgtcgccggccctgacccgggcggtggagggcgtccagtacattgcagaccacctgaaggccgaagacacagacttctcggtgaaggaggactggaagtacgtggccatggtcatcgaccgcatcttcctctggatgttcatcatcgtctgcctgctggggacggtgggcctcttcctgccgccctggctggctggcatgatctaggaagggaccgggagcctgcgtggcctggggctgccgtgcacggggccagcatccatgcggccggcctggggccgggctggcttctccctggactctgtggggccacacgtttgccaaattttccttcctgttctgtgtctgctgtaagacggccttggacggggacacggcctctggggagaccgagtgtggagctgcttccagttggactgtggcctcaggaggcagtggcttggagcagaggtgggggtcgncgccttctacctgcaggactcgggctaagtccagttcaagagtctcctgagctcccctgcagatggaactcactcctcccagtctctcagcagatctggtgatggtcccgaccgcaaggggcccttgaagggagttcacgccccttcagccccaagcgccccgtcttctggaggcccggccgcctctcccacccaccgtgtcctgcgcctgtgtgggcttcaacttctcccccagggtccttgagcctctcgggccccatgagggtgagccagcagngctccaatctnnttcgctaggagagggtccaggcagggattgtgtttggttgtgttttgggtaagttagtgagaactcaagtcttgtgcctaaggagccttggagaacagagttttgtggagctggttccgcgtggggagaatcgggaggcccacgcgggaccaggctctccccctgcgcaggccctccgcggcggacaggaacacccagccccagcgagtctggagaccaggactctgccttccaggcgtagggccagggctctggcaggtggccagggctccacgggggcctagtggcttcagcccctggggtacttctgtgttgtgattccccggagctgggaaggtcccgaatggagtccagacctgggccctggttcccccaggaccctgagggtttccaccttggcgcgcagcccgggagatccgccctgggctctgggttcgggaagaaggacttcctgctacagtagctgtggggagctggtgggggcatccttgaggacctccacctgggagatgctgggaccctcggggcaggaagtccctgagaagcctcatgggagtcagggagccctggggtttccacacaggcccatgccctccgtcctggcagggcaggcagagctcagcacagcctcacccctgcaggcggtatccagaggtgagggaggcctgaaatgtttccaggcatgaccctggagcccggcagtgcaccccctaaagatggcgcacccggcagccccccagtgtccccaggggcacacttcccccttgggatgggcacaggctgccccacccctccatgattccaagggcccagaggggcggggccaggatggcgtgtcccctgcctgtgagtgacatcggttcaggaggagacagtcaggaagcctcctgctgagtggtccacattctgctgcccccagaccccatccagccaggggtggggatggggttgggctctgcgtcccactgagtctcattcctctgtccccgagccgagctctcctgggccagggtctcgtcaggaggtgcctgagagcagaatgaataattgaggttaggaacccggcatgccgagtgccccagaaatgccgctgtgtccccgcgggcagtgacgtgagtggggaggagactcaggcccacattgcccacacctgcctctgaactgctgctggtcacccccacccccgggtgcctgtgaccggggtcctgaggctggggctttt

SEQ ID NO: 87840 - DNA, 1965 bp, Homo sapiens
  misc_feature (454)..(454): n is a, c, g, or t
  misc_feature (731)..(731): n is a, c, g, or t
  misc_feature (742)..(743): n is a, c, g, or t
ggcgccggggtcctgagggctgtcccgctggcggcggccgggccgtgctggagtgacggcgtctgtgcttgcaggtgaaggaggactggaagtacgtggccatggtcatcgaccgcatcttcctctggatgttcatcatcgtctgcctgctggggacggtgggcctcttcctgccgccctggctggctggcatgatctaggaagggaccgggagcctgcgtggcctggggctgccgtgcacggggccagcatccatgcggccggcctggggccgggctggcttctccctggactctgtggggccacacgtttgccaaattttccttcctgttctgtgtctgctgtaagacggccttggacggggacacggcctctggggagaccgagtgtggagctgcttccagttggactgtggcctcaggaggcagtggcttggagcagaggtgggggtcgncgccttctacctgcaggactcgggctaagtccagttcaagagtctcctgagctcccctgcagatggaactcactcctcccagtctctcagcagatctggtgatggtcccgaccgcaaggggcccttgaagggagttcacgccccttcagccccaagcgccccgtcttctggaggcccggccgcctctcccacccaccgtgtcctgcgcctgtgtgggcttcaacttctcccccagggtccttgagcctctcgggccccatgagggtgagccagcagngctccaatctnnttcgctaggagagggtccaggcagggattgtgtttggttgtgttttgggtaagttagtgagaactcaagtcttgtgcctaaggagccttggagaacagagttttgtggagctggttccgcgtggggagaatcgggaggcccacgcgggaccaggctctccccctgcgcaggccctccgcggcggacaggaacacccagccccagcgagtctggagaccaggactctgccttccaggcgtagggccagggctctggcaggtggccagggctccacgggggcctagtggcttcagcccctggggtacttctgtgttgtgattccccggagctgggaaggtcccgaatggagtccagacctgggccctggttcccccaggaccctgagggtttccaccttggcgcgcagcccgggagatccgccctgggctctgggttcgggaagaaggacttcctgctacagtagctgtggggagctggtgggggcatccttgaggacctccacctgggagatgctgggaccctcggggcaggaagtccctgagaagcctcatgggagtcagggagccctggggtttccacacaggcccatgccctccgtcctggcagggcaggcagagctcagcacagcctcacccctgcaggcggtatccagaggtgagggaggcctgaaatgtttccaggcatgaccctggagcccggcagtgcaccccctaaagatggcgcacccggcagccccccagtgtccccaggggcacacttcccccttgggatgggcacaggctgccccacccctccatgattccaagggcccagaggggcggggccaggatggcgtgtcccctgcctgtgagtgacatcggttcaggaggagacagtcaggaagcctcctgctgagtggtccacattctgctgcccccagaccccatccagccaggggtggggatggggttgggctctgcgtcccactgagtctcattcctctgtccccgagccgagctctcctgggccagggtctcgtcaggaggtgcctgagagcagaatgaataattgaggttaggaacccggcatgccgagtgccccagaaatgccgctgtgtccccgcgggcagtgacgtgagtggggaggagactcaggcccacattgcccacacctgcctctgaactgctgctggtcacccccacccccgggtgcctgtgaccggggtcctgaggctggggctttt

SEQ ID NO: 87841 - DNA, 3471 bp, Homo sapiens
  misc_feature (2369)..(2369): n is a, c, g, or t
tcccagccggctgaggcgggcagggccgggcggggccgcgccacggagtccacagcccggcgctccctgccgcgccgccgccgcaccgcgccccacaggagaagacgaaccgggcccggcggccgaagcggcccgcgaggcgcgggaggcatgaagttgggcgcgcacgggcctcgaagcggcggggagccgggagccgcccgcatctagagcccgcgaggtgcgtgcgccatggagctagggggccccggagcgccgcggctgctgccgccgctgctgctgcttctggggaccggcctcctgcgcgccagcagccatgtggagacccgggcccacgccgaggagcggctcctgaagaaactcttctccggttacaacaagtggtcccgacccgtggccaacatctcggacgtggtcctcgtccgcttcggcctgtccatcgctcagctcattgacgtggatgagaagaaccagatgatgaccacgaacgtatgggtgaagcaggagtggcacgactacaagctgcgctgggacccagctgactatgagaatgtcacctccatccgcatcccctccgagctcatctggcggccggacatcgtcctctacaacaatgctgacggggacttcgcggtcacccacctgaccaaggcccacctgttccatgacgggcgggtgcagtggactcccccggccatttacaagagctcctgcagcatcgacgtcaccttcttccccttcgaccagcagaactgcaccatgaaattcggctcctggacctacgacaaggccaagatcgacctggtgaacatgcacagccgcgtggaccagctggacttctgggagagtggcgagtgggtcatcgtggacgccgtgggcacctacaacaccaggaagtacgagtgctgcgccgagatctacccggacatcacctatgccttcgtcatccggcggctgccgctcttctacaccatcaacctcatcatcccctgcctgctcatctcctgcctcaccgtgctggtcttctacctgccctccgagtgtggcgagaagatcacgctgtgcatctccgtgctgctgtcgctcaccgtcttcctgctgctcatcaccgagatcatcccgtccacctcactggtcatcccactcatcggcgagtacctgctgttcaccatgatcttcgtcaccctgtccatcgtcatcacggtcttcgtgctcaacgtgcaccaccgctcgccacgcacgcacaccatgcccacctgggtacgcagggtcttcctggacatcgtgccacgcctgctcctcatgaagcggccgtccgtggtcaaggacaattgccggcggctcatcgagtccatgcataagatggccagtgccccgcgcttctggcccgagccagaaggggagccccctgccacgagcggcacccagagcctgcacccgccctcaccgtccttctgcgtccccctggatgtgccggctgagcctgggccttcctgcaagtcaccctccgaccagctccctcctcagcagcccctggaagctgagaaagccagcccccacccctcgcctggaccctgccgcccgccccacggcacccaggcaccagggctggccaaagccaggtccctcagcgtccagcacatgtccagccctggcgaagcggtggaaggcggcgtccggtgccggtctcggagcatccagtactgtgttccccgagacgatgccgcccccgaggcagatggccaggctgccggcgccctggcctctcgcaacacccactcggctgagctcccacccccagaccagccctctccgtgcaaatgcacatgcaagaaggagccctcttcggtgtccccgagcgccacggtcaagacccgcagcaccaaagcgccgcccccgcacctgcccctgtcgccggccctgacccgggcggtggagggcgtccagtacattgcagaccacctgaaggccgaagacacagacttctcggtgaaggaggactggaagtacgtggccatggtcatcgaccgcatcttcctctggatgttcatcatcgtctgcctgctggggacggtgggcctcttcctgccgccctggctggctggcatgatctaggaagggaccgggagcctgcgtggcctggggctgccgtgcacggggccagcatccatgcggccggcctggggccgggctggcttctccctggactctgtggggccacacgtttgccaaattttccttcctgttctgtgtctgctgtaagacggccttggacggggacacggcctctggggagaccgagtgtggagctgcttccagttggactgtggcctcaggaggcagtggcttggagcagaggtgggggtcgncgccttctacctgcaggactcgggctaagtccagctctccccctgcgcaggccctccgcggcggacaggaacacccagccccagcgagtctggagaccaggactctgccttccaggcgtagggccagggctctggcaggtggccagggctccacgggggcctagtggcttcagcccctggggtacttctgtgttgtgattccccggagctgggaaggtcccgaatggagtccagacctgggccctggttcccccaggaccctgagggtttccaccttggcgcgcagcccgggagatccgccctgggctctgggttcgggaagaaggacttcctgctacagtagctgtggggagctggtgggggcatccttgaggacctccacctgggagatgctgggaccctcggggcaggaagtccctgagaagcctcatgggagtcagggagccctggggtttccacacaggcccatgccctccgtcctggcagggcaggcagagctcagcacagcctcacccctgcaggcggtatccagaggtgagggaggcctgaaatgtttccaggcatgaccctggagcccggcagtgcaccccctaaagatggcgcacccggcagccccccagtgtccccaggggcacacttcccccttgggatgggcacaggctgccccacccctccatgattccaagggcccagaggggcggggccaggatggcgtgtcccctgcctgtgagtgacatcggttcaggaggagacagtcaggaagcctcctgctgagtggtccacattctgctgcccccagaccccatccagccaggggtggggatggggttgggctctgcgtcccactgagtctcattcctctgtccccgagccgagctctcctgggccagggtctcgtcaggaggtgcctgagagcagaatgaataattgaggttaggaacccggcatgccgagtgccccagaaatgccgctgtgtccccgcgggcagtgacgtgagtggggaggagactcaggcccacattgcccacacctgcctctgaactgctgctggtcacccccacccccgggtgcctgtgaccggggtcctgaggctggggctttt

SEQ ID NO: 87842 - DNA, 434 bp, Homo sapiens
  misc_feature (11)..(14): n is a, c, g, or t
  misc_feature (16)..(16): n is a, c, g, or t
  misc_feature (51)..(51): n is a, c, g, or t
  misc_feature (316)..(316): n is a, c, g, or t
ggggtgggaannnntnatgtgaggagctgaaggaagtggacgtgctgggcngggggctggggcagcctggagagctcctggacagctcccggctcctgtcccgcctgcacctgagccactggcctgcctctccccgcagccagcagccatgtggagacccgggcccacgccgaggagcggctcctgaagaaactcttctccggttacaacaagtggtcccgacccgtggccaacatctcggacgtggtcctcgtccgcttcggcctgtccatcgctcagctcattgacgtggtaggtgagggcgtggcatcgtgcnctgtgactgaggtcgccctgcaaggagcacaggggtctgggtgggcagaggggacacagccatcaacactcccctctgtgagtgtccggcgggctggtacgtcagaacgacagccacc

SEQ ID NO: 87843 - DNA, 1526 bp, Homo sapiens
ggagatgtttgtggccttgtccccacatccctaggtcccctcagagtccccatcctgggctcggctgcctccagggacggggcactcaccccctccacaggtcgcccgtccaccatatcttgccctggccgtgtccttgtgccagtggctgtagatgaggaaacctagggccagagaaagacaccaaggggtcactggcccccttcctctctcggtgccctaggatgagaagaaccagatgatgaccacgaacgtatgggtgaagcaggtgagtgggagggcactgcctgccccacccctgccctcccccacacccctcaccctgctgccctgtcctggccctgccccaccctggccctgctgagaactcaagtcttgtgcctaaggagccttggagaacagagttttgtggagctggttccgcgtggggagaatcgggaggcccacgcgggaccaggctctccccctgcgcaggccctccgcggcggacaggaacacccagccccagcgagtctggagaccaggactctgccttccaggcgtagggccagggctctggcaggtggccagggctccacgggggcctagtggcttcagcccctggggtacttctgtgttgtgattccccggagctgggaaggtcccgaatggagtccagacctgggccctggttcccccaggaccctgagggtttccaccttggcgcgcagcccgggagatccgccctgggctctgggttcgggaagaaggacttcctgctacagtagctgtggggagctggtgggggcatccttgaggacctccacctgggagatgctgggaccctcggggcaggaagtccctgagaagcctcatgggagtcagggagccctggggtttccacacaggcccatgccctccgtcctggcagggcaggcagagctcagcacagcctcacccctgcaggcggtatccagaggtgagggaggcctgaaatgtttccaggcatgaccctggagcccggcagtgcaccccctaaagatggcgcacccggcagccccccagtgtccccaggggcacacttcccccttgggatgggcacaggctgccccacccctccatgattccaagggcccagaggggcggggccaggatggcgtgtcccctgcctgtgagtgacatcggttcaggaggagacagtcaggaagcctcctgctgagtggtccacattctgctgcccccagaccccatccagccaggggtggggatggggttgggctctgcgtcccactgagtctcattcctctgtccccgagccgagctctcctgggccagggtctcgtcaggaggtgcctgagagcagaatgaataattgaggttaggaacccggcatgccgagtgccccagaaatgccgctgtgtccccgcgggcagtgacgtgagtggggaggagactcaggcccacattgcccacacctgcctctgaactgctgctggtcacccccacccccgggtgcctgtgaccggggtcctgaggctggggctttt

SEQ ID NO: 87844 - DNA, 355 bp, Homo sapiens
agacatagctgattcctagctagaaaccaaaggagcttagctttcggctagcttgtaggtgagactctgatcggccgagggtaggttggcagctatttaaaattgcaaatctcttccccacctcccaacctaaccctcctcctctttaggaaagaatttcaattgcaaatatatctctgcctcagtacatcctcccccaaccccaactccccatccccctttcttctcggagcttctcccatcacccactatttattacaaacctttagctgcagcgattatttttttgctttttttcccctcattgcattttcactcctccatctttccttccttccctctcagaatcgctagg

SEQ ID NO: 87845 - DNA, 720 bp, Homo sapiens
gtctgagactgcgagagggtcgtaaccatgaggggttcctgtgagaggtctggggaggatgaagagcagaaagaagaggctatggtggcctgtgggcgtctttcaggggtccccgaggccgagcagggtcccgaggccaattgggactccgacctggagacggaaggcaccgatgggcttggagaactggtcagggacacactgtacctgaggtcttgccgggcccatagtgttgtgcccatctcctgctttctgcgccaagggagcgcccaagagctgaacctccggcaccgtggcctggggccccagggcgcccgggctctggcttcctcattgagctccaatccatatgtcaagcggctggaccttcgagacaatgggctctgtggggcaggtgcagaggccctggcaggtgccctgagcaaaagcagcagcatccatggtaggtgctgggtctggggcaggtgggcaggcgtgtcctccttttcctcagggatgtgcctccatcgttgaaagctgggccgtgtcacctggggcctgctggtgttgctggtggatagaagaggggcctcatcacaggagggggcatgtggggtggagttagaccctctgctgtgcagccgatgcctgatagaagtcctttcctcacccaccccacaccatcactcccctcccttgctggccagcatccccctcttcacctagcacatgggagactcc

SEQ ID NO: 87846 - DNA, 274 bp, Homo sapiens
atgcacgccaaaaatttacaaacattctaaaaatgtagaaaggaaatatgtaagtataaaaaatgacagaaatagaattcaaaaaataagcaaataaaatatttaattgaaaaagaacagaattggggaaaagcaatttaatagaaatcatagtaaacaaaactaaagaaaagtcacaaaatagcaacataacatttcagtaaccataataattgtaaacaggctatacaaaccaattactaaaaacaaaattctgaaattacttgaaaaatta

SEQ ID NO: 87847 - DNA, 391 bp, Homo sapiens
ccagagccttaccaataacataaaagcaattaacatatattttgtatatgtactatatacaatattcttacaataaagctagagaaaataaaatcttattaagaaaatcaaaagaagagaacatatatttactattcattaactggaagtggatcatcaaaaatgtcatcatccttgttgtctttacattgagtcagttgagaaagtggaggaagaggataggttggccttgctgtctcaggggtgacagatatagaagaaaagccacataaagtgaacccatctggttcaaacctattgttcaaggatcaactgtacaatcatactagtaagtccacagaaaactgttggcataataaaattaacgccttctcatggccttagaaatcct

SEQ ID NO: 87848 - DNA, 236 bp, Homo sapiens
agaccaacctgggcaacctagtggaaccctgtctcttcaaaacaaataaataagtaaatagctgctatggtggcatatgcctgtcatcccaaccactcgggaagctgaggcagaagtattgcttgagccatgtttacaatgaactatgatcctaccactgcacttcaacctgggtgacagagcaagaccctgtttctaaaataataatcatgctgctgtgaacacttgtgtaccgg

SEQ ID NO: 87849 - DNA, 623 bp, Homo sapiens
  misc_feature (2)..(2): n is a, c, g, or t
  misc_feature (15)..(15): n is a, c, g, or t
  misc_feature (92)..(92): n is a, c, g, or t
  misc_feature (201)..(201): n is a, c, g, or t
  misc_feature (468)..(469): n is a, c, g, or t
  misc_feature (616)..(617): n is a, c, g, or t
anggcaggaaaatcntcactttttaaagtaattctctttggagatggtggagttggaaagagttatcttatgcacagatatgtaattaatangtttgatacccagctctttcatacataggtgtggaatttttaagtaaagatttggaagtggatggacattttggtaccaagtagaattgggacacagcaggtcaggagngattctgaagcctgaggatgccattttacagaggttctgactgctgcctgcttacttttagtgttgacaattccaaagcttccagaacttaagtaactggaagaaagaattcttatatttcgctgatgtgaaagaacccaaaagctttccttttgtaattttgggtaacaagactgacagtgaacagcaggtgtctgcagaagaagcccaagcctggtgcagggacggcagcgactatccttaatttgaaacaagtgcaaaagatcnncaaatgtggcagtagcatttgaaaagggggttccaagagttcttactaccagggataggtcagatcacttgactcagagagtgatggtctgacttcatcgaaaccattggtcaatcttcattgaaagcccaagcctagctcatcttnntgttga

SEQ ID NO: 87850 - DNA, 413 bp, Homo sapiens
ctgagaaattcaaagaggctggcagtaagcttggagagtaagtgttgcagatgcagatcagaagagattaggaagagctttgcagatcaccgcaagtatttgtatttcactctaaattaaacagaaaacccaggaagggttttaggcagataaatggcattatttagtttctgtatttaagtcatcatttaggttactgggggaggctgccctgaagtggatcagaagtaaaaggcagagataccagctaggaagctgttgcagtgagccaggtgagaagagagggccacctggaccaggtagaagcagtacaggtgaaaaaaatcagacacttccaaatcttcctcaagatttgatacattattggctgggcacggtggctcacacccgtaatcccagcactttgggaggcc

SEQ ID NO: 87851 - DNA, 699 bp, Homo sapiens
ggcagggagggcaggtagccggatgccactggccatagacttataagtctaagaggggagcctcaactggttggcgggggtggggctgcaggttgcataggtgaggctgggcccttcctgctgggaaaagcagaagagggagagtccatggcaggagaggcaggtgggctcgctaggcggagctcagctgggccagcaggcactgtggtccccttggctgaatagcacaggcgacccctaggagcaacaggccaaggtgtgtgagcctgctggtcggcgatagtgcttcagcgggggccagggaccctgccttcggtcacacactagcagctatggtggtacctgggagggagggaagggggctgtgtgtccccgcctggcctgtggagtgtggagtgtgttgtgggatgaccgtgtgcatgggactctcacctagataccactggattgccgacagatagatgaggtgggaccctgactatcagccctgctttgcagtggatttggctctcagcactcccaggctgggagctggatacctgccctggcagcatgactcagactgcacgacaggtacggcatgcccaggatgatgttcttagggactggttcagtgtgtgggtcaggagcaagtcgacaggccctgctccttaccccttggaagggactgccaccaggggcagttctgactaaggcctg

SEQ ID NO: 87852 - DNA, 185 bp, Homo sapiens
tcatttcagtagatccactgcctttggttgggccggctgaatcgctggggactgcggccagtctcttaaaaaaggagaacaaaaagccgaagaccttgtgtggccgccgggacaaagcaccttgggttcggcgagaagggacgcgcaggagcgctgaacccagaacacgcgtggccgctgcggaa

SEQ ID NO: 87853 - DNA, 994 bp, Homo sapiens
  misc_feature (8)..(8): n is a, c, g, or t
tttttagnggagacagggctttgcatgttcccaggagttccagacatgtctatgcaacaaagtgagaccctgactctaagaaaaaaataaaatgtataaaatttaaaatagtaatgtgtccattaaaccttttattttagagtagttttagatttacagaaaaactccaaatagagaggtcccatatacatctatgggcattaatgagccaatattgatcattacattcatacttcattcagatttccttagtttataacctaatgtcctttttctgtcccaggatcccattcaggataccacattacatttagttgtcatgtttccttaggcttcccttggctgtgacagtttctgcaactttccttgtttttgatgacagttttgagaaataaactgatattttgtagaatgtccttctatggggattcgtctgatgtttttctcgtgactagacacaggttttggtttttgaaagaacacaacggtaaagtgccatgctcatcacatggtatcaaaggtatatgccatcaccgggactcgtcttagctgtgacagtttctcaaactttaggctactcttagctgttgatgttaaccttgatcacttagctgaggtagcatctattatatttctccactgtaaagtaatgcgtttttaaagagattatattgaaggtaaattttctggacatttacactgagctaaaacaaattctaaacactaatattaggttccactaagtgattactaataaatgctataaagaaaatacagtgaagtggaaaaataaaactccagaagtcttagcctgaatattcacctaatagaggtgaaagtgaatttttcccttgaactgtctgcgcaatttacaataatcctccacatactttggatattaaagatcttatcttactaattgtcataagaggtatttaaatttaaactaaccatttgcttatgcattttatattggcctcactaatcaatgaac

SEQ ID NO: 87854 - DNA, 446 bp, Homo sapiens
cggtggctcacgcatacaatcccagcactttgggagactaaggcgtgaggatcacttgagcccaggagttccagacatgtctatgcaacaaagtgagaccctgactctaagaaaaaaataaaatgtataaaatttaaaatagtaatgtgtccattaaaccttttattttagagtagttttagatttacagaaaaactccaaatagagaggtcccatatacatctatgggcattaatgagccaatattgatcattacattcatacttcattcagatttccttagtttataacctaatgtcctttttctgtcccaggatcccattcaggataccacattacatttagttgtcatgtttccttaggcttcccttggctgtgacagtttctgcaactttccttgtttttgatgacagttttgagaaataaactgatattttgtagaatgt

SEQ ID NO: 87855 - DNA, 1160 bp, Homo sapiens
caaaaaaagggacatcatcttagcaggacacagaggaaactagaagatagtggagcaatatactcaaaattctgaggggaaattttttccaacctaaaattctgtaccaactcttatgagctggattgtgtccctccagtgtttctgtgttgaagccctaacccccagtaactcagatagggccatttaaagaagcaattaagttaaaataagaccattagagttggccataattcaatctggtgtccttttaagaagaggaaatttggacataggaagggccatgtgaggacacagcaagaaggcagccatctgcaagccaaggaaaagggtgtcagaggaaaccaaacctgctgacaccttgatcctgcacttctagcctccaaaactatgaagaataaatttctgttgtttgagccaccctatctttggcattttatatggcagccctagcagactaacataccaaccagcctatcaatgaaatatgagattagaaaaaaggaactcacaagaagataatcctcatgcatcttttctcaggaagctcctaggaggtgttcctcactaaaatgaaggaataaggtagaaataagaaagtcatagaatccaggaaataaggagcccccactaacatgtacggcacctagagaaaggccagtccaggtacggcagggcgaaggcccaggagacacaggtttgtcaaaacagatgaactccatgcaatgcaggctgtgattgaatagaggaagaagccaaacacagctattgacaccaggatgaatggaaggctgtgcggcaaaggaagactaaatgcagctgtgactcaaatttacatgaatgtgaccacataaatactaaacagtgctctattgcaggtataacatgctacagttagtggggagccaggtgcagggatgtgtgttgaacattccagaatcctcttcttcctagggaaaagttgagataatgcctcagactgactagcaataaaagcatgtgaaaaaaaatatgtgcagttttcaaaggtttgggaaaaaacaatccctctttctgctgatggaaggatagcttagtggaatgtttctgagggctggttggtctctatatgttaaaagcattaaaagtgtgtacacactttgacccaggaatttgagctc

SEQ ID NO: 87856 - DNA, 286 bp, Homo sapiens
ttttggtcaaataaatcagagtactacaatcatcaaacatttgattcatttaacatgtgagcatctatacctgcccatttgtgtgaatattcagtatatatctcatacctattctcatgccttcatttattgtggttatggctgtagatatggaaaaaacagtagctgagacatttttattatgaactatattataccttaatcaatcagtcagaaaatgcttaggaagaagaaatgcatgattgtaaatgcatgatttcaacatgatacccgaacaacaaagttg

SEQ ID NO: 87857 - DNA, 291 bp, Homo sapiens
agcagggaacttggattttatcctataggaaatggagagatcctgagcaggagaaggaaatggtcacacttgttgacaggattgtcgagaacagttgagagaaaggcatttaagaggctctttcagctgtcttgggtgtgacaaaagaatcaagttaaaagaggatatgcagaggctagtttgagagaagttaaggaggacaaattggcaatggatggactatggcaggaaggagagaaagagagaggaggtggagatgatgttcatgtccctggcttgggcgtacgggga

SEQ ID NO: 87858 - DNA, 403 bp, Homo sapiens
gagatggcgtctcactctgtcacccaggctggagtacagtggcaagatctcagctcactgcaacctctacctcctggattcaagcaattcttctgcctcagcctcccaagtagctgaggttacaggcgcctgccacaatgtacagctaagttttatatttttagtagagatggggtttcaccatgttggccaggctggtctcaaactcctaacctcaagtgatccgcctgccttggcctcccaacatgctgggattacaggcatgagccaccactcctcaccctcttttctcatttttaaaagcttgtatccttcaacatttttctctatattctgtgaatttgtcaggtttctttttttttttcaattggagtaccaataaatgccaaggttagccaatgaa

SEQ ID NO: 87859 - DNA, 555 bp, Homo sapiens
agaccctcttctattggtgggaaccatgtctcatgggcactcacagttacaagggagtctgaaacaccagatggctggcaacagtctgaggcagccagcttccaggaggagagagggtgtacctctctatcatctaaggaccagtaatctttcctttcagtcttattgagccaatttaagtcagatttccactctagatgaattactggcagggggatatgagattattcttaaaccaacagatcaaaccctacagccagaaaaggattagtttcctctaaatcaaataaatggtttatctggaggaaggtggacgctcaaagtcagacttttgttaagaagaaagaagcatgattgattgtgtgaaggcagtctactatgggctgacatggacccaaacattgttctttgctttcttttctctttttcttgccattcattttctaagaaatcttctccactgtggtttaactgctgtgaaaattctaccaaagctatgttccccaaatggacttctcactctttctattctatgttcagctctattaaaacatt

SEQ ID NO: 87860 - DNA, 393 bp, Homo sapiens
ttcatatttcatattaaaatggacatttagtaggattattagatgaaaagggtcccccagggatatctaatatcaaattatctgcaggacatcttctccagaaagcagactgactgtaatatgaactaattttcccccctttgagttgcttgaaagaatctctgagatctgacactgatgggctacagtaatcagcagttcttgcagtactcaagacattttaaggggcaggaaatctttcctatttccagtatctcctttttgggggcaacaagggtaagctgctagttttaagtacataatttgaacttagagatttaagatgctcctggctgtacaggaaaacgcctgaaaacagcatgggcctggatgaagacgctgcttttgaaagca

SEQ ID NO: 87861 - DNA, 1669 bp, Homo sapiens
tccagcccaagtgacagagagaccctgtctcagacaaacaaacaaacaaacaaaatttcaattctgacaaggtcttcccatactgtctgaatgactgaagtgactacatgatgaacgaaaggcactattttcaccccttcccattctgttctggtaaatagttgcatcttaaaacaaaacagtatacttaaattggaattaccttctcttttctatttaaagtaaacatctttctcaagtaatatttatacaggaacagtttttgtttatggtgacagttaaaatcaagttgctcaaagagtagcctaacagattagggacaagcaaatgtaaataaataccaaaagtagaagagcaaataaagaatggaacgtatctctgagcataaacagggttgttgcataatacttgtagataaactgctccaactgttggacaaaataaagaggggattgtgccagaccttgtgttttctgattcgaactttgccaaggcctggaacgctgaagaataatacttttatttttcttttctttctaattttattttactttttatttttctttccaaaaagcattaagaggtttttgtttgtctgtttcctttatcctcttggtaaaattttagcatatttaaccatataagatttaatgtttgggtgatacaaaaaacaagaaaaatcaggtgtgttattttactaaatattaaaaatatgaaaattatagttagcattaatttcaatattatgctataagcacagttttctcccttctgtcttaaaatacataaaattttgactctgaaattgtgcagtacaaaaatgttgaaaatagaaataatccacaaaatctaatttatagcactgttcttccacacttacccaacttcacacatttgtggagaaatacaaaaattaatcatatggagcaaggtggttcatgcctatcatcccagcagtttgggaggctaaggctggaggatcgcttgaggccaggagtttaagactagcctggacaacatagtaagaccctatctctacaaaaaaaaaaacaattaacaaaagagcattatgtagcaactacaacaacattttgaatataagccagtaatatttactgtttaagtggtaagtttctagggcaggatttggggatggggaaggtagagaatatgccaaccctcttgaagtctaaaatgttaatcacatgaatgtggtggtttattttagtgaagtatttgtttacaaattcttaatgaattttatttttctaggaaaatttccagaccaaccaattcacatcgtgtatgttccttctcacctccatcatatgctctttgaactatttaaggtatgatacttcacaataattgaaattttaccttttaaaaaggtttaacagttatatttttatctcctttattattcgccacaaaacagaagcctcaatatcttttcccaagaatgcttctagtcctcctaagagaaagaaactatacagtcaatgtttgacaaagtacatgtagctcattgtagcatcaacacatatttgagaatgcatcatacaattcatgatgtatcaatgctttacagccaagaggaagttcttattattttttcaggtgcccattaaagaactagtcatttattcattcattaagagaggtcatg

SEQ ID NO: 87862 - DNA, 3621 bp, Homo sapiens
agcggaagacttgaacttgaatctcgaaccactgcatctccgactctgcccagactcttcactccgcggcaccctcaaaccccagcccaggccggggcgcacaagccagccagcgcacctgcagtcctcgcccggacgcgccgcgccccctcggaaccaggctctgctccgagcagccttcgcccctcaagccagccacagtccccgccaggccgggtgggcgtcaagatgaaggcggcccgcttcgtgctgcgcagcgctggctcgctcaacggcgccggcctggtgccccgagaggtggagcatttctcgcgctacagcccgtccccgctgtccatgaagcagctactggactttggttcagaaaatgcatgtgaaagaacttcttttgcatttttgcgacaagaattgcctgtgagactcgccaacattctgaaggaaattgatatcctcccgacccaattagtaaatacctcttcagtgcaattggttaaaagctggtatatacagagcctgatggatttggtggaattccatgagaaaagcccagatgaccagaaagcattatcagactttgtagatacactcatcaaagttcgaaatagacaccataatgtagtccctacaatggcacaaggaatcatagagtataaagatgcctgtacagttgacccagtcaccaatcaaaatcttcaatatttcttggatcgattttacatgaaccgtatttctactcggatgctgatgaaccagcacattcttatatttagtgactcacagacaggaaacccaagccacattggaagcattgatcctaactgtgatgtggtagcagtggtccaagatgcctttgagtgttcaaggatgctctgtgatcagtattatttatcatctccagaattaaagcttacacaagtgaatggaaaatttccagaccaaccaattcacatcgtgtatgttccttctcacctccatcatatgctctttgaactatttaagaatgcaatgcgggcaacagttgaacaccaggaaaatcagccttcccttacaccaatagaggttattgttgtcttgggaaaagaagaccttaccattaagatttcagacagaggaggtggtgttcccctgagaattattgaccgcctctttagttatacatactccactgcaccaacgcctgtgatggataattcccggaatgctcctttggctggttttggttacggcttgccaatttctcgtctgtatgccaagtactttcaaggagatctgaatctctactctttatcaggatatggaacagatgctatcatctacttaaaggctttgtcttctgagtctatagaaaaacttccagtttttaacaagtcagccttcaaacattatcagatgagctctgaggctgatgactggtgtatcccaagcagggaaccaaagaacctggcaaaagaagtggccatgtgaagagggacactcaggacactttacgggatcaaagtgggtctacaccagtgctgcttcctgaatgtttgtgtgtgaacccttgtttcctccaaaacaaacgacagcaacgaaaactccttaatcagaacactgatccaatgaggaatggagcttgtttctgtgacccaggagaacttagtgcaagactacaggagttaacagatggccagctccttattttttaatgtagaataactcctgagtttatatcaaatcctgaagaaataagcctcagttttccatctgtttttgataagaataagaaagggagtgagtgtgaagatggtggttagcagtttcactaagactgatattttaggcctcttgttcacatcaaaagatattggtgtcagaataccagcattttcctgccatgcaaaggattaaaacttagtttacactatgtggttacaaatatatgtcaatgtacattttgaacatatttatgtgctatggaaggaaatgctggtgactaaaataaggtttactctgaaagaggaggaattttattcaaagcattcaaacattttattcaagtgtttcaaaattcaaagcattgtattcaaagttgcagtgaaggcatcaacttatgtaaaaactcagaaggaaggctcctctgataaaaacacagctcctttattatgctgcttttcttgttcactttacacactaagtaaacacttattgtcaggtgcctagtcttgagtgaattgttagatgtgcactgaactcgggatgttggggattggagagagagaattgccaaagtaacagcaaaaatatctcttactttgctttgtttataaataaattagtagattggaaaaactagtgttagggaaagaaatcacatgttcagagcctaattcagtaggaagggcttttctctaccctgaaatgaaggtaatccaaaggcatccattttctaggcttaaaagatatatttttgatatatttaattatattctctacactccagcattaatatgtctgtttaaaaattactaattctcaaatggctcaagaacattagaatttaagtaccttttagagtaattattttaagcaaatagcctggacgtaagagattctcatgccagcatgctttcatttgtcagttgttgtgactgagagataatgaatgacacctgaaatgcatatggtattttgggagagttaaggtataatttgaaggttggcagaccagttgcgctgattactcttagagaagaagaaatggaaaaatgaaagaaggcaggaaggaaagaaaggatataggaagagagggaagcagaaggcaggcatttttctattttccccacaaattatttcaaaaaaaatctgtattttctgggatatgtcattggcaagaggaagaactggtgttttgaaagcagtatggattctttaaatgcctctcactcttacaagatagtaggctttgagataataaacttacccgtgtcaattaacatttaaactggcatatagaaaaaaaggaggatttttctgcattgtaaaataatcagtatggtttatatgttgaatttgacatttgtgtgtaatttcatggtggcctagtgttgtggtgcttctggtaatggtaatagaagctcaactatttttttgtggatttcagtttttatcatcagaagtcctagacagtgacatttcttaatggtgggagtccagctcatgcatttctgattatacaaaacagtttgcagtaggttatttgtcatttcagttttttactgaaatttgagctaaacatttttacatgtaaatacttgtatttaccaaagatttaaatcagttgattaattaattaactcaaatactgtgaactatctttaaaacactagaaaaaagaaatgttagtatctcaattacaccaactgtgcaaatgaactttgataaaatagaaataatctacattggcctttgtgaaatctggggaagagctttaggattctagtagatggatactgaatactcaggcccacttaaattattaatgtatacattgtgtttttgtctttatgctatgtacagagaaatgtgataattttttataataaatattttttatgatgataaaagaaaaaaaaaaaaaag

SEQ ID NO: 87863 - DNA, 3820 bp, Homo sapiens
agcggaagacttgaacttgaatctcgaaccactgcatctccgactctgcccagactcttcactccgcggcaccctcaaaccccagcccaggccggggcgcacaagccagccagcgcacctgcagtcctcgcccggacgcgccgcgccccctcggaaccaggctctgctccgagcagccttcgcccctcaagccagccacagtccccgccaggccgggtgggcgtcaagatgaaggcggcccgcttcgtgctgcgcagcgctggctcgctcaacggcgccggcctggtgccccgagaggtggagcatttctcgcgctacagcccgtccccgctgtccatgaagcagctactggactttggttcagaaaatgcatgtgaaagaacttcttttgcatttttgcgacaagaattgcctgtgagactcgccaacattctgaaggaaattgatatcctcccgacccaattagtaaatacctcttcagtgcaattggttaaaagctggtatatacagagcctgatggatttggtggaattccatgagaaaagcccagatgaccagaaagcattatcagactttgtagatacactcatcaaagttcgaaatagacaccataatgtagtccctacaatggcacaaggaatcatagagtataaagatgcctgtacagttgacccagtcaccaatcaaaatcttcaatatttcttggatcgattttacatgaaccgtatttctactcggatgctgatgaaccagcacattcttatatttagtgactcacagacaggaaacccaagccacattggaagcattgatcctaactgtgatgtggtagcagtggtccaagatgcctttgagtgttcaaggatgctctgtgatcagtattatttatcatctccagaattaaagcttacacaagtgaatggaaaatttccagaccaaccaattcacatcgtgtatgttccttctcacctccatcatatgctctttgaactatttaagaatgcaatgcgggcaacagttgaacaccaggaaaatcagccttcccttacaccaatagaggttattgttgtcttgggaaaagaagaccttaccattaaggtaaccattctctgttttccttttgggtgtctcttgagagaattaaatagggtcaatagtaataaagctgtctgctttttgcaatagataacagtcatatatgccaggtgatttttaaatgaaggaaagccatttttatttagacaaatgcacattgtttttaatgtgtggctttgatgacttgtattgattgttttagatttcagacagaggaggtggtgttcccctgagaattattgaccgcctctttagttatacatactccactgcaccaacgcctgtgatggataattcccggaatgctcctttggctggttttggttacggcttgccaatttctcgtctgtatgccaagtactttcaaggagatctgaatctctactctttatcaggatatggaacagatgctatcatctacttaaaggctttgtcttctgagtctatagaaaaacttccagtttttaacaagtcagccttcaaacattatcagatgagctctgaggctgatgactggtgtatcccaagcagggaaccaaagaacctggcaaaagaagtggccatgtgaagagggacactcaggacactttacgggatcaaagtgggtctacaccagtgctgcttcctgaatgtttgtgtgtgaacccttgtttcctccaaaacaaacgacagcaacgaaaactccttaatcagaacactgatccaatgaggaatggagcttgtttctgtgacccaggagaacttagtgcaagactacaggagttaacagatggccagctccttattttttaatgtagaataactcctgagtttatatcaaatcctgaagaaataagcctcagttttccatctgtttttgataagaataagaaagggagtgagtgtgaagatggtggttagcagtttcactaagactgatattttaggcctcttgttcacatcaaaagatattggtgtcagaataccagcattttcctgccatgcaaaggattaaaacttagtttacactatgtggttacaaatatatgtcaatgtacattttgaacatatttatgtgctatggaaggaaatgctggtgactaaaataaggtttactctgaaagaggaggaattttattcaaagcattcaaacattttattcaagtgtttcaaaattcaaagcattgtattcaaagttgcagtgaaggcatcaacttatgtaaaaactcagaaggaaggctcctctgataaaaacacagctcctttattatgctgcttttcttgttcactttacacactaagtaaacacttattgtcaggtgcctagtcttgagtgaattgttagatgtgcactgaactcgggatgttggggattggagagagagaattgccaaagtaacagcaaaaatatctcttactttgctttgtttataaataaattagtagattggaaaaactagtgttagggaaagaaatcacatgttcagagcctaattcagtaggaagggcttttctctaccctgaaatgaaggtaatccaaaggcatccattttctaggcttaaaagatatatttttgatatatttaattatattctctacactccagcattaatatgtctgtttaaaaattactaattctcaaatggctcaagaacattagaatttaagtaccttttagagtaattattttaagcaaatagcctggacgtaagagattctcatgccagcatgctttcatttgtcagttgttgtgactgagagataatgaatgacacctgaaatgcatatggtattttgggagagttaaggtataatttgaaggttggcagaccagttgcgctgattactcttagagaagaagaaatggaaaaatgaaagaaggcaggaaggaaagaaaggatataggaagagagggaagcagaaggcaggcatttttctattttccccacaaattatttcaaaaaaaatctgtattttctgggatatgtcattggcaagaggaagaactggtgttttgaaagcagtatggattctttaaatgcctctcactcttacaagatagtaggctttgagataataaacttacccgtgtcaattaacatttaaactggcatatagaaaaaaaggaggatttttctgcattgtaaaataatcagtatggtttatatgttgaatttgacatttgtgtgtaatttcatggtggcctagtgttgtggtgcttctggtaatggtaatagaagctcaactatttttttgtggatttcagtttttatcatcagaagtcctagacagtgacatttcttaatggtgggagtccagctcatgcatttctgattatacaaaacagtttgcagtaggttatttgtcatttcagttttttactgaaatttgagctaaacatttttacatgtaaatacttgtatttaccaaagatttaaatcagttgattaattaattaactcaaatactgtgaactatctttaaaacactagaaaaaagaaatgttagtatctcaattacaccaactgtgcaaatgaactttgataaaatagaaataatctacattggcctttgtgaaatctggggaagagctttaggattctagtagatggatactgaatactcaggcccacttaaattattaatgtatacattgtgtttttgtctttatgctatgtacagagaaatgtgataattttttataataaatattttttatgatgataaaagaaaaaaaaaaaaaag

SEQ ID NO: 87864 - DNA, 3971 bp, Homo sapiens
tccagcccaagtgacagagagaccctgtctcagacaaacaaacaaacaaacaaaatttcaattctgacaaggtcttcccatactgtctgaatgactgaagtgactacatgatgaacgaaaggcactattttcaccccttcccattctgttctggtaaatagttgcatcttaaaacaaaacagtatacttaaattggaattaccttctcttttctatttaaagtaaacatctttctcaagtaatatttatacaggaacagtttttgtttatggtgacagttaaaatcaagttgctcaaagagtagcctaacagattagggacaagcaaatgtaaataaataccaaaagtagaagagcaaataaagaatggaacgtatctctgagcataaacagggttgttgcataatacttgtagataaactgctccaactgttggacaaaataaagaggggattgtgccagaccttgtgttttctgattcgaactttgccaaggcctggaacgctgaagaataatacttttatttttcttttctttctaattttattttactttttatttttctttccaaaaagcattaagaggtttttgtttgtctgtttcctttatcctcttggtaaaattttagcatatttaaccatataagatttaatgtttgggtgatacaaaaaacaagaaaaatcaggtgtgttattttactaaatattaaaaatatgaaaattatagttagcattaatttcaatattatgctataagcacagttttctcccttctgtcttaaaatacataaaattttgactctgaaattgtgcagtacaaaaatgttgaaaatagaaataatccacaaaatctaatttatagcactgttcttccacacttacccaacttcacacatttgtggagaaatacaaaaattaatcatatggagcaaggtggttcatgcctatcatcccagcagtttgggaggctaaggctggaggatcgcttgaggccaggagtttaagactagcctggacaacatagtaagaccctatctctacaaaaaaaaaaacaattaacaaaagagcattatgtagcaactacaacaacattttgaatataagccagtaatatttactgtttaagtggtaagtttctagggcaggatttggggatggggaaggtagagaatatgccaaccctcttgaagtctaaaatgttaatcacatgaatgtggtggtttattttagtgaagtatttgtttacaaattcttaatgaattttatttttctaggaaaatttccagaccaaccaattcacatcgtgtatgttccttctcacctccatcatatgctctttgaactatttaagaatgcaatgcgggcaacagttgaacaccaggaaaatcagccttcccttacaccaatagaggttattgttgtcttgggaaaagaagaccttaccattaagatttcagacagaggaggtggtgttcccctgagaattattgaccgcctctttagttatacatactccactgcaccaacgcctgtgatggataattcccggaatgctcctttggctggttttggttacggcttgccaatttctcgtctgtatgccaagtactttcaaggagatctgaatctctactctttatcaggatatggaacagatgctatcatctacttaaaggctttgtcttctgagtctatagaaaaacttccagtttttaacaagtcagccttcaaacattatcagatgagctctgaggctgatgactggtgtatcccaagcagggaaccaaagaacctggcaaaagaagtggccatgtgaagagggacactcaggacactttacgggatcaaagtgggtctacaccagtgctgcttcctgaatgtttgtgtgtgaacccttgtttcctccaaaacaaacgacagcaacgaaaactccttaatcagaacactgatccaatgaggaatggagcttgtttctgtgacccaggagaacttagtgcaagactacaggagttaacagatggccagctccttattttttaatgtagaataactcctgagtttatatcaaatcctgaagaaataagcctcagttttccatctgtttttgataagaataagaaagggagtgagtgtgaagatggtggttagcagtttcactaagactgatattttaggcctcttgttcacatcaaaagatattggtgtcagaataccagcattttcctgccatgcaaaggattaaaacttagtttacactatgtggttacaaatatatgtcaatgtacattttgaacatatttatgtgctatggaaggaaatgctggtgactaaaataaggtttactctgaaagaggaggaattttattcaaagcattcaaacattttattcaagtgtttcaaaattcaaagcattgtattcaaagttgcagtgaaggcatcaacttatgtaaaaactcagaaggaaggctcctctgataaaaacacagctcctttattatgctgcttttcttgttcactttacacactaagtaaacacttattgtcaggtgcctagtcttgagtgaattgttagatgtgcactgaactcgggatgttggggattggagagagagaattgccaaagtaacagcaaaaatatctcttactttgctttgtttataaataaattagtagattggaaaaactagtgttagggaaagaaatcacatgttcagagcctaattcagtaggaagggcttttctctaccctgaaatgaaggtaatccaaaggcatccattttctaggcttaaaagatatatttttgatatatttaattatattctctacactccagcattaatatgtctgtttaaaaattactaattctcaaatggctcaagaacattagaatttaagtaccttttagagtaattattttaagcaaatagcctggacgtaagagattctcatgccagcatgctttcatttgtcagttgttgtgactgagagataatgaatgacacctgaaatgcatatggtattttgggagagttaaggtataatttgaaggttggcagaccagttgcgctgattactcttagagaagaagaaatggaaaaatgaaagaaggcaggaaggaaagaaaggatataggaagagagggaagcagaaggcaggcatttttctattttccccacaaattatttcaaaaaaaatctgtattttctgggatatgtcattggcaagaggaagaactggtgttttgaaagcagtatggattctttaaatgcctctcactcttacaagatagtaggctttgagataataaacttacccgtgtcaattaacatttaaactggcatatagaaaaaaaggaggatttttctgcattgtaaaataatcagtatggtttatatgttgaatttgacatttgtgtgtaatttcatggtggcctagtgttgtggtgcttctggtaatggtaatagaagctcaactatttttttgtggatttcagtttttatcatcagaagtcctagacagtgacatttcttaatggtgggagtccagctcatgcatttctgattatacaaaacagtttgcagtaggttatttgtcatttcagttttttactgaaatttgagctaaacatttttacatgtaaatacttgtatttaccaaagatttaaatcagttgattaattaattaactcaaatactgtgaactatctttaaaacactagaaaaaagaaatgttagtatctcaattacaccaactgtgcaaatgaactttgataaaatagaaataatctacattggcctttgtgaaatctggggaagagctttaggattctagtagatggatactgaatactcaggcccacttaaattattaatgtatacattgtgtttttgtctttatgctatgtacagagaaatgtgataattttttataataaatattttttatgatgataaaagaaaaaaaaaaaaaag

SEQ ID NO: 87865 - DNA, 3755 bp, Homo sapiens
caccttaagctttttgatgcttcccaagagtcccctgaattggagagaaggaagcctaaaaaagacaaatctgcctctaattctgacataactctttccagaacttcctgtttcctaacttattctaatgttactgctgtgaggtactgactgtactacaaacatctgatctactttatttcactacagctaatgactagaacttaatattatttaaaaaccagaaagcagaaagtagacaggtggtgagaaaggaaaatgggttaagaaaaccaagactgtatctgtatgagattcagccaatagacggaaaacatcttttagtttgttctgtgttaaaggacaaaggatactttttcattgatttgatttatttttaagttgaatgatacaactcatagagttattctgccatcattggtaaaagttagatgataatcaaatgcaaattgaaattcaatttagaattattgactgtccttttaaatagtaacaaccttttcacagcaagttttatgaaagccaataaattggttcaatgatttcactgttcatttgttatatagtagtctttggtgcttggatgtaaaacgtaatagaaagatagaaaagggagagctaggaaatggactataaaaaccaatttctacatttaaattaagcttacaaataagaacttgacagctagcagaattggtttccattagacattactcccaggagctatattacatagtaaatgaatatttttcattatacatcctacatgacccattcataaatggctatttacaaagctgttttactactaacttaaaaaaataggaactttgaattaccctctgtgctacttttattttaaacataaaaaaaaaaacatttattgtccctcattcctctgccattgaattccttatggtttgctttgttttagaatgcaatgcgggcaacagttgaacaccaggaaaatcagccttcccttacaccaatagaggttattgttgtcttgggaaaagaagaccttaccattaaggtaaccattctctgttttccttttgggtgtctcttgagagaattaaatagggtcaatagtaataaagctgtctgctttttgcaatagataacagtcatatatgccaggtgatttttaaatgaaggaaagccatttttatttagacaaatgcacattgtttttaatgtgtggctttgatgacttgtattgattgttttagatttcagacagaggaggtggtgttcccctgagaattattgaccgcctctttagttatacatactccactgcaccaacgcctgtgatggataattcccggaatgctcctttggctggttttggttacggcttgccaatttctcgtctgtatgccaagtactttcaaggagatctgaatctctactctttatcaggatatggaacagatgctatcatctacttaaaggctttgtcttctgagtctatagaaaaacttccagtttttaacaagtcagccttcaaacattatcagatgagctctgaggctgatgactggtgtatcccaagcagggaaccaaagaacctggcaaaagaagtggccatgtgaagagggacactcaggacactttacgggatcaaagtgggtctacaccagtgctgcttcctgaatgtttgtgtgtgaacccttgtttcctccaaaacaaacgacagcaacgaaaactccttaatcagaacactgatccaatgaggaatggagcttgtttctgtgacccaggagaacttagtgcaagactacaggagttaacagatggccagctccttattttttaatgtagaataactcctgagtttatatcaaatcctgaagaaataagcctcagttttccatctgtttttgataagaataagaaagggagtgagtgtgaagatggtggttagcagtttcactaagactgatattttaggcctcttgttcacatcaaaagatattggtgtcagaataccagcattttcctgccatgcaaaggattaaaacttagtttacactatgtggttacaaatatatgtcaatgtacattttgaacatatttatgtgctatggaaggaaatgctggtgactaaaataaggtttactctgaaagaggaggaattttattcaaagcattcaaacattttattcaagtgtttcaaaattcaaagcattgtattcaaagttgcagtgaaggcatcaacttatgtaaaaactcagaaggaaggctcctctgataaaaacacagctcctttattatgctgcttttcttgttcactttacacactaagtaaacacttattgtcaggtgcctagtcttgagtgaattgttagatgtgcactgaactcgggatgttggggattggagagagagaattgccaaagtaacagcaaaaatatctcttactttgctttgtttataaataaattagtagattggaaaaactagtgttagggaaagaaatcacatgttcagagcctaattcagtaggaagggcttttctctaccctgaaatgaaggtaatccaaaggcatccattttctaggcttaaaagatatatttttgatatatttaattatattctctacactccagcattaatatgtctgtttaaaaattactaattctcaaatggctcaagaacattagaatttaagtaccttttagagtaattattttaagcaaatagcctggacgtaagagattctcatgccagcatgctttcatttgtcagttgttgtgactgagagataatgaatgacacctgaaatgcatatggtattttgggagagttaaggtataatttgaaggttggcagaccagttgcgctgattactcttagagaagaagaaatggaaaaatgaaagaaggcaggaaggaaagaaaggatataggaagagagggaagcagaaggcaggcatttttctattttccccacaaattatttcaaaaaaaatctgtattttctgggatatgtcattggcaagaggaagaactggtgttttgaaagcagtatggattctttaaatgcctctcactcttacaagatagtaggctttgagataataaacttacccgtgtcaattaacatttaaactggcatatagaaaaaaaggaggatttttctgcattgtaaaataatcagtatggtttatatgttgaatttgacatttgtgtgtaatttcatggtggcctagtgttgtggtgcttctggtaatggtaatagaagctcaactatttttttgtggatttcagtttttatcatcagaagtcctagacagtgacatttcttaatggtgggagtccagctcatgcatttctgattatacaaaacagtttgcagtaggttatttgtcatttcagttttttactgaaatttgagctaaacatttttacatgtaaatacttgtatttaccaaagatttaaatcagttgattaattaattaactcaaatactgtgaactatctttaaaacactagaaaaaagaaatgttagtatctcaattacaccaactgtgcaaatgaactttgataaaatagaaataatctacattggcctttgtgaaatctggggaagagctttaggattctagtagatggatactgaatactcaggcccacttaaattattaatgtatacattgtgtttttgtctttatgctatgtacagagaaatgtgataattttttataataaatattttttatgatgataaaagaaaaaaaaaaaaaag

SEQ ID NO: 87866 - DNA, 2946 bp, Homo sapiens
  misc_feature (2)..(2): n is a, c, g, or t
  misc_feature (13)..(13): n is a, c, g, or t
  misc_feature (42)..(43): n is a, c, g, or t
  misc_feature (92)..(92): n is a, c, g, or t
  misc_feature (125)..(125): n is a, c, g, or t
anttccagcagangtaaatccaatttggccctcagagacctnnatttttaacagcgtcttcatcaaggacatggccagcctggacaacatanactttgtaattatttgaacattgttttaatcangtaaatgaatatttttcattatacatcctacatgacccattcataaatggctatttacaaagctgttttactactaacttaaaaaaataggaactttgaattaccctctgtgctacttttattttaaacataaaaaaaaaaacatttattgtccctcattcctctgccattgaattccttatggtttgctttgttttagaatgcaatgcgggcaacagttgaacaccaggaaaatcagccttcccttacaccaatagaggttattgttgtcttgggaaaagaagaccttaccattaagatttcagacagaggaggtggtgttcccctgagaattattgaccgcctctttagttatacatactccactgcaccaacgcctgtgatggataattcccggaatgctcctttggctggttttggttacggcttgccaatttctcgtctgtatgccaagtactttcaaggagatctgaatctctactctttatcaggatatggaacagatgctatcatctacttaaaggctttgtcttctgagtctatagaaaaacttccagtttttaacaagtcagccttcaaacattatcagatgagctctgaggctgatgactggtgtatcccaagcagggaaccaaagaacctggcaaaagaagtggccatgtgaagagggacactcaggacactttacgggatcaaagtgggtctacaccagtgctgcttcctgaatgtttgtgtgtgaacccttgtttcctccaaaacaaacgacagcaacgaaaactccttaatcagaacactgatccaatgaggaatggagcttgtttctgtgacccaggagaacttagtgcaagactacaggagttaacagatggccagctccttattttttaatgtagaataactcctgagtttatatcaaatcctgaagaaataagcctcagttttccatctgtttttgataagaataagaaagggagtgagtgtgaagatggtggttagcagtttcactaagactgatattttaggcctcttgttcacatcaaaagatattggtgtcagaataccagcattttcctgccatgcaaaggattaaaacttagtttacactatgtggttacaaatatatgtcaatgtacattttgaacatatttatgtgctatggaaggaaatgctggtgactaaaataaggtttactctgaaagaggaggaattttattcaaagcattcaaacattttattcaagtgtttcaaaattcaaagcattgtattcaaagttgcagtgaaggcatcaacttatgtaaaaactcagaaggaaggctcctctgataaaaacacagctcctttattatgctgcttttcttgttcactttacacactaagtaaacacttattgtcaggtgcctagtcttgagtgaattgttagatgtgcactgaactcgggatgttggggattggagagagagaattgccaaagtaacagcaaaaatatctcttactttgctttgtttataaataaattagtagattggaaaaactagtgttagggaaagaaatcacatgttcagagcctaattcagtaggaagggcttttctctaccctgaaatgaaggtaatccaaaggcatccattttctaggcttaaaagatatatttttgatatatttaattatattctctacactccagcattaatatgtctgtttaaaaattactaattctcaaatggctcaagaacattagaatttaagtaccttttagagtaattattttaagcaaatagcctggacgtaagagattctcatgccagcatgctttcatttgtcagttgttgtgactgagagataatgaatgacacctgaaatgcatatggtattttgggagagttaaggtataatttgaaggttggcagaccagttgcgctgattactcttagagaagaagaaatggaaaaatgaaagaaggcaggaaggaaagaaaggatataggaagagagggaagcagaaggcaggcatttttctattttccccacaaattatttcaaaaaaaatctgtattttctgggatatgtcattggcaagaggaagaactggtgttttgaaagcagtatggattctttaaatgcctctcactcttacaagatagtaggctttgagataataaacttacccgtgtcaattaacatttaaactggcatatagaaaaaaaggaggatttttctgcattgtaaaataatcagtatggtttatatgttgaatttgacatttgtgtgtaatttcatggtggcctagtgttgtggtgcttctggtaatggtaatagaagctcaactatttttttgtggatttcagtttttatcatcagaagtcctagacagtgacatttcttaatggtgggagtccagctcatgcatttctgattatacaaaacagtttgcagtaggttatttgtcatttcagttttttactgaaatttgagctaaacatttttacatgtaaatacttgtatttaccaaagatttaaatcagttgattaattaattaactcaaatactgtgaactatctttaaaacactagaaaaaagaaatgttagtatctcaattacaccaactgtgcaaatgaactttgataaaatagaaataatctacattggcctttgtgaaatctggggaagagctttaggattctagtagatggatactgaatactcaggcccacttaaattattaatgtatacattgtgtttttgtctttatgctatgtacagagaaatgtgataattttttataataaatattttttatgatgataaaagaaaaaaaaaaaaaag

SEQ ID NO: 87867 - DNA, 2388 bp, Homo sapiens
ctctgaatgtattttgagtaataacttcaagtgcaaattatgccatgcataatttctttggtctcatgtttttccccccttttcttttaggctttgtcttctgagtctatagaaaaacttccagtttttaacaagtcagccttcaaacattatcagatgagctctgaggctgatgactggtgtatcccaagcagggaaccaaagaacctggcaaaagaagtggccatgtgaagagggacactcaggacactttacgggatcaaagtgggtctacaccagtgctgcttcctgaatgtttgtgtgtgaacccttgtttcctccaaaacaaacgacagcaacgaaaactccttaatcagaacactgatccaatgaggaatggagcttgtttctgtgacccaggagaacttagtgcaagactacaggagttaacagatggccagctccttattttttaatgtagaataactcctgagtttatatcaaatcctgaagaaataagcctcagttttccatctgtttttgataagaataagaaagggagtgagtgtgaagatggtggttagcagtttcactaagactgatattttaggcctcttgttcacatcaaaagatattggtgtcagaataccagcattttcctgccatgcaaaggattaaaacttagtttacactatgtggttacaaatatatgtcaatgtacattttgaacatatttatgtgctatggaaggaaatgctggtgactaaaataaggtttactctgaaagaggaggaattttattcaaagcattcaaacattttattcaagtgtttcaaaattcaaagcattgtattcaaagttgcagtgaaggcatcaacttatgtaaaaactcagaaggaaggctcctctgataaaaacacagctcctttattatgctgcttttcttgttcactttacacactaagtaaacacttattgtcaggtgcctagtcttgagtgaattgttagatgtgcactgaactcgggatgttggggattggagagagagaattgccaaagtaacagcaaaaatatctcttactttgctttgtttataaataaattagtagattggaaaaactagtgttagggaaagaaatcacatgttcagagcctaattcagtaggaagggcttttctctaccctgaaatgaaggtaatccaaaggcatccattttctaggcttaaaagatatatttttgatatatttaattatattctctacactccagcattaatatgtctgtttaaaaattactaattctcaaatggctcaagaacattagaatttaagtaccttttagagtaattattttaagcaaatagcctggacgtaagagattctcatgccagcatgctttcatttgtcagttgttgtgactgagagataatgaatgacacctgaaatgcatatggtattttgggagagttaaggtataatttgaaggttggcagaccagttgcgctgattactcttagagaagaagaaatggaaaaatgaaagaaggcaggaaggaaagaaaggatataggaagagagggaagcagaaggcaggcatttttctattttccccacaaattatttcaaaaaaaatctgtattttctgggatatgtcattggcaagaggaagaactggtgttttgaaagcagtatggattctttaaatgcctctcactcttacaagatagtaggctttgagataataaacttacccgtgtcaattaacatttaaactggcatatagaaaaaaaggaggatttttctgcattgtaaaataatcagtatggtttatatgttgaatttgacatttgtgtgtaatttcatggtggcctagtgttgtggtgcttctggtaatggtaatagaagctcaactatttttttgtggatttcagtttttatcatcagaagtcctagacagtgacatttcttaatggtgggagtccagctcatgcatttctgattatacaaaacagtttgcagtaggttatttgtcatttcagttttttactgaaatttgagctaaacatttttacatgtaaatacttgtatttaccaaagatttaaatcagttgattaattaattaactcaaatactgtgaactatctttaaaacactagaaaaaagaaatgttagtatctcaattacaccaactgtgcaaatgaactttgataaaatagaaataatctacattggcctttgtgaaatctggggaagagctttaggattctagtagatggatactgaatactcaggcccacttaaattattaatgtatacattgtgtttttgtctttatgctatgtacagagaaatgtgataattttttataataaatattttttatgatgataaaagaaaaaaaaaaaaaag

SEQ ID NO: 87868 - DNA, 2187 bp, Homo sapiens
gtgactctccaggacttagtattgaggtgaagagggacactcaggacactttacgggatcaaagtgggtctacaccagtgctgcttcctgaatgtttgtgtgtgaacccttgtttcctccaaaacaaacgacagcaacgaaaactccttaatcagaacactgatccaatgaggaatggagcttgtttctgtgacccaggagaacttagtgcaagactacaggagttaacagatggccagctccttattttttaatgtagaataactcctgagtttatatcaaatcctgaagaaataagcctcagttttccatctgtttttgataagaataagaaagggagtgagtgtgaagatggtggttagcagtttcactaagactgatattttaggcctcttgttcacatcaaaagatattggtgtcagaataccagcattttcctgccatgcaaaggattaaaacttagtttacactatgtggttacaaatatatgtcaatgtacattttgaacatatttatgtgctatggaaggaaatgctggtgactaaaataaggtttactctgaaagaggaggaattttattcaaagcattcaaacattttattcaagtgtttcaaaattcaaagcattgtattcaaagttgcagtgaaggcatcaacttatgtaaaaactcagaaggaaggctcctctgataaaaacacagctcctttattatgctgcttttcttgttcactttacacactaagtaaacacttattgtcaggtgcctagtcttgagtgaattgttagatgtgcactgaactcgggatgttggggattggagagagagaattgccaaagtaacagcaaaaatatctcttactttgctttgtttataaataaattagtagattggaaaaactagtgttagggaaagaaatcacatgttcagagcctaattcagtaggaagggcttttctctaccctgaaatgaaggtaatccaaaggcatccattttctaggcttaaaagatatatttttgatatatttaattatattctctacactccagcattaatatgtctgtttaaaaattactaattctcaaatggctcaagaacattagaatttaagtaccttttagagtaattattttaagcaaatagcctggacgtaagagattctcatgccagcatgctttcatttgtcagttgttgtgactgagagataatgaatgacacctgaaatgcatatggtattttgggagagttaaggtataatttgaaggttggcagaccagttgcgctgattactcttagagaagaagaaatggaaaaatgaaagaaggcaggaaggaaagaaaggatataggaagagagggaagcagaaggcaggcatttttctattttccccacaaattatttcaaaaaaaatctgtattttctgggatatgtcattggcaagaggaagaactggtgttttgaaagcagtatggattctttaaatgcctctcactcttacaagatagtaggctttgagataataaacttacccgtgtcaattaacatttaaactggcatatagaaaaaaaggaggatttttctgcattgtaaaataatcagtatggtttatatgttgaatttgacatttgtgtgtaatttcatggtggcctagtgttgtggtgcttctggtaatggtaatagaagctcaactatttttttgtggatttcagtttttatcatcagaagtcctagacagtgacatttcttaatggtgggagtccagctcatgcatttctgattatacaaaacagtttgcagtaggttatttgtcatttcagttttttactgaaatttgagctaaacatttttacatgtaaatacttgtatttaccaaagatttaaatcagttgattaattaattaactcaaatactgtgaactatctttaaaacactagaaaaaagaaatgttagtatctcaattacaccaactgtgcaaatgaactttgataaaatagaaataatctacattggcctttgtgaaatctggggaagagctttaggattctagtagatggatactgaatactcaggcccacttaaattattaatgtatacattgtgtttttgtctttatgctatgtacagagaaatgtgataattttttataataaatattttttatgatgataaaagaaaaaaaaaaaaaag

SEQ ID NO: 87869 - DNA, 2210 bp, Homo sapiens
gatagccgttctagagtatacccgtctgcatcttctgaatgctgaagatgtgaagagggacactcaggacactttacgggatcaaagtgggtctacaccagtgctgcttcctgaatgtttgtgtgtgaacccttgtttcctccaaaacaaacgacagcaacgaaaactccttaatcagaacactgatccaatgaggaatggagcttgtttctgtgacccaggagaacttagtgcaagactacaggagttaacagatggccagctccttattttttaatgtagaataactcctgagtttatatcaaatcctgaagaaataagcctcagttttccatctgtttttgataagaataagaaagggagtgagtgtgaagatggtggttagcagtttcactaagactgatattttaggcctcttgttcacatcaaaagatattggtgtcagaataccagcattttcctgccatgcaaaggattaaaacttagtttacactatgtggttacaaatatatgtcaatgtacattttgaacatatttatgtgctatggaaggaaatgctggtgactaaaataaggtttactctgaaagaggaggaattttattcaaagcattcaaacattttattcaagtgtttcaaaattcaaagcattgtattcaaagttgcagtgaaggcatcaacttatgtaaaaactcagaaggaaggctcctctgataaaaacacagctcctttattatgctgcttttcttgttcactttacacactaagtaaacacttattgtcaggtgcctagtcttgagtgaattgttagatgtgcactgaactcgggatgttggggattggagagagagaattgccaaagtaacagcaaaaatatctcttactttgctttgtttataaataaattagtagattggaaaaactagtgttagggaaagaaatcacatgttcagagcctaattcagtaggaagggcttttctctaccctgaaatgaaggtaatccaaaggcatccattttctaggcttaaaagatatatttttgatatatttaattatattctctacactccagcattaatatgtctgtttaaaaattactaattctcaaatggctcaagaacattagaatttaagtaccttttagagtaattattttaagcaaatagcctggacgtaagagattctcatgccagcatgctttcatttgtcagttgttgtgactgagagataatgaatgacacctgaaatgcatatggtattttgggagagttaaggtataatttgaaggttggcagaccagttgcgctgattactcttagagaagaagaaatggaaaaatgaaagaaggcaggaaggaaagaaaggatataggaagagagggaagcagaaggcaggcatttttctattttccccacaaattatttcaaaaaaaatctgtattttctgggatatgtcattggcaagaggaagaactggtgttttgaaagcagtatggattctttaaatgcctctcactcttacaagatagtaggctttgagataataaacttacccgtgtcaattaacatttaaactggcatatagaaaaaaaggaggatttttctgcattgtaaaataatcagtatggtttatatgttgaatttgacatttgtgtgtaatttcatggtggcctagtgttgtggtgcttctggtaatggtaatagaagctcaactatttttttgtggatttcagtttttatcatcagaagtcctagacagtgacatttcttaatggtgggagtccagctcatgcatttctgattatacaaaacagtttgcagtaggttatttgtcatttcagttttttactgaaatttgagctaaacatttttacatgtaaatacttgtatttaccaaagatttaaatcagttgattaattaattaactcaaatactgtgaactatctttaaaacactagaaaaaagaaatgttagtatctcaattacaccaactgtgcaaatgaactttgataaaatagaaataatctacattggcctttgtgaaatctggggaagagctttaggattctagtagatggatactgaatactcaggcccacttaaattattaatgtatacattgtgtttttgtctttatgctatgtacagagaaatgtgataattttttataataaatattttttatgatgataaaagaaaaaaaaaaaaaag

SEQ ID NO: 87870 - DNA, 2338 bp, Homo sapiens
ctctgaatgtattttgagtaataacttcaagtgcaaattatgccatgcataatttctttggtctcatgtttttccccccttttcttttaggctttgtcttctgagtctatagaaaaacttccagtttttaacaagtcagccttcaaacattatcagatgagctctgaggctgatgactggtgtatcccaagcagggaaccaaagaacctggcaaaagaagtggccatgtgaagagggacactcaggacactttacgggatcaaagtgggtctacaccagtgctgcttcctgaatgtttgtgtgtgaacccttgtttcctccaaaacaaacgacagcaacgaaaactccttaatcagaacactgatccaatgaggaatggagcttgtttctgtgacccaggagaacttagtgcaagactacaggagttaacagatggccagctccttattttttaatgtagaataactcctgagtttatatcaaatcctgaagaaataagcctcagttttccatctgtttttgataagaataagaaagggagtgagtgtgaagatggtggttagcagtttcactaagactgatattttcctgccatgcaaaggattaaaacttagtttacactatgtggttacaaatatatgtcaatgtacattttgaacatatttatgtgctatggaaggaaatgctggtgactaaaataaggtttactctgaaagaggaggaattttattcaaagcattcaaacattttattcaagtgtttcaaaattcaaagcattgtattcaaagttgcagtgaaggcatcaacttatgtaaaaactcagaaggaaggctcctctgataaaaacacagctcctttattatgctgcttttcttgttcactttacacactaagtaaacacttattgtcaggtgcctagtcttgagtgaattgttagatgtgcactgaactcgggatgttggggattggagagagagaattgccaaagtaacagcaaaaatatctcttactttgctttgtttataaataaattagtagattggaaaaactagtgttagggaaagaaatcacatgttcagagcctaattcagtaggaagggcttttctctaccctgaaatgaaggtaatccaaaggcatccattttctaggcttaaaagatatatttttgatatatttaattatattctctacactccagcattaatatgtctgtttaaaaattactaattctcaaatggctcaagaacattagaatttaagtaccttttagagtaattattttaagcaaatagcctggacgtaagagattctcatgccagcatgctttcatttgtcagttgttgtgactgagagataatgaatgacacctgaaatgcatatggtattttgggagagttaaggtataatttgaaggttggcagaccagttgcgctgattactcttagagaagaagaaatggaaaaatgaaagaaggcaggaaggaaagaaaggatataggaagagagggaagcagaaggcaggcatttttctattttccccacaaattatttcaaaaaaaatctgtattttctgggatatgtcattggcaagaggaagaactggtgttttgaaagcagtatggattctttaaatgcctctcactcttacaagatagtaggctttgagataataaacttacccgtgtcaattaacatttaaactggcatatagaaaaaaaggaggatttttctgcattgtaaaataatcagtatggtttatatgttgaatttgacatttgtgtgtaatttcatggtggcctagtgttgtggtgcttctggtaatggtaatagaagctcaactatttttttgtggatttcagtttttatcatcagaagtcctagacagtgacatttcttaatggtgggagtccagctcatgcatttctgattatacaaaacagtttgcagtaggttatttgtcatttcagttttttactgaaatttgagctaaacatttttacatgtaaatacttgtatttaccaaagatttaaatcagttgattaattaattaactcaaatactgtgaactatctttaaaacactagaaaaaagaaatgttagtatctcaattacaccaactgtgcaaatgaactttgataaaatagaaataatctacattggcctttgtgaaatctggggaagagctttaggattctagtagatggatactgaatactcaggcccacttaaattattaatgtatacattgtgtttttgtctttatgctatgtacagagaaatgtgataattttttataataaatattttttatgatgataaaagaaaaaaaaaaaaaag

SEQ ID NO: 87871 - DNA, 3567 bp, Homo sapiens
agcggaagacttgaacttgaatctcgaaccactgcatctccgactctgcccagactcttcactccgcggcaccctcaaaccccagcccaggccggggcgcacaagccagccagcgcacctgcagtcctcgcccggacgcgccgcgccccctcggaaccaggctctgctccgagcagccttcgcccctcaagccagccacagtccccgccaggccgggtgggcgtcaagatgaaggcggcccgcttcgtgctgcgcagcgctggctcgctcaacggcgccggcctggtgccccgagaggtggagcatttctcgcgctacagcccgtccccgctgtccatgaagcagctactggactttggttcagaaaatgcatgtgaaagaacttcttttgcatttttgcgacaagaattgcctgtgagactcgccaacattctgaaggaaattgatatcctcccgacccaattagtaaatacctcttcagtgcaattggttaaaagctggtatatacagagcctgatggatttggtggaattccatgagaaaagcccagatgaccagaaagcattatcagactttgtagatacactcatcaaagttcgaaatagacaccataatgtagtccctacaatggcacaaggaatcatagagtataaagatgcctgtacagttgacccagtcaccaatcaaaatcttcaatatttcttggatcgattttacatgaaccgtatttctactcggatgctgatgaaccagcacattcttatatttagtgactcacagacaggaaacccaagccacattggaagcattgatcctaactgtgatgtggtagcagtggtccaagatgcctttgagtgttcaaggatgctctgtgatcagtattatttatcatctccagaattaaagcttacacaagtgaatggaaaatttccagaccaaccaattcacatcgtgtatgttccttctcacctccatcatatgctctttgaactatttaagaatgcaatgcgggcaacagttgaacaccaggaaaatcagccttcccttacaccaatagaggttattgttgtcttgggaaaagaagaccttaccattaagatttcagacagaggaggtggtgttcccctgagaattattgaccgcctctttagttatacatactccactgcaccaacgcctgtgatggataattcccggaatgctcctttggctggttttggttacggcttgccaatttctcgtctgtatgccaagtactttcaaggagatctgaatctctactctttatcaggatatggaacagatgctatcatctacttaaaggctttgtcttctgagtctatagaaaaacttccagtttttaacaagtcagccttcaaacattatcagatgagctctgaggctgatgactggtgtatcccaagcagggaaccaaagaacctggcaaaagaagtggccatgtgaagagggacactcaggacactttacgggatcaaagtgggtctacaccagtgctgcttcctgaatgtttgtgtgtgaacccttgtttcctccaaaacaaacgacagcaacgaaaactccttaatcagaacactgatccaatgaggaatggagcttgtttctgtgacccaggagaacttagtgcaagactacaggagttaacagatggccagctccttattttttaatgtagaataactcctgagtttatatcaaatcctgaagaaataagcctcagttttccatctgtttttgataagaataagaaagggagtgagtgtgaagatggtggttagcagtttcactaagactgatattttaggcctcttgttcacatcaaaagatattggtgtcagaataccagcattttcctgccatgcaaaggattaaaacttagtttacactatgtggttacaaatatatgtcaatgtacattttgaacatatttatgtgctatggaaggaaatgctggtgactaaaataaggtttactctgaaagaggaggaattttattcaaagcattcaaacattttattcaagtgtttcaaaattcaaagcattgtattcaaagttgcagtgaaggcatcaacttatgtaaaaactcagaaggaaggctcctctgataaaaacacagctcctttattatgctgcttttcttgttcactttacacactaagtaaacacttattgtcaggtgcctagtcttgagtgaattgttagatgtgcactgaactcgggatgttggggattggagagagagaattgccaaagtaacagcaaaaatatctcttactttgctttgtttataaataaattagtagattggaaaaactagtgttagggaaagaaatcacatgttcagagcctaattcagtaggaagggcttttctctaccctgaaatgaaggtaatccaaaggcatccattttctaggcttaaaagatatatttttgatatatttaattatattctctacactccagcattaatatgtctgtttaaaaattactaattctcaaatggctcaagaacattagaatttaagtaccttttagagtaattattttaagcaaatagcctggacgtaagagattctcatgccagcatgctttcatttgtcagttgttgtgactgagagataatgaatgacacctgaaatgcatatggtattttgggagagttaaggtataatttgaaggttggcagaccagttgcgctgattactcttagagaagaagaaatggaaaaatgaaagaaggcaggaaggaaagaaaggatataggaagagagggaagcagaaggcaggcatttttctattttccccacaaattatttcaaaaaaaatctgtattttctgggatatgtcattggcaagaggaagaactggtgttttgaaagcagtatggattctttaaatgcctctcactcttacaagatagtaggctttgagataataaacttacccgtgtcaattaacatttaaactggcatatagaaaaaaaggaggatttttctgcattgtaaaataatcagtatggtttatatgttgaatttgacatttgtgtgtaatttcatggtggcctagtgttgtggtgcttctggtaatggtaatagaagctcaactatttttttgtggatttcagtttttatcatcagaagtcctagacagtgacatttcttaatggtgggagtccagctcatgcatttctgattatacaaaacagtttgcagtaggttatttgtcatttcagttttttactgaaatttgagctaaacatttttacatgtaaatacttgtatttaccaaagatttaaatcagttgattaattaattaactcaaatactgtgaactatctttaaaacactagaaaaaagaaatgttagtatctcaattacaccaactgtgcaaatgaactttgatttctagtagatggatactgaatactcaggcccacttaaattattaatgtatacattgtgtttttgtctttatgctatgtacagagaaatgtgataattttttataataaatattttttatgatgataaaagaaaaaaaaaaaaaag

SEQ ID NO: 87872 - DNA, 2518 bp, Homo sapiens
agcggaagacttgaacttgaatctcgaaccactgcatctccgactctgcccagactcttcactccgcggcaccctcaaaccccagcccaggccggggcgcacaagccagccagcgcacctgcagtcctcgcccggacgcgccgcgccccctcggaaccaggctctgctccgagcagccttcgcccctcaagccagccacagtccccgccaggccgggtgggcgtcaagatgaaggcggcccgcttcgtgctgcgcagcgctggctcgctcaacggcgccggcctggtgccccgagaggtggagcatttctcgcgctacagcccgtccccgctgtccatgaagcagctactggactttggttcagaaaatgcatgtgaaagaacttcttttgcatttttgcgacaagaattgcctgtgagactcgccaacattctgaaggaaattgatatcctcccgacccaattagtaaatacctcttcagtgcaattggttaaaagctggtatatacagagcctgatggatttggtggaattccatgagaaaagcccagatgaccagaaagcattatcagactttgtagatacactcatcaaagttcgaaatagacaccataatgtagtccctacaatggcacaaggaatcatagagtataaagatgcctgtacagttgacccagtcaccaatcaaaatcttcaatatttcttggatcgattttacatgaaccgtatttctactcggatgctgatgaaccagcacattcttatatttagtgactcacagacaggaaacccaagccacattggaagcattgatcctaactgtgatgtggtagcagtggtccaagatgcctttgagtgttcaaggatgctctgtgatcagtattatttatcatctccagaattaaagcttacacaagtgaatggaaaatttccagaccaaccaattcacatcgtgtatgttccttctcacctccatcatatgctctttgaactatttaagaatgcaatgcgggcaacagttgaacaccaggaaaatcagccttcccttacaccaatagaggttattgttgtcttgggaaaagaagaccttaccattaagatttcagacagaggaggtggtgttcccctgagaattattgaccgcctctttagttatacatactccactgcaccaacgcctgtgatggataattcccggaatgctcctttggctggttttggttacggcttgccaatttctcgtctgtatgccaagtactttcaaggagatctgaatctctactctttatcaggatatggaacagatgctatcatctacttaaaggctttgtcttctgagtctatagaaaaacttccagtttttaacaagtcagccttcaaacattatcagatgagctctgaggctgatgactggtgtatcccaagcagggaaccaaagaacctggcaaaagaagtggccatgtgaagagggacactcaggacactttacgggatcaaagtgggtctacaccagtgctgcttcctgaatgtttgtgtgtgaacccttgtttcctccaaaacaaacgacagcaacgaaaactccttaatcagaacactgatccaatgaggaatggagcttgtttctgtgacccaggagaacttagtgcaagactacaggagttaacagatggccagctccttattttttaatgtagaataactcctgagtttatatcaaatcctgaagaaataagcctcagttttccatctgtttttgataagaataagaaagggagtgagtgtgaagatggtggttagcagtttcactaagactgatattttaggcctcttgttcacatcaaaagatattggtgtcagaataccagcattttcctgccatgcaaaggattaaaacttagtttacactatgtggttacaaatatatgtcaatgtacattttgaacatatttatgtgctatggaaggaaatgctggtgactaaaataaggtttactctgaaagaggaggaattttattcaaagcattcaaacattttattcaagtgtttcaaaattcaaagcattgtattcaaagttgcagtgaaggcatcaacttatgtaaaaactcagaaggaaggctcctctgataaaaacacagctcctttattatgctgcttttcttgttcactttacacactaagtaaacacttattgtcaggtgcctagtcttgagtgaattgttagatgtgcactgaactcgggatgttggggattggagagagagaattgccaaagtaacagcaaaaatatctctactggctggtataataattgtgatggaaactagttgggagaaatactgttcgagcctatcaggggaggggtttctaccggaataagtatccaggtcattcaggtaagaatatttgaataaatttctacccgctaagtggtaaaataatcaggcaaaaaaacggatattaaaggggaactccttgtgggaaaacacttaggaggcacaaaagggttggcgtgtacgtga

SEQ ID NO: 87873 - DNA, 634 bp, Homo sapiens
atgatattagatattaatcattattttataaagagaagacttaatgaatacatctgatgaatgcattggttataaggctaatagttttacatataagctagaaacaaaatgagtctgtttgtgaaattatctcctctactctagtggaagaatctgtagtgagattactaataaaggactaatgttttatcatttgatttgttcagatgggtaatgcaaaaaaaactttagccttctgtgaagtaaccttaggagtataagtgaatgaaacgtatttgaacttttactaaccataaatattgtggcttagctttgtagatacactcatcaaagttcgaaatagacaccataatgtagtccctacaatggcacaaggaatcatagagtataaagatgcctgtacagttgacccagtcaccaatcaaaatcttcaatatttcttggatcgattttacatgaaccgtatttctactcggatgctgatgaaccagcacagtaagttagctcatcatgatcatggtatatagacatgggtgtagaatataagccatactataactagatgtctcactaatcagcgggtcacattctcagtgatagtactaatcattatcctgaattttataacaatttt

SEQ ID NO: 87874 - DNA, 1706 bp, Homo sapiens
agcggaagacttgaacttgaatctcgaaccactgcatctccgactctgcccagactcttcactccgcggcaccctcaaaccccagcccaggccggggcgcacaagccagccagcgcacctgcagtcctcgcccggacgcgccgcgccccctcggaaccaggctctgctccgagcagccttcgcccctcaagccagccacagtccccgccaggccgggtgggcgtcaagatgaaggcggcccgcttcgtgctgcgcagcgctggctcgctcaacggcgccggcctggtgccccgagaggtggagcatttctcgcgctacagcccgtccccgctgtccatgaagcagctactggactttggttcagaaaatgcatgtgaaagaacttcttttgcatttttgcgacaagaattgcctgtgagactcgccaacattctgaaggaaattgatatcctcccgacccaattagtaaatacctcttcagtgcaattggttaaaagctggtaagtggtgaaccatattgaagtctctagttttgaaacagttacccgggtatgaattcttatactatgttaacatcataattggaaaacaggtgatctgaatggtaactacttttgaaagatgtaagaattttaaaattaatttagggtaagttatcattagagaagttataaaactataaacagacatttttaccctgaaaaagtagattactttataataaaattttgagttctaggaaaaatttgaaaaaaattggcatgcaattttaattttcaattatagaagagcactttcaataataaaagagtttgatattgcaaaagaaatcctatgcctagaaaccaattcacatgactgctatttagggaaggcctaatctttgtaacttacaaagtgattgacagagtgggctctgggttcaaatcctgcctctgtcacttctagttgtggaatccttggcaagtgtcttaaactctttatgccattgagttattattcccatctgttattaaagagattaaagtatatgcctcagagggatgtttgagtgtaatgaaatgagataatccataaaaaagaaaaaaaaaaaccacttaggacagcacttggcacacagccagcagtcagtaagtgtcagttgttgtcatctcattttataaatgaagatactgatgcttagagaaggtaggtaacccaaaacagcaaatttttgggtcacagaagcaggatatgcacaggtagcagacatgcatgagacccttatcttaatccactgactgcacagccttttgttcattgattcaagaaatacatgtattatatacctataagacaattacaatctaaaacatatattcaatctgtagtatttactattgcagtcaagacttacactcttctatgaatgaatgtagtagaaaaaaaataaaaagctttaaaaaaagttgtttctaagtattattgctagaagaaatgaaaatatttgccaaacaaaacagtcaggaaactgaatactgacctgaaatagttaaagaaacattttgcgttaaattttaagtttgaaagtcaaggattaaaagttatagcattttaaatttatattattttccaaatgttctggaggaaagttttaagtttgaacataatgcttactttctcttttcaaattatttgaaaaagctattctattttcagccatttgt

SEQ ID NO: 87875 - DNA, 3571 bp, Homo sapiens
agcggaagacttgaacttgaatctcgaaccactgcatctccgactctgcccagactcttcactccgcggcaccctcaaaccccagcccaggccggggcgcacaagccagccagcgcacctgcagtcctcgcccggacgcgccgcgccccctcggaaccaggctctgctccgagcagccttcgcccctcaagccagccacagtccccgccaggccgggtgggcgtcaagatgaaggcggcccgcttcgtgctgcgcagcgctggctcgctcaacggcgccggcctggtgccccgagaggtggagcatttctcgcgctacagcccgtccccgctgtccatgaagcagctactggactttggttcagaaaatgcatgtgaaagaacttcttttgcatttttgcgacaagaattgcctgtgagactcgccaacattctgaaggaaattgatatcctcccgacccaattagtaaatacctcttcagtgcaattggttaaaagctggtatatacagagcctgatggatttggtggaattccatgagaaaagcccagatgaccagaaagcattatcagactttgtagatacactcatcaaagttcgaaatagacaccataatgtagtccctacaatggcacaaggaatcatagagtataaagatgcctgtacagttgacccagtcaccaatcaaaatcttcaatatttcttggatcgattttacatgaaccgtatttctactcggatgctgatgaaccagcacattcttatatttagtgactcacagacaggaaacccaagccacattggaagcattgatcctaactgtgatgtggtagcagtggtccaagatgcctttgagtgttcaaggatgctctgtgatcagtattatttatcatctccagaattaaagcttacacaagtgaatggaaaatttccagaccaaccaattcacatcgtgtatgttccttctcacctccatcatatgctctttgaactatttaagaatgcaatgcgggcaacagttgaacaccaggaaaatcagccttcccttacaccaatagaggttattgttgtcttgggaaaagaagaccttaccattaagatttcagacagaggaggtggtgttcccctgagaattattgaccgcctctttagttatacatactccactgcaccaacgcctgtgatggataattcccggaatgctcctttggctggttttggttacggcttgccaatttctcgtctgtatgccaagtactttcaaggagatctgaatctctactctttatcaggatatggaacagatgctatcatctacttaaaggctttgtcttctgagtctatagaaaaacttccagtttttaacaagtcagccttcaaacattatcagatgagctctgaggctgatgactggtgtatcccaagcagggaaccaaagaacctggcaaaagaagtggccatgtgaagagggacactcaggacactttacgggatcaaagtgggtctacaccagtgctgcttcctgaatgtttgtgtgtgaacccttgtttcctccaaaacaaacgacagcaacgaaaactccttaatcagaacactgatccaatgaggaatggagcttgtttctgtgacccaggagaacttagtgcaagactacaggagttaacagatggccagctccttattttttaatgtagaataactcctgagtttatatcaaatcctgaagaaataagcctcagttttccatctgtttttgataagaataagaaagggagtgagtgtgaagatggtggttagcagtttcactaagactgatattttcctgccatgcaaaggattaaaacttagtttacactatgtggttacaaatatatgtcaatgtacattttgaacatatttatgtgctatggaaggaaatgctggtgactaaaataaggtttactctgaaagaggaggaattttattcaaagcattcaaacattttattcaagtgtttcaaaattcaaagcattgtattcaaagttgcagtgaaggcatcaacttatgtaaaaactcagaaggaaggctcctctgataaaaacacagctcctttattatgctgcttttcttgttcactttacacactaagtaaacacttattgtcaggtgcctagtcttgagtgaattgttagatgtgcactgaactcgggatgttggggattggagagagagaattgccaaagtaacagcaaaaatatctcttactttgctttgtttataaataaattagtagattggaaaaactagtgttagggaaagaaatcacatgttcagagcctaattcagtaggaagggcttttctctaccctgaaatgaaggtaatccaaaggcatccattttctaggcttaaaagatatatttttgatatatttaattatattctctacactccagcattaatatgtctgtttaaaaattactaattctcaaatggctcaagaacattagaatttaagtaccttttagagtaattattttaagcaaatagcctggacgtaagagattctcatgccagcatgctttcatttgtcagttgttgtgactgagagataatgaatgacacctgaaatgcatatggtattttgggagagttaaggtataatttgaaggttggcagaccagttgcgctgattactcttagagaagaagaaatggaaaaatgaaagaaggcaggaaggaaagaaaggatataggaagagagggaagcagaaggcaggcatttttctattttccccacaaattatttcaaaaaaaatctgtattttctgggatatgtcattggcaagaggaagaactggtgttttgaaagcagtatggattctttaaatgcctctcactcttacaagatagtaggctttgagataataaacttacccgtgtcaattaacatttaaactggcatatagaaaaaaaggaggatttttctgcattgtaaaataatcagtatggtttatatgttgaatttgacatttgtgtgtaatttcatggtggcctagtgttgtggtgcttctggtaatggtaatagaagctcaactatttttttgtggatttcagtttttatcatcagaagtcctagacagtgacatttcttaatggtgggagtccagctcatgcatttctgattatacaaaacagtttgcagtaggttatttgtcatttcagttttttactgaaatttgagctaaacatttttacatgtaaatacttgtatttaccaaagatttaaatcagttgattaattaattaactcaaatactgtgaactatctttaaaacactagaaaaaagaaatgttagtatctcaattacaccaactgtgcaaatgaactttgataaaatagaaataatctacattggcctttgtgaaatctggggaagagctttaggattctagtagatggatactgaatactcaggcccacttaaattattaatgtatacattgtgtttttgtctttatgctatgtacagagaaatgtgataattttttataataaatattttttatgatgataaaagaaaaaaaaaaaaaag

SEQ ID NO: 87876 - DNA, 3560 bp, Homo sapiens
agcggaagacttgaacttgaatctcgaaccactgcatctccgactctgcccagactcttcactccgcggcaccctcaaaccccagcccaggccggggcgcacaagccagccagcgcacctgcagtcctcgcccggacgcgccgcgccccctcggaaccaggctctgctccgagcagccttcgcccctcaagccagccacagtccccgccaggccgggtgggcgtcaagatgaaggcggcccgcttcgtgctgcgcagcgctggctcgctcaacggcgccggcctggtgccccgagaggtggagcatttctcgcgctacagcccgtccccgctgtccatgaagcagctactggactttgactcgccaacattctgaaggaaattgatatcctcccgacccaattagtaaatacctcttcagtgcaattggttaaaagctggtatatacagagcctgatggatttggtggaattccatgagaaaagcccagatgaccagaaagcattatcagactttgtagatacactcatcaaagttcgaaatagacaccataatgtagtccctacaatggcacaaggaatcatagagtataaagatgcctgtacagttgacccagtcaccaatcaaaatcttcaatatttcttggatcgattttacatgaaccgtatttctactcggatgctgatgaaccagcacattcttatatttagtgactcacagacaggaaacccaagccacattggaagcattgatcctaactgtgatgtggtagcagtggtccaagatgcctttgagtgttcaaggatgctctgtgatcagtattatttatcatctccagaattaaagcttacacaagtgaatggaaaatttccagaccaaccaattcacatcgtgtatgttccttctcacctccatcatatgctctttgaactatttaagaatgcaatgcgggcaacagttgaacaccaggaaaatcagccttcccttacaccaatagaggttattgttgtcttgggaaaagaagaccttaccattaagatttcagacagaggaggtggtgttcccctgagaattattgaccgcctctttagttatacatactccactgcaccaacgcctgtgatggataattcccggaatgctcctttggctggttttggttacggcttgccaatttctcgtctgtatgccaagtactttcaaggagatctgaatctctactctttatcaggatatggaacagatgctatcatctacttaaaggctttgtcttctgagtctatagaaaaacttccagtttttaacaagtcagccttcaaacattatcagatgagctctgaggctgatgactggtgtatcccaagcagggaaccaaagaacctggcaaaagaagtggccatgtgaagagggacactcaggacactttacgggatcaaagtgggtctacaccagtgctgcttcctgaatgtttgtgtgtgaacccttgtttcctccaaaacaaacgacagcaacgaaaactccttaatcagaacactgatccaatgaggaatggagcttgtttctgtgacccaggagaacttagtgcaagactacaggagttaacagatggccagctccttattttttaatgtagaataactcctgagtttatatcaaatcctgaagaaataagcctcagttttccatctgtttttgataagaataagaaagggagtgagtgtgaagatggtggttagcagtttcactaagactgatattttaggcctcttgttcacatcaaaagatattggtgtcagaataccagcattttcctgccatgcaaaggattaaaacttagtttacactatgtggttacaaatatatgtcaatgtacattttgaacatatttatgtgctatggaaggaaatgctggtgactaaaataaggtttactctgaaagaggaggaattttattcaaagcattcaaacattttattcaagtgtttcaaaattcaaagcattgtattcaaagttgcagtgaaggcatcaacttatgtaaaaactcagaaggaaggctcctctgataaaaacacagctcctttattatgctgcttttcttgttcactttacacactaagtaaacacttattgtcaggtgcctagtcttgagtgaattgttagatgtgcactgaactcgggatgttggggattggagagagagaattgccaaagtaacagcaaaaatatctcttactttgctttgtttataaataaattagtagattggaaaaactagtgttagggaaagaaatcacatgttcagagcctaattcagtaggaagggcttttctctaccctgaaatgaaggtaatccaaaggcatccattttctaggcttaaaagatatatttttgatatatttaattatattctctacactccagcattaatatgtctgtttaaaaattactaattctcaaatggctcaagaacattagaatttaagtaccttttagagtaattattttaagcaaatagcctggacgtaagagattctcatgccagcatgctttcatttgtcagttgttgtgactgagagataatgaatgacacctgaaatgcatatggtattttgggagagttaaggtataatttgaaggttggcagaccagttgcgctgattactcttagagaagaagaaatggaaaaatgaaagaaggcaggaaggaaagaaaggatataggaagagagggaagcagaaggcaggcatttttctattttccccacaaattatttcaaaaaaaatctgtattttctgggatatgtcattggcaagaggaagaactggtgttttgaaagcagtatggattctttaaatgcctctcactcttacaagatagtaggctttgagataataaacttacccgtgtcaattaacatttaaactggcatatagaaaaaaaggaggatttttctgcattgtaaaataatcagtatggtttatatgttgaatttgacatttgtgtgtaatttcatggtggcctagtgttgtggtgcttctggtaatggtaatagaagctcaactatttttttgtggatttcagtttttatcatcagaagtcctagacagtgacatttcttaatggtgggagtccagctcatgcatttctgattatacaaaacagtttgcagtaggttatttgtcatttcagttttttactgaaatttgagctaaacatttttacatgtaaatacttgtatttaccaaagatttaaatcagttgattaattaattaactcaaatactgtgaactatctttaaaacactagaaaaaagaaatgttagtatctcaattacaccaactgtgcaaatgaactttgataaaatagaaataatctacattggcctttgtgaaatctggggaagagctttaggattctagtagatggatactgaatactcaggcccacttaaattattaatgtatacattgtgtttttgtctttatgctatgtacagagaaatgtgataattttttataataaatattttttatgatgataaaagaaaaaaaaaaaaaag

SEQ ID NO: 87877 - DNA, 3122 bp, Homo sapiens
agcggaagacttgaacttgaatctcgaaccactgcatctccgactctgcccagactcttcactccgcggcaccctcaaaccccagcccaggccggggcgcacaagccagccagcgcacctgcagtcctcgcccggacgcgccgcgccccctcggaaccaggctctgctccgagcagccttcgcccctcaagccagccacagtccccgccaggccgggtgggcgtcaagatgaaggcggcccgcttcgtgctgcgcagcgctggctcgctcaacggcgccggcctggtgccccgagaggtggagcatttctcgcgctacagcccgtccccgctgtccatgaagcagctactggactttggttcagaaaatgcatgtgaaagaacttcttttgcatttttgcgacaagaattgcctgtgagactcgccaacattctgaaggaaattgatatcctcccgacccaattagtaaatacctcttcagtgcaattggttaaaagctggtatatacagagcctgatggatttggtggaattccatgagaaaagcccagatgaccagaaagcattatcagactttgtagatacactcatcaaagttcgaaatagacaccataatgtagtccctacaatggcacaaggaatcatagagtataaagatgcctgtacagttgacccagtcaccaatcaaaatcttcaatatttcttggatcgattttacatgaaccgtatttctactcggatgctgatgaaccagcacattcttatatttagtgactcacagacaggaaacccaagccacattggaagcattgatcctaactgtgatgtggtagcagtggtccaagatgcctttgagtgttcaaggatgctctgtgatcagtattatttatcatctccagaattaaagcttacacaagtgaatggaaaatttccagaccaaccaattcacatcgtgtatgttccttctcacctccatcatatgctctttgaactatttaagaatgcaatgcgggcaacagttgaacaccaggaaaatcagccttcccttacaccaatagaggttattgttgtcttgggaaaagaagaccttaccattaagatttcagacagaggaggtggtgttcccctgagaattattgaccgcctctttagttatacatactccactgcaccaacgcctgtgatggataattcccggaatgctcctttggctggttttggttacggcttgccaatttctcgtctgtatgccaagtactttcaaggagatctgaatctctactctttatcaggatatggaacagatgctatcatctacttaaaggctttgtcttctgagtctatagaaaaacttccagtttttaacaagtcagccttcaaacattatcagatgagctctgaggctgatgactggtgtatcccaagcagggaaccaaagaacctggcaaaagaagtggccatgtgaagagggacactcaggacactttacgggatcaaagtgggtctacaccagtgctgcttcctgaatgtttgtgtgtgaacccttgtttcctccaaaacaaacgacagcaacgaaaactccttaatcagaacactgatccaatgaggaatggagcttgtttctgtgacccaggagaacttagtgcaagactacaggagttaacagatggccagctccttattttttaatgtagaataactcctgagtttatatcaaatcctgaagaaataagcctcagttttccatctgtttttgataagaataagaaagggagtgagtgtgaagatggtggttagcagtttcactaagactgatattttaggcctcttgttcacatcaaaagatattggtgtcagaataccagcattttcctgccatgcaaaggattaaaacttagtttacactatgtggttacaaatatatgtcaatgtacattttgaacatatttatgtgctatggaaggaaatgctggtgactaaaataaggtttactctgaaagaggaggaattttattcaaagcattcaaacattttattcaagtgtttcaaaattcaaagcattgtattcaaagttgcagtgaaggcatcaacttatgtaaaaactcagaaggaaggctcctctgataaaaacacagctcctttattatgctgcttttcttgttcactttacacactaagtaaacacttattgtcaggtgcctagtcttgagtgaattgttagatgtgcactgaactcgggatgttggggattggagagagagaattgccaaagtaacagcaaaaatatctcttactttgctttgtttataaataaattagtagattggaaaaactagtgttagggaaagaaatcacatgttcagagcctaattcagtaggaagggcttttctctaccctgaaatgaaggtaatccaaaggcatccattttctaggcttaaaagatatatttttgatatatttaattatattctctacactccagcattaatatgtctgtttaaaaattactaattctcaaatggctcaagaacattagaatttaagtaccttttagagtaattattttaagcaaatagcctggacgtaagagattctcatgccagcatgctttcatttgtcagttgttgtgactgagagataatgaatgacacctgaaatgcatatggtattttgggagagttaaggtataatttgaaggttggcagaccagttgcgctgattactcttagagaagaagaaatggaaaaatgaaagaaggcaggaaaaaaaaaaaaaaaaaaaaaaaaaattgggggggggcttgggccctggaaaagttttctcgaaaaacccactccgttgggaggcggcgcgggccccccagggaggtaaaggcgacacacgtgtggtcaaaagagggtggtccccagagggggagaacctcgggggacagaggaaaaagaggggccgtggggaattcctacacgccaatataaaaaaaacgccgcgaggggggcacaaccgggaggggttgtgggaaacacaagcccccacagaatgggggagctcggaaaagacacaataacggggaaatgtaatacacagggggagtcccagagagaagtccgaaattataaaattag

SEQ ID NO: 87878 - DNA, 1319 bp, Homo sapiens
agcggaagacttgaacttgaatctcgaaccactgcatctccgactctgcccagactcttcactccgcggcaccctcaaaccccagcccaggccggggcgcacaagccagccagcgcacctgcagtcctcgcccggacgcgccgcgccccctcggaaccaggctctgctccgagcagccttcgcccctcaagccagccacagtccccgccaggccgggtgggcgtcaagatgaaggcggcccgcttcgtgctgcgcagcgctggctcgctcaacggcgccggcctggtgccccgagaggtggagcatttctcgcgctacagcccgtccccgctgtccatgaagcagctactggactttggttcagaaaatgcatgtgaaagaacttcttttgcatttttgcgacaagaattgcctgtgagactcgccaacattctgaaggaaattgatatcctcccgacccaattagtaaatacctcttcagtgcaattggttaaaagctggtatatacagagcctgatggatttggtggaattccatgagaaaagcccagatgaccagaaagcattatcagactttgtagatacactcatcaaagttcgaaatagacaccataatgtagtccctacaatggcacaaggaatcatagagtataaagatgcctgtacagttgacccagtcaccaatcaaaatcttcaatatttcttggatcgattttacatgaaccgtatttctactcggatgctgatgaaccagcacattcttatatttagtgactcacagacaggaaacccaagccacattggaagcattgatcctaactgtgatgtggtagcagtggtccaagatgcctttgagtgttcaaggatgctctgtgatcagtattatttatcatctccagaattaaagcttacacaagtgaatggaaaatttccagaccaaccaattcacatcgtgtatgttccttctcacctccatcatatgctctttgaactatttaaggtatgatacttcacaataattgaaattttaccttttaaaaaggtttaacagttatatttttatctcctttattattcgccacaaaacagaagcctcaatatcttttcccaagaatgcttctagtcctcctaagagaaagaaactatacagtcaatgtttgacaaagtacatgtagctcattgtagcatcaacacatatttgagaatgcatcatacaattcatgatgtatcaatgctttacagccaagaggaagttcttattattttttcaggtgcccattaaagaactagtcatttattcattcattaagagaggtcatg

SEQ ID NO: 87879 - DNA, 1306 bp, Homo sapiens
ctaagaggtgttccccattcggcagccagactccttgaaataccctttcagtaatcattcaaccaacgcttccatgtctctactctgtcgtaacaaaggctgtgggcagcactttgaccctaataccaaccttcctgattcctgttgccatcaccctggggtcccaatcttccatgatgcacttaagggttggtcctgctgccgaaagcgaactgtagatttctctgagttcttaaacatcaagggctgtactatgggaccacactgtgctgagaagcttcctgaggcccctcaacctgaaggccctgctacaagcagttcacttcaggagcaaaaacctctgaatgtgattccaaagtcagcagagaccttgcgccgggagaggcccaagtcagagttgcctctgaagctgctgccgctaaatatatcccaagccctggaaatggcattggaacagaaggaattagaccaggaacctggggcaggacttgacagtctgatccggactggttccagctgccagaacccaggatgtgatgctgtttaccaaggccctgagagtgatgctactccatgtacctaccacccaggagcaccccgattccatgaggggatgaagtcttggagctgttgtggcatccagaccctggattttggggcattcttggcacaaccagggtgcagagtcggtagacatgactgggggaagcagctcccagcatcttgccgccatgattggcaccagacagattccttagtagtggtgactgtatatggccagattccacttcctgcgtttaactgggtgaaggccagtcaaactgagcttcatgtccacattgtctttgatggtaaccgtgtgttccaagcacagatgaagctctggggggtcataaacgtggagcagagctctgtcttcttgatgccatctcgggttgaaatctccctggtcaaggctgacccaggatcctgggcccagctggagcaccctgatgcactagctaagaaggctagggcaggggttgtgttagagatggatgaggaagaatctgacgattcagatgatgatctgagctggacagaggaggaggaagaggaggaagcaatgggggaatagtgacaccagacagttgatgtctagataggacctcaatgattcccttagaatcttagataccaggatattgttggccatgtggcatcattgagcagcaggaggctgaaggaggggagaacaaaattgtccaaaccatgctgtttttttcccttaaataaatcttgtattcttcagtttcaaaaaaaaaca

SEQ ID NO: 87880 - DNA, 1666 bp, Homo sapiens
ctaagaggtgttccccattcggcagccagactccttgaaataccctttcagtaatcattcaaccaacgcttccatgtctctactctgtcgtaacaaaggctgtgggcagcactttgaccctaataccaaccttcctgattcctgttgccatcaccctggggtcccaatcttccatgatgcacttaagggttggtcctgctgccgaaagcgaactgtagatttctctgagttcttaaacatcaagggctgtactatgggaccacactgtgctgagaagcttcctgaggcccctcaacctgaaggccctgctacaagcagttcacttcaggagcaaaaacctctgaatgtgattccaaagtcagcagagaccttgcgccgggagaggcccaagtcagagttgcctctgaagctgctgccgctaaatatatcccaagccctggaaatggcattggaacagaaggaattagaccaggaacctggggcaggacttgacagtctgatccggactggttccagctgccagaacccaggatgtgatgctgtttaccaaggccctgagagtgatgctactccatgtacctaccacccaggagcaccccgattccatgaggggatgaagtcttggagctgttgtggcatccagaccctggattttggggcattcttggcacaaccagggtgcagagtcggtagacatgactgggggaagcagctcccagcatcttgccgccatgattggcaccagacagattccttagtagtggtgactgtatatggccagattccacttcctgcgtttaactgggtgaaggccagtcaaactgagcttcatgtccacattgtctttgatggtaaccgtgtgttccaagcacagatgaagctctggggggtaagtgaagaccaggggacacaagagtgggaggcagatgggtgaaagagcggctagactggaatagagggtgtcttgagggaaggagttgtactaggaaaatggaggttttctcttcatttgctttcattttctctctctctcctactcttcctatttccctctttccctcccctcttccttctcccttttcatctctcatttctttcctctctctcccttattgtcttattcctcccttaccttttttcttaccttattaaaaatttctctctctcatttgtcaccactccaccctgaccccaatgcctttgatttcctcattctctctttcttctgttttcctttgctcctcctcaggtcataaacgtggagcagagctctgtcttcttgatgccatctcgggttgaaatctccctggtcaaggctgacccaggatcctgggcccagctggagcaccctgatgcactagctaagaaggctagggcaggggttgtgttagagatggatgaggaagaatctgacgattcagatgatgatctgagctggacagaggaggaggaagaggaggaagcaatgggggaatagtgacaccagacagttgatgtctagataggacctcaatgattcccttagaatcttagataccaggatattgttggccatgtggcatcattgagcagcaggaggctgaaggaggggagaacaaaattgtccaaaccatgctgtttttttcccttaaataaatcttgtattcttcagtttcaaaaaaaaaca

SEQ ID NO: 87881 - DNA, 2021 bp, Homo sapiens
ctaagaggtgttccccattcggcagccagactccttgaaataccctttcagtaatcattcaaccaacgcttccatgtctctactctgtcgtaacaaaggctgtgggcagcactttgaccctaataccaaccttcctgattcctgttgccatcaccctggggtcccaatcttccatgatgcacttaagggttggtcctgctgccgaaagcgaactgtagatttctctgagttcttaaacatcaagggctgtactatgggaccacactgtgctgagaagcttcctgaggcccctcaacctgaaggccctgctacaagcagttcacttcaggagcaaaaacctctgaatgtgattccaaagtcagcagagaccttgcgccgggagaggcccaagtcagagttgcctctgaagctgctgccgctaaatatatcccaagccctggaaatggcattggaacagaaggaattagaccaggaacctggggcaggacttgacagtctgatccggactggttccagctgccagaacccaggatgtgatgctgtttaccaaggccctgagagtgatgctactccatgtacctaccacccaggagcaccccgattccatgaggggtgagggaggggactgggtgggctatgaggctatgagacaggtttctcctaatatttggtcataagataatattgggggtgagagaattcagttgaattatcttcctacttcaggatgaagtcttggagctgttgtggcatccagaccctggattttggggcattcttggcacaaccagggtgcagagtcggtagacatgactgggggaagcagctcccagcatcttgccgccatgattggcaccagacagattccttagtagtggtgactgtatatggccagattccacttcctgcgtttaactgggtgaaggccagtcaaactgaggtgagcaatgatctgatgttggatgggaggatagtcaattgggtgatactacaatctcacaggcagagttgccatttgctgttaacctgtaggctccatagtacccttagaggaaaggagagttattaggtcagggctgtctggccaacctgtggatcatacctctgacctggttatctgtcgtaatgacctattctgaccttctgggtttgttactacccctgtaattcttttctctcagcttcatgtccacattgtctttgatggtaaccgtgtgttccaagcacagatgaagctctggggggtaagtgaagaccaggggacacaagagtgggaggcagatgggtgaaagagcggctagactggaatagagggtgtcttgagggaaggagttgtactaggaaaatggaggttttctcttcatttgctttcattttctctctctctcctactcttcctatttccctctttccctcccctcttccttctcccttttcatctctcatttctttcctctctctcccttattgtcttattcctcccttaccttttttcttaccttattaaaaatttctctctctcatttgtcaccactccaccctgaccccaatgcctttgatttcctcattctctctttcttctgttttcctttgctcctcctcaggtcataaacgtggagcagagctctgtcttcttgatgccatctcgggttgaaatctccctggtcaaggctgacccaggatcctgggcccagctggagcaccctgatgcactagctaagaaggctagggcaggggttgtgttagagatggatgaggaagaatctgacgattcagatgatgatctgagctggacagaggaggaggaagaggaggaagcaatgggggaatagtgacaccagacagttgatgtctagataggacctcaatgattcccttagaatcttagataccaggatattgttggccatgtggcatcattgagcagcaggaggctgaaggaggggagaacaaaattgtccaaaccatgctgtttttttcccttaaataaatcttgtattcttcagtttcaaaaaaaaaca

SEQ ID NO: 87882 - DNA, 606 bp, Homo sapiens
tgtagatttctctgagttcttaaacatcaaggtaaattatttatgtacttggattctgcccccaatagaaggattctatccctaatcctatctccttatctatactagggctgtactatgggaccacactgtgctgagaagcttcctgaggcccctcaacctgaaggccctgctacaagcagttcacttcaggagcaaaaacctctgaatgtgattccaaagtcagcagagaccttgcgccgggagaggcccaagtaaagaggaggaggcccctggacttttcttattttcatgtagcttcctaggagtgattaatgggtcattgaggactgggaactagggaccagggatgtgaggagggccagatgtcagggtttggatggtgtatatcctgtgccttaggggaaatttgtgtctggaaataacgccctttcctctaaggtggtgtgggatgatgggatagatacctgaatcaacagagtagatagcccctcacaaatacatccttagtgtataacacaaaagggattgttgagaatgacttctctttctagaaaagaactttaagataaatctcatatcaagaaaaggatgtattgtattatt

SEQ ID NO: 87883 - DNA, 284 bp, Homo sapiens
ccttccttgataacttctactgatgtccacagattcctgttgccatcaccctggggtcccaatcttccatgatgcacttaaggtgaggagtaggtgaggggggttagcaagagcatttcccagaagagataatacccaggaagctaagctgatctgggtctcttgttatcagggttggtcctgctgccgaaagcgaactgtagatttctctgagttcttaaacatcaaggtaaattatttatgtacttggattctgcccccaatagaaggattctatccctaat

SEQ ID NO: 87884 - DNA, 1053 bp, Homo sapiens
ctaagaggtgttccccattcggcagccagactccttgaaataccctttcagtaatcattcaaccaacgcttccatgtctctactctgtcgtaacaaaggctgtgggcagcactttgaccctaataccaaccttcctggtcagagttgcctctgaagctgctgccgctaaatatatcccaagccctggaaatggcattggaacagaaggaattagaccaggaacctggggcaggacttgacagtctgatccggactggttccagctgccagaacccaggatgtgatgctgtttaccaaggccctgagagtgatgctactccatgtacctaccacccaggagcaccccgattccatgaggggatgaagtcttggagctgttgtggcatccagaccctggattttggggcattcttggcacaaccagggtgcagagtcggtagacatgactgggggaagcagctcccagcatcttgccgccatgattggcaccagacagattccttagtagtggtgactgtatatggccagattccacttcctgcgtttaactgggtgaaggccagtcaaactgagcttcatgtccacattgtctttgatggtaaccgtgtgttccaagcacagatgaagctctggggggtcataaacgtggagcagagctctgtcttcttgatgccatctcgggttgaaatctccctggtcaaggctgacccaggatcctgggcccagctggagcaccctgatgcactagctaagaaggctagggcaggggttgtgttagagatggatgaggaagaatctgacgattcagatgatgatctgagctggacagaggaggaggaagaggaggaagcaatgggggaatagtgacaccagacagttgatgtctagataggacctcaatgattcccttagaatcttagataccaggatattgttggccatgtggcatcattgagcagcaggaggctgaaggaggggagaacaaaattgtccaaaccatgctgtttttttcccttaaataaatcttgtattcttcagtttcaaaaaaaaaca

SEQ ID NO: 87885 - DNA, 381 bp, Homo sapiens
gtaattcagtgcttgtgttttaacataaacttcaagtcacatgcatactaacactacttcatgagcaagaaattaccacgtctggttcattgacatttacttctgggaaccatttcaatcagattaattcatttatctaaataatcttccactcacttcacaacatcaaaactcaccaatacattttctgttgatgcttccaactttcctttttgtacagtgagaagcaagattaatttttacctggagttcacagactgggcacttattagagtatgagggaatgcaaataataacaacctctatcccaacagaacacaagaaaagggaaaaaagtagggcagatggagatgcaaatgtcaatctactactaatagggct

SEQ ID NO: 87886 - DNA, 704 bp, Homo sapiens
agcccagcctgcaaggaggcgccaccggacctgcacactcaggagcaggctcataaaatcccccagactcagctagattggaagagaggatgggaagacaatggatgacctacctgtggagagaaactacccattccagaacctcctctctgctgaaagctgaacactcaatgggaagacctgtttgcagagaggagccagccactccagggtctccgttctgctagaagctgaacactcgttgggacacccttgctgtggaaaggacatccttactgtggaaatgagctactaactgcaggagctgaggagctgcacagcaaggttaaaagagctgtaacacaaacagggctgcaacatgccccttgctccccacagggagagaagagctctggccctcggagaagcccagacctgggagctccttgagcccgggctgtgactccctctttggggccctggttggcgtcactgcattcgccagtgccactgttggaagctgcttgtgatgcgcctggtccagggggaagctgtttgttgtgtgcctggtccagccacctcatggagagcctgtgctggcacctggagctgcccaacctgggcagcagcttgtgtgtgtgactgcacagtggccacgcttgctcacacacccctagcacacccctctgctccacccgtctcaatctcccttggatccgggatcc

SEQ ID NO: 87887 - DNA, 349 bp, Homo sapiens
tgaggtttgagtgtttactggcatttgagttcttcagtactgcaccccaggtgatcttaggaaagaaaccatccactgtgggtacttctggcttctgtccagagaagattatcagctttggtccaaaaattgatttaaaagtagtttacttctttttctccaataaaatatttgccataatttaatgtctttaataccaacattttcttcatttcctatggtagccaggacaaatgaagtatttcagatctttcaaaaactcttaggatgaaaggtaggaatttggacttaggtttttaaaatagtgtgtatgtaaaagtgcaaagaatggggccctggctttctcttc

SEQ ID NO: 87888 - DNA, 390 bp, Homo sapiens
ctgacctcgtgatctgccctcctcagcctcccaaagtgctgggattacaggcgtgagccatctggccagtatcatggatttatgcatatttctccatacttctttgacctctttcccttgctccaaaagagtacattttaaagatgaatgataggatttaagctgcagcttggtttcatttgaacaacaacaaaaaatcagttcgtatacagggattgaatctgtgattttggcttccttttatacaatgctctaaccacatgagcctatcacattcaaatttatgctactcagaacttttaagctattaacttttccatcctaatgtagtgtaaatataaacatgccccatggtgtttcccagaaggttagcctcagcaagtgaaactt

SEQ ID NO: 87889 - DNA, 462 bp, Homo sapiens
gccccacaccccaaccatcagaggggactccaatgtctgcaactcaggacactgagcatacactaccctctattccacgcctctgtgtctctcagagccactaggggttcatgctgcaggcaagactttgaattcctaaagtaaaagaacatgaagacggacagttatcagaagcatctcattatatctagcagacgatttcctatcgaattcaagcaaactctgtaaatcaaacaatattttatgagcagtttagaaagctctgtggccctgccacaaatccttttgtgaagtgaagacatgcctggtactgtgataaggaatcctctaatgcaacaatgctgcaccctttctcaaagagaagcgttcttcatgtatggtatcaggacatgagaaagacccttactgctccctaaatggcttcctgaaggtgctcagggggcaacttgggtgtatcgggga

SEQ ID NO: 87890 - DNA, 334 bp, Homo sapiens
atgcccagctaatttttgtattttagtagagacagggtttcaccatgttggccaggctggtcttgaactcctgacctcaggtgatccgcctgccttggcctccccaagtgctaggattacaggcatgagccactgtgcccggcagagccaccgcgcccagcctcaatttctttctatttccttttttgagacggggtctggctctgttgcccaggctggagtgcagtggcacaatctcggctcactgcatccccccacttccacattggagtgattctcctacaggcatgcaccaccacacccaataaagcgaatggaccatcaaaaaaaaaaa

SEQ ID NO: 87891 - DNA, 396 bp, Homo sapiens
tttagaatatgactgtatttagacgtggggcctttaaagaggtaattaaggtaaaatgaggtctaatgggcaattcttaacctaatatgactggtgtccttttaagaagaggagacgaggacacagacaacactgaccaagggaagacagtatgaggacacaactagaaggcagccatctgtgagctaaggagagaagcgtcaggaaaaaacgaaactgctgtcacctcgatcttagacttctagcatccagaaccatgagaaaacaaatttctgctgttcaagccacccagtctgtggtgttttgttactgcagctctagcaaactaatatatcggtattttaaaatcgcacaaataatgtgccttgggatgggtctaactccattctttttttt

SEQ ID NO: 87892 - DNA, 1941 bp, Homo sapiens
acggaaagaggcagggcggtttactaaatcttatgcagtgaaaattcgccttagaaatcgaaggttggatgagtcagtattgatatattcaaaaatctaaatttcttagcatatttcatcgttcttagatgttgaaagtattaaatgtaaacaatacaaatttaaattccctaagtaatgaatcaaaatggcaagggagagagagagagagacggaaaatcaaccaattcgtagccaccctggctggctatttctcaaaagaaatttctatgcatttgcttgagtttgtctataaattcacaaacataaagggtgttaaaattagtaacagacaaaataattcaggttggacaatagagacagcaacaccgattttgatccaggtataacaatgggccatgcattgacaatgacctaaaagacatgtgttcattaagttattttttttacacgggatgtagatgtatcataaaattcatgaaataaagcggccaggtgcaatatcctcagagagctgccttctcaccccctgcctcagggcggattttatctgtcctcgaattttagaactctgcaagtcgggtctttcacattcatcgattactttggtttatatttaattttatccaatttcggagtgggtgggtaaagcacactggaaaataggggctgctcgaattacaaaatttaaggattgggaatattcctcttgtgccaattaaaagcagtcgttggaagcagaaatgaatttaaagcattacacgttatcatggcggccttgctttttccttccagtattcatccaattgcgctgatctcctgcatccacatcttgcgtaatccacaaagcagctatggtccagggctgcaaaatcgtcctgcctgattcctttagaattcatactacctcagaggagcaaacctaatcccctcagcctaatcctacctgtttaggatcatctaaacttgtccttcagaaagcttgatcagtttaaaattgctttctaaatagaaatgaaatacgtgatatgagagaggttaaaatactgcttaaaaagggaaacactcaatttagtaattcggttgcctagatgaaatcgagtggctattgatccgtgatgtttctagatttttaagactatgtacttcctatttctttggaaaataatcatccagtttgatgcccattacaaattttcctgctatgaaagaaattctatgcgcggcagttttgcaataaaacaacccgggcttcgcaatgggagaacttcggtgcggcgtgccgtgagagtcctttcacaatctcaactttcatctaggtctgaaattaaagcttctcggaataatttaggaacagcttgacccgttgagatactcaaggacaaccctccagggaaatagtatgtttccttcctgggaacaagatgctagcgcggtgcaccgggaggtatctggtgtcaacaatgccagagcgccctctgctgcctcaaagaggcaggacaccagttacaaaagccagatggcacagtggcaataagcggaggaaacattaagctcttagaaacgtttaatctgtgaaatttaaaagctctcatcatattctacttttgaaagggccacctgattttgattttgagcactccttggatgttatcttctattctggaggataatgaaaagtccgtgttttgaagttttcagattatttctgtagttatatttctccactctttctcgaattttatatggaaatacgaaattgcaaatctaagtgaaaaacctttgtgtaaaacaggtgagtggagaagacgtcctggtttctccaaataactaagatctaataaagaaacaaatcttaattaaaataaagataccgagcacatgtttttgtgttagtttaaaacgataataaaaagaaagaaattaagtctcgatgtaaat

SEQ ID NO: 87893 - DNA, 476 bp, Homo sapiens
aatttatgaacctgtaaccagtattagtgcagtcttgggttccttgttctgcataattgcaccctttctcaggtatgtcctgacaacataaattttaaaataatctcattagagattagattctcagtggatagtgtgtaaggggactaggggtggggggttgggggtagttggacacaggacactgacacagtagagcagggatttttaacagtcaatagccaaatagaatttcaatctagaatatttttaccccggtccccccccttttttttttttttgcattgtatgtcaaaagcgcttgttctttcgtgcatgtgtaagatttaatggttccattgtattatttgaccatgacattttggagaaacattcccagctgtaatgttgtgtatggtagttctcactggatgctagagttttcaaaaccactattcttctaataaattttgttgtgaaaaactgttaaaaaagct

SEQ ID NO: 87894 - DNA, 2900 bp, Homo sapiens
aatttatgaacctgtaaccagtattagtgcagtcttgggttccttgttctgcataattgcaccctttctcaggtatgtcctgacaacataaattttaaaataatctcattagagattagattctcagtggatagtgtgtaaggggactaggggtggggggttgggggtagttggacacaggacactgacacagtagagcagggatttttaacagtcaatagccaaatagaatttcaatctagaatatttttaccccctcagaatgagtgaaacaacttctattatttggtgtacccggtgctacactcctaaaagtcttttttttttttcatccaggtgacgttttttatttttcctgcttggtggtggaaggttatatagtaaacttcactgtcattaagaaagcgcttgtccaaaatgtttaaagtactagaaaagggataattcagcactttttctgttacaacactaaagtcttaatttatcttcagagtcttaggtactgtaagtttttggatgattatttaaaaatataaaacatactacataatatggggtcagatcacatttatataaataattcttattttaaaaaagacaataacattttgtacctttctagcaattccaagtgattgcctcattttctcttgttaagcatttcaagcttaagaatttggaatttgagagaaggtgagggggaaaattccctaaaataaaaatttgtttcaaaccattttagaaaaataaatcactaggaaaataggtagggattctctccccctttaagtcttcagggaatgagcagtatttagaatctttggctgaaattcaagcctttttactttgtaaatttttaatattaattcactgacatgctttttacaccagaggactgaaaatggatcttaatgtttttaagttgtggaagggtatatttctaaaatgaggggggatgattaactaggttagtattaccagcattagtaagtttaaggaattttagtatgtaatagcaaagtgtttgattaaaagtctaatcctatattactagtcaaaattagttacattctgatctaggaaagataatagtcattggatattgatatgctgtgctgtcagaaaaccagactaagatagaaacctttatctgactcccacatgttgcttgttgtgatgggatgtatactttacagcagcttattgctgctttgaaaaaaaatgtataaactatacatttggagtgtttgcatataattctttataacctccacttaaagctgtcagacattggtattttatcagtccacattgttgaataaaactaatgttcttaggaatccagcttgtacacactgtttaaaaaccctcagggacagtttacacactcttctcactcaattcaggtactttgatgctattcttaaacctaacagtgacttgtatttttctgttttgcttttatttcaacgtgctggtagcacatctgatgaatgtcaacttaaaaaactcagttcaggtatccaggtataactcagccaaacagattttaaagctgcatataactctccagcacatggtgcctcacactcttatagtggcattctatatattcagttattactactgagcagataatatgggggttcctgttaacagtgtattttttaaaaaaagcgcataaatgtatagccagcacactacacacacacacacaaacatgcacagttaaactatatatttttaaatgccactaatagccagcacaactaaaacaaaagacattcctaactgctctgtaagctgttaacagatgcagttccttcttgatgtggctcttgcttcttcacgataactactactaaattcaagcactggtccttgggtgtctgacctctacattctagtttatgcaatgtctttagagaattttgtgcactggccactgtgatggaaccattgggccaggagtgctttgagtttatcagtagtgattctgccaaagttggtgttgtaacatgagtatgtaaaatgtcaaaaaaattagcagaggtctaggtctgcatatcagcagacagttttgtccgtgtattttgtagccttgaagttctcagtgacaagttttttctgatgcgaagttctaattccagtgttttagtcctttgcatctttaatgttaagacttgcctctttaaaattgcttttgttttctgcagtactatctgtggttaacaaaatagattatttctctgctttaatatttgatatcttacatctaaaataaattctctccacatataaaacccatagcctttggagatatggaaaatggtatctttcagatttctagaagttcaagtgtcatacaacaaaacaggaaccccctttactcttatggacctcatttcaatatactgtttacagtttgatggaattgtataatttaatatttctcttgtactgtagtttatatttatttacagatttttttgtactgtgtgatttgaactttttgttccttgctatgatcaatgtttatgtagtagagcacttatgatcacaaattaagttttttggtttgattgcactacattaaattttttaatgcagttctgatttttgactggactaaaactgtgtcttaatgtatgtgatgagtacttaaaattttaatccatgtggtccccccccttttttttttttttgcattgtatgtcaaaagcgcttgttctttcgtgcatgtgtaagatttaatggttccattgtattatttgaccatgacattttggagaaacattcccagctgtaatgttgtgtatggtagttctcactggatgctagagttttcaaaaccactattcttctaataaattttgttgtgaaaaactgttaaaaaagct

SEQ ID NO: 87895 - DNA, 1221 bp, Homo sapiens
tctagagatccccggccgcacatttacacacacacacaaacatgcacagttaaactatatatttttaaatgccactaatagccagcacaactaaaacaaaagacattcctaactgctctgtaagctgttaacagatgcagttccttcttgatgtggctcttgcttcttcacgataactactactaaattcaagcactggtccttgggtgtctgacctctacattctagtttatgcaatgtctttagagaattttgtgcactggccactgtgatggaaccattgggccaggagtgctttgagtttatcagtagtgattctgccaaagttggtgttgtaacatgagtatgtaaaatgtcaaaaaaattagcagaggtctaggtctgcatatcagcagacagttttgtccgtgtattttgtagccttgaagttctcagtgacaagttttttctgatgcgaagttctaattccagtgttttagtcctttgcatctttaatgttaagacttgcctctttaaaattgcttttgttttctgcagtactatctgtggttaacaaaatagattatttctctgctttaatatttgatatcttacatctaaaataaattctctccacatataaaacccatagcctttggagatatggaaaatggtatctttcagatttctagaagttcaagtgtcatacaacaaaacaggaaccccctttactcttatggacctcatttcaatatactgtttacagtttgatggaattgtataatttaatatttctcttgtactgtagtttatatttatttacagatttttttgtactgtgtgatttgaactttttgttccttgctatgatcaatgtttatgtagtagagcacttatgatcacaaattaagttttttggtttgattgcactacattaaattttttaatgcagttctgatttttgactggactaaaactgtgtcttaatgtatgtgatgagtacttaaaattttaatccatgtggtccccccccttttttttttttttgcattgtatgtcaaaagcgcttgttctttcgtgcatgtgtaagatttaatggttccattgtattatttgaccatgacattttggagaaacattcccagctgtaatgttgtgtatggtagttctcactggatgctagagttttcaaaaccactattcttctaataaattttgttgtgaaaaactgttaaaaaagct

SEQ ID NO: 87896 - DNA, 1280 bp, Homo sapiens
gctgtgattctcactatactggtcctgaggaaagggcttctgtgaactgcggtttttagtttttattgtggttcttagttctcatgagacccctcttgaggatatgtgcctatctggtgcctctgctctccactagttgagtgaaaggaaggaggtaatttaccaccatgtttggttcctgtttataagatgttttaagaaagatttgaaacagattttctgaagaaagcagaagctctcttcccattatgacttcggaaatcacttatgctgaagtgaggttcaaaaatgaattcaagtcctcaggcatcaacacagcctcttctgcagcttccaaggagaggactgcccctctcaaaagtaataccggattccccaagctgctttgtgcctcactgttgatatttttcctgctattggcaatctcattctttattgcttttgtcattttctttcaaaaatattctcagcttcttgaaaaaaagactacaaaagagctggttcatacaacattggagtgtgtgaaaaaaaatatgcccgtggaagagacagcctggagctgttgcccaaagaattggaagtcatttagttccaactgctactttatttctactgaatcagcatcttggcaagacagtgagaaggactgtgctagaatggaggctcacctgctggtgataaacactcaagaagagcaggatttcatcttccagaatctgcaagaagaatctgcttattttgtggggctctcagatccagaaggtcagcgacattggcaatgggttgatcagacaccatacaatgaaagttccacattctggcatccacgtgagcccagtgatcccaatgagcgctgcgttgtgctaaattttcgtaaatcacccaaaagatggggctggaatgatgttaattgtcttggtcctcaaaggtcagtttgtgagatgatgaagatccacttatgaactgaacattctccatgaacaggtggttggattggtatctgtcattgtagggatagataataagctcttcttattcatgtgtaagggaggtccatagaatttaggtggtctgtcaactattctacttatgagagaattggtctgtacattgactgattcactttttcataaagtgagcatttattgagcattttttcatgtgccagagcctgtactggaggcccccattgtgcacacatggagagaacatgagtctctcttaatttttatctggttgctaaagaattatttaccaataaaattatatgatgtggtgtc

SEQ ID NO: 87897 - DNA, 1181 bp, Homo sapiens
gctgtgattctcactatactggtcctgaggaaagggcttctgtgaactgcggtttttagtttttattgtggttcttagttctcatgagacccctcttgaggatatgtgcctatctggtgcctctgctctccactagttgagtgaaaggaaggaggtaatttaccaccatgtttggttcctgtttataagatgttttaagaaagatttgaaacagattttctgaagaaagcagaagctctcttcccattatgacttcggaaatcacttatgctgaagtgaggttcaaaaatgaattcaagtcctcaggcatcaacacagcctcttctgcagcttccaaggagaggactgcccctctcaaaagtaataccggattccccaagctgctttgtgcctcactgttgatatttttcctgctattggcaatctcattctttattgcttttgtcaagacagcctggagctgttgcccaaagaattggaagtcatttagttccaactgctactttatttctactgaatcagcatcttggcaagacagtgagaaggactgtgctagaatggaggctcacctgctggtgataaacactcaagaagagcaggatttcatcttccagaatctgcaagaagaatctgcttattttgtggggctctcagatccagaaggtcagcgacattggcaatgggttgatcagacaccatacaatgaaagttccacattctggcatccacgtgagcccagtgatcccaatgagcgctgcgttgtgctaaattttcgtaaatcacccaaaagatggggctggaatgatgttaattgtcttggtcctcaaaggtcagtttgtgagatgatgaagatccacttatgaactgaacattctccatgaacaggtggttggattggtatctgtcattgtagggatagataataagctcttcttattcatgtgtaagggaggtccatagaatttaggtggtctgtcaactattctacttatgagagaattggtctgtacattgactgattcactttttcataaagtgagcatttattgagcattttttcatgtgccagagcctgtactggaggcccccattgtgcacacatggagagaacatgagtctctcttaatttttatctggttgctaaagaattatttaccaataaaattatatgatgtggtgtc

SEQ ID NO: 87898 - DNA, 870 bp, Homo sapiens
gagacaggttctcgctgtgttgcccaggctggtcttgaacttctgggatcaagcgattcttctgcctcagcctcccaaagtgctgggattacagatgtgagccaccgtgcccggccccatttttgttgtcttgattagacagcctggagctgttgcccaaagaattggaagtcatttagttccaactgctactttatttctactgaatcagcatcttggcaagacagtgagaaggactgtgctagaatggaggctcacctgctggtgataaacactcaagaagagcaggatttcatcttccagaatctgcaagaagaatctgcttattttgtggggctctcagatccagaaggtcagcgacattggcaatgggttgatcagacaccatacaatgaaagttccacattctggcatccacgtgagcccagtgatcccaatgagcgctgcgttgtgctaaattttcgtaaatcacccaaaagatggggctggaatgatgttaattgtcttggtcctcaaaggtcagtttgtgagatgatgaagatccacttatgaactgaacattctccatgaacaggtggttggattggtatctgtcattgtagggatagataataagctcttcttattcatgtgtaagggaggtccatagaatttaggtggtctgtcaactattctacttatgagagaattggtctgtacattgactgattcactttttcataaagtgagcatttattgagcattttttcatgtgccagagcctgtactggaggcccccattgtgcacacatggagagaacatgagtctctcttaatttttatctggttgctaaagaattatttaccaataaaattatatgatgtggtgtc

SEQ ID NO: 87899 - DNA, 1227 bp, Homo sapiens
gctgtgattctcactatactggtcctgaggaaagggcttctgtgaactgcggtttttagtttttattgtggttcttagttctcatgagacccctcttgaggatatgtgcctatctggtgcctctgctctccactagttgagtgaaaggaaggaggtaatttaccaccatgtttggttcctgtttataagatgttttaagaaagatttgaaacagattttctgaagaaagcagaagctctcttcccattatgacttcggaaatcacttatgctgaagtgaggttcaaaaatgaattcaagtcctcaggcatcaacacagcctcttctgcagcttccaaggagaggactgcccctctcaaaagtaataccggattccccaagctgctttgtgcctcactgttgatatttttcctgctattggcaatctcattctttattgcttttgtcattttctttcaaaaatattctcagcttcttgaaaaaaagactacaaaagagctggttcatacaacattggagtgtgtgaaaatcatttagttccaactgctactttatttctactgaatcagcatcttggcaagacagtgagaaggactgtgctagaatggaggctcacctgctggtgataaacactcaagaagagcaggatttcatcttccagaatctgcaagaagaatctgcttattttgtggggctctcagatccagaaggtcagcgacattggcaatgggttgatcagacaccatacaatgaaagttccacattctggcatccacgtgagcccagtgatcccaatgagcgctgcgttgtgctaaattttcgtaaatcacccaaaagatggggctggaatgatgttaattgtcttggtcctcaaaggtcagtttgtgagatgatgaagatccacttatgaactgaacattctccatgaacaggtggttggattggtatctgtcattgtagggatagataataagctcttcttattcatgtgtaagggaggtccatagaatttaggtggtctgtcaactattctacttatgagagaattggtctgtacattgactgattcactttttcataaagtgagcatttattgagcattttttcatgtgccagagcctgtactggaggcccccattgtgcacacatggagagaacatgagtctctcttaatttttatctggttgctaaagaattatttaccaataaaattatatgatgtggtgtc

SEQ ID NO: 87900 - DNA, 1010 bp, Homo sapiens
gctgtgattctcactatactggtcctgaggaaagggcttctgtgaactgcggtttttagtttttattgtggttcttagttctcatgagacccctcttgaggatatgtgcctatctggtgcctctgctctccactagttgagtgaaaggaaggaggtaatttaccaccatgtttggttcctgtttataagatgttttaagaaagatttgaaacagattttctgaagaaagcagaagctctcttcccattatgacttcggaaatcacttatgctgaagtgaggttcaaaaatgaattcaagtcctcaggcatcaacacagcctcttctgcagagacagcctggagctgttgcccaaagaattggaagtcatttagttccaactgctactttatttctactgaatcagcatcttggcaagacagtgagaaggactgtgctagaatggaggctcacctgctggtgataaacactcaagaagagcaggatttcatcttccagaatctgcaagaagaatctgcttattttgtggggctctcagatccagaaggtcagcgacattggcaatgggttgatcagacaccatacaatgaaagttccacattctggcatccacgtgagcccagtgatcccaatgagcgctgcgttgtgctaaattttcgtaaatcacccgagatgatgaagatccacttatgaactgaacattctccatgaacaggtggttggattggtatctgtcattgtagggatagataataagctcttcttattcatgtgtaagggaggtccatagaatttaggtggtctgtcaactattctacttatgagagaattggtctgtacattgactgattcactttttcataaagtgagcatttattgagcattttttcatgtgccagagcctgtactggaggcccccattgtgcacacatggagagaacatgagtctctcttaatttttatctggttgctaaagaattatttaccaataaaattatatgatgtggtgtc

SEQ ID NO: 87901 - DNA, 463 bp, Homo sapiens
ttaaagagaagtcaaatgtcaggctcccttctctccacagtcatgacctttcaaatcattgtaccttgatagtcctctaataccttcaagcagaggctgttttaacgatttattttcctggttattttagctcgctgttgggaaggttggtctgatctaatctagcccattatattgaagtagaagttgaagtacttctttaaggcactctaatcctacatgttttgataccttgatgctatgttcaataatttcaaatgccaagttgctgttaacctgtgccatcttgaactcttgtttatcagaagtttttgatcaagctactgaaaattttgtatagccataacgaaaacacctcaatgttatgtcatatgtttgcatttaaagatagtttacaaattttactcatattattgcatttaatctttacaacagtcatgtgatgtcaaatatcatgattaag

SEQ ID NO: 87902 - DNA, 802 bp, Homo sapiens
atataaatagaatcacacagtatttgtcttttcgtgactggcttattttagttaggatgtcttcaaggttcatccatgttgtagtgtccaaacttccatcctttttatggctgtataatattgcattgtgtatatagaccacgttgtgtttgtccactcaggttgctgtcaccttttgggtatttttgaaaatggttaattttggctaccatgaaacatgggtgtacaaataactctacaaatttctgctttccattcttttgagtatatacctggacgtggaattgctggatcgtatggtaattctatgtttaactttttagaaactgccattctgttttccatagtggctgcacaattttacattcccaccagcagtacacaagagttccaatttctccacatcctcatcagcacttattctttaataatagtcatcctgaggggtgaaaaagttatcttgttgtgattttgatttgaatttccctaatgactgtcactgctgagtgctatattcatgtgttattggccatttgtatatcttctttagaaaaatgtctattcaagtcctttgtccatttttttaattgagtcatttttgttgagttgaagttctttacatattctagatattacttatcagatataatttgtgattattttctatttttcggttgccttttcattctcatggtgtccctttgatgcatgaaagttttcaattttgatgtagtgcaactttttgcctttgcttttgatgtcataccccaagatattattgccaaatccaacatcatgaaaa

SEQ ID NO: 87903 - DNA, 895 bp, Homo sapiens
agctttatgttgatatatcaatatacgttggaaaaggaaatagacattttaatcattatcttaccatccaattgtgaaatggctgcaaggcctaaacactaactaacccaccttcccctcttgagattccatgccccatctcatatcctgaaggaagtcaaattacttcctaggcagaatcaattcatctgagaaaaatgaaaacattagggactttcccatttagaactgcattattcatacaaattcttagcttctgaaaaggggctcttgataatttggtggcttagagaagttagatcacagctgtgaagctctggctttggtatttgagccccatggcctgattgaggaagtggcagggacccatatctgaggccttcccaccttcctttttccctcttccccctccaaggagaaacaagacctttaatttccacagtagagcaatgggtttgtgcttgcagtccttctgctcattctttattccctctttatttcctttttttgtcactcatgcctagttccctgaaccccttacttacctggccttacctacatctctgagccccagcctgcagggctccttctttgactattcacctggtggcttttactcctccttcaagacccaactcacagatgacttctctggagtcttccctgaatgctctaggcaggtataaatgagaaaattgttcctctcttcccctctttattcctctcactgtgcctccaaagtactttgtccatacctcggtgatagtacttattctactgtgattttattgtagctttgtgattgtctgcccctctgcactgagcatctaagaacagggggccaagccttattcatttctgtgttaataaatatttgttaaatgtgaaaaagagt

SEQ ID NO: 87904 - DNA, 469 bp, Homo sapiens
aaaacctctcggtacttgttcttgtcaagtggtaagggatactttaaaaaaaaaaaaacctaccatgaagaacaactcacctattgcaagtttttgatctgtaggtcagagaagtgaccttttaacacaaatattatttgaatggcgttgtcaggttactttcactggggaaaaaaataaaaaatccatgaatattcagtgatacaaatggttagcagaagacaatgctaaaaatgaagggtattatgacagccaactgttttaaaacttcaagtttggagatctttgttacttagaattttgtaatctgaacaattattctgaaagattttgatggatcattagataggcaagcatctgttcaagtaaaactggttatttgctgacaaagcagaagataattaagaatcataattaactataagctagacataagtcaggattataacacttattataaccatgtata

SEQ ID NO: 87905 - DNA, 1517 bp, Homo sapiens
  misc_feature (1284)..(1284): n is a, c, g, or t
  misc_feature (1299)..(1299): n is a, c, g, or t
  misc_feature (1436)..(1436): n is a, c, g, or t
  misc_feature (1512)..(1513): n is a, c, g, or t
tgaataagagaatgctttctctttctttgagctgaaaaggttgcatcttctaggcttggagaaacaatgggaatgggcttttccataagaccatctttacttacctttcagtgctggattatactgcaaatcttactacctaagcattaatttttcttggttattgctccaacatgcaacagtgtcagagaagcaaggcaagcactatttaatacctgtttactgagcatcaactaagcacaacacacactttgttttgggagcttcataaatgcatcccacctggatccttcatccaggctctcagagcttcctttccttccttgttcgattcagaattcagttacattaatgcagaagtttccaggacttcagggatcctagggagaggtatccaatgatgtttcagagacagagtaggccctagaaaattttattgtgggagaatgtgtttgatagattctgttgactttaactttatggatttgtactttcactacatcagagaaccatcagaagtacaggcaatggtctgtaagaacaatttcaaatatttcttctagcagatggctgaaggagaagaggaaatgtaagctatttaccctggaacacttgaccagatttcagaatatggggcagcaagcatttcagacaggcattccttacattagaaaaatgtgaagaggagttgccatgtttatcagaattttgcaatgggacaaatttaaagccagttgtctttcatcctgagtggttctctcactcttcaaaatacttgggtgattacagagaagggctatgtctgtctgtctctctctctctttctttctctctctgtctctctcccacctcccccccatacgtgtgtgagagagaaaataaattatatatttccgtaagttaaatttaatgatcagatatctcacctatattcttacacttttctatttttcacagaatatacaagcacaggcatttaaatgttagtcacccaaaactccagatgctaagcagtgaaagtttatattctgccagcatatcagactctgtaatgagtctgatttggtttaattcctttctactgtttagtcatttgatgagctgcagatggaaatttaagccaaagccataacatttcagctaatactttttatgctgctgtaagaatttgttgtcatgtcaatttaagagagttgaaatcttttttgagaaggcattcaaatctgcattaagtgcttttatcaactctaatttgatatacaactctgactgcttctgctgttnttaatcaattgcaangtgcaaagtaatttagcagtggaagacagctttgcaattccaggatttctcagctaatgccataagcacaacattatggaaatatacaattaaatttacattaaaaatttttcctatgcttaagaaacacgaggccnacttctttgagtttagccttaaataggtaaatatgtattttggcagccatgaaaagaatagggtattagattaacnngggc

SEQ ID NO: 87906 - DNA, 258 bp, Homo sapiens
acacacacacacacacacacacacagaggcacatgcgcacactcaggcacacaaaaggaaggaaaagaaaaaaagtaaagtgatggggcagggggaataaaccacgtaaaggaaagctaaaatcttagaaagtatgaaaatgtgggcttcaattatatttgtcttcagctcatattcacatttactgtggaaacagaaatatcacaaatccaatgttaaaactgcccctcctggtttcacactggtcacaagtttcaa

SEQ ID NO: 87907 - DNA, 139 bp, Homo sapiens
ggcttaggacccatccatgctcctctcaccctgtctccactgccaccgtcctcatcccaccaaacagaatgcaaattctaaaggcgctggaggctaggactgcaagaaaagacaccatggggtacagctcaagttcata

SEQ ID NO: 87908 - DNA, 373 bp, Homo sapiens
atacaagtttttaaaaatgtgcccaggaacaaggctttagggacgctggtggagggttcctgctgaggctccaggacatgaccacgctgcacagaattcagagcacagtgtggagtctgacagccatggggtcacgtcctgtggcaacccttcactggctgggtgcccctaagcatgtggtccccctgtcgaaggctcagctgcctcatcaggcaagaagagcgaatactcatccccacctgatgaggctcactgaggatcaagggcaccaacaggtttaggatgcccaccccatactcctcccagtgctcctcagagggagttggcatgaccctctagagcccctctgcccacttctgggctcctctgggac

SEQ ID NO: 87909 - DNA, 448 bp, Homo sapiens
ggtattctagctgagggacagacaggaaacaaggtgttacagcattgagtgactgttctgacaagtgctgaagcagatggagaaggggctgtaagagtggatagcaaggcacctggcccagtggactggctggggtacagtcagagctggcttcctgagatgggaaaacggtggtaagagggacctgggagagtgtctaggcagatatacagtaggtacaaagacccagcggcagaaaggagtttggctcttccaggaacagagaagggacattgtgactagagaggagaaagcctgaggggtagggctggaggaagagcccccagggtaggcctggatgccaggatccaggacttcttagtggcctgggatccgtgttcagggaccttctcaaaggtcacagcaaataatatatagtagcttcttattttctgtagaaggaaggaca

SEQ ID NO: 87910 - DNA, 418 bp, Homo sapiens
tcaagcccatatccttgaaaacattgccatattttgagatcattaactagatgaataggaagtttagaatatgaatcttgttttatttccagaaaggcaacatttttaatgtaaaaatatttcctatagcttatatagtttatttaccagttattacccattaatgttcagcaaattagtacataatcttagtactgtcaattctgttcttaggatatttgtttctttgtccaagggatattgtccatgtcatgaataatgacaatatgataaaatgtttgctaattagaacaagtgatgatttggaggaggggaattggctgccctgtttccgataagttcagaggcttatgactatatattcctattaaattaactgttggatggcaaagggtatgcccataatggttagaaatgg

SEQ ID NO: 87911 - DNA, 349 bp, Homo sapiens
  misc_feature (346)..(346): n is a, c, g, or t
cattcctaagtagtgaaatacttggaaaaccagtagaaattaatttgcaagtttctactgacttgaaaaagtgaattaaaaaagtatatgatatgttgggtgtggtggcttgcacctgtaatcccagctactctggaggttgaggcagaaggactgcttgaggccaggagttgagttacagtgagctatgatcatgccactgcactccagcctgggcaacgagtgaaactctgtctcaaaaaaaaactaaacaaaaaatcagtcgatgtttgtgtcggtcatttctggactctattctgttccactgatctacttgcctttgtttttgcccataccacactgtctngac

SEQ ID NO: 87912 - DNA, 468 bp, Homo sapiens
gatttaaaaaaaatcacagtgaaatgtatgtatgtgtctgtgtattcatataattgccaacgatattcccagaatacaaaaatattaaaaagaatgaagttctaatcagtgttcagtaagatgggcagtgaaaattttcattaatagctcgttaccctgttgtttccaaagcacattacatagtaacatacttcttcacaatgtggtacactcaacatttgcaaggaatattctttggagacccccaaagaatggttggcatttatggatccactacttcacaaactcaaatgtttatacatgattctggcttattctcaaattaaatttccattcaaaatcacatttctggggctgggcatggtggctcacgccctgtaatcccagcactttgggaggaaagacgggcggataacttgagccctggagttcgagacaagactgggcaacaaagtaagacctcacctc

SEQ ID NO: 87913 - DNA, 398 bp, Homo sapiens
ggggatttgtgcaggcaatcctgtgcagcagccccccaaaatttcctaacaatcccggacataacacatatttttaaagttgtcccagcccctggttgccttgtgttacgaactcagaaagtaaaattcgtgatgttaaaggacttgagcctcacatctgcaactcttttagagaattttgactattttttaaatagctgtattgaagaatcattttattccctcttcttgagatgaacaaataatattaaacaccaggtataaggagttcttatgtctacatagatgagaaatattttattggaagctttagataggctgtagcatctatctgtgttgaataggccttaaaatatcctcttgcttctcatagaaattgagatgattgaaggttattt

SEQ ID NO: 87914 - DNA, 90 bp, Homo sapiens
gatctaaagtctaaaaaacaaatccttaggttaagaagaaaataatgcaataaataaaatgttataaataaatgacatattgctactttt

SEQ ID NO: 87915 - DNA, 515 bp, Homo sapiens
tgaaaccctgtctctactaaaaatataaaaattatccgggctgggtggtgagcacctgtaatcccagctacttgggaggctgatgtgagacaatcgcttgaacctgggaggcagaggttgcagtgagcgaagatcacgccactgcactccagcctgggtgagagagcaagactctgtctcaaaacaaacaaacaaacaaaaaaggatcaaaacaatattttggtgaactaaataaaaccagtttgctttcttgtcaccaaaaggactctctttcccactcctcaccaattcaaagcaacacacctgtactcatgatagaggtgaaggaagggagaggaggggtgagcacacaggtgtacatgtgccaatgcacactcaatcacaagcgtttgtgttatgtgtgttgggggatcctatactccattttatctttatagctgccccctcagggactcacaattaatgttatggagtgtcatactaacttttagatttagataatttttttctagaaa

SEQ ID NO: 87916 - DNA, 135 bp, Homo sapiens
aaaccaattaaaagggtctactcttatggaatggtatggggagatggagtggaggggaatgaaagcaagacttctctgtgttttcttttaaaaaataatttttggccaggcatgatggcttatctctgtaatccc

SEQ ID NO: 87917 - DNA, 429 bp, Homo sapiens
gtctttagatgtaatctaattgctcctaagtgtcaaccccttggtccaggcataactgctgatttccatggctattgattttaacatctgtaaagaaaagttttcatggatttttcttatcagtgcttcattgctctgatagaaagtggtgaaacttagttattctttgtctcttatctttaccaagcatttcttcattaaaagaggcaccaaaaaaactttaaaatagctggtgagcttccatttttagtagcaagttgaaagtgtctatttgctgtagctggttcatattcagagtatgtgttatactttataatcaaatttatgatgtagctattagttcacactaatatgtgtgattgattatgcaggactgggcaggtaatgtgtgagacctagtataaaatgaaaatatgaggttcttgttaa

SEQ ID NO: 87918 - DNA, 503 bp, Homo sapiens
tgacatgctgagaggccttcgaagctgcctcagaatcaaggtccctctaaccttctctcccaagtatagggaggcactctctctagaatttcctaatctgatcgagaaaacgtctttccaaaagaaacaaaattgccttcctcccctctccgaaatctcatctagctcagaaaagaagactgaggaaggcaactacgcctggatggatttttcacaagatgatgcctgtttctcgggctcattcaaattctaaagagaatcatttacaagttaatttctgtccattttttcgccctaagaatcacttgctgccctcagaagaattgtctatattctccatctctccccttcccctatgaaaaagagtgtatacgcttctgtaccccattgggttattgggtaatcattctcctgtgacccttcccttcccaccccctcgcctccccgccccgtgctatgcacgttaaaataaaattttgtatgtcttttctcctattaaaatg

SEQ ID NO: 87919 - DNA, 269 bp, Homo sapiens
ggcagaaccttgggattgtcatggccagcctctgatgtcaaaatgtgaccaatccctcgcgaacacatctctctagcagaataacagtagttggaagtagatcttccctccaaaaatctgtctatacttgagttgcacggcagggggccagggttgacacttattacaaatttattcatttttgccagatcccttctgccacaagagggttttatctagacaaggttcctaaattggctttgcaaaatgtaatcctctattgattgtct

SEQ ID NO: 87920 - DNA, 504 bp, Homo sapiens
cacgtgtcctcaccaccaatctgaaagtcagatccgccttcttatgaaaatactgcaggcacctcaactttggatgtaactaagaactacatatagattttacttttgcttccctgtgagagtgcagaagttgccaggagccagagattaaggactaagataaggtccagggtctacctgattcagtgatgtcagaagtggtggtgactggtttatttgtttttccgtcttagagatgtttactgttactctgaggtgtcacaaggccaggctaaccaggaacaacccttgcttaatattgtcatagaactccccccaaaaggaattttcctttctgagtggaaatttgcccaaactagagacatgggaccaaatttgccaagatgattttctatctacaactccttacattctaccactgttgaaaaaattgatctgtgcatggttatgtcttttatgttatttttttttccttttattttgaatggcttagaggcttcctag

SEQ ID NO: 87921 - DNA, 434 bp, Homo sapiens
ataatgcagcttttaaatatcagggagttgcgaggctcttgggttctagtgtcatcttccaggattttattcagatctcctcattctgtggccaggccctactgtgtaattgttgtgtatttgtttgttctaaggtcctgtgtactgataggattttatatactttactcaggttgcagtgacactagttaaaacactaataatcatttactcaggtttacagttggcacaattctcggtatttaccattcagtggtcatttcattgactattaatcactgagtctccaagcctggagcagttaccacacatgctaggcactcagtaaacatttatttagtgaatgacatttgtttctttgatcagatttggatctctgtgagaactggatgactaattgaacatatgattacacgtatgactacactttaaaa

SEQ ID NO: 87922 - DNA, 1113 bp, Homo sapiens
ccacactcagtctggcctcggggcctttgcactggctgtgtcccctgcctgtgatgccattctcctctgcctggccaactcctacgtttattcaagtctggaccttgtcatcggctcctcaggaaggcactccgggacccccagatgggggcggttccctgtgactcctggcacggaggccaaccccttccttgttcaatggttccttgagggaccattcccatgtgattatcgaccattcggcaggcgttcaaagtcaaaggccccacactgagtcctggcccagcgccctgtgcccgttggctgctggagggacagacggggcgtgcggctgaccatcccgtgcccgcaggctgaggatgcagcgctggaaggcggcggccttggcctcagtgctctgcagctccgtgctgtccatctggatgtgtcgagagggcctgcttctcagccaccgcctcggacctgcgctggtccccctgcaccgcctgcctcgaaccctggacgcccggattgcccgcctggcccagtaccgtgcactcctgcagggggccccggatgcgatggagctgcgcgagctgacgccctgggctgggcggcccccaggtccgcgccgtcgggcggggccccggcggcggcgcgcgcgtgcgcggttgggggcgcggccttgcgggctgcgcgagctggaggtgcgcgtgagcgagctgggcctgggctacgcgtccgacgagacggtgctgttccgctactgcgcaggcgcctgcgaggctgccgcgcgcgtctacgacctcgggctgcgacgactgcgccagcggcggcgcctgcggcgggagcgggtgcgcgcgcagccctgctgccgcccgacggcctacgaggacgaggtgtccttcctggacgcgcacagccgctaccacacggtgcacgagctgtcggcgcgcgagtgcgcctgcgtgtgaccctacctcactcggccggcgcggcggccactccccccgcctcgacggcaccactggccggccccgcgaaagactgcgcgtgcgtagagcacgccggcgcggccccgggactctcgcgataactgtactgagataaagtgtggcaactcgaaaaggctgg

SEQ ID NO: 87923 - DNA, 403 bp, Homo sapiens
ttaatggcactagcattctgtccatctcccatcctacaaactcttccattatctttacattacttagagctaggaaataaccaaaccttgtctattatctttaatttttttatacctcttatatccatcaatatttttcaacttcagcactacctccataacccagatctttttacctcacaagacttttaaaccctcttaactagtttccttgcttccattttttcttctgctagtatattttgcaccatgttgtacatttaatacttataacacattgctttacatatcatattccttgccactggttagttaactaaaagatggcttggatgggggaagagctaagccaagattccaggtggaaacagagtactcactaaacctaagcatttagctacag

SEQ ID NO: 87924 - DNA, 523 bp, Homo sapiens
ggtcccgcttccgtgagtagcacaggggtgcctgctcagagtgtagtacaacgctgacaagtagaaggcgaggattgcggggcctgggtgagatgggacccactaagttgtgggatcgaaatctcagtaggtccttggggaaagcggggacgggaggggagatgagcagattggaatagaaccgagagagacggaggaaactgacagttgcgtccctggtgggaagactaaaatctatgcagaaacagggataggcaaaagcattgtgcacaagcgggacaggcagagcgccgggacagaaacccttaggacattctgacaccttgctgaacctggatccttacagaatatgtcttgtaggtgaagctagatctgcaaggcataggcaagcctcttagagaatcagaaaagtgatttggaaggaacttcagctgttactactttgtttaagcaaatcaaatgctgttctttaatgttactggacgtttcaaattaaacacaagaaaacctgaaaaaaagcatt

SEQ ID NO: 87925 - DNA, 414 bp, Homo sapiens
ggctgtgttttgtttacacatgctggtttgggtttttgggtagacctgtgttgaattcacagggtggctcttatgccatgttgcaggaatttattagtatggaaccccacagaagattccacctccatttttaacattctgtatggctgtcgagtcgacaccaaagcaaatgtgtctccagacacctctctctcgttgtctcagtcttgttggctttaatcatcctgttttctctgttttacgaaagaagtaaacaaatttctattcatccacacgtgtgtccccaaagcaaggcatatgtggactgaaaggtgggctggggctttgcttcgagaacgtgagcgaagagcgtgtgagtgcacgttgcctttggtgatgcatcatttatattgacattatcagtgacacagacag

SEQ ID NO: 87926 - DNA, 835 bp, Homo sapiens
tactattgacttttgagagttatttatataggcagccctcacttttgcacaatttcagtatgtatgacttccacttgccatggcttaaatggttcaaattgaagttatgacatattaactgtgattgcatgaagtactccctcttacagtctacaaatcacaatataacaaatgtgtatatggtcattgaccaattacttttttgaaaatttgttcatgactgaccattgcacatctcttattaagacagacagtaaatgtttggttttgttgcctccttgtctcccagtaataaaaccacttgacattttacaaaaatggataagtgaaagagagacttggccacagacatgaaagtacagcacagaaacaaaaagttacaacactggaagtgaaatttgaattaaccatttgtggggttttagatgaaatggttgactgagaatgttgatcctgctgccattcaaacgagactctacatatgcatccagccagagaaatttagtgacagcaaaactgttggcataaataaggaaataaggaagatgtcccagaggaagtgaaatatatcttcacatttaaggaattcttaaagatatctcatgacattgaaaatgcaaaaggtaaaacgtcaaaagctgatccaaacttaggaatatgacaattcgccaagcaaagaaagggtgcttgctctattgtgttacatcatgagaagacactgcttaaactattactgatgttttttttacaaagatataaagcactttaattctaaaagtttctaatgctttaaattacaatgtattaaataaatattagttttactacttttaaa

SEQ ID NO: 87927 - DNA, 514 bp, Homo sapiens
agatatcttcaccttgcaatctgtatgaccaattattttgaagtgccaacttaatgaatgacccttcgtggtgccagactcctaagctctcccttgccttctcttagttctctctttggtagagttggttgaatgcaccagtgagtttgttacttctcagcaaaccttgggggagatatctgaacctaattgttggtgttctcccttagatttgggctttattgcctcttgctgtcagctttgggccctagttactgattctggaaaaagtggaaaaataccccttaacatcttgttagattatgaataggtaagtttaggaaatattattgcaggtagaagaaaacctaacaggtttttattttctaatgtttaaagagacatttaagtaaaagatctcaatggaattatacctttctttttgttgttgttgttgcagatagtatgtacttaattttttttttttttaaatttcaataggtttttcaggaagattgcgtgtttggttacatgg

SEQ ID NO: 87928 - DNA, 334 bp, Homo sapiens
cagacacaggatcgcactcagattcgaggcatcttttggacgtagagctggaagaatgtgttgatgggctggacatggactgtgagcaaaagggaagcagcaaggatggccccaaggtttttggcctccgaagctggtaaatgaagaagcctggagagagccacactgaactacctgaagctcccaagcactgcatgtcctcccaggcctcagctccctgcctggacctcccttcctagataactccaggtgttcctcggcctggacaactcctgttactgtcttttttttttttctttgagtcagagtcttgctctattgcccaggctggagt

SEQ ID NO: 87929 - DNA, 408 bp, Homo sapiens
ccttcaccttctctgacacatccataaaaggactttcattttccagggggagcaagcgaccaaagaaaagttatgtgacttgtcttcagatcagaggagagtcaaaagcataaagtaagtcaccatgctcctcgatgaatgtatatacatttacatgtatacagcaggtcctcaaataacggcatttcatttgcacgttctcctcacatctatgtggtttttcctgggaactctgggttcctcccacatcccaaagctgtgcctgtgaggtgaactggtgcatctctacggtcctagtgagtgtgggtgagcggagtgagtgtgtgagtgtgagtgggtgtgagtatgagtctccctacgatgggagggtgtcctggccagggcagttcccacctgacatcctgagct

SEQ ID NO: 87930 - DNA, 343 bp, Homo sapiens
ctgctcctggctaattaaaaaatatatatatattttgtagaaaggtggtcttactatgttgcccaggctggtcttgaactcctggggtcaagtgatcctctgccttggcttttcaaagcgctgagattacaaacgtgagccactgcacctagccctttaaaaaaaaaaatgttgttactagatagaattataattctaggtgtcatgttaccgtcaggcttttccctaatacagagatttttgggggcactgagggtgaagggaattgtttttgttttataagcctaataaatggtaggcttttggctatttttgtgcgtgaatgtatatacacacaccaaaa

SEQ ID NO: 87931 - DNA, 372 bp, Homo sapiens
  misc_feature (25)..(25): n is a, c, g, or t
ttatcgatgccaccggcttcaatcntcaagaacttggtcattacctataaccggacatatgagtcaaaggaagaagcccggtggcgcctgtccgtctttgtcaataacatggtgcgagcacagaagatccaggccctggaccgtggcacagctcagtatggagtcaccaagttcagtgatctcacagaggaggagttccgcactatctacctgaatactctcctgagaaaagagcctggcaacaagatgaagcaagccaagtctgtgggtgacctcgccccacctgaatgggactggaggagtaagggggctgtcacaaaagtcaaagaccagggcacgggtggcatcgataaacaccgggtacggagctcg

SEQ ID NO: 87932 - DNA, 1385 bp, Homo sapiens
  misc_feature (25)..(25): n is a, c, g, or t
ttatcgatgccaccggcttcaatcntcaagaacttggtcattacctataaccggacatatgagtcaaaggaagaagcccggtggcgcctgtccgtctttgtcaataacatggtgcgagcacagaagatccaggccctggaccgtggcacagctcagtatggagtcaccaagttcagtgatctcacagaggaggagttccgcactatctacctgaatactctcctgagaaaagagcctggcaacaagatgaagcaagccaagtctgtgggtgacctcgccccacctgaatgggactggaggagtaagggggctgtcacaaaagtcaaagaccagggcatgtgtggctcctgctgggccttctcagtcacaggcaatgtggagggccagtggtttctcaaccaggggaccctgctctccctctctgaacaggagctcttggactgtgacaagatggacaaggcctgcatgggcggcttgccctccaatgcctactcggccataaagaatttgggagggctggagacagaggatgactacagctaccagggtcacatgcagtcctgcaacttctcagcagagaaggccaaggtctacatcaatgactccgtggagctgagccagaacgagcagaagctggcagcctggctggccaagagaggcccaatctccgtggccatcaatgcctttggcatgcagttttaccgccacgggatctcccgccctctccggcccctctgcagcccttggctcattgaccatgcggtgttgcttgtgggctacggcaaccgctctgacgttcccttttgggccatcaagaacagctggggcactgactggggtgagaagggttactactacttgcatcgcgggtccggggcctgtggcgtgaacaccatggccagctcggcggtggtggactgaagaggggcccccagctcgggacctggtgctgatcagagtggctgctgccccagcctgacatgtgtccaggcccctccccgggaggtacagctggcagagggaaaggcactgggtacctcagggtgagcagagggcactgggctggggcacagcccctgcttccctgcaccccattcccaccctgaagttctgcacctgcacctttgttgaattgtggtagcttaggaggatgtcggggtgaagggtggtatcttggcagttgaagctggggcaagaactctgggcttgggtaatgagcaggaagaaaattttctgatcttaagcccagctctgttctgcccccgctttcctctgtttgatactataaattttctggttcccttggatttagggatagtgtccctctccatgtccaggaaacttgtaaccacccttttctaacagcaataaagaggtgtccttgt

SEQ ID NO: 87933 - DNA, 1112 bp, Homo sapiens
  misc_feature (56)..(56): n is a, c, g, or t
cggggaggggcctggacacatgtcaggctggggcagcagccactctgatcagcacncaggtcccgagctgggggcccctcttcagtccaccaccccgcgagctggccatggtgtgtcacgcacaggccccggaccctgctctccctctctgaacaggagctcttggactgtgacaagatggacaaggcctgcatgggcggcttgccctccaatgcctactcggccataaagaatttgggagggctggagacagaggatgactacagctaccagggtcacatgcagtcctgcaacttctcagcagagaaggccaaggtctacatcaatgactccgtggagctgagccagaacgagcagaagctggcagcctggctggccaagagaggcccaatctccgtggccatcaatgcctttggcatgcagttttaccgccacgggatctcccgccctctccggcccctctgcagcccttggctcattgaccatgcggtgttgcttgtgggctacggcaaccgctctgacgttcccttttgggccatcaagaacagctggggcactgactggggtgagaagggttactactacttgcatcgcgggtccggggcctgtggcgtgaacaccatggccagctcggcggtggtggactgaagaggggcccccagctcgggacctggtgctgatcagagtggctgctgccccagcctgacatgtgtccaggcccctccccgggaggtacagctggcagagggaaaggcactgggtacctcagggtgagcagagggcactgggctggggcacagcccctgcttccctgcaccccattcccaccctgaagttctgcacctgcacctttgttgaattgtggtagcttaggaggatgtcggggtgaagggtggtatcttggcagttgaagctggggcaagaactctgggcttgggtaatgagcaggaagaaaattttctgatcttaagcccagctctgttctgcccccgctttcctctgtttgatactataaattttctggttcccttggatttagggatagtgtccctctccatgtccaggaaacttgtaaccacccttttctaacagcaataaagaggtgtccttgt

SEQ ID NO: 87934 - DNA, 1795 bp, Homo sapiens
  misc_feature (25)..(25): n is a, c, g, or t
ttatcgatgccaccggcttcaatcntcaagaacttggtcattacctataaccggacatatgagtcaaaggaagaagcccggtggcgcctgtccgtctttgtcaataacatggtgcgagcacagaagatccaggccctggaccgtggcacagctcagtatggagtcaccaagttcagtgatctcacagaggaggagttccgcactatctacctgaatactctcctgagaaaagagcctggcaacaagatgaagcaagccaagtctgtgggtgacctcgccccacctgaatgggactggaggagtaagggggctgtcacaaaagtcaaagaccagggcatgtgtggctcctgctgggccttctcagtcacaggcaatgtggagggccagtggtttctcaaccaggggaccctgctctccctctctgaacaggagctcttggactgtgacaagatggacaaggcctgcatgggcggcttgccctccaatgcctactcggccataaagaatttgggagggctggagacagaggatgactacagctaccagggtcacatgcagtcctgcaacttctcagcagagaaggccaaggtctacatcaatgactccgtggagctgagccagaacgagcagaagctggcagcctggctggccaagagaggcccaatctccgtggccatcaatgcctttggcatgcagttttaccgccacgggatctcccgccctctccggcccctctgcagcccttggctcattgaccatgcggtgttgcttgtgggctacggcaaccgtgagttccgctgcctgtcctgcatccagccaggccacagcaggggtgggatcacagcatctcaggtcctctagaggggaaatagggggaatgcctaggaaccctgtccttacccactgcctgggccatgaccagctgggcatcatctgtcctctctatggcagggaagctgagctgtgggagggtaaatattgatggcctaataacctgcaataggcgggtgggtgcgtgcttcctccctgccccagggcttctccctgaggctggtaggtgggcccctcgctttctgctcttttcctagtccctgtcacacagtaggcccagtgcaagtatttgaagggtgcaaagtgattaaggctctgcctggagaattaaggaccctgatccttgcgctctgcactgcaccccaggctctgacgttcccttttgggccatcaagaacagctggggcactgactggggtgagaagggttactactacttgcatcgcgggtccggggcctgtggcgtgaacaccatggccagctcggcggtggtggactgaagaggggcccccagctcgggacctggtgctgatcagagtggctgctgccccagcctgacatgtgtccaggcccctccccgggaggtacagctggcagagggaaaggcactgggtacctcagggtgagcagagggcactgggctggggcacagcccctgcttccctgcaccccattcccaccctgaagttctgcacctgcacctttgttgaattgtggtagcttaggaggatgtcggggtgaagggtggtatcttggcagttgaagctggggcaagaactctgggcttgggtaatgagcaggaagaaaattttctgatcttaagcccagctctgttctgcccccgctttcctctgtttgatactataaattttctggttcccttggatttagggatagtgtccctctccatgtccaggaaacttgtaaccacccttttctaacagcaataaagaggtgtccttgt

SEQ ID NO: 87935 - DNA, 2199 bp, Homo sapiens
  misc_feature (25)..(25): n is a, c, g, or t
ttatcgatgccaccggcttcaatcntcaagaacttggtcattacctataaccggacatatgagtcaaaggaagaagcccggtggcgcctgtccgtctttgtcaataacatggtgcgagcacagaagatccaggccctggaccgtggcacagctcagtatggagtcaccaagttcagtgatctcacagaggaggagttccgcactatctacctgaatactctcctgagaaaagagcctggcaacaagatgaagcaagccaagtctgtgggtgacctcgccccacctgaatgggactggaggagtaagggggctgtcacaaaagtcaaagaccagggcatgtgtggctcctgctgggccttctcagtcacaggcaatgtggagggccagtggtttctcaaccaggggaccctgctctccctctctgaacaggagctcttggactgtgacaagatggacaaggcctgcatgggcggcttgccctccaatgcctactcggccataaagaatttgggagggctggagacagaggatgactacagctaccagggtcacatgcagtcctgcaacttctcagcagagaaggccaaggtctacatcaatgactccgtggagctgagccagaacgagcagaagctggcagcctggctggccaagagaggcccaatctccgtggccatcaatgcctttggcatgcagttttaccgccacgggatctcccgccctctccggcccctctgcagcccttggctcattgaccatgcggtgttgcttgtgggctacggcaaccgctctgacgttcccttttgggccatcaagaacagctggggcactgactggggtgagaagggttactactacttgcatcgcgggtccggggcctgtggcgtgaacaccatggccagctcggcggtggtggactgaagaggggcccccagctcgggacctggtgctgatcagagtggctgctgccccagcctgacatgtgtccaggcccctccccgggaggtacagctggcagagggaaaggcactgggtacctcagggtgagcagagggcactgggctggggcacagcccctgcttccctgcaccccattcccaccctgaagttctgcacctgcacctttgttgaattgtggtagcttaggaggatgtcggggtgaagggtggtatcttggcagttgaagctggggcaagaactctgggcttgggtaatgagcaggaagaaaattttctgatcttaagcccagctctgttctgcccccgctttcctctgtttgatactataaattttctggttcccttggatttagggatagtgtccctctccatgtccaggaaacttgtaaccacccttttctaacagcaataaagaggtgtccttgtaaaaaaaaaaaaaaaaaaaaaaaaaaaaaaaaaaaaaaaaaaaaaaaaaaaaaaaaaaaaaaaaaaaaaaaaaaaaaaaaaaaaaaaaaaaggagggcgcagccgcgcgataagaaaacacgggcgaagacaagcagacagtagacacaaccaccaacgtgatgagaaaagagagacgccaccaaacagaggaccgcaaaaaaacagacacacagagagcacccccacacacacacacacagcgagacggcaagcgacacgaccacacacgggggagaataaagagaaaagcgaaccccctcaacggcgggcgacggacgacaacacaacgcgggacaaaccgaccctgaagaacacacaaaacccccgaccgacgaaaaccacaacacaccgacagacaagagaacaaagagagccgcggaccacaacccgaacgaatgagcacagcgccggggacaggaagaggaaaccgaatcagctccagctacaccgacaggggaaaggagagtggacggagacacagaagcaaacaacaacagaacgagaaaggggagcgagagccgcagacaacaaccggggcacaggaacgaagagagcagaggaagaaacagaaacataccagaagcaagcgagacacaaaccgacagaagcgcagacaagggtgcgaggaaagagacaaccgagaaagcaaaaagagcgagagacaggcgagaaaaacgaagcagaaagacgaagcagaaaggaacgaaacgagaagcaacgaaagcagagaaacagaaacaaaaaaaaggaagaaacaaagagcgagcgaagg

SEQ ID NO: 87936 - DNA, 1464 bp, Homo sapiens
  misc_feature (25)..(25): n is a, c, g, or t
ttatcgatgccaccggcttcaatcntcaagaacttggtcattacctataaccggacatatgagtcaaaggaagaagcccggtggcgcctgtccgtctttgtcaataacatggtgcgagcacagaagatccaggccctggaccgtggcacagctcagtatggagtcaccaagttcagtgatctcacagaggaggagttccgcactatctacctgaatactctcctgagaaaagagcctggcaacaagatgaagcaagccaagtctgtgggtgacctcgccccacctgaatgggactggaggagtaagggggctgtcacaaaagtcaaagaccagggcatgtgtggctcctgctgggccttctcagtcacaggcaatgtggagggccagtggtttctcaaccaggggaccctgctctccctctctgaacagggtgagcatctcgctctactcctctgtccccagcctagcccctcaggagggcttcttgggaccagccttctgtctcctagagctcttggactgtgacaagatggacaaggcctgcatgggcggcttgccctccaatgcctactcggccataaagaatttgggagggctggagacagaggatgactacagctaccagggtcacatgcagtcctgcaacttctcagcagagaaggccaaggtctacatcaatgactccgtggagctgagccagaacgagcagaagctggcagcctggctggccaagagaggcccaatctccgtggccatcaatgcctttggcatgcagttttaccgccacgggatctcccgccctctccggcccctctgcagcccttggctcattgaccatgcggtgttgcttgtgggctacggcaaccgctctgacgttcccttttgggccatcaagaacagctggggcactgactggggtgagaagggttactactacttgcatcgcgggtccggggcctgtggcgtgaacaccatggccagctcggcggtggtggactgaagaggggcccccagctcgggacctggtgctgatcagagtggctgctgccccagcctgacatgtgtccaggcccctccccgggaggtacagctggcagagggaaaggcactgggtacctcagggtgagcagagggcactgggctggggcacagcccctgcttccctgcaccccattcccaccctgaagttctgcacctgcacctttgttgaattgtggtagcttaggaggatgtcggggtgaagggtggtatcttggcagttgaagctggggcaagaactctgggcttgggtaatgagcaggaagaaaattttctgatcttaagcccagctctgttctgcccccgctttcctctgtttgatactataaattttctggttcccttggatttagggatagtgtccctctccatgtccaggaaacttgtaaccacccttttctaacagcaataaagaggtgtccttgt

SEQ ID NO: 87937 - DNA, 1423 bp, Homo sapiens
  misc_feature (25)..(25): n is a, c, g, or t
ttatcgatgccaccggcttcaatcntcaagaacttggtcattacctataaccggacatatgagtcaaaggaagaagcccggtggcgcctgtccgtctttgtcaataacatggtgcgagcacagaagatccaggccctggaccgtggcacagctcagtatggagtcaccaagttcagtgatctcacagaggaggagttccgcactatctacctgaatactctcctgagaaaagagcctggcaacaagatgaagcaagccaagtctgtgggtgacctcgccccacctgaatgggactggaggagtaagggggctgtcacaaaagtcaaagaccagggcatgtgtggctcctgctgggccttctcagtcacaggcaatgtggagggccagtggtttctcaaccaggggaccctgctctccctctctgaacagggtgagcatctcgctctactcctctgtccccagcctagcccctcaggagggcttcttgggaccagccttctgtctcctagagctcttggactgtgacaagatggacaaggcctgcatgggcggcttgccctccaatgcctactcggccataaagaatttgggagggctggagacagaggatgactacagctaccagggtctacatcaatgactccgtggagctgagccagaacgagcagaagctggcagcctggctggccaagagaggcccaatctccgtggccatcaatgcctttggcatgcagttttaccgccacgggatctcccgccctctccggcccctctgcagcccttggctcattgaccatgcggtgttgcttgtgggctacggcaaccgctctgacgttcccttttgggccatcaagaacagctggggcactgactggggtgagaagggttactactacttgcatcgcgggtccggggcctgtggcgtgaacaccatggccagctcggcggtggtggactgaagaggggcccccagctcgggacctggtgctgatcagagtggctgctgccccagcctgacatgtgtccaggcccctccccgggaggtacagctggcagagggaaaggcactgggtacctcagggtgagcagagggcactgggctggggcacagcccctgcttccctgcaccccattcccaccctgaagttctgcacctgcacctttgttgaattgtggtagcttaggaggatgtcggggtgaagggtggtatcttggcagttgaagctggggcaagaactctgggcttgggtaatgagcaggaagaaaattttctgatcttaagcccagctctgttctgcccccgctttcctctgtttgatactataaattttctggttcccttggatttagggatagtgtccctctccatgtccaggaaacttgtaaccacccttttctaacagcaataaagaggtgtccttgt

SEQ ID NO: 87938 - DNA, 1410 bp, Homo sapiens
  misc_feature (25)..(25): n is a, c, g, or t
ttatcgatgccaccggcttcaatcntcaagaacttggtcattacctataaccggacatatgagtcaaaggaagaagcccggtggcgcctgtccgtctttgtcaataacatggtgcgagcacagaagatccaggccctggaccgtggcacagctcagtatggagtcaccaagttcagtgatctcacagaggaggagttccgcactatctacctgaatactctcctgagaaaagagcctggcaacaagatgaagcaagccaagtctgtgggtgacctcgccccacctgaatgggactggaggagtaagggggctgtcacaaaagtcaaagaccagggcatgtgtggctcctgctgggccttctcagtcacaggcaatgtggagggccagtggtttctcaaccaggggaccctgctctccctctctgaacaggagctcttggactgtgacaagatggacaaggcctgcatgggcggcttgccctccaatgcctactcggccataaagaatttgggagggctggagacagaggatgactacagctaccagggtcacatgcagtcctgcaacttctcagcagagaaggccaaggtctacatcaatgactccgtggagctgagccagaacgagcagaagctggcagcctggctggccaagagaggcccaatctccgtggccatcaatgcctttggcatgcagttttaccgccacgggatctcccgccctctccggcccctctgcagcccttggctcattgaccatgcggtgttgcttgtgggctacggcaaccgctctgacgttcccttttgggccatcaagaacagctggggcactgactggggtgagaagggttactactacttgcatcgcgggtccggggcctgtggcgtgaacaccatggccagctcggcggtggtggactgaagaggggcccccagctcgggacctggtgctgatcagagtggctgctgccccagcctgacatgtgtccaggcccctccccgggaggtacagctggcagagggaaaggcactgggtacctcagggtgagcagagggcactgggctggggcacagcccctgcttccctgcaccccattcccaccctgaagttctgcacctgcacctttgttgaattgtggtagcttaggaggatgtcggggtgaagggtggtatcttggcagttgaagctggggcaagaactctgggcttgggtaatgagcaggaagaaaattttctgatcttaagcccagctctgttctgcccccgctttcctctgtttgatactataaattttctggttcccttggatttagggatagtgtccctctccatgtccaggaaacttgtaaccacccttttctaacagcaataaagaggtgtccttgtaacaacacaaccacacagaaaaccc

SEQ ID NO: 87939 - DNA, 400 bp, Homo sapiens
cctgacctcaaggcagggacccccatttgctcacatccatttcacctttgggaagggggctctgcgggacaagaaatgtgcttttcctgcccctggagccctctgaacaaacctatgtccgtctacccccacccagccagggtccctggggtggacttcctgccaccccaaacccccaaggccacggggggctgcagcctccacaggttccggcctggcctgggaaccagttcgggtatagccaagctccctagttactcaattgctaagacaacagcccccaggggccttgcctcctcctccaaccggcaggtgttgacagcaccacccggggcccaggggagccagtgacctcagcctctgggggcgggaatgaggtgggtggggtggaggggctcga

SEQ ID NO: 87940 - DNA, 255 bp, Homo sapiens
agctcactgaatgaaaggcaaatgcataagtgtacactgatataaataaattagaaaatgaaaaattcttcctcacaatataaacactactactaacttataagcataactcacacctgtgaaaatgagttagggtaacttcacttatgataacctcaccaacattggactgtgatcattttaaaacctacgctaatttgaagggcatgaaatgatcttttatttggatttataggactttggatcattagggga

SEQ ID NO: 87941 - DNA, 2202 bp, Homo sapiens
ggccagttcctagtcggtggctccatgctggtctctgatgtttaggaagtggtgtcagcagagactgagctgcaccctttctttggacagatggcaggagaggagaacttcaaggaagagctcagatcccaggatgcttccaggaacttgaaccagcatgaggtagcaggacatccacattcctggtctctggagatgctgttacgcagattgagggctgtccacaccaagcaggatgacaagtttgccaacctcctggatgcggtgggggagtttggcacattccagcagaggctagtagccctcacctttatccccagcatcatgtcggccttcttcatgtttgctgaccacttcgtgttcacagcccagaagccctattgcaataccagctggatcctggcagtgggcccccacctgtccaaagctgagcagctgaatctgaccataccccaagcacccaatggcagtttcctgacatgcttcatgtaccttcctgtgccttggaatctggattctaccatccagtttggcctcaatgacacagacacatgccaagatgggtggatctatcctgacgctaagaagcgatcgctgatcaatgagtttgacttggtatgtggcatggagacgaagaaggacactgcacagatcatgttcatggcagggctcccgataggctctctcatcttcaggctcataactgacaagatgggccgctaccctgccatcctgctgtcactgctggggctgatcatcttcggctttgggacagccttcatgaacagctttcacctgtatttgttctttcgctttggcatctcgcagtcagtggtgggctacgccatcagcagcatttctttggccactgagtggttagtgggtgagcaccgggcccacgccattatcctgggacactgctttttcgctgtgtgggccatgttgctgacagggatcgcctacggtcttccccactggcagctgctgtttctggtgggtgggatacttgtgatccccttcatctcctatatctggattctcccggagtccccgcggtggctgatgatgaaagggaaggtgaaggaggccaagcaggtgctgtgctacgccgcaagtgtgaacaagaagaccattccttcaaatctgctggacgagctgcagctgcccagaaagaaggtgactcgggcctctgtcctggacttctgtaagaataggcagctctgcaaggtgaccttggtgatgagctgtgtgtggtttaccgtcagttacacctattttacgttgagcctgagaatgagagagctgggcgtgagcgtccacttcagacacgtggtccccagcatcatggaggtgcctgcccggctgtgctgcatctttctcctccagcagattgggaggaagtggagcctggctgtgactctcctccaagccatcatctggtgcttgcttctccttttcctccctgaaggggaggatggcctcagactcaagtggccacgttgtccggccacagagctgaaatccatgacgatcttggtgctcatgctcagagagttcagcctggccgccactgtcactgtgttcttcctctacaccgctgagctcctccccactgtgctcagggcgacaggtctggggctggtgtctctggcctcggtggctggagccatcttgtccctgacaatcatcagccagaccccctccctcctgcccatctttctctgctgcgtcttagccatcgtggccttttccctctcctccctgctgccggaaacgcgagatcagcccctctccgagagcctgaaccactcctcacagataaggaataaggtcaaggacatgaagactaaggaaacatcatctgatgatgtctgaggaagcggccaagaatgtcattctcaatgcccagatcctgagattggacccataccctgtctccaaccctgccttgaagcaattcaataaagaggaagcaaacagccaggctccctgagggccaggcccccagaccatcttgggttggaattgagtggccaagtatggggtcatggattccaggccacaaattccaggcctagttcagtttgggggcagggtcagtcctgctcccaggccagcccttgacattaaaaaaaaatgccccctccttctgcaggagctctgctgtgattcattccaataaaggtacaatgttggtcttga

SEQ ID NO: 87942 - DNA, 372 bp, Homo sapiens
caggtctctgtgcttatttctctcctccgttcctaccctgacccttgctgctctgcctctgtctttattcctggctccgtgtgcacgcgcacttgcctcctggcttcatccaggtttaccgtcagttacacctattttacgttgagcctgagaatgagagagctgggcgtgagcgtccacttcagacacgtggtccccagcatcatggaggtgcctgcccggctgtgctgcatctttctcctccagcagattgggaggaagtggagcctggctgtgactctcctccaagccatcatctggtgcttgcttctccttttcctccctgaaggtacagctcatccttcccctgtggcctgcccacagccttcctgc

SEQ ID NO: 87943 - DNA, 331 bp, Homo sapiens
tcaactactcagaaatagggaggaacatctttttcttactcattgacgaccctatcaatgcccagtgtgcagtgggtactggaaaacttatgatttacttaagatacccctacattcaaatgagttcaagtagttgtaggaggaagcattcaattcaatatggctgctttgggtgtggctgagctggaactcttcttcgggctttgccctcaaagtcccaggcatattcttttaaaaattctgttaaaaaatagttttaaaattataggatagttcttacattttgtgtatgaggctatcggaaagataattttataattaaggggggggg

SEQ ID NO: 87944 - DNA, 405 bp, Homo sapiens
cggcacgaggcggcacgagggaataaatagcttaaactctttgaagttatagtttctcacttataaaacacaagagttgggctaggttgtcacaaggcaccttttggttccaaaattctgtgattttttttggacctaccacaagcttattgctataaattgtataaagaagagggtgatgggaaagaataggaacaaagattattttggtcattgaaaatagctctcaaatgtttctgagcatggagacagattaaaatagaaattatgaatatttatttcacaaaagaaagtctgtgagactttctaacaaagatagaaaaaccataatgaagaatattttacaaataccatataaatacagattggcaagtaggaagaattataaaatgtttattaatctgt

SEQ ID NO: 87945 - DNA, 426 bp, Homo sapiens
atccttgtttggcctccttccctttgaagctctacttcccattcccctgagaacacttcctaacaaattatttttacatgatgtctcatctcaggattttgttttagggaactcagcctaagatagcaggaaagagactatcacacaaaaacatctagtccccctcttctcctttctggtatagagatgccagtcagaggcagtgtaaacatttcagactctgagcaagtggtcttccaggtcctgggaatctctcgtcctatctcatgcttcaatggggcagccagtttcaagcaaaccaggattttttaaacaaagaaatccacccgccaaacattaaggatggcttagcagacttatgtgactacatattgattttaatccacttaagtgccccttaaacatggactcatttaattaccattc

SEQ ID NO: 87946 - DNA, 324 bp, Homo sapiens
gtctctccagttctcccgtttcttcctccctcctcctcaccctcctcgttagttaggagctgcgacgcctggctctggggaggtgctggcactgagtgttttacagctctttaattctgccttattatcctctgttcctacaaccaaggtctttgactgctgctttcattgtgttgtcaggtttctctttgatgcctaaattaatactaatgggaagccctctcagctgtttgcttacttttccttctgctcagtttctcccagttgaatattccccagtccgtgctgtgcactgatctgtcagccctttctcggatccacttt

SEQ ID NO: 87947 - DNA, 360 bp, Homo sapiens
gagagagagagagagagagagagagagagagagagaagagagagagagagagagagagagagagagcttttcttccttccaggactgtttctctatatccactctccacagccagaatgatcattctgaaacacaaacttcatcatgagttttctgtttaagtctttagaggtccccactatctttaggatgaagtttaaaattcgcgtcatagcttcaaagctttttattatctagcctacctctccatccttcctctcctcacagcctcacactctcctccccagctggactgaactactttcagttccccaaaggcctgagctcactctccaacctccaggtcattgcacatgctgt

SEQ ID NO: 87948 - DNA, 799 bp, Homo sapiens
tttttagacagaatctcactctgttgctcaggctggagtgcagtggtgcaatcttggctcgctgcaacctccaccttccaggttcaagtgattctcctgcctcagcctcctgagtagctgggattacaggcgcctgccaccatacctggctaatttttgtatttttagtagaaacggggtttcaccatgttggccaggctggtctgataatagcagggagtattatgacattaatctgtttaatttttcagagctcctttgacagtacaatactttcttaggtaattaagattgatatttctacaatacttcattgggtaattaagactgatattcctgacatcttcaggaccttttgcacttcttgttttctgtgtttagttcacttgtccttcattgttcatcccttaccttcttgggtctttacccacatgtcacttgagtgaggccttccctgaccttaccttaccttaaaagtagaactcaaggccaggcatggtaactcatgcctgtaatcctagcactttcagaggccaaagcaggaggattgcttgagcccagcagtttgagaccagcctgagtgacatagtgagaccctgtctctacaaaaacataagaaaattagccaggtgtggtggcacatgcctgtagtcctagctactcaggaggctgaggtgggagggtcacttgagccttggagttgggggctatagtgagccatgattctgccactgcactccagcctgggcggcggagtgaggctgtgtcaaaaacacgtacaactcatcccagcatccca

SEQ ID NO: 87949 - DNA, 333 bp, Homo sapiens
cagtctcagtgccagcaccaccccttggctgcctgcccacactgctggattctcgggtggaactcgacccgcagggacagccagccccagagtccgcactggggagagaaggggccaggcccaggacactgccacctaccacccactccagtccaccgagatcactcggagaagagcctgggccatgtggccgctgcaggagccccacggtgcaagggtgaggatagcccaaggaagggctgggcatctgcccagacaggcctcccagagaaggctggtgaccaggtcccaggcgggcaagactcagccttggtggggcctgaggacagagga

SEQ ID NO: 87950 - DNA, 474 bp, Homo sapiens
cgactgtcaacccctcttgctggccatagcagattggacaaggggtgggccctggatttgagcagcaatcctgtctacccagcaacctacagaacttctggatatgaaaagatgagctggacctttcacaatctctctcacagaaatttgaactaaaagtatccaggctaggagtattagctcatccctgtaatcccagcactttgggaagctgaggccacttgagcccaggagtccaagaccagcataggcaacagggtgaaaccccatctctacaaaaactacaaaaaaattagccgagcatggtgatgcaggctgagtagtcgcagctactcaggagacagaggtgggagaatcacctgagctcagggaagtcgaggctccagtgagccatgattgcaccactgcactccagcctgggcaacacagtgagaacctgtctcataaataaataaataaataaaggtatgcaaa

SEQ ID NO: 87951 - DNA, 611 bp, Homo sapiens
gtgtgtggtttgaatgtcaaagcccaatgaaaggtcctaaatgcacataattgcattccatagctatccaagaacaaaggggaaaaggaggtggcttctcaaagcagaggcttattactcccctgcctttccttaagccccctaggaaaagtcagaacatatagtcaggactttgtattggctctttcaccactggtgaggggaggaattgtctacaggagtaggacagacaaaacattctgggtttatgctctgtgagtagacagtgatgtcctcttcacagaaactgaggaggtcgagacagtcatcttgggatggcttgcttgaagctctgtccctccagctgcatgcagtcctgatgtgggacacagtcaccagaaacccagactaccccttctctctcactcccgggatggagagagaagggggcaggatgtggcaggagggaaagagtacattatagaaaaccagtggacctccggttctgagagcagggatacttggatgaccctaaaggcagagtctctcctggggaaggtttggagaagatggtcaggatcctaccagtgaggctgctggggaaggagccctctgggtggaaaggactgcag

SEQ ID NO: 87952 - DNA, 692 bp, Homo sapiens
gggacatgtgggcccacacatgtgtgtgctgtgtttctggggtgtgtgatcctttgtgatcggggaagcttatgtctctgagcatgtggctgggtgtgtgtttggtaagtctgcgtgtgcgcgtgtgttaggaggtgggccccgtccatggccgtgatgtcatgcacatcacaccatgcctacagcaccgcgctctccttgcagccacggacacacaagccaccccctggtcagcaccccatgtgggtgtctcacgggcttctcaaactcacgtctcctccacccaccctgccaatcacacccaccccttctcagcaaatggcacccctttgctcacgcctgaaccttacatgacatccggcccttctccaagtcctaggtctgtcccctggcctccagcccctgcagaggggcagcactggccccgggtaccggcactgtgtgcgtggaagcccctccctctcagggttcccaatcttccttctgtgcctggactggcccggggtcagtgctgcccaggcaggaagcggaagcccaggtcaagacccacttggccctggctcgtttctccccttgggggcgttctgcaaccctctgcctggtgctgaggtccaccagatgccccagagcttccagactcccacgtgggaggtcctggttcctgtcgctggcaggtagattttgtggtgtgg

SEQ ID NO: 87953 - DNA, 553 bp, Homo sapiens
gtgttggttcctgggaggtgacagcaaaggcaacgccggcttctctgaggaagcgatctttaggccgaggcctgcaggatgagtgcgagtgtggtagcgagctgaggcttgcacattctagagcatggacacagcacaagcagaacttagggccaagaaggtgaataggcgtgtgccggccaaggggaggcctgtgtgtccagggctttggtgagcaggaagggtggaggtggtgggcccagctcccttggaactttgcaggccagagccttgggaagccattgctgcatcctgagcaggggagtgacatgctcgaatttacattcaacaaagatcactctggctgtagtggggagaaggactgggaagagttcgtggtgcaaatgtgcaggctgttgcactgcgccactgtgagaacatggtgctcaggatctcctaaggaggtcagcagccagggcctgttgcctggatagtggctgaggcagagggaggacccaagggggccccagcctgtgcaggagcaaccagatggctagtggctcaataaatgcat

SEQ ID NO: 87954 - DNA, 506 bp, Homo sapiens
aaatataaaaataattactaaaacagcatccacagtgtagcagcagatgtgcatttgcatggtatcggttagaggtgcggtgtgaggcaggccagggaatgcatgttaactaaaccaaatttcacaatgatgttatctttgtgtggtgaaataattggtgagagaagctgctagtccatctaagtacttttatctttaaatgggctgcttgtccatttaaaatggtctgtaactataaaatagtaagattaaaacctaacccctggatttattggaaagactgaagcacaggaagaacctaagtacacagcactatgcctagaacctgtttgtgcttggtacaagttccctttttcctctctgcctgccggatctgccctctttctgggcatttatctttaccaggcagagaagcaattctacatcactctcgggtctcaagacttcacttacagaaacagtgaattaaaataaatttggaaaagtcgcacaaaggataccaattt

SEQ ID NO: 87955 - DNA, 870 bp, Homo sapiens
atgtggaacgcgacgcccagcgaagagccggggttcaacctcacactggccgacctggactgggatgcttcccccggcaacgactcgctgggcgacgagctgctgcagctcttccccgcgccgctgctggcgggcgtcacagccacctgcgtggcactcttcgtggtgggtatcgctggcaacctgctcaccatgctggtggtgtcgcgcttccgcgagctgcgcaccaccaccaacctctacctgtccagcatggccttctccgatctgctcatcttcctctgcatgcccctggacctcgttcgcctctggcagtaccggccctggaacttcggcgacctcctctgcaaactcttccaattcgtcagtgagagctgcacctacgccacggtgctcaccatcacagcgctgagcgtcgagcgctacttcgccatctgcttcccactccgggccaaggtggtggtcaccaaggggcgggtgaagctggtcatcttcgtcatctgggccgtggccttctgcagcgccgggcccatcttcgtgctagtcggggtggagcacgagaacggcaccgacccttgggacaccaacgagtgccgccccaccgagtttgcggtgcgctctggactgctcacggtcatggtgtgggtgtccagcatcttcttcttccttcctgtcttctgtctcacggtcctctacagtctcatcggcaggaagctgtggcggaggaggcgcggcgatgctgtcgtgggtgcctcgctcagggaccagaaccacaagcaaaccgtgaaaatgctgggtgggtctcagcgcgcgctcaggctttctctcgcgggtcctatcctctccctgtgccttctcccttctctctga

SEQ ID NO: 87956 - DNA, 1101 bp, Homo sapiens
atgtggaacgcgacgcccagcgaagagccggggttcaacctcacactggccgacctggactgggatgcttcccccggcaacgactcgctgggcgacgagctgctgcagctcttccccgcgccgctgctggcgggcgtcacagccacctgcgtggcactcttcgtggtgggtatcgctggcaacctgctcaccatgctggtggtgtcgcgcttccgcgagctgcgcaccaccaccaacctctacctgtccagcatggccttctccgatctgctcatcttcctctgcatgcccctggacctcgttcgcctctggcagtaccggccctggaacttcggcgacctcctctgcaaactcttccaattcgtcagtgagagctgcacctacgccacggtgctcaccatcacagcgctgagcgtcgagcgctacttcgccatctgcttcccactccgggccaaggtggtggtcaccaaggggcgggtgaagctggtcatcttcgtcatctgggccgtggccttctgcagcgccgggcccatcttcgtgctagtcggggtggagcacgagaacggcaccgacccttgggacaccaacgagtgccgccccaccgagtttgcggtgcgctctggactgctcacggtcatggtgtgggtgtccagcatcttcttcttccttcctgtcttctgtctcacggtcctctacagtctcatcggcaggaagctgtggcggaggaggcgcggcgatgctgtcgtgggtgcctcgctcagggaccagaaccacaagcaaaccgtgaaaatgctggctgtagtggtgtttgccttcatcctctgctggctccccttccacgtagggcgatatttattttccaaatcctttgagcctggctccttggagattgctcagatcagccagtactgcaacctcgtgtcctttgtcctcttctacctcagtgctgccatcaaccccattctgtacaacatcatgtccaagaagtaccgggtggcagtgttcagacttctgggattcgaacccttctcccagagaaagctctccactctgaaagatgaaagttctcgggcctggacagaatctagtattaatacatga

SEQ ID NO: 87957 - DNA, 655 bp, Homo sapiens
tagtagagacggggtttcaccgtgctagccaggatggttttgatctcctgacctcatgatctgcccatcttgggctcccaaagtgctgggattacaggcatgagccaccgcacccggcctcgtctttatttttaaaaaagaaaaagaaagaaaaacggggagtcgttgggattcaccaagaaaaaataggtggctggcatgcagtggactgtcagtcactgtcaggtgcttccctacctgccttcaggtggcttaattggcagggggtgtttaacagaatacagatctttgagttgatggaaaccttcaatctctggtccgtaatagttaaaaatgtaaaagagtccttagaccaagaagtctgagaaccacttccccgagtcatttctaaagctaaattcagattcaccaggaaatcaagtatggtgaaagacagtgactatacccattgctcacctgatgtatggactcttaatacagcaccaggatcagcctaaaatgtactttcagagcgttcgtgaaccacaccaatcaaaatgacaagtgacactcagaggtcacccaaacccaaaataagaatcagcaaaattccctccattcaccatatcattagtcagtgaaaataactttgcatggcttccagcctttctcagca

SEQ ID NO: 87958 - DNA, 153 bp, Homo sapiens
ggctgctctcaggagaattgaggatagattgtgcacatcactggaccacagcccaaaaatgctggtgagaagagcagaaggagggtttgaaggtttgctgtagccagcaccgtctcagcactcacaccaaggggctctgtcagggcattaaga

SEQ ID NO: 87959 - DNA, 549 bp, Homo sapiens
ttttagaaaaaagttttaaacatcttccttaggaacaaccttataaacgttttaattttcatttatagtgaaagaaacttgtctctcaagctttctaaaagtaattttgagaagttactataaataacctagttacagggctgggtgcagtggctcacacctgtaatcccagcactttgggaggccgaggcatggggtggatcaaaaggtcaagagtttgagaccagcctggacaacatggtgaaaccccgtctctactaagaatacaaaaattagccaagcatggtggcatgtgcctgtaatcccagctactcgggaggctgaggcaggagaattgcttgaacctggggggtggaggttgcagtgagcagaggtcataccactgcactccagcctgggtgacagagcaagactctgtctcaaaaaaacaaacaaacagaggaggagccaagatggccgaataggaacagctccggtctacagctcccagcgtgagcgacgcagaagacggtgatttctgcatttccatctgaggtacgcggttcatct

SEQ ID NO: 87960 - DNA, 185 bp, Homo sapiens
  misc_feature (1)..(2): n is a, c, g, or t
nngcagcaaggccagtgacatttccccctgggcggataggtgaagacggaggctgaggcttgagaagtgagaggacagtaaactgagtggggcccagatgccagggccagtcctctcggcacacctggtgccagacctcccactgtctgacctgccgtctcacggcccctgcctgccctcccacg

SEQ ID NO: 87961 - DNA, 476 bp, Homo sapiens
gaggaaaaaaatcttccaggacactcctggagatctgatgtattcatgaggattgttgacccaatatcaaatagaacagaggttaattgcatgaactgagctaatagaagactaaaataattttttgtgtgatctttttgtctgaaacattggtgattcttttcattttttgggttgtttacagcttttaacaattgagtaaaatatgctcttgtgagcaaaatttaaagcatatttctttctctctacctgatttctccagaatttgaaaactatttttgagtattcttaatttataacaatatagttatttgtatgagctcaataagaatctgctttcttttgtaacaggacacaattggagactattattttactaaagctttgactagaatgaaatattttaagctataaacaaaacaacaaactgttttaaggaattgccattgacttatagagccaataaaagatcctta

SEQ ID NO: 87962 - DNA, 915 bp, Homo sapiens
ttttttctgtatgttttgcaaagatgaggtttcgccatgttgctcaggctggtcttagacctcctgagctcaggcaatctgcccaccttggcctcccaaagtgctaggactataagcgtgaaccacgacgcccggacagccactgcgcccagccttattttgtttttgagacagggtctctcactctgtccccaaagctggggtgcaatggtgcaatcttgcctcactgcagccttgaagtcctgggctcaaacattcctcccacctcagtctcctggggagctaggactacaggcatggaccaccacacctggttacttttttttttttttttttggtagagatagagtctctatgttgaccaggctggtcacaggagctatgttgactcctggcctcaagtgactctctgacctcggcctcccaaagtgctgggattacaggcatgaggcaacatgcctagctgaagttatgtgtaaaatggaactagctatttcgaaaaaatggtaagcttcttaaaaatgttcaaaaacccaggcgtggtggctcacgcctgtaatcccagcactttgggaggccaagacgggtggatcacttgaggtaaggagtttgagaccagcctggccaacatggcgaaatcccatctccacgaaaaatacaaaaattatcggaaggctgggcacagtggctcatgcctgtaatcccagcactttgggaagccgagtcaggcagatcacgaggtcaggagttcgagaccagcctaaccaacatggtgaaactctgtctctactaaaaatacaaaaaattagcagggtgtggtggcgcacgcctgtaatcccagctactcaggaggctgaggcaagagaactgcttgaacctgggaggcggaggctgcagcgagccaagattgcacca

SEQ ID NO: 87963 - DNA, 298 bp, Homo sapiens
cctcctgggttcacgtcattctcctgcctcagcctcccgagtagctgggactacaggtgcccgccaccacgcccagctaattttttgtatttttagtagagacggggtttcaccatgttagccaggatggtctcgatctcctgacctcgtgatttgcccacctccgcctcccaaagtgctgggattacaggcatgagccattgcgcccagcctaaaattcattcttttaaagtgtgcaattcagtgtttcttagtatattcccaaagttctgcagccatcgccgctatctaaacccag

SEQ ID NO: 87964 - DNA, 339 bp, Homo sapiens
tgaaagaacatttcagactgctttcttcttcatttcacactttccatgagacttgacaagtaggcaggattctacagacaatggcaacattgctacagctgtagaacttctcacctaagaggttcacaggtgtggtgatggttcaaaacagaagtctttcgaggtaggatgtgtgctgacttagggaaagaatgctgtacctgcattattacagacctcttttggatctttaatgttgctaaaattatctgggtggcaaacataaaaatagtgaaattatgtaatttggctaatactctctatctgcttgtgtggcctcttcacattggggataaaatg

SEQ ID NO: 87965 - DNA, 810 bp, Homo sapiens
ggagaggacattgtctgagtggcccctcaggtctgttttggggacattcacccagaccccagctaatgcgcgccccttcccctaaaccatttagtcttggaagctgactctgccctctgggaccttttcttccaggccactccttgctcagactccagtctcaggtgggatggtcctcagaaccgtgtgatgtgacggtggggcctgtcccaaaatacaaaccccaatgcccagtttccagtcctcttggaagcatgggcaggacaggacttaggctaggctggaggggtggtttcttttgacctctgtggggtctattaatatttgggagcactgcctgggatctggggtgataggcatctggggatggtaatcctgtccctgcgacaaataagcggggtaatctccgcttgctcagtacccacacccatcttgtgtcggtagttttgggagtgtgggaagctggcagggcccctggcaagatgaccagtgttgtcttgacttactgggttttgggaaaggagtatggcaactgataccccggctcccagggctttggctgaacattctctctgacgcctgctgtctttcctccctctactcccctctccaccctctggctgctgtctggagcccacacagtttgtggggggatgcacggtggggggcagggcctggatctccgtgtgtgtccagggagtattctgggaattggcaggattggctgagggtgtcttggtgtccccgcagggtgggcggcatgtggggacctagtgtgagaatgtgtcagcgttggtgtgtctgtcccca

SEQ ID NO: 87966 - DNA, 446 bp, Homo sapiens
  misc_feature (208)..(208): n is a, c, g, or t
  misc_feature (216)..(216): n is a, c, g, or t
  misc_feature (262)..(262): n is a, c, g, or t
ggaggtcctcctcctaaaaagtctgctccttctgctgtggtaagaagcaataattggatgagaggccaaggtcccatatcatgtggaagagagaattatggaggtcctacacgtagacggccaatctcttcctggagaaatgaccacatgtctctaagagacgatggttatgcaactaaggagagaaatcatccaagctcctgagaanctaggacnccacctagagactatgcataccatgattatggtcattctagctggnatgaacattcttctagaggatatagcctgcagggacctctcatggtgcaccacctgcacgagggcctcggatgtcttatggtggaagcagccgccctgattataacaatacactagatagatatggcagaagtcaggagagttactcaagaagctgcggtgatttttatttttgtggtcatgag

SEQ ID NO: 87967 - DNA, 113 bp, Homo sapiens
ggccgcctctcctcccggagcgagcgcgcagccctgcgcagcagcgcccactggtcccgtcctgtgagccccggccccagccgcggacagacccgcggagtcgcctcccggcc

SEQ ID NO: 87968 - DNA, 395 bp, Homo sapiens
tttttaaagcattttaagtgaataattgagcatttgatttattatcctggcttttctatctgggtctttgaaagggacaaaaggagcacatatacaccatgggatgtagcctggccagattgaaaactgaaaattgatggatttggagtatgcaggcagatagttgaatgctgggacagggatcctctttgctgactgcctcatggttaagcttttaaaaatttgttggttaagcttttaaaaaaattttagggtttttagggcaatgaagttactctgtatgatgctataatacatcgtggatacgtgtcattgtacatttgtccaaacacatagaatgcaggacaccaagagtgaaccctgacataaactgtggactttgggtgataacgaca

SEQ ID NO: 87969 - DNA, 632 bp, Homo sapiens
gtaccacttgtgcgagataactcagctcagggcagaggatcggtggaaaagatgactgacctcctggcctgacttggaagtcagtggcctgtaactcaacaggtgggagccaggcacctgtgctaagagcagagcagaagtgggcagaggcatcctgggctggactcagcttccacaaggatccttcatcctcacttccaccctcctgctagcttgtgggaggggtgctacatggagaaattgggtgggaagggaaaaaaggaaggagccacatcagtgacaatgccacattcacagatccccacagcctgaatgccctccatgaagtcctctgtctcccgggtgtgtacccaactaggccagatggagctctccccagcatttctccattctttctatggaggcacctggaaaacagtagctgggagcctgcactgtggcatcggattgcctgggtctacattctgattctgtctctttcaaattgctgactttagatgagttatttcaattatttggacctggctggacacagtggctcacacctgtaatcccaccactttgggaggccaaggtgggtggatcacttgaggtcaggagtttgagaccagcctgggcaacatggcaaaacc

SEQ ID NO: 87970 - DNA, 192 bp, Homo sapiens
caagtcaccagggaccacagcaatgcacagtgctggcgggcgtcccatgctcgcaagagaagctggaaatccagtatctttttcatgcgaactcccaatttttaaacgttggcaacaaattccaatgaaaaagatacagttcaaacaaaacacattttctggctatatcacacaagggtggctgggttagtt

SEQ ID NO: 87971 - DNA, 407 bp, Homo sapiens
tgtacatgtgtgtgtataatttaaagtaccttcctcatgattggaaatgcataattatgaagtgccatacaatgttgcactagactttaaatttttgcattaaaatctactttaatattaactgtagtttttgcttttattaactacttttcataaagcacatgttgttatccacttcctctatcatttttgcgttttgagtgactttcttctagagtgtatataaaagggttttttaaattttattattattttgtggtaggtagtcaagccacacttcctgtattttattttactatgtttgattaatattatattaattgaaaaatcaaaattgtatacatgtatggggtataatgtggtgtttaaatatatgtatacaatgtagaataaaatgatttctttgt

SEQ ID NO: 87972 - DNA, 387 bp, Homo sapiens
aaagaatgtggatcatacagtagattacacagctacacttggacagtgacttcatcagccatgcgatattctaatttgcaaaatgatgagatgagacaggggcagcaacggcagcacagagagatgacccgttccacctcttcctttggtggccacattctatatttaatacagagaatataaagccataaaccagcttccttttctctgcagccacacctaagagaaaacatgcatattcagaacataccatgggctctttttctctctagcagtctgtatttagtcacatttcagaacttcatgagatgatgaatctccagcatctgagagggatgttgtgtgttactagaatcatgaaatcattttgaggagctaagaggcaag

SEQ ID NO: 87973 - DNA, 292 bp, Homo sapiens
ggccgggctgactccgcttctgggcggccgggcctccgcgagtaccgggtcgacttcggagtctgcgagcccagccaggggtgcccgcttcccacccctctccccgagcggcgtccccgtcggggtcgaacctcccccgcgacaggcgcccagccgcctgttcccccaggccttgcctgcggaccgccctgggaacggcgtctgggagccccgaggggctggcgggactcggggcccgggccatgcggcagccgcccccgcccctccgcgaccatccccggcccaagcggga

SEQ ID NO: 87974 - DNA, 2148 bp, Homo sapiens
  misc_feature (33)..(33): n is a, c, g, or t
ctgacacggatccagtcatacctggggctggangggatttggaggccctggtcatttgcagagtgaatggtgaagggcgcggaaaaggtttgcttggaggaaagaccggttgcagaggcgaggcggagggaggaggggcggaggcagcaggtctttgtttgtggtaggtctctggcttccatcagggaggaggaaagaggctgtgcccttcctggctcttggctgcaccactgaggacgctccgagggacagcgtgctcacccatcctttgcacagtgctggccccaagccccacggccttccagctaggattttctgctgggctcatgcagaggcaggggacaggtgcatggaagagccgccccacccgacacaccattgtttgaaaatcactgttctctttactcacttaaaaaagtgtacagggaacacctgttcctggcataatgctccaacctcgcggaaggggccaggtgcccttcatctggctctggctgcttccgacctgggcccacgtcatcgttcacgtcctctgtgaccaccactggtcacggtgctccctggcccagcctccaacccacccagcaccctggcatctcccaggccagtctgctgcacccagcgagcttccagtcagaagccaggctgaacggccctcctgccccatcagcttcgtgtcttctttttttttaaagaactgaaatagtccccaagaggcctcatggcctgaagactcacaatcatccacctgtaatttatgataaatgtctgggagcatttaccatttgcgtccgtgagtatttatagccctgaatgggcgggggggagggggggtggaggaggccctgcagccaggagctacacacctgtccccactagtgtcccctggttgacagagccccctcagcctccccaaggctgtcactgcggctgtgacagctgaggagtgccgcctttgaaagccagtggacagtcgctccactagggggagaggccctggccctggcgcagaggaggcgttgcgaggcgggacgggggctggaggggctgagcagccttcagggcagggactgggccctgggtcactggagacgttgatattagtccgtctgctgccaaattgctccccaccacatgagccccaggggtttatgtcccaggaaggcgagggtgcccatctgagcggaattgggaggggacggcaccagctcatctccctcagggcctttgcctcctggtgctgccctggtggctgctcctgcaccacagcccctgatggctgctgctagtcctgagttgctgggtttacccccagcccacacttcccacctgggcctgagggtgcggccagtgccctagtcctagccactacaggagtcattctgagacctgctggaggccatggggtcttcccaggcccctcaatcagctgcttccagggtcagcagggcagggtgctgccagtaaggtcctcagggagcacagcccggccgcccaggctgggggatactggggcagagcttccaggtctgtggggcctgatctctccccaaggctctccaggccttggtgcgccctccacagtgaccttcagagaggctgcaccccctcagaagaacagtgagaaatctctccatcacacgctccctggtccttatgtccctgaggccacccttccccaccccccagtgcctggagaagcgtgagactctggaggggcgccaggaggccaggggtcctcagggctaggcctggagctcggcccaagagctgcttttgcgaagcctgtcttgaatccggattcaccagagaacaagagcctcccagcctttggcgtttctgggcctgtaaagatgtgtgtacctcccaggccactctgatgcaagggcagggaccatgccaggcctgggttgggaatggctctgtgactccagaagctccgtctaaaactccaaagatgcccaaaaggctgtgctgctatgtggaatgtgtattatttgtgagcacgatgcggcttcttcctcattttgcagagcaacctaagcgggcagatgtacaaaccgtgtgttcgaaacccctgagtccatgtgtgtgaaaatgcaggttttctcttagaaataaagtggtgacttgtgctgtaaacgagtc

SEQ ID NO: 87975 - DNA, 1906 bp, Homo sapiens
  misc_feature (33)..(33): n is a, c, g, or t
ctgacacggatccagtcatacctggggctggangggatttggaggccctggtcatttgcagagtgaatggtgaagggcgcggaaaaggtttgcttggaggaaagaccggttgcagaggcgaggcggagggaggaggggcggaggcagcaggtctttgtttgtggtaggtctctggcttccatcagggaggaggaaagaggctgtgcccttcctggctcttggctgcaccactgaggacgctccgagggacagcgtgctcacccatcctttgcacagtgctggccccaagccccacggccttccagctaggattttctgctgggctcatgcagaggcaggggacaggtgcatggaagagccgccccacccgacacaccattgtttgaaaatcactgttctctttactcacttaaaaaagtgtacagggaacacctgttcctggcataatgctccaacctcgcggaaggggccaggtgcccttcatctggctctggctgcttccgacctgggcccacgtcatcgttcacgtcctctgtgaccaccactggtcacggtgctccctggcccagcctccaacccacccagcaccctggcatctcccaggccagtctgctgcacccagcgagcttccagtcagaagccaggctgaacggccctcctgccccatcagcttcgtgtcttctttttttttaaagaactgaaatagtccccaagaggcctcatggcctgaagactcacaatcatccacctgtaatttatgataaatgtctgggagcatttaccatttgcgtccgtgagtatttatagccctgaatgggcgggggggagggggggtggaggaggccctgcagccaggagctacacacctgtccccactagtgtcccctggttgacagagccccctcagcctccccaaggctgtcactgcggctgtgacagctgaggagtgccgcctttgaaagccagtggacagtcgctccactagggggagaggccctggccctggcgcagaggaggcgttgcgaggcgggacgggggctggaggggctgagcagccttcagggcagggactgggccctgggtcactggagacgttgatattagtccgtctgctgccaaattgctccccaccacatgagccccaggggtttatgtcccaggaaggcgagggtgcccatctgagcggaattgggaggggacggcaccagctcatctccctcagggcctttgcctcctggtgctgccctggtggctgctcctgcaccacagcccctgatggctgctgctagtcctgagttgctgggtttacccccagcccacacttcccacctgggcctgagggtgcggccagtgccctagtcctagccactacaggagtcattctgagacctgctggaggccatggggtcttcccaggcccctcaatcagctgcttccagggtcagcagggcagggtgctgccagtaaggtcctcagggagcacagcccggccgcccaggctgggggatactggagctcggcccaagagctgcttttgcgaagcctgtcttgaatccggattcaccagagaacaagagcctcccagcctttggcgtttctgggcctgtaaagatgtgtgtacctcccaggccactctgatgcaagggcagggaccatgccaggcctgggttgggaatggctctgtgactccagaagctccgtctaaaactccaaagatgcccaaaaggctgtgctgctatgtggaatgtgtattatttgtgagcacgatgcggcttcttcctcattttgcagagcaacctaagcgggcagatgtacaaaccgtgtgttcgaaacccctgagtccatgtgtgtgaaaatgcaggttttctcttagaaataaagtggtgacttgtgctgtaaacgagtc

SEQ ID NO: 87976 - DNA, 307 bp, Homo sapiens
ggttgtagtgagcagagatcacaccactgcactccagcctgggcgacaacagcgaaactctgcctcaaaataaataaataaccacagactgtgctgggagaatgtataatgaggaactggccccacctggagggtaaggaagcaacactgatcagagatcagaaatggtagggctaataaccagctaaatgagacaacaggactaggaagagcgcaagctctccgtacttggtgtttctttgctctgaaggttttcagatccttccccttcacaagtttcttcctctctttcttcttctttctttct

SEQ ID NO: 87977 - DNA, 659 bp, Homo sapiens
tcccaaaaagaaaaaatagcaaaaggaagaaattaactgctgataaaacaacatgaatcagttcaacaataaaaaaaaccttactgagttaaaccagatacaaaagcatacaaactgcgagattctatgtatttgaaagtctagaacaagcaaaaccaacctatagtgaaaaagagcagtggttgcctttgtaggggaggaggaaagtggaaactgactagaaagggtcgtgaggggactttctgaactgatgatgatatgccgcatcgtaataggattacacagttacatgcatttgtcaatgctcaggaaatagcccacttaagttgtgatttcattatatttaggttttacgtcacacacacaaaaagaattataggctggccatggtggctcacacctgtaaccccagaactttgggaggccaaggtgggtggatcactttagcccaggagttcgagaccagctgggcaacatgatgaaacgccatctctacaaaaaaaaaaaaatacaaaaattagctgggcatggttgtgcatgcctgtgatcccagatactcaggaggctgagatgggaggatcacttgatccccggaggttgagggtgcagtgagccttgattgcacaattgtattccaacctgagggaaagcctgcctca

SEQ ID NO: 87978 - DNA, 410 bp, Homo sapiens
tgcgggagggctgcctggaattgaggccttattactggctctagccaaataggagaaaacagggagtttctcgaattagttcatgtcccatttgggttacccaggaaggatagtctgtgctattgtccacagagtcaaggcaggccagagaactggcagacaagcccagctccagaagccagagttactgctgtagctggacctggaaaccactcctcagctggaccagtcactgtgtgtggggcctttaatgggaggggaagggaaactatgaaacacatcctaataccatgtaagggtgatgactgtgattagagacattattagatggcggatacacagaatccttaactttttccagaccgtgacttaaaaaaaaattgtcattgtttctttttggcaattacttg

SEQ ID NO: 87979 - DNA, 305 bp, Homo sapiens
caggttcctgttgttgtgacaaaggcttcttagtaggaggaatgccttggccctagaagctggttaaggtctacagattgagtgagtcctatttggaacagggatgggccttacagtattctttgccatcttaaggtcagggaacttaagaatagcaaacctggactactctgtcaaaaggtcatgctcagtcgggcctgacggggtgctcctgtagtcccagctactccgtaggctgtggtgggtggatcagtcgagcccaggagttcaagtccaggttgtgcaacatagcaagaccttgtctc

SEQ ID NO: 87980 - DNA, 141 bp, Homo sapiens
tcagtaggtgctgggagatgtgattcttggtggcagaggcctccaaacagagtggtaaaaaccaactgcctaggtgcgaaccttgcctctcccacttcctggctgtgagacttacgtactttttctggttgttttttctcg

SEQ ID NO: 87981 - DNA, 332 bp, Homo sapiens
ggtcaccgcagcaggccgggcccatgcgttatgagccgggtgcggacgtgatggtgctcggggaagtcgggggctttgacgcctgaaggcgcgggagccgggcgcctgggggaagggggtccggcgccgtcacctcccactcctcgcccgcgggtcggggagcccctgccgcgggggaaggaggctgtttcctttgtaaactggcggaggcgcgcctggcccctgggcccggcaacccgaagagacacgcccgagacctccggagggagttaaccccccgggccccggtgccggccacccccaggcgcgcagggtggccctgagccgggcgc

SEQ ID NO: 87982 - DNA, 898 bp, Homo sapiens
tgcagtcaggacagacgtcccaggcgagcagaggccctgcgtgaggatggggcggcggggccagatggtgtcctgagtatccatcctccctggtggctgaggacacgctgaccagcgtggggtcaggagcatggcccctggaaagcaaagatttctgaagacgtctttctagaaatgactggaaagtttcaagaggcataagatacagcatttcttctgaggccctgaagaagtatcaagtgggctttgacattgcggtggtgagagcgacccctcctcacctggagaactgggaaatgtggattctcagggaccgcgctgttcacgagctccaggctgtgctgctggccctggtcctggggcgctgagccgcatctgcaatagcacacttgcccggccacctgctgccgtgagcctttgctgctgaagcccctggggtcgcctctacctgatgaggatgtgcacccccattagggggctgctcatggcccttgcagtgatgtttgggacagcgatggcatttgcacccataccccggatcacctgggagcacagagaggtgcacctggtgcagtttcatgagccagacatctacaactactcagccttgctgctgagcgaggacaaggacaccttgtacataggtgcccgggaggcggtcttcgctgtgaacgcactcaacatctccgagaagcagcatgaggtgtatcggaagggtctcagaaagacaaggaaaacgcaaatggtgcagaaaacaggggagaccaaacacgaacagagtggctcaactacatccaggggggcggcaggcaatcaagaggccgatacggatacgtgagtggggaccaaggcatccaagcgggcctggtgacacccgaacataacatcttaaatacgg

SEQ ID NO: 87983 - DNA, 4753 bp, Homo sapiens
agcattggcaacccgctcgggtccccttccacactgtggaagctttgttctttcgctcttgctactgctagctctttgggtccacgctgcttttatgagctgtaacactcaccgcgaagatctgcagcttcactcctgagcccagcgagaccacgagcccaccgggaggaacgaacaactccagacgcgctgccttaagagctgtaacactcaccgtgaaggtctgcagcttcactcccgagccagcgagaccacgaacccaccagaaggaagaaactctgaacacatctgaacatcagaagggacagactccagacgcgccaccactctgctaacaccagatagtggaaagaaaccatgtgctgaaatgtttgacgacactgatggtttgcaaagatttctgaagacgtctttctagaaatgactggaaagtttcaagaggcataagatacagcatttcttctgaggccctgaagaagtatcaagtgggctttgacattgcggtggtgagagcgacccctcctcacctggagaactgggaaatgtggattctcagggaccgcgctgttcacgagctccaggctgtgctgctggccctggtcctggggcgctgagccgcatctgcaatagcacacttgcccggccacctgctgccgtgagcctttgctgctgaagcccctggggtcgcctctacctgatgaggatgtgcacccccattagggggctgctcatggcccttgcagtgatgtttgggacagcgatggcatttgcacccataccccggatcacctgggagcacagagaggtgcacctggtgcagtttcatgagccagacatctacaactactcagccttgctgctgagcgaggacaaggacaccttgtacataggtgcccgggaggcggtcttcgctgtgaacgcactcaacatctccgagaagcagcatgaggtgtattggaaggtctcagaagacaaaaaagcaaaatgtgcagaaaaggggaaatcaaaacagacagagtgcctcaactacatccgggtgctgcagccactcagcgccacttccctttacgtgtgtgggaccaacgcattccagccggcctgtgaccacctgaacttaacatcctttaagtttctggggaaaaatgaagatggcaaaggaagatgtccctttgacccagcacacagctacacatccgtcatggttgatggagaactttattcggggacgtcgtataattttttgggaagtgaacccatcatctcccgaaattcttcccacagtcctctgaggacagaatatgcaatcccttggctgaacgagcctagtttcgtgtttgctgacgtgatccgaaaaagcccagacagccccgacggcgaggatgacagggtctacttcttcttcacggaggtgtctgtggagtatgagtttgtgttcagggtgctgatcccacggatagcaagagtgtgcaagggggaccagggcggcctgaggaccttgcagaagaaatggacctccttcctgaaagcccgactcatctgctcccggccagacagcggcttggtcttcaatgtgctgcgggatgtcttcgtgctcaggtccccgggcctgaaggtgcctgtgttctatgcactcttcaccccacagctgaacaacgtggggctgtcggcagtgtgcgcctacaacctgtccacagccgaggaggtcttctcccacgggaagtacatgcagagcaccacagtggagcagtcccacaccaagtgggtgcgctataatggcccggtacccaagccgcggcctggagcgtgcatcgacagcgaggcacgggccgccaactacaccagctccttgaatttgccagacaagacgctgcagttcgttaaagaccaccctttgatggatgactcggtaaccccaatagacaacaggcccaggttaatcaagaaagatgtgaactacacccagatcgtggtggaccggacccaggccctggatgggactgtctatgatgtcatgtttgtcagcacagaccggggagctctgcacaaagccatcagcctcgagcacgctgttcacatcatcgaggagacccagctcttccaggactttgagccagtccagaccctgctgctgtcttcaaagaagggcaacaggtttgtctatgctggctctaactcgggcgtggtccaggccccgctggccttctgtgggaagcacggcacctgcgaggactgtgtgctggcgcgggacccctactgcgcctggagcccgcccacagcgacctgcgtggctctgcaccagaccgagagccccagcaggggtttgattcaggagatgagcggcgatgcttctgtgtgcccggataaaagtaaaggaagttaccggcagcattttttcaagcacggtggcacagcggaactgaaatgctcccaaaaatccaacctggcccgggtcttttggaagttccagaatggcgtgttgaaggccgagagccccaagtacggtcttatgggcagaaaaaacttgctcatcttcaacttgtcagaaggagacagtggggtgtaccagtgcctgtcagaggagagggttaagaacaaaacggtcttccaagtggtcgccaagcacgtcctggaagtgaaggtggttccaaagcccgtagtggcccccaccttgtcagttgttcagacagaaggtagtaggattgccaccaaagtgttggtggcatccacccaagggtcttctcccccaaccccagccgtgcaggccacctcctccggggccatcacccttcctcccaagcctgcgcccaccggcacatcctgcgaaccaaagatcgtcatcaacacggtcccccagctccactcggagaaaaccatgtatcttaagtccagcgacaaccgcctcctcatgtccctcttcctcttcttctttgttctcttcctctgcctctttttctacaactgctataagggatacctgcccagacagtgcttgaaattccgctcggccctactaattgggaagaagaagcccaagtcagatttctgtgaccgtgagcagagcctgaaggagacgttagtagagccagggagcttctcccagcagaatggggagcaccccaagccagccctggacaccggctatgagaccgagcaagacaccatcaccagcaaagtccccacggatagggaggactcacagaggatcgacgacctttctgccagggacaagccctttgacgtcaagtgtgagctgaagttcgctgactcagacgcagatggagactgaggccggctgtgcatccccgctggtgcctcggctgcgacgtgtccaggcgtggagagttttgtgtttctcctgttcagtatccgagtctcgtgcagtgctgcgtaggttagcccgcatcgtgcagacaacctcagtcctcttgtctattttctcttgggttgagcctgtgacttggtttctctttgtccttttggaaaaatgacaagcattgcatcccagtcttgtgttccgaagtcagtcggagtacttgaagaaggcccacgggcggcacggagttcctgagccctttctgtagtgggggaaaggtggctggacctctgttggctgagaagagcatcccttcagcttcccctccccgtagcagccactaaaagattatttaattccagattggaaatgacattttagtttatcagattggtaacttatcgcctgttgtccagattggcacgaaccttttcttccacttaattatttttttaggattttgctttgattgtgtttatgtcatgggtcatttttttttagttacagaagcagttgtgttaatatttagaagaagatgtatatcttccagattttgttatatatttggcataaaatacggcttacgttgcttaagattctcagggataaacttccttttgctaaatgcattctttctgcttttagaaatgtagacataaacactccccggagcccactcaccttttttctttttctttttttttttttaactttattccttgagggaagcattgtttttggagagattttctttctgtacttcgttttacttttctttttttttaacttttactctctcgaagaagaggaccttcccacatccacgaggtgggttttgagcaagggaaggtagcctggatgagctgagtggagccaggctggcccagagctgagatgggagtgcggtacaatctggagcccacagctgtcggtcagaacctcctgtgagacagatggaaccttcacaagggcgcctttggttctctgaacatctcctttctcttcttgcttcaattgcttacccactgcctgcccagactttctatccagcctcactgagctgcccactactggaagggaactgggcctcggtggccggggccgcgagctgtgaccacagcaccctcaagcatacggcgctgttcctgccactgtcctgaagatgtgaatgggtggtacgatttcaacactggttaatttcacactccatctccccgctttgtaaatacccatcgggaagagactttttttccatggtgaagagcaataaactctggatgtttgtgcgcgtgtgtggacagtcttatcttccagcatgataggatttgaccattttggtgtaaacatttgtgttttataagatttaccttgtttttatttttctactttgaattgtatacatttggaaagtacccaaataaatgagaagcttctatcctt

SEQ ID NO: 87984 - DNA, 249 bp, Homo sapiens
taaatagccttgtttcccattattttcacagcaaagatttctgaagacgtctttctagaaatgactggaaagtttcaagaggcataagatacaggtaaaaccactttattcatgatctgtaatttcagttgagcagagttgataatgtgtagaggcctcagttggatctggcaggtggttggttgcttggtcccttggtccctgatatcctgtggggcaaagcttcagacttggctgccatcccttggg

SEQ ID NO: 87985 - DNA, 4690 bp, Homo sapiens
agcattggcaacccgctcgggtccccttccacactgtggaagctttgttctttcgctcttgctactgctagctctttgggtccacgctgcttttatgagctgtaacactcaccgcgaagatctgcagcttcactcctgagcccagcgagaccacgagcccaccgggaggaacgaacaactccagacgcgctgccttaagagctgtaacactcaccgtgaaggtctgcagcttcactcccgagccagcgagaccacgaacccaccagaaggaagaaactctgaacacatctgaacatcagaagggacagactccagacgcgccaccactctgctaacaccagatagtggaaagaaaccatgtgctgaaatgtttgacgacactgatggtttgcatttcttctgaggccctgaagaagtatcaagtgggctttgacattgcggtggtgagagcgacccctcctcacctggagaactgggaaatgtggattctcagggaccgcgctgttcacgagctccaggctgtgctgctggccctggtcctggggcgctgagccgcatctgcaatagcacacttgcccggccacctgctgccgtgagcctttgctgctgaagcccctggggtcgcctctacctgatgaggatgtgcacccccattagggggctgctcatggcccttgcagtgatgtttgggacagcgatggcatttgcacccataccccggatcacctgggagcacagagaggtgcacctggtgcagtttcatgagccagacatctacaactactcagccttgctgctgagcgaggacaaggacaccttgtacataggtgcccgggaggcggtcttcgctgtgaacgcactcaacatctccgagaagcagcatgaggtgtattggaaggtctcagaagacaaaaaagcaaaatgtgcagaaaaggggaaatcaaaacagacagagtgcctcaactacatccgggtgctgcagccactcagcgccacttccctttacgtgtgtgggaccaacgcattccagccggcctgtgaccacctgaacttaacatcctttaagtttctggggaaaaatgaagatggcaaaggaagatgtccctttgacccagcacacagctacacatccgtcatggttgatggagaactttattcggggacgtcgtataattttttgggaagtgaacccatcatctcccgaaattcttcccacagtcctctgaggacagaatatgcaatcccttggctgaacgagcctagtttcgtgtttgctgacgtgatccgaaaaagcccagacagccccgacggcgaggatgacagggtctacttcttcttcacggaggtgtctgtggagtatgagtttgtgttcagggtgctgatcccacggatagcaagagtgtgcaagggggaccagggcggcctgaggaccttgcagaagaaatggacctccttcctgaaagcccgactcatctgctcccggccagacagcggcttggtcttcaatgtgctgcgggatgtcttcgtgctcaggtccccgggcctgaaggtgcctgtgttctatgcactcttcaccccacagctgaacaacgtggggctgtcggcagtgtgcgcctacaacctgtccacagccgaggaggtcttctcccacgggaagtacatgcagagcaccacagtggagcagtcccacaccaagtgggtgcgctataatggcccggtacccaagccgcggcctggagcgtgcatcgacagcgaggcacgggccgccaactacaccagctccttgaatttgccagacaagacgctgcagttcgttaaagaccaccctttgatggatgactcggtaaccccaatagacaacaggcccaggttaatcaagaaagatgtgaactacacccagatcgtggtggaccggacccaggccctggatgggactgtctatgatgtcatgtttgtcagcacagaccggggagctctgcacaaagccatcagcctcgagcacgctgttcacatcatcgaggagacccagctcttccaggactttgagccagtccagaccctgctgctgtcttcaaagaagggcaacaggtttgtctatgctggctctaactcgggcgtggtccaggccccgctggccttctgtgggaagcacggcacctgcgaggactgtgtgctggcgcgggacccctactgcgcctggagcccgcccacagcgacctgcgtggctctgcaccagaccgagagccccagcaggggtttgattcaggagatgagcggcgatgcttctgtgtgcccggataaaagtaaaggaagttaccggcagcattttttcaagcacggtggcacagcggaactgaaatgctcccaaaaatccaacctggcccgggtcttttggaagttccagaatggcgtgttgaaggccgagagccccaagtacggtcttatgggcagaaaaaacttgctcatcttcaacttgtcagaaggagacagtggggtgtaccagtgcctgtcagaggagagggttaagaacaaaacggtcttccaagtggtcgccaagcacgtcctggaagtgaaggtggttccaaagcccgtagtggcccccaccttgtcagttgttcagacagaaggtagtaggattgccaccaaagtgttggtggcatccacccaagggtcttctcccccaaccccagccgtgcaggccacctcctccggggccatcacccttcctcccaagcctgcgcccaccggcacatcctgcgaaccaaagatcgtcatcaacacggtcccccagctccactcggagaaaaccatgtatcttaagtccagcgacaaccgcctcctcatgtccctcttcctcttcttctttgttctcttcctctgcctctttttctacaactgctataagggatacctgcccagacagtgcttgaaattccgctcggccctactaattgggaagaagaagcccaagtcagatttctgtgaccgtgagcagagcctgaaggagacgttagtagagccagggagcttctcccagcagaatggggagcaccccaagccagccctggacaccggctatgagaccgagcaagacaccatcaccagcaaagtccccacggatagggaggactcacagaggatcgacgacctttctgccagggacaagccctttgacgtcaagtgtgagctgaagttcgctgactcagacgcagatggagactgaggccggctgtgcatccccgctggtgcctcggctgcgacgtgtccaggcgtggagagttttgtgtttctcctgttcagtatccgagtctcgtgcagtgctgcgtaggttagcccgcatcgtgcagacaacctcagtcctcttgtctattttctcttgggttgagcctgtgacttggtttctctttgtccttttggaaaaatgacaagcattgcatcccagtcttgtgttccgaagtcagtcggagtacttgaagaaggcccacgggcggcacggagttcctgagccctttctgtagtgggggaaaggtggctggacctctgttggctgagaagagcatcccttcagcttcccctccccgtagcagccactaaaagattatttaattccagattggaaatgacattttagtttatcagattggtaacttatcgcctgttgtccagattggcacgaaccttttcttccacttaattatttttttaggattttgctttgattgtgtttatgtcatgggtcatttttttttagttacagaagcagttgtgttaatatttagaagaagatgtatatcttccagattttgttatatatttggcataaaatacggcttacgttgcttaagattctcagggataaacttccttttgctaaatgcattctttctgcttttagaaatgtagacataaacactccccggagcccactcaccttttttctttttctttttttttttttaactttattccttgagggaagcattgtttttggagagattttctttctgtacttcgttttacttttctttttttttaacttttactctctcgaagaagaggaccttcccacatccacgaggtgggttttgagcaagggaaggtagcctggatgagctgagtggagccaggctggcccagagctgagatgggagtgcggtacaatctggagcccacagctgtcggtcagaacctcctgtgagacagatggaaccttcacaagggcgcctttggttctctgaacatctcctttctcttcttgcttcaattgcttacccactgcctgcccagactttctatccagcctcactgagctgcccactactggaagggaactgggcctcggtggccggggccgcgagctgtgaccacagcaccctcaagcatacggcgctgttcctgccactgtcctgaagatgtgaatgggtggtacgatttcaacactggttaatttcacactccatctccccgctttgtaaatacccatcgggaagagactttttttccatggtgaagagcaataaactctggatgtttgtgcgcgtgtgtggacagtcttatcttccagcatgataggatttgaccattttggtgtaaacatttgtgttttataagatttaccttgtttttatttttctactttgaattgtatacatttggaaagtacccaaataaatgagaagcttctatcctt

SEQ ID NO: 87986 - DNA, 278 bp, Homo sapiens
ctcactgctcttgggcaatttaaagttactgtcagggactatggctggtaacaacagtgtggttttcagttatctgttgagttctggaaaccttgtttttgcttggaagaaagaattgatacttggatgttaaagttctgtaggggtacagcctggcgtggtagctcatgcatataatcccagcactttgggaggctgaggtgggtggatctcttgaggccaggagttcgagaccagcctggtcaacatggcgaaactcttgtctctactaacaatac

SEQ ID NO: 87987 - DNA, 1432 bp, Homo sapiens
gcaacatattcctaaaatgtttttatcttgcaaagctaaatatcaatacccattaaaaaactatgaattttacccatttcctggcacttttcaaacaccactctgttttctctaagagtgtaactgcttcatatatctcatacaatctctgtctttttgtgactggctcattttattttgcacaatatcatcaagctttatagttgttagaatattttctgctttttaaatactgggtgatatttaagtattttgtattttagattatatctactgagtaatttggtgacaaatttgcactgcttttacctattggctttcagtaacaatgctgcaataattacaggtatgcaaatgacctatatgatcatatatgtgtaagtttatatatgtgccgcattctgttctactagtgtacgtttttacctttgtactcataccaaattgttacaattctgtagctctgtaatgtgtttcaaaatcagaaactgtaatgccttcaaaattgtttattttattgcagatttttgggtactttattatctcttaagactttatatactttgggggttgctgtttctatttcttcaaaaatgcatgagaaatttgaacaacattgcattaaatctgtaaattacattgagcaggatggacatcttcacaagattaattattttaacatttcaacaagcatgctcaagagtgtattgttttaatttctatgtatttgtgaatttttcagttttttcttcttactgttctatactcatttcattttggtcatagaaagtaatccataaaaatttagttttaaataatttgttaagacttcttttttggtttaccaggttttctatcaaggagaatttcgtatgaggtattgagaaggctgtttatcattatgttgttgagtgttctttatgcctctgttattaataattgttttatactcccttcaagtccggtttctttaccaatattttgtctttttaaaatctttattacagaaagtgaagcattaaaatattctactataaaaaaaaaaaaaaacaaaaaaacaaacacaaccaaacaaacaacacaaaacaaaaaaaaaaaaaaaaaaaaaaacaaaaaaaacaccaaaaaaaaaacaaaaacccccccacccaacttcaaaacaaaacacacacgaaatacaacaaccatataacagcgagggcatacatcaatataaatccaacactgcgcgcacaacacacactgtcacatcatcatttaatcacgataacaccacatcgatcattagcgatttataaacagatacgcagagcaacatcatcaacttctagcaggcacgaacacaatctactagaatgcagaacaccaacactcccgctgtaagttgatgaggcacaacagatacataacagattgagaaatcaccaggctg

SEQ ID NO: 87988 - DNA, 163 bp, Homo sapiens
caatcaataaagtgaaaagtgaaaagaattataagtggatggacaaatatgtgaaacacaagcagttaaatgcccacagcaaaacctaggctgtgcatacaggtaggtgttcattaaattttttattttattattattatattttgaagtgcagtttaactct

SEQ ID NO: 87989 - DNA, 392 bp, Homo sapiens
ggagaactaggttcttatcctggctctgctatggacttgcttcatatgggacaaatggcttcgtttccttgcttctctcaaaggtagggtgtaggaattgggcaagaaaagtactgtttggggggttctgtggttccaaggacagcctaagattctgatcttgcattgatggtctgtatttttctcaaccttagtttttcacatttgtaaactacgattaataatcataatggttgctgtaagaactacataaaaccatacatgtggggccgggcacggtggctcacacctgtaatcccagcactttgggaggccgaggtgggcggatcatgaggtcaggagatcaagaccatcctggctaacatggtgaaaccctgtctctactaaaaata

SEQ ID NO: 87990 - DNA, 728 bp, Homo sapiens
aaattaacacctttcacttttaccccttgcctagaaatttgtatttattaaagcatgatatttatttagccactatgaatagtttatagacagacctggaaatttatagatttgtctttgttggaatacttgcttaaacagacttgtttcctaaaccactggcctggttttctactattaaaagattatttaaattggttacctagagaagatctccatgctgttatgagccatattttgagataggagaaggaagcccagccatactcccttatctgtgtcctggcagatgcaaacctgccctgccctgcacatttggttagagatgatagtgccaaaccaccacttctgacgcgatcatgaggctggtctccttgtctcctttgtgcacagggactgctcatcttacagtaagcttctatttggaagcaagagatttgaattctttgaaaacattgataaagcaagtcaggaggggagtgcagggactggctatttgatatacctacacagaaagctaggtacagatcttcagatctgcaagacatgggaaataaacccttacccaaaccaaacatgtcttcctctgtagaatatgaaacgaggtggccagtgaccaagctgaccacacattttgaatgaaagtgatgatgtatgctgccattcacactccagtagatttctgacatggaattaagctcttttttagggagactaatgggccctta

SEQ ID NO: 87991 - DNA, 710 bp, Homo sapiens
accactgcactccagcttgggtgacagaccaacactccatccccaccaccccatctcccccaaaaaatatatattctaggaatgaagcccgaatggccaatggacatgcaaggaatggggaaagatccaaattaaccaatggggcacatttggcaataactactgagtcctgattttataagccggagggaaagagctttattctttaccaaattttaactagggatggctcatgcctgtaatcccagtgctttgagaggctgaggtgggagggattgcttgaagccaggagttagagaccagctggggtaacatatcgagatcttgtcttgacaaaaaattttaaaaaatagcctggagtggtagtgtgtccctgtagtctcagccacacgggtggctgaggccgagagggtcacttgggccccaggaatttgaggttacagtgagctgtgattgtgccactgcactccaaccttgatgacatggtgggaccctgtctctaaaaataaaacaacaaaataaaaaaaactttatctagtgctgggaaagtgcagtgaacaagacaggcagccagccagacagaaagtatgtccacccttttcacatgcagtctctccttcatctttccatgaatccagtgaggaaatgggcttggagaggtaaaaatgaattttcaaaaacatatagcaccaatagcagacaggtgcttc

SEQ ID NO: 87992 - DNA, 308 bp, Homo sapiens
ttgtaaccccccaacctctacattcctatgtccaagccctaacccctaatgtgactgtgtttgataaggcctacaagaaattaattaaggtttaatgaagtcatgaagatgggggcctgatccaataggattattgtccttataaaagactgttggagagctcgtgctctccctctccctgcacacactcagaggaaaagctatgtgagtacaaagtggccgtatagcagccttaaagcctagtaaaggaagagagcctttaccaggaactgaactctgccagtaccttaatcttgggctttctagcc

SEQ ID NO: 87993 - DNA, 435 bp, Homo sapiens
attgcactccagcctaggcaacaagagtgaaactctgtctcaaaaaaaaaccaataaaacaaaaaacctacctgattctgggtaatttataaagaacagagatttcattgattcacagttccgcatggctggggaggccttaggaaacttataatcatggcggaaggagaagaagaggcaaggcacgtcttacacagtggcaggagagagagagcaagaggggaaatgccacacttctgagccatcacatcttgtgagaactcgctatcatgagaacagcatgggggaaatccgcccccatgatcccatcacctcccaccaggttcctcccctgacatgtggggattacagtttgacatgagatttgggtggggacaaaggtgaaccatatcaatgtgacaggttgacatgacgtcacggcagacgtggaaggtc

SEQ ID NO: 87994 - DNA, 360 bp, Homo sapiens
ctcgttactggcatttagtggatacaggtcatggatgcgctaaacatcctatagtgcagaggacagctaaggaaatccagaattgtcacacagctggtgagaggggtggctgtgactgtgacctcataccacccctcaaacctcaccactgtgctcttattgtgggttgaatggtggcctccaaaaaggcagttccatatccaaatccctgcaacttgtgaaggcaagcttattgggaatcaggtctttgcagatgtaattaagttacggatcttgacatgagatcagccaggaagaccctaaatccaaaaacaagtgtcttcatagcagaaaggtagagggagatttgaggcagacagg

SEQ ID NO: 87995 - DNA, 750 bp, Homo sapiens
tacaaaagcagttctactgaaaagtgaattcccagaaagcatttcagcttgtttagactggcttgacaattttaactgaacaacctctataattacatatttcatgtctcaactaacttgtggatcttttcatttactcttatagcactgtttaatatattttgaaggagatatagtctttttttcagattttaattaagaatgatattcagttttaagggatatttttttttaacatacagtctttatgtccaaggaattgaatactggaaggtataataatatacattttaatttaaccctctaagagccaaataacccccaacaagcagaaatgttaaagactagagattttgacattttgaattcaaaaagctgatgtttttccggtctcttatttataactagccccagtagttacatcaaggcaaaccagggaaattcatctcatttgattttaaaactgatatagaagcgggagggataaagagagattgattaatgggtacagatacagacatagatagaagtgagacctggtgttcaatagatcagtatggcaactgtagttaacattaattgattgaatatttgaaaaaaatctagaataattcagatatttctagaataaagaaaacataatattttaggtgatggatttctcaattactgtgatttgattatatgaatgtatctaattatcacatctaccttgaaaatatatatatctaatatgtttcaattaaaaca

SEQ ID NO: 87996 - DNA, 301 bp, Homo sapiens
tgagacatagtttcactctgttgcccaggctggagtagagtgacatgatctcggctcactgtaacccccgcctcccaggttcaagtgattctcctgcctcagcctcccaactagctgggattacaggtatgtgccaccacactcagctaaggatgtaagatatttaaacaacatgatgaacacactaggcctatttgatatatgtagaatataagagccaacaaatgcaaagtccacatttaatgcacatggaatatttacaaaaactgaccacatgctgagtcattcactgaccatatgg

SEQ ID NO: 87997 - DNA, 3539 bp, Homo sapiens
gccatttgaagcagaatccaaaccatgaattgtagagaattacccttgaccctttgggtgcttatatctgtaagcactgcagaatcttgtacttcacgtccccacattactgtggttgaaggggaacctttctatctgaaacattgctcgtgttcacttgcacatgagattgaaacaaccaccaaaagctggtacaaaagcagtggatcacaggaacatgtggagctgaacccaaggagttcctcgagaattgctttgcatgattgtgttttggagttttggccagttgagttgaatgacacaggatcttactttttccaaatgaaaaattatactcagaaatggaaattaaatgtcatcagaagaaataaacacagctgtttcactgaaagacaagtaactagtaaaattgtggaagttaaaaaattttttcagataacctgtgaaaacagttactatcaaacactggtcaacagcacatcattgtataagaactgtaaaaagctactactggagaacaataaaaacccaacgataaagaagaacgccgagtttgaagatcaggggtattactcctgcgtgcatttccttcatcataatggaaaactatttaatatcaccaaaaccttcaatataacaatagtggaagatcgcagtaatatagttccggttcttcttggaccaaagcttaaccatgttgcagtggaattaggaaaaaacgtaaggctcaactgctctgctttgctgaatgaagaggatgtaatttattggatgttcggggaagaaaatggatcggatcctaatatacatgaagagaaagaaatgagaattatgactccagaaggcaaatggcatgcttcaaaagtattgagaattgaaaatattggtgaaagcaatctaaatgttttatataattgcactgtggccagcacgggaggcacagacaccaaaagcttcatcttggtgagaaaagcagacatggctgatatcccaggccacgtcttcacaagaggaatgatcatagctgttttgatcttggtggcagtagtgtgcctagtgactgtgtgtgtcatttatagagttgacttggttctattttatagacatttaacgagaagagatgaaacattaacagatggaaaaacatatgatgcttttgtgtcttacctaaaagaatgccgacctgaaaatggagaggagcacacctttgctgtggagattttgcccagggtgttggagaaacattttgggtataagttatgcatatttgaaagggatgtagtgcctggaggagctgttgttgatgaaatccactcactgatagagaaaagccgaagactaatcattgtcctaagtaaaagttatatgtctaatgaggtcaggtatgaacttgaaagtggactccatgaagcattggtggaaagaaaaattaaaataatcttaattgaatttacacctgttactgacttcacattcttgccccaatcactaaagcttttgaaatctcacagagttctgaagtggaaggccgataaatctctttcttataactcaaggttctggaagaaccttctttacttaatgcctgcaaaaacagtcaagccaggtagagacgaaccggaagtcttgcctgttctttccgagtcttaatcttcagaaacagtgaacgccaaaaagaactcaagatattctggggactgagcatatgaacctgttcataacaaaggctgtgactcgaaataattaactttgtcaaaatcctgctcacaatttgaagatgaaacttgtcattaggttggcgggaatgagactaaagattgcgctgtgggctgtggtcacgtgctcccagaagacctggaattcaaaagaaatggagctattctttttctccctctttcataactggatgcagctgctcatactcaatcccatattcagcaagtgtgaagctggacgtgatgcaaaataaccgatgccctacaaaaagggcgcatctttaagagttttaatgccagtgcttaattcgaatgaggggattttaagtgtctgaagaggcattttctagggaccagtgggtgactgagtaactgaaatgctgctttcactccctaacaccatggatctggttgtgcataggatgtgggaggaggggctggcagggccgccttcagaggctgcagggcctcagcctcaggatgcatttaatgtatcctggccacagttgcagccaacggttcttgaaagctcggtaaggccctgcaacgcagagcctgcttatgtggatctatttatgggaacttcttaaaaggaccccagaatagctctttatctttcacaagagacacaaattctaattgagttaattatctgggcctttcactttggatgctctgaaacatttgttgattttgtgtgaatgtttatatcaaaatgtttgccaggttgtattagccattgaatagcaaaaaactgatagttacttgcttgttttttaaaaattacatattaaaaatgcccttggcataaggcagcatggtgtggcagttaagagatgggctgtgcagcccatcctgagctccagtcctgagtttgctacttacttctgtggcctctggaaccttatccaacctcttggtgcttcagtttcctcatctgtgaaattagaatttataataattgcacctacctcccaggggtaactaaatgaataaatataataaagtacttacagtggttcctgacacagactcagcactccgtcagtgttgccatgactatttttattatcattattaatgattacttagatcaattatttagcagtggactaatggaagctacagagcagggaagggaagcagatctagggaggaaggcagttttgatttgaggaggtttgcacatgtagagaagcatactggagaagcatatccagagggcgaaagatatctctccattgtgcatctgcctcttttgacgttggaagacacatgtcttactccccaaagggagcccagcactgggagccttcttgatgatctcaaaaataatagctattcaagaaaatcaccaagtgactgtgaaaccgtcagttcggaaggctggttagaacatgtgggagcaacatgaatgttctacaaaagtttaaagcagagattgtttcaaatgggtgtagtagatattactgaaaaccaaaaaagagtgagattgtcagtgtaagaatgtgatttaatgtttgtagtgcttacaattttgtgtaccaactggatgactaaaaagagtaaaataatttaattaatagctcatattttatgtgtgaaaacatgttagtgaacatatataatcaaaatagatttcattgctattgcatagtctctaatacatagaatgattttgcttttctcttttattatacttgctttaaaatacttgaaatatattttgcattaaatgcatttcaagttaaatgtcttaaatgtatacattagatgtgtgttttaaaatgcataaaacacgttgaaatacattaatgaaccatt

SEQ ID NO: 87998 - DNA, 1492 bp, Homo sapiens
gccatttgaagcagaatccaaaccatgaattgtagagaattacccttgaccctttgggtgcttatatctgtaagcactgcagaatcttgtacttcacgtccccacattactgtggttgaaggggaacctttctatctgaaacattgctcgtgttcacttgcacatgagattgaaacaaccaccaaaagctggtacaaaagcagtggatcacaggaacatgtggagctgaacccaaggagttcctcgagaattgctttgcatgattgtgttttggagttttggccagttgagttgaatgacacaggatcttactttttccaaatgaaaaattatactcagaaatggaaattaaatgtcatcagaagaaataaacacagctgtttcactgaaagacaagtaactagtaaaattgtggaagttaaaaaattttttcagataacctgtgaaaacagttactatcaaacactggtcaacagcacatcattgtataagaactgtaaaaagctactactggagaacaataaaaacccaacgataaagaagaacgccgagtttgaagatcaggggtattactcctgcgtgcatttccttcatcataatggaaaactatttaatatcaccaaaaccttcaatataacaatagtggaagatcgcagtaatatagttccggttcttcttggaccaaagcttaaccatgttgcagtggaattaggaaaaaacgtaaggctcaactgctctgctttgctgaatgaagaggatgtaatttattggatgttcggggaagaaaatggatcggatcctaatatacatgaagagaaagaaatgagaattatgactccagaaggcaaatggcatgcttcaaaagtattgagaattgaaaatattggtgaaagcaatctaaatgttttatataattgcactgtggccagcacgggaggcacagacaccaaaagcttcatcttggtgagaaaagcagacatggctgatatcccaggccacgtcttcacaagaggaatgatcatagctgttttgatcttggtggcagtagtgtgcctagtgactgtgtgtgtcatttatagagttgacttggttctattttatagacatttaacgagaagagatgaaacattaacaggtaacacatataatgctggaatttcttaccttatgttctcattaagaaatcagataaataggcattaatcttcatcttattgtgatgatattgtagaattaatctgtgggagaggttttctatgggaaatattgttctgcctgtaccatccattatgaatgttgtctatgtcttcttttcttgtgcttacttatgtgttgcccaaaattgttctgattgtctcgtgtatgtatgtcatagcttcctaaatgccctgggagatgctcgggcccaggaactgtatatctgggtgtctttgtgcatgcatcacttaggtatctttatagtacatacactcaataaagttgctttaagtta

SEQ ID NO: 87999 - DNA, 546 bp, Homo sapiens
aaataaagaacccacaggaaattgacaccgagatttctcaggactttcttgctaaccttgcttcttcacctaatgcattaggagaccaaaaaaagttaccttgtcattttggtttttgtttttatttattttactttactaatcttttgaagaatcttgtacttcacgtccccacattactgtggttgaaggggaacctttctatctgaaacattgctcgtgttcacttgcacatgagattgaaacaaccaccaaaagctggtacaaaagcagtggatcacaggaacatgtggagctgaacccaaggagttcctcgagaattgctttgcatgattgtgttttggagttttggccagttgagttgaatgacacaggatcttactttttccaaatgaagtgagtaaccctttcttttcaaaatgtatttcacagccctcttgtcctttgttcagcaactcaaatatgcagtaatctgaaaggtcagataatcaccacatccttttctttcctactcttcctatgacatgaaatacattctttgttatg

SEQ ID NO: 88000 - DNA, 807 bp, Homo sapiens
gctgtgtgctgtattaactactttttgtgtaatatttcatttaatcttccccaaaggagcagccttgtaagtgaagcagttagtatcttcattttacagatgaaggtaccaaggtttaagggcattcacgatttttcctacaatacaaaataattgatggagcccagctgcaaacccagacaaatgtcaatccagtgctctctctcttctctcaaaactatgcacctcaacccacttgctaatatttctgtgagtccctatgtgtttcagcctagtatctcttcaccccagaaatctgatttccacgggtacggatagaatacattactgtgtaatgttttcacttcagttctctaaatatccgtgtacacatttttattctttaaaaatctgagtagaaatatcactactccagactaaaggcaggaatgtggagtcactcagtggaatgtgtcagcacgtgggttggcaactactgcattagtgttagcagtaaaaatggacaagcacgtgatgatggacaacactggtaagatttcttgattattttcttttcctttttccctttcttttctagcagacatggctgatatcccaggccacgtcttcacaagaggaatgatcatagctgttttgatcttggtggcagtagtgtgcctagtgactgtgtgtgtcatttatagagttgacttggttctattttatagacatttaacgagaagagatgaaacattaacaggtaacacatataatgctggaatttcttaccttatgttctcattaagaaatcagataaataggcattaa

SEQ ID NO: 88001 - DNA, 2577 bp, Homo sapiens
gccatttgaagcagaatccaaaccatgaattgtagagaattacccttgaccctttgggtgcttatatctgtaagcactgcagaatcttgtacttcacgtccccacattactgtggttgaaggggaacctttctatctgaaacattgctcgtgttcacttgcacatgagattgaaacaaccaccaaaagctggtacaaaagcagtggatcacaggaacatgtggagctgaacccaaggagttcctcgagaattgctttgcatgattgtgttttggagttttggccagttgagttgaatgacacaggatcttactttttccaaatgaaaaattatactcagaaatggaaattaaatgtcatcagaagaaataaacacagctgtttcactgaaagacaagtaactagtaaaattgtggaagttaaaaaattttttcagataacctgtgaaaacagttactatcaaacactggtcaacagcacatcattgtataagaactgtaaaaagctactactggagaacaataaaaacccaacgataaagaagaacgccgagtttgaagatcaggggtattactcctgcgtgcatttccttcatcataatggaaaactatttaatatcaccaaaaccttcaatataacaatagtggaagatcgcagtaatatagttccggttcttcttggaccaaagcttaaccatgttgcagtggaattaggaaaaaacgtaaggctcaactgctctgctttgctgaatgaagaggatgtaatttattggatgttcggggaagaaaatggatcggatcctaatatacatgaagagaaagaaatgagaattatgactccagaaggcaaatggcatgcttcaaaagtattgagaattgaaaatattggtgaaagcaatctaaatgttttatataattgcactgtggccagcacgggaggcacagacaccaaaagcttcatcttggtgagaaaagcagacatggctgatatcccaggccacgtcttcacaagaggaatgatcatagctgttttgatcttggtggcagtagtgtgcctagtgactgtgtgtgtcatttatagagttgacttggttctattttatagacatttaacgagaagagatgaaacattaacagatggaaaaacatatgatgcttttgtgtcttacctaaaagaatgccgacctgaaaatggagaggagcacacctttgctgtggagattttgcccagggtgttggagaaacattttgggtataagttatgcatatttgaaagggatgtagtgcctggaggagctgttgttgatgaaatccactcactgatagagaaaagccgaagactaatcattgtcctaagtaaaagttatatgtctaatgaggtcaggtatgaacttgaaagtggactccatgaagcattggtggaaagaaaaattaaaataatcttaattgaatttacacctgttactgacttcacattcttgccccaatcactaaagcttttgaaatctcacagagttctgaagtggaaggccgataaatctctttcttataactcaaggttctggaagaaccttctttacttaatgcctgcaaaaacagtcaagccaggtagagacgaaccggaagtcttgcctgttctttccgagtcttaatcttcagaaacagtgaacgccaaaaagaactcaagatattctggggactgagcatatgaacctgttcataacaaaggctgtgactcgaaataattaactttgtcaaaatcctgctcacaatttgaagatgaaacttgtcattaggttggcgggaatgagactaaagattgcgctgtgggctgtggtcacgtgctcccagaagacctggaattcaaaagaaatggagctattctttttctccctctttcataactggatgcagctgctcatactcaatcccatattcagcaagtgtgaagctggacgtgatgcaaaataaccgatgccctacaaaaagggcgcatctttaagagttttaatgccagtgcttaattcgaatgaggggattttaagtgtctgaagaggcattttctagggaccagtgggtgactgagtaactgaaatgctgctttcactccctaacaccatggatctggttgtgcataggatgtgggaggaggggctggcagggccgccttcagaggctgcagggcctcagcctcaggatgcatttaatgtatcctggccacagttgcagccaacggttcttgaaagctcggtaaggccctgcaacgcagagcctgcttatgtggatctatttatgggaacttcttaaaaggaccccagaatagctctttatctttcacaagagacacaaattctaattgagttaattatctgggcctttcactttggatgctctgaaacatttgttgattttgtgtgaatgtttatatcaaaatgtttgccaggttgtattagccattgaatagcaaaaaactgatagttacttgcttgttttttaaaaattacatataccgagctcagcctgagttgtactacttctgggccttggacctatcaccccttgggctcagttctcattga

SEQ ID NO: 88002 - DNA, 359 bp, Homo sapiens
gatttgagccatcagaattcagcttttgtagataaagaatatgaactaattgactatggatggaattattgtacatagttagcttgctgaattattggttaagcactactaactatatcttggtaaactatggtgcaactgagccaccccctaaaagcaaaagacatttagcagttcaccatattttgcaattaaccaaatgagagcctatgagaatgaaatggtttcaggtggagtttgacaatacaattcatccataatatatagggaaaaatatttcctcaaaaataacatctatgtggtaggcccttaaaaacgatggatgaatgcatgcaaaattctctgtacacagacacatg

SEQ ID NO: 88003 - DNA, 779 bp, Homo sapiens
acaaaaagaattaatgtcctgaatgctcatcatttgtatttaactgaaaaagtggtccatctaacagtttctacattaatgagggaaaaagaatatatccatagtaagaccacaccaaattatcagtactgtagtagttttctctaggtgaatgagattagggtcatttttctcccactacatctgaaaactggggatgataatgatacccaccaacttcatagttagttgttaataatcaaatgagatcatgcattttaagtacttaacacagtgcctggcatatacatagcaaacctcaaatacttatttttgccattatcatttcttcattttacttatcagcagttcccaaaatttctacaagagatactactttttaaaacaaagtcatattgttttaatgtatactcattttcaatgaagtcctatatttcaataaataccttttaaaaagtatcttctaagtagaaaatattatactaaaatgaggatgaaaagatgtacaagataaagcctatgctgacaagggctctgtaatctattaaaaatgacagggaaaatgtgcagtgtgaaatgtgcagtaagaaaaacaaaatgctatggggtatagaaaaaggaaaattatatccaggttttccgtgtctcgggtttggggtttggctggggcagtgagagagagcttctgggaggagatggcatgtgaaatgaatgaaatgaaccttgaataaagctgggacccactcagcattctgtgacaggagtggtctgctccagct

SEQ ID NO: 88004 - DNA, 460 bp, Homo sapiens
ggaaagtacattaggaattctttaaggggaaacttgtaaagaaattataaggaagaactgcctggagattggtttcctgtgtatgctaaagcaagatccaaaatatccatttcgcagagacatgaccagaaagtcccagcacacttgggaacagcattttaagaggttttgaattattgtgctcattaatatattttcccttctttgatccttttcttgaggataactagagctgctttgctctacaatatttcaagcatggtgagaatttagcactaggagaaaccacgtagtcagaaaaaaaaaaaacacacatatcttaagaatttttcctataatcaaaatgaacaaaggtggagttgaacccaccaaaagaaaatacctgccccttctaagcctgataggatgtgatcagaaagggagttttggggccaggcatggtggctcacgcctgtaatcc

SEQ ID NO: 88005 - DNA, 758 bp, Homo sapiens
tgaagatgatgatggtgatgataatgataattaatgatgatggtgatgatgaccatcatcacctcaggctattggggcctatgatattggggttacatttggaagaaattcatgattttcaccttgggagtatttatttgactcacatgctattgctgagtgggccaggaagcatgtgcagaactggaaattgagaacttgaagtttggttttggtcaagttccccagaagcagcccctaaaatgaaggtctgtgcataagtgattcattaaaggggcactcccccaaaaaactggtcaggtagagatagaaggtacagagagaaactggagagggaaggggaagagaccaaggaaaggtgaggcttcacctgagtcccagcttcagcctgagcctgtggggagctctggatcataaatcttatcttgaggttcgtcttgctcaagacaaaggagctgggcttctgcatttctgcgtcaatctaccctcggctgtgacctgccctgggggatgagggtttgagaaaccagactcccaggcactcctggccctcagtccaagtgagccattccagtagcacaggcatcatcctctaaagaagactgacactgtgagctgttagaagcaaacacacagaagccgggtggtggcgggtggggaggggacacacattagggagatcagaggcatgcgggtggagcactgatgtgtctgtgcaccacggagttcacatctactcttccagtaatggcatgtga

SEQ ID NO: 88006 - DNA, 263 bp, Homo sapiens
gaaaagacatcaggcagagaggaagctgtggctaaataagtaatacaagataattttcttgagttggggaaatccgtcttcagcccacaacccccactacgtgccaggccagggtataaaatagactctctgtgtttcctgcttttccttatttattccaaggataaagaaaaatcttggaatcatcctgcccaacaaaccaacaacgagggaagatactaggagggaaaatccatctggcatcagacttatcactaaacact

SEQ ID NO: 88007 - DNA, 2664 bp, Homo sapiens
gagagaacagcgtgagcctgtgtgcttgtgtgctgagccctcatcccctcctggggccaggcttgggtttcacctgcagaatcgcttgtgctgggctgcctgggctgtcctcagtggcacctgcatgaagccgttctggctgccagagctggacagccccaggaaaacccacctctctgcagagcttgcccagctgtccccgggaagccaaatgcctctcatgtaagtcttctgctcgacggggtgtctcctaaaccctcactcttcagcctctgtttgaccatgaaatgaagtgactgagctctattctgtacctgccactctatttctggggtgacttttgtcagctgcccagaatctccaagccaggctggttctctgcatcctttcaatgacctgttttcttctgtaaccacaggttcggtggtgagaggaagcctcgcagaatccagcagaatcctcacagaatccagcagcagctctgctggggacatggtccatggtgcaacccacagcaaagccctgacctgacctcctgatgctcaggagaagccatgggcccctcctgtcctgtgttcctgtccttcacaaagctcagcctgtggtggctccttctgaccccagcaggtggagaggaagctaagcgcccacctcccagggctcctggagacccactctcctctcccagtcccacggcattgccgcagggaggctcgcataccgagactgaggaccggctcttcaaacacctcttccggggctacaaccgctgggcgcgcccggtgcccaacacttcagacgtggtgattgtgcgctttggactgtccatcgctcagctcatcgatgtggatgagaagaaccaaatgatgaccaccaacgtctggctaaaacaggagtggagcgactacaaactgcgctggaaccccgctgattttggcaacatcacatctctcagggtcccttctgagatgatctggatccccgacattgttctctacaacaatgcagatggggagtttgcagtgacccacatgaccaaggcccacctcttctccacgggcactgtgcactgggtgcccccggccatctacaagagctcctgcagcatcgacgtcaccttcttccccttcgaccagcagaactgcaagatgaagtttggctcctggacttatgacaaggccaagatcgacctggagcagatggagcagactgtggacctgaaggactactgggagagcggcgagtgggccatcgtcaatgccacgggcacctacaacagcaagaagtacgactgctgcgccgagatctaccccgacgtcacctacgccttcgtcatccggcggctgccgctcttctacaccatcaacctcatcatcccctgcctgctcatctcctgcctcactgtgctggtcttctacctgccctccgactgcggcgagaagatcacgctgtgcatttcggtgctgctgtcactcaccgtcttcctgctgctcatcactgagatcatcccgtccacctcgctggtcatcccgctcatcggcgagtacctgctgttcaccatgatcttcgtcaccctgtccatcgtcatcaccgtcttcgtgctcaatgtgcaccaccgctcccccagcacccacaccatgccccactgggtgcggggggcccttctgggctgtgtgccccggtggcttctgatgaaccggcccccaccacccgtggagctctgccaccccctacgcctgaagctcagcccctcttatcactggctggagagcaacgtggatgccgaggagagggaggtggtggtggaggaggaggacagatgggcatgtgcaggtcatgtggccccctctgtgggcaccctctgcagccacggccacctgcactctggggcctcaggtcccaaggctgaggctctgctgcaggagggtgagctgctgctatcaccccacatgcagaaggcactggaaggtgtgcactacattgccgaccacctgcggtctgaggatgctgactcttcggtgaaggaggactggaagtatgttgccatggtcatcgacaggatcttcctctggctgtttatcatcgtctgcttcctggggaccatcggcctctttctgcctccgttcctagctggaatgatctgactgcacctccctcgagctggctcccagggcaaaggggagggttcttggatgtggaagggctttgaacaatgtttagatttggagatgagcccaaagtgccagggagaacagccaggtgaggtgggaggttggagagccaggtgaggtctctctaagtcaggctggggttgaagtttggagtctgtccgagtttgcagggtgctgagctgtatggtccagcaggggagtaataagggctcttccggaaggggaggaagcgggaggcaggcctgcacctgatgtggaggtacaggcagatcttccctaccggggagggatggatggttggatacaggtggctgggctattccatccatctggaagcacatttgagcctccaggcttctccttgacgtcattcctctccttccttgctgcaaaatggctctgcaccagccggcccccaggaggtctggcagagctgagagccatggcctgcaggggctccatatgtccctacgcgtgcagcaggcaaacaaga

SEQ ID NO: 88008 - DNA, 817 bp, Homo sapiens
ccggacgcgtgggtccgacccacgcgtcggctacgctcttcatattccagataccaactgcctaccaaggactaatgagatggtatatttcttccacatcagggcaagctgaaaatatattgattcagcgttactgttacgtaaatgaatttccatcttctcatatgtgttatttttgaaagaatgaatacactctctgtcttaaatccgctcttaacaaatgatctcttctcagaatactacatctgtattgagagtacagacagcccattggtcactgcaccttttgcaagacagcgaaacggatgcatcaaattgcattgatacatcatcaccatcaatcttttgcactgatttttagacttaatcttcttatttgaaaataaactcatttttaaataaaataaaaaatattttagggaaagctctataaaattaaaattacagaattatatgctttttaaaatttatgcaaaaatgtgcagacaaatgtattctgtattggtttatgtatcactttgcccttgtatattttgagattattaagatttgttgacttttttggtttgatatttatcatctgttaaatttttccttttaaattattaaatgcaaagtgcaagaaaaagagataaatatttactgattgctagatgtaaaaatatctatgaatatatatatttaaacttctgccagagagcaaccatctgacagtcaacttactaaaatctaaattgagtactttttactgttgcagagaattaagtcactaaacgttatttagatatatagatgctagttgcaagtaacacccttt

SEQ ID NO: 88009 - DNA, 624 bp, Homo sapiens
ccggacgcgtgggtccgacccacgcgtcggctacgctcttcatattccagataccaactgcctaccaaggactaatgagatggtatatttcttccacatcagggcaagctgaaaatatattgattcagcgttactgttacgtaaatgaatttccatcttctcatatgtgttatttttgaaagaatgaatacactctctgtcttaaatccgctcttaacaaatgatctcttctcagaatactacatctgtattgagagtacagacagcccattggtcactgcaccttttgcaagacagcgaaacggatgcatcaaattgcattgatacatcatcaccatcaatcttttgcactgatttttagacttaatcttcttatttgaaaataaactcatttttaaataaaataaaaaatattttagggaaagctctataaaattaaaattacagaattatatgctttttaaaatttatgcaaaaatgtgcagacaaatgtattctgtattggtttatgtatcactttgcccttgtatattttgagattattaagatttgttgacttttttggtttgatatttatcatctgttaaatttttccttttaaattattaaatgcaaagtgcaaga

SEQ ID NO: 88010 - DNA, 395 bp, Homo sapiens
aactggaacatgtctcattaaggtttacatacacactaagacagcaaaggattggaattaactttatggagacagttccagggactaatattgaagcagtggttatttgataatgcatggaaccaccatttggattcaataaaccaattacataaaagcaatgatgctacgctcttcatattccagataccaactgcctaccaaggactaatgagatggtatatttcttccacatcagggcaagctgaaaatatattgattcagcgttactgttacgtaaatgaatttccatcttctcatatgtgttatttttgaaagaatgaatacactctctgtcttaaatccgctcttaacaaatgatctcttctcagaatactacatctgtattgagagta

SEQ ID NO: 88011 - DNA, 397 bp, Homo sapiens
gttattccaaccaaaatttcctaagattgaaatgcagaaacttacagaattgagtaaaaagacaaaaacgtaaatactaaatattgaaaagatgcaagttctccccaaatacactcatagatttaataaaattcaaatttaaaggcaattaattagggatgaggcaagaatctgggaagaaaattaatctgaagtttgtctggaaaaatcaatgggtgaaacgaaaatattttaggataagattaatgagaagtaaaattatttcaattataaaagtaaaatgataaaatagttagacctatatggtactgatgccaggaatgttatacaaagctacgtcaaggcttgagataattttattgaaagatattcgtggttatctcattggctataaaag

SEQ ID NO: 88012 - DNA, 443 bp, Homo sapiens
aggcttctcatccccctgaaatgtctcaatgggtcagaaaggcagggcccaagagagaaactctctctttgccatgtccatgcagacagcagatacccctagaaactaaactaaaggattagggctaccaagtggcttccctcatcctaggaccaccatatctgcaggaggatgggagtgaggcaggctgtgcgggccccttgggcacccgcctgccctggttgctgccctgatcctgcagggagagcctgggtgttgctgtgaatataggcgagggcattagggctgggtattggagagtaatgaagggaggacaggctatctttcattgtggtcagagggctacattctggtagtcaccaccacaatatacaattttgtttaatttattcccttttattcccattttcaccaccatccttcatatccttttattcgtacgt

SEQ ID NO: 88013 - DNA, 481 bp, Homo sapiens
cttctgctctggctctcctaagccttcctcagccccctcagtcccttacggcctggcctggcaacacagcagaacccctaggaacccctacaagagagggcaaggccccactaggccacagcactgagattcggaggccaaggagcaagaggaaccagcctcaacaactatcatgcagtcatcagccaacaccatggccacattcttacactcacagtccgtatcctctcacagtgatgctcaagttatagctggcaatttaggacttcattctttccctaatattatgcttgttctcccataagccccagtcttagactgagaccaagcctggggaaggctcagaagctattgaagtccatggtgagggcctctgagactgggaattgtccagaggagtgaaatgaaagcatgttccttagggctgcactgtgagcacaggctcagtgctgggtgcacgtacggtactgtgtggtggtag

SEQ ID NO: 88014 - DNA, 411 bp, Homo sapiens
atgtaccctggaaattagtgctagatggatgatgcacaggggttctactactgataaaaacactgaccacaaagattcacatatagactttgagtaggatggttttatgaacaatgagagtggttaaagcaatccttctacattattgcaatgcttcataaaatgtaactacattaataaatttaaaattttaccatttaatctatttccttagaagtttataaggggagactgctttatatttgggcttgccaccttatattctggcatacatattaacttttcctgtaaatgaccataaaggataaagtctcctcactcttccctccccattacagaagaccattattgtgcacaactgtgtgttctgattttataacagttcaactcttattttcttttagggtaata

SEQ ID NO: 88015 - DNA, 152 bp, Homo sapiens
gatccgcccaccttggcctcccaaagtgctgggattataggcgtgagccacccctggcctccaatcttcacatttatatactgaattatacattacattatgtacatatgataactagttgcttaaatattttaataaattatatctaatgt

SEQ ID NO: 88016 - DNA, 575 bp, Homo sapiens
gcccccatttgcatggagacaatggtctcagccctgaatccggagctgtgggggcactgggcattggttggcacaatcgccctttgtgccggctccagcgggcaggcgggagcacgtcccgggggctcactgagatgtggtcgggtcccagcccaatcctgatggcatctaagtcctggggagcctggtgcccagtggagcgggagcctggacttggtcttgcctgctgacttccacatgggatgcccaggaaagccccaaggggcagggaacaccacccagcctcctgccaaggaggtggggatgcaggtgagccatcctgaatgaactggagcttggcgggctgggctggtgcctgcgagcacaaagggttgcgaacactgtgggtttgtcccctctctgccatgcataagatgtgacagcatccttacaactgctggtaagctgagacattcgggttagtcccaggcactgggaagaggtccgagagggagagatggatgcagaaatgaccaaagggtaaagggacggctgctgagaagggaatggatcatattacttggatggctgagcac

SEQ ID NO: 88017 - DNA, 716 bp, Homo sapiens
tgtggggaaacagaatcagatatcgccatactcaggagtatgaaaagaagaacaggaaattctttttcttcagtttgcacttgaatggactcaagcaaagagtgtggatatgtatcttgttactgtttatagttaataatgtggagattagtatatatgggatttcatttgccttgtttgaactaattggatgcattatatagaaatcacctgagcctgtgctagatcaacaaagaaaatggaaatgtatacctcaggattgaaatccgagaaaattagacaattcaatgctatttaataacgcattaagaagaaatactattgccaatcagggaaagtgagaatctagtgaacgtgagaggaagtaaaatttaggcaattattacacttgttgaaacataacttatgacggtgtaaaagcagaagatagatcacagtatatgtcacagacattttacacagtttccaactgaatttggggttaactatgtaagtgttctaggaatgtatggccattatatcaataagaaactgtccttttaaatttgtgatcctacacatttatatatgcagaagagggcctttttaaatttattgaggatgaattgcatgctggaagtacctctttgcattacagttacttgctcaattgaagatactgtataaagtctaatttttgtatgggtgtgaaggtatgtgtatgcacttatgtgtgc

SEQ ID NO: 88018 - DNA, 996 bp, Homo sapiens
agtattttgtagctaatttttaaaaatttggagcactattataaacacaaagatgactcacaagttatctcttttataatattttaagtactccaaatttaaatatttaagtctatgatattgatatttattaaggtaatgtttttaggagtggagatataggaaatacaaggccaaaaaatcttaaaggcccactttctcatggaaaaataatctcttgctcaggttttctcaacaggagggaatgaaatggaaatgtagcagagtttcaaaactagaaatgtactagagatggaagctgtattctttactaaaggcatcagcattactgttaacttccaggcttcctgcaaataatgcgtgttaccactctctccttaactttttgactctgtcgagagaaggctcatgtttccttcaggtctctcctctaggtcaggagcatatctagggacatctgtgcttcactcagtctagaaaacctgcttgtcatagccaagccactgctgtgagctcctggcctccagtttagaaggaaacctgctgtccaaactaagatgctgtcctgacagttcccagcttgcagctgctggtccacgcttatgttcgcctgccaaactccgctcccgctctttcttctctgctgtgacaccctccaaggctgcaactttcatccgtaatggattcgtttacacttggtcaaggctctcgacaacagtgggaccaaaacccagaggttcacagaaactacaatagtcaccgtgagtcaggccagtctgcccagaggatggcctgcaggactgcccacagcatttggaggccaggcctcagctgcatctctgaagcccaggcaaaggcggccctggggaaggtggaacaccagcatttctactgatgctctggggtcctgcagaaccctgactgtgccacagaccttctgtaccgtgtccatttccatataatctaataaatccttcttacaaaggaaacctgagt

SEQ ID NO: 88019 - DNA, 588 bp, Homo sapiens
gaaattatatttatgtttgtttcatcttgaaagtgtgcttttacatatatatttatgaatgtatattgaagctttattattaggatatgtctttcatttggtcaaatgagatgcgaaaatgcaacgtgcttaatttcattctattttttaaatttctaaacattgaaattgttttttgaaatgacgctttaaaatatttaacttatgaaataaatttgtctctgaaaatctagatgttgtgttatgtatctattttctctagacaggaatacatttctaatatggatatatatgtctgtcttttttcaggcctggttgcagcatgcttgaaatctgggatgtggaagacccttccaatgcagctaaccctcccttatgtagcgtcctccttgagccgagattgtgccactgcactccagcctgggcgacaaatcaagaccccgtctccaaaaaaaaaaaaaaaaaaacttgattgggatccaaaatcatacaactatacactaaaatcagtgaatattaccttatgtaaattaaaaattaggaaatcaaaagaaaagcatacatataaaaaacagttttttctaagca

SEQ ID NO: 88020 - DNA, 949 bp, Homo sapiens
ttcagactctgctgatatacacaaagacattattgcttccagttgttatggtgattacatgttttatctttaaaaagactgttggtgatatttcgcgtgttttagctacaaacgtttatctaagaaaacagctccttgaacacagtgagctggcttttcacacattgcagttgttagcatttactgcccttgccattttaattttgaggctaaagctgtttttgacacagcacatgtgtgttatggcttccttgatatgctcttgacggctctttggctggctttttcgcagagttcgcagagagaatgttatctttggcattctaacagtgatgtcaatacaaggttatgcaaacctctgtaatcaatggagcataacaggagaatttaatgatttgcctcaggaagaacttttacagtggatcaaatacaataccgtaccagatgctgtctttgcaggtgccatgcctacaatggcaagtgtcaagctgtctacacttcatcccattgtgaatcatccacattacgaagatgcagacttgagggcttggacaaaaatagtttattctacatatagtggaaaatctgccaaagaagtaagagataaattgttggagttacatgtgaattattatgttttagaagaggcatggtgtgttgtgagaactaagcctggttgcagcatgcttgaaatctgggatgtggaagacccttccaatgcagctaaccctcccttatgtagcgtcctccttgagccgagattgtgccactgcactccagcctgggcgacaaatcaagaccccgtctccaaaaaaaaaaaaaaaaaaacttgattgggatccaaaatcatacaactatacactaaaatcagtgaatattaccttatgtaaattaaaaattaggaaatcaaaagaaaagcatacatataaaaaacagttttttctaagca

SEQ ID NO: 88021 - DNA, 928 bp, Homo sapiens
tgaaaataactcaaaagtttcagtggtcatctaaagtattgtatacactgtatatataggttgaatagaaggtcatcctattcatttattaatgagaggtacaatctccagggatctgtaaaatctattttgtcttaaccaaagaacaaatttttgacatatcttgaataggatgactataaattatgacttttaaattgtcgtaatttttgtactattatgtgatatttttatttttatgtatgttcctaagtagtttagagatagtcacattttaaaaatccaagatcaaacaaatgaatcttatttttatgtattcatagtatagaagaccttcagtaaatagataatatttttgttttattctagaaaacagctccttgaacacagtgagctggcttttcacacattgcagttgttagcatttactgcccttgccattttaattttgaggctaaagctgtttttgacacagcacatgtgtgttatggcttccttgatatgctcttgacggctctttggctggctttttcgcagagttcgcagagagaatgttatctttggcattctaacagtgatgtcaatacaaggttatgcaaacctctgtaatcaatggagcataacaggagaatttaatgatttgcctcaggaagaacttttacagtggatcaaatacaataccgtaccagatgctgtctttgcaggtgccatgcctacaatggcaagtgtcaagctgtctacacttcatcccattgtgaatcatccacattacgaagatgcagacttgaggcctggttgcagcatgcttgaaatctgggatgtggaagacccttccaatgcagctaaccctcccttatgtagcgtcctccttgagccgagattgtgccactgcactccagcctgggcgacaaatcaagaccccgtctcc

SEQ ID NO: 88022 - DNA, 1304 bp, Homo sapiens
tgaaaataactcaaaagtttcagtggtcatctaaagtattgtatacactgtatatataggttgaatagaaggtcatcctattcatttattaatgagaggtacaatctccagggatctgtaaaatctattttgtcttaaccaaagaacaaatttttgacatatcttgaataggatgactataaattatgacttttaaattgtcgtaatttttgtactattatgtgatatttttatttttatgtatgttcctaagtagtttagagatagtcacattttaaaaatccaagatcaaacaaatgaatcttatttttatgtattcatagtatagaagaccttcagtaaatagataatatttttgttttattctagaaaacagctccttgaacacagtgagctggcttttcacacattgcagttgttagcatttactgcccttgccattttaattttgaggctaaagctgtttttgacacagcacatgtgtgttatggcttccttgatatgctcttgacggctctttggctggctttttcgcagagttcgcagagagaatgttatctttggcattctaacagtgatgtcaatacaaggttatgcaaacctctgtaatcaatggagcataacaggagaatttaatgatttgcctcaggaagaacttttacagtggatcaaatacaataccgtaccagatgctgtctttgcaggtgccatgcctacaatggcaagtgtcaagctgtctacacttcatcccattgtgaatcatccacattacgaagatgcagacttgagatttatacttcaagatggacaagaagttctatcagctgatgagaaatgatgccagatggtaactcagatatacaagaaatactgaaatgcgctggaaaaggtaaatatgtggatattaatcactatacgtttttcttctctgaaaatctttaaaagacattatttaaggcaaaagtgataccattatattttttagtttatgacagaaattaaatatacatgacaatagcacaaaaattgagtaaaccgtggaaatgtacgatttactagaaataacccaatttaaatggtaagtaaatcatgatatgttaaagatgcttgttgtcatccctatcaaaaccactcaaaaaataaataaaacagtggggaaaaaaagagcataatggcaagcctagatatggatgagcctggatacattaagtgaaataagtcagacacagaaagatgaatagtgcatgttgtcactcatgtggaagctcaaagaagtagctcatagaagtagagtagaattgtgg

SEQ ID NO: 88023 - DNA, 363 bp, Homo sapiens
ttcagactctgctgatatacacaaagacattattgcttccagttgttatggtgattacatgttttatctttaaaaagactgttggtgatatttcgcgtgttttagctacaaacgtttatctaagatgctgtctttgcaggtgccatgcctacaatggcaagtgtcaagctgtctacacttcatcccattgtgaatcatccacattacgaagatgcagacttgaggcctggttgcagcatgcttgaaatctgggatgtggaagacccttccaatgcagctaaccctcccttatgtagcgtcctccttgagccgagattgtgccactgcactccagcctgggcgacaaatcaagaccccgtctcc

SEQ ID NO: 88024 - DNA, 1168 bp, Homo sapiens
tgaaaataactcaaaagtttcagtggtcatctaaagtattgtatacactgtatatataggttgaatagaaggtcatcctattcatttattaatgagaggtacaatctccagggatctgtaaaatctattttgtcttaaccaaagaacaaatttttgacatatcttgaataggatgactataaattatgacttttaaattgtcgtaatttttgtactattatgtgatatttttatttttatgtatgttcctaagtagtttagagatagtcacattttaaaaatccaagatcaaacaaatgaatcttatttttatgtattcatagtatagaagaccttcagtaaatagataatatttttgttttattctagaaaacagctccttgaacacagtgagctggcttttcacacattgcagttgttagcatttactgcccttgccattttaattttgaggctaaagctgtttttgacacagcacatgtgtgttatggcttccttgatatgctcttgacggctctttggctggctttttcgcagagttcgcagagagaatgttatctttggcattctaacagtgatgtcaatacaaggttatgcaaacctctgtaatcaatggagcataacaggagaatttaatgatttgcctcaggaagaacttttacagtggatcaaatacaataccgtaccagatgctgtctttgcaggtgccatgcctacaatggcaagtgtcaagctgtctacacttcatcccattgtgaatcatccacattacgaagatgcagacttgagatttatacttcaagatggacaagaagttctatcagctgatgagaaatgatgccagatggtaactcagatatacaagaaatactgaaatgcgctggaaaaggcctggttgcagcatgcttgaaatctgggatgtggaagacccttccaatgcagctaaccctcccttatgtagcgtcctccttgagccgagattgtgccactgcactccagcctgggcgacaaatcaagaccccgtctccaaaaaaaaaaaaaaaaaaacttgattgggatccaaaatcatacaactatacactaaaatcagtgaatattaccttatgtaaattaaaaattaggaaatcaaaagaaaagcatacatataaaaaacagttttttctaagca

SEQ ID NO: 88025 - DNA, 749 bp, Homo sapiens
tgaattattatgttttagaagaggcatggtgtgttgtgagaactaagtgagtattaaacctatgctatctgatatggtatatttttgagcaacaaatgtttcactttattacagtagtcctgattctttaagaatttttattttaaatttattaaaatattatcctggtaccttagtttaaattatttcatctagagacataaaactatattatcaatgaagtagaatttaattccaaacattatagtatatttaatatcctgatttttcaatttaacatcttccacttagcttttttcataatttttgaaatatttatgaaaatttttattagatatctgtaatatggatttgaatttacaacaaagtgagatattggcattctgtattatagctgaattatattggatttgtaagacttaaaagaaaagtgacaaaacccaaaatgacctaaggaaaacattcctaattaaaattttttaatttctgaattttgaatctctaaaaatcataaaattctaagatgtgtaattgatcttatgagtcctttgtttaggctcctaagcacagatattagctgctgcacatgacaggaaattcaggcacattaattgtctcctagaatgacacattggcaatcagaagaacaaaacaggttctacggtcacttcaaaatatcatttaaaatgtgcaaaaagtttcagagattcaaactaaaatgagaaagtatgaccaatactctgaaaaaa

SEQ ID NO: 88026 - DNA, 2679 bp, Homo sapiens
  misc_feature (911)..(911): n is a, c, g, or t
  misc_feature (928)..(928): n is a, c, g, or t
  misc_feature (941)..(941): n is a, c, g, or t
  misc_feature (978)..(978): n is a, c, g, or t
  misc_feature (1842)..(1842): n is a, c, g, or t
agcgattctcctgcctcagcctctttagctgggactacaggcgcacgccaccacgcccggctgatttttgtattttagtagagatgggtttcaccatgttggcaaggctggtcttgaactcctgacctcaggtgatacacccatctcggcctcccaaagtgctgggattacaggcttgagccaccacgcccagcttaaatgtgattcttgatactgttttaagtatttaggttgcaattaactttggcaaagtcagtcgacataagccctgtggatatggccttatgtacactgtaatgcagacaggtgcttttcatcattcatgtaacattctcacacagttgaggatattcatctcctcaccaattccagattgtaaatgtaccatcttaaacaactctgaggtcaccaaacagtagttatttgactgttaataggtgctacttgcttgcaaggatttggagatgtaaacatgaagaaaatatagttactgcctgcaaagaattaacatccgtctagtgggagaaacaaacacaccccactcactaagtatggaaaactgattctgggaggaagcagaaatgtccctagataacagcatgtattgcagatacccaaatgtttattgttttctcagcccttcaattttgcttttctctctcaaatgctacagactcaatttaaatcttacctttgattgttgaaaaaagtcactaagatgtgaatacagaatagacattgagaggttatatatgtccaaaactcatctgtccagcagtcaccgtcctcttcagagtggtcacgttgggcagatgggcacaggtgctggtgatgcctctcctgggcaaaacgccccatttgtggcactttcagatactatttatttactttttaagagagagacaggctcnctctgtcacccaggccngagtgcagtggcncgatcatagttaccgcagcatcaaattcctggactgnagcggtccttttgcctcggcctcgcggatagctgggaccacaagcagtagagacaagatctccgtatgttatacaggctggcctcaggtggatcctcttgccttggcctcccaaacaccgggattataggcgtgagcccccgtgcctggcctcaaattttattttagctcgaccctatggcagtttgtgtttggaaatcgtgatgtgaagtcatcagtatctgtgcatatccctaaactaatggtttaagcgttgaagcatgcgcaagcaacatgaacaactgaatacagaaagtaactgaaagcagcacagagactgtgtcgtccctacagacttctaaccctgcattcagcaacatcattcgacccgaagccagattcaaaccctatgtcttctagcaggttctgaatttagaggacaaataaggtgacaggtactaagagaagagtgaattaagtgaaaatcttccctttgttaaggagctttttaacaagagtgtctttgctgggtggtgattgggatgtaacagatcagttctactggacttgtagcttgatagtgaaataaggagcttgggctaaggtatcaatcaacacactgcttccttcctccagaaggtcttactgtgaaggaaaaaatgtcagttgaactaaattgtgcttcacgcctcggtagatttgcattctgatgcaagcccccaacctcacggaccaagaggatccctggctgcctgtgaatggcccacatttgagtggtgctaacttgatgtgagtaggcattaattatgggtgcggctactaagatgggaaaaactatcacgacagtggcaccacctgatttcatgatgtaccatatgcagtaacncatgtttgaggtacagaattgaagctgatttttctgcaaaagatgaatttctataaacaatcccatttttatattttattattaaaacaaaaatacctctctttgctagagagtatatgtatgacttaaattattagctatggtttgcatttagtacatggcagattgcctgtaagtctgttcattttaacaacatacggggctgggcacggtggctcacgcctgtaatcccagcactttgggaggttgcgggtggatcacttgaggtcaggagttcgagaccagcctggccaacatggcaaaaccccgtctctatgaaaaatataaaaattagctgggcatggtggcaggcacctgtaatcccagctactcgggaggctgaggcaggagaatcgcttgaacctgggaggtggatgttgcagtgagcagagatcgtgccattgcactccagcctgggaacaagagtgaaactctcaaaagcagaaacaaaaacccaacatatatgggctgttagatagtaattgtaatttcgtataaatagtaaatgagtacatcttgattaaaagctatgaattcagaattgcttttaaatatatagggggttttttgaaatttattacagtgcaattgaaaatacacttaaaatactgcaggatgcttagtgctcagtgttatgtatgaacttgtggactttacaatgcaggttgagaactgctaatgtatagaatgactaaacagctgtctttcagggtatctcatttttaaaggtataaggaacaaactttaatgtattgaaatgcataaataaaatttattttttatatttaaaaaaaaaaa

SEQ ID NO: 88027 - DNA, 2589 bp, Homo sapiens
  misc_feature (821)..(821): n is a, c, g, or t
  misc_feature (838)..(838): n is a, c, g, or t
  misc_feature (851)..(851): n is a, c, g, or t
  misc_feature (888)..(888): n is a, c, g, or t
  misc_feature (1752)..(1752): n is a, c, g, or t
tgttatattgtattatttagacgcacatacctctctttgctagagagttatatgtatgacttagattattgctgggattacaggcttgagccaccacgcccagcttaaatgtgattcttgatactgttttaagtatttaggttgcaattaactttggcaaagtcagtcgacataagccctgtggatatggccttatgtacactgtaatgcagacaggtgcttttcatcattcatgtaacattctcacacagttgaggatattcatctcctcaccaattccagattgtaaatgtaccatcttaaacaactctgaggtcaccaaacagtagttatttgactgttaataggtgctacttgcttgcaaggatttggagatgtaaacatgaagaaaatatagttactgcctgcaaagaattaacatccgtctagtgggagaaacaaacacaccccactcactaagtatggaaaactgattctgggaggaagcagaaatgtccctagataacagcatgtattgcagatacccaaatgtttattgttttctcagcccttcaattttgcttttctctctcaaatgctacagactcaatttaaatcttacctttgattgttgaaaaaagtcactaagatgtgaatacagaatagacattgagaggttatatatgtccaaaactcatctgtccagcagtcaccgtcctcttcagagtggtcacgttgggcagatgggcacaggtgctggtgatgcctctcctgggcaaaacgccccatttgtggcactttcagatactatttatttactttttaagagagagacaggctcnctctgtcacccaggccngagtgcagtggcncgatcatagttaccgcagcatcaaattcctggactgnagcggtccttttgcctcggcctcgcggatagctgggaccacaagcagtagagacaagatctccgtatgttatacaggctggcctcaggtggatcctcttgccttggcctcccaaacaccgggattataggcgtgagcccccgtgcctggcctcaaattttattttagctcgaccctatggcagtttgtgtttggaaatcgtgatgtgaagtcatcagtatctgtgcatatccctaaactaatggtttaagcgttgaagcatgcgcaagcaacatgaacaactgaatacagaaagtaactgaaagcagcacagagactgtgtcgtccctacagacttctaaccctgcattcagcaacatcattcgacccgaagccagattcaaaccctatgtcttctagcaggttctgaatttagaggacaaataaggtgacaggtactaagagaagagtgaattaagtgaaaatcttccctttgttaaggagctttttaacaagagtgtctttgctgggtggtgattgggatgtaacagatcagttctactggacttgtagcttgatagtgaaataaggagcttgggctaaggtatcaatcaacacactgcttccttcctccagaaggtcttactgtgaaggaaaaaatgtcagttgaactaaattgtgcttcacgcctcggtagatttgcattctgatgcaagcccccaacctcacggaccaagaggatccctggctgcctgtgaatggcccacatttgagtggtgctaacttgatgtgagtaggcattaattatgggtgcggctactaagatgggaaaaactatcacgacagtggcaccacctgatttcatgatgtaccatatgcagtaacncatgtttgaggtacagaattgaagctgatttttctgcaaaagatgaatttctataaacaatcccatttttatattttattattaaaacaaaaatacctctctttgctagagagtatatgtatgacttaaattattagctatggtttgcatttagtacatggcagattgcctgtaagtctgttcattttaacaacatacggggctgggcacggtggctcacgcctgtaatcccagcactttgggaggttgcgggtggatcacttgaggtcaggagttcgagaccagcctggccaacatggcaaaaccccgtctctatgaaaaatataaaaattagctgggcatggtggcaggcacctgtaatcccagctactcgggaggctgaggcaggagaatcgcttgaacctgggaggtggatgttgcagtgagcagagatcgtgccattgcactccagcctgggaacaagagtgaaactctcaaaagcagaaacaaaaacccaacatatatgggctgttagatagtaattgtaatttcgtataaatagtaaatgagtacatcttgattaaaagctatgaattcagaattgcttttaaatatatagggggttttttgaaatttattacagtgcaattgaaaatacacttaaaatactgcaggatgcttagtgctcagtgttatgtatgaacttgtggactttacaatgcaggttgagaactgctaatgtatagaatgactaaacagctgtctttcagggtatctcatttttaaaggtataaggaacaaactttaatgtattgaaatgcataaataaaatttattttttatatttaaaaaaaaaaa

SEQ ID NO: 88028 - DNA, 4795 bp, Homo sapiens
  misc_feature (318)..(318): n is a, c, g, or t
  misc_feature (322)..(322): n is a, c, g, or t
  misc_feature (329)..(329): n is a, c, g, or t
  misc_feature (342)..(342): n is a, c, g, or t
  misc_feature (366)..(366): n is a, c, g, or t
  misc_feature (372)..(372): n is a, c, g, or t
  misc_feature (376)..(376): n is a, c, g, or t
  misc_feature (397)..(397): n is a, c, g, or t
  misc_feature (399)..(399): n is a, c, g, or t
  misc_feature (403)..(404): n is a, c, g, or t
  misc_feature (427)..(427): n is a, c, g, or t
  misc_feature (433)..(433): n is a, c, g, or t
  misc_feature (2234)..(2234): n is a, c, g, or t
atatttaaaatgtttttcatttatttactgaaccatttgagagttaactgcagatgagagattttatccttaaatacttttgtgtttatctcctaagaataaggaacataatagtattattatgattaagaaatttaacataaataaaaactaatgaggccaggcgcggtggctcacacctgtaatcccagcaccctgagagcctgaggcgggtggatcgtgagatcaggagatcaagactatcctggccaacatggtgaaaccccatctctaccaaaaatacaaaaaaaaaaaaaaaattagccgggcgtggtggcnggcncctgtantcccagctactcnggaggctgaggcaggagaatggcntgaacncggnaggcggagcttgcagtgagcngngatnncgccactgcactccagcctgggngacagngcgagactctgtctcaaaaaaaaaaaaaactaatgaaatttaacattaataaaatactactaggccaggtgcggtggctcatgcctgtaatcccggcactgtgtgatgccaaggtgggcagatcacttgaggtcaggagttcaagaccagctgggccaacatggtgaaatcctatctgtaccaaaaacacaaaaattagctgggcatggtggtgtgcacctacaattccagccactcgggaggctgaggcaggagaaccgcttgaacccaggaggcagaggttgcagtgagccaagattgcgccactgcactccagcctgagcaacagagtgagactccgtcgctcatcaaccccagcttccttgaagtgtttctggagagccgcgatgcctctcgactgagtggccgggacccctcctcatggacagtcgaggatgtgatgcagtttgtccgggaagctgatcctcagcttggaccccacgctgacctgtttcgcaaacacgtaggtgctgctgcctgacctctcagtaggaacctgtgtggagagcctcacctgggaagggcccagcttggcagggaaaggagcgctgactggaaccctcgatccagcagggtttcctgcctcggctgcaggagggtgggcagaactgggcccctcggcctggtgaggggcatcaggatgtccgtaagagtcaggctgcagcaggggcctgactgggggttcttgcagtccttctcagggtcagggctcccatttcctggctggacccatacattcattcttgactaccaccctaggagaaggaggaggaggaggaggacagtggcctgagccctggccccagtccaggctctggtgtcccgctgcccacctggcctacacacacgctgcctgataggccccaggcccagcagctgcagagctgccagggccggcccagcggcgtgtgctccgacagtgccattgtgcaccagcagatcgtgggcaaggaccagctcttccagggtgccttcctgggcagcgagacccgcaatatggagttcaagcggggtagcggcgagtacctcagcctggccttcaagcaccacgtgcggcgctacgtgtgcgccttcctcaacagcgagggcggcagcctgctcgtgggagtagaggacagcggcctggtgcagggcatccgctgcagccaccgtgacgaggaccgcgcacgcctgctggtggactccatcctgcagggcttcaagcctcagatctttcccgatgcctacactctcaccttcatccctgtgatcagtacctcggagaccagcgtccccctcaaggtgagcctgcaggacaggagggcctctgggcctgtcatctgtcatcactcagtaagacgatggcctgcactcctgccaggcagtgctggggcagggacgggactgggggccacaggagaagaggctggggatggcccctgtgccagccctgctggcctgccctaaggaatcagtgagcaatgctgagcagcctggcaggatgggggctgccgaccgtgaggggcggcgcctccagagctgctgttgcccctaccaaggtgatccgcctgaccgtgcacacccccaaggcccagagccagccgcaactctaccagacagaccagggggaggtgtttctgcggcgcgacgggagcatccagggcccgctgtctgccagcgccatccaggagtggtgcaggcaggtacggaagctgaggccagtgggtggggtggagcggagctgaccccagaccccttcagccacccactgagcagcccgggnaagccaccatggttccctgggtcctgcatcaccccgttgaacccaaggggttggaatacaatcacaccacatcccatactccgcgggtaggtggctggtgggaaggaagaggcccaagctctctccttttaaaaatctatgcagtggccaggcgcagtggctcacgcctgtaatcccagcactttgggaggatgaggcgaacagatcacaaggtcaggagttcgagaccagcctggccaacatggtgaaccctcgtctctactaaaaatacaaaaattagctgggcatggtggcgggcgcctgtagttccaaatactcgagagggtgaggcaggagaatcgatcgaatctgggaagcggaggttgcagtgagccgagatcgcgccactgcactccagcctgggcgacagaccgagactccatctcaaaaaaaaaaaaatcctatgcagtatcctcccttcaggggtgcctgaaacccctcaccctctacttgggcagttaacacactcgatcttgagtgagggagcagagagactggaatgttgagatgtcaccagaaaaccccaaagactatacactgcattttaggggaggccctaaagcggcagagggggcaagacacagtcccaaggaagagctttttcaagagggaaacagagaatggaggacaagggaccaacagtgaggaggcacatggcctgcccagcacggaggaggctcccttccatggctggcagccggcagcttccctcaggctgacacggttgaaggtggcagcaggccgaggggcctgacttttcccctagctgagaaagctctcaggctcctgggctttgccttcctccctcagtttggccccaggtggaggacggacaggcccgagaccaggcgggcttggccacatgcttttcccatgtcccctcagaggtggctggtggagctgggcaagctggaagagaagatgaaggcgctgatgatggagaaggagcagctccagcagcagctgcagcagcacgggcctgtgtcctgcacctgctgtgtcctgtgagggccctggggagcaggcaggacggcacggcactctccacctgagacccagggatttcctgtttgagtgtaaggccaaccagtaaagcccatgcgggctgctgagaggcggacagggactccttcaacatggcacatgagcaggcacccatgtggcttcaaccctgacagacccatctgtgtagccaagaaactgctctcagccctgtccccaaatgaccttactttcagaaagaatgtgtaaaaccctgcccagagctcccctagggctaagctataagggattgtccttctccctaaaatgctcatttggcccaggctgaggtctgtgactccagttggctacacagtgccagaaaggaatctgtcatctcaggaaagcccctcaaagatggcgaggcatatttgatgactgtggttacagggcaagaggccaccctgcagcccccacccctgacttgctggaacttgtgactgtcaaagctccattaataaattacatgcacctgggacaagaatggttctttctaggacactgggtcagccggtcagatgctgcagggtcatgagtcccaggcccagcccacctctgtccaggaggcagaggacagacctgcaagggcagggagcccagcccctcagactccagtccagctctgtcttaaagaccagggaccgtggggcaaagtgctatgcctctgtgcttcagtttcttcatctataagacagtgacaatggccaggggcattttgtcaccatcggccagtgccctgtgtctacgccagctgtggcacagagcagcacctcacactaagggtctcagttcctttccaagacccctctggtccagtaagaccgttagcttaaaacaaacaaaaaaaaccagactcctccagctgcttcctgcctctggccgtttctcctgctgtctccaccagctgagccagaggctgcaaagccagagtctgatcacactcacgccacacctgcacccatagccctccaaattcttcaagagcaaagcccaaacttgatggcctacatggttctccaccacctagcccacccaacctcaatgtcttccgccccttatgtaagccacttcagccacgcccaccaacttgtttcatttgcactcctgcctcggggcctctgcgctacatagcggcctatttcctttcctcttcaccttcaagtccatgcttaatttcccacccaccctattttaaagacaccacctcccagcactgccactcccctgctcacttccacccttggtctccatctatgaactaccacactctgtagcttatatttggtgcttcccccactgaataactgctctgggggacaggggtttgggtatggctggcatatggtagacacccaataaatacctgctggtgagacaattaaggatactcctaaatttggggtctgagccaccagaaaatcaccaaaccttgttgaacagggcatttcacaggactagtgtccacagaacacacttcagtt

SEQ ID NO: 88029 - DNA, 841 bp, Homo sapiens
accctggttctggccgtccctgtgccaagcctccaagttccctgagagctaccggccaggggtcgggaggctatgggagctcagggcaggcacctcccatgctcccgcgggagccaccaggacatgaaggtcataggcctctcctctcctcctcttcctgtttgacctgaatgcccccaggccaactgcctcaaggattccatttgagaagatgcaggctgggtgtgtggggagcagtagaggggctggtgtgtgcacatatgtgcacagctcaggacagaggctccctggacttggggcgggggcactagggccccaactctaaccctcgttctgccctgttgacctctgctctctggaccaaaaatggaggactcagtctagactagttcttagggtctaggagccaccttaagttatgtttatatgcaaaggccatttttctgagaggccatagctttcatcagtgtgccaaaaagcgtgagatcctctgctctaaaagcctctgccccagcgctgcctagtttcagagcccccgatggcctcacatggggttttagagcaggcagagaagctgcaatggggccaccagccagtcctcagagtcctgggttaaggcctcctctccaggaggccctgtgtaaaggttttctctgttgcctggaggcaggagtgaactggtaggcaggaaaccctgagggtacctaggaggcccctagcctgtgggttggggagggaagacaggacccctggggccactgaaatggtggagctctcagagacctgagttctggtcccttctgccactttttgggcagatcccgtcttcccacaggccctg

SEQ ID NO: 88030 - DNA, 483 bp, Homo sapiens
gtggcaggccctttcctgcttgccctctgccctccctctctctggccctgcccagtctctgccaatctgtgtacctcccaggagccgggacactccctgagtcctctgggagcccttaagccacactgagaacacagaccctgggagaagcagccagcagtgaggaatcctggaaccccttcccagggagagccttcccatgacccccatgaagagatcagtgcaaacacaggtgtcagagcccttcatggagtcctggggtgaggagtccctgccggagctacccgcagagcagtccctgacggagtactctgacctcgaggaggctccctcgagctgaggaccatcgttgcaacgatggtcctcagctcacttggatcttgcaagtgagctgagagaacaaagtagaaccccataacctttggccaggcatggtggctcacgcctgtggtcccagctttttggaagctgaggactatcgtt

SEQ ID NO: 88031 - DNA, 1504 bp, Homo sapiens
accctggttctggccgtccctgtgccaagcctccaagttccctgagagctaccggccaggggtcgggaggctatgggagctcagggcaggcacctcccatgctcccgcgggagccaccaggacatgaagctcccaggagccgggacactccctgagtcctctgggagcccttaagccacactgagaacacagaccctgggagaagcagccagcagtgaggaatcctggaaccccttcccagggagagccttcccatgacccccatgaagagatcagtgcaaacacaggtgtcagagcccttcatggagtcctggggtgaggagtccctgccggagctacccgcagagcagtccctgacggagtactctgacctcgaggaggctccctcggcgcacactctctatgtgggccatctgaacccccagttctcagtgccggtgcttgcctgcctgctgcgagacaccctggagcggctggagatgccggtggcgcgggagcacattgaagtggtgaggcggccgcggaaggcctatgcactggtgcaggtgactgtccacagggacaccctggcctccctcccctggcgcctgcagacggccctggaggagcacctaatcctcaaggagctggcagcccgtgggaaggacctgctattgagtgaggcccaagggcccttcagccacagagaggtaagtgggacttttcccaagcaagctccaaagcctcaccccaagggagagcctctgagtgggagtggcctgcagagtggggatggaggggtgtctctggggaagcagggacaaatctgcaaacttgggggctgccactcaaatgaccatggcttgcggctggtactgccagctttctctgggaaaaacagtttgcctcaagctcaagcccgacgtttgtgtgaagaaaggccacgaggggacctcctctccttaggtccttttacattccagcctctgggcctgggagaccctagaagacacaggggccccgattttctccttggcccaactcatttgttcaattgacaaacatgaacaccccctctgtgccaagagtaaggcagggatgagaggcccagccaggcccccaggaagccctgcatctgtggccagagctggacagccacccaccgagctgcaaggtggctgcgctcagagctgtgagagaagacaggaaggtttgccctgctctctggggacagattaacaggggaagtgaaatccaggccgggacttagggagttggacaggcacttgcaagggaggacattccaggcaagggacacagaatatgcagaggaacctgggggcttagagggagtgtcatgtctgcagaagggcaaaccatttggtgtccctggagctcccactaaaggctgcagggggtgctaaggaaggaagttgggccagaaggtagggtaggggccaggtcaccaaggctatcatccaaggcaaggctgaactgctggctttattgggtgggacatgggacg

SEQ ID NO: 88032 - DNA, 3996 bp, Homo sapiens
  misc_feature (1435)..(1435): n is a, c, g, or t
accctggttctggccgtccctgtgccaagcctccaagttccctgagagctaccggccaggggtcgggaggctatgggagctcagggcaggcacctcccatgctcccgcgggagccaccaggacatgaagctcccaggagccgggacactccctgagtcctctgggagcccttaagccacactgagaacacagaccctgggagaagcagccagcagtgaggaatcctggaaccccttcccagggagagccttcccatgacccccatgaagagatcagtgcaaacacaggtgtcagagcccttcatggagtcctggggtgaggagtccctgccggagctacccgcagagcagtccctgacggagtactctgacctcgaggaggctccctcggcgcacactctctatgtgggccatctgaacccccagttctcagtgccggtgcttgcctgcctgctgcgagacaccctggagcggctggagatgccggtggcgcgggagcacattgaagtggtgaggcggccgcggaaggcctatgcactggtgcaggtgactgtccacagggacaccctggcctccctcccctggcgcctgcagacggccctggaggagcacctaatcctcaaggagctggcagcccgtgggaaggacctgctattgagtgaggcccaagggcccttcagccacagagaggagaaggaggaggaggaggaggacagtggcctgagccctggccccagtccaggctctggtgtcccgctgcccacctggcctacacacacgctgcctgataggccccaggcccagcagctgcagagctgccagggccggcccagcggcgtgtgctccgacagtgccattgtgcaccagcagatcgtgggcaaggaccagctcttccagggtgccttcctgggcagcgagacccgcaatatggagttcaagcggggtagcggcgagtacctcagcctggccttcaagcaccacgtgcggcgctacgtgtgcgccttcctcaacagcgagggcggcagcctgctcgtgggagtagaggacagcggcctggtgcagggcatccgctgcagccaccgtgacgaggaccgcgcacgcctgctggtggactccatcctgcagggcttcaagcctcagatctttcccgatgcctacactctcaccttcatccctgtgatcagtacctcggagaccagcgtccccctcaaggtgatccgcctgaccgtgcacacccccaaggcccagagccagccgcaactctaccagacagaccagggggaggtgtttctgcggcgcgacgggagcatccagggcccgctgtctgccagcgccatccaggagtggtgcaggcaggtacggaagctgaggccagtgggtggggtggagcggagctgaccccagaccccttcagccacccactgagcagcccgggnaagccaccatggttccctgggtcctgcatcaccccgttgaacccaaggggttggaatacaatcacaccacatcccatactccgcgggtaggtggctggtgggaaggaagaggcccaagctctctccttttaaaaatctatgcagtggccaggcgcagtggctcacgcctgtaatcccagcactttgggaggatgaggcgaacagatcacaaggtcaggagttcgagaccagcctggccaacatggtgaaccctcgtctctactaaaaatacaaaaattagctgggcatggtggcgggcgcctgtagttccaaatactcgagagggtgaggcaggagaatcgatcgaatctgggaagcggaggttgcagtgagccgagatcgcgccactgcactccagcctgggcgacagaccgagactccatctcaaaaaaaaaaaaatcctatgcagtatcctcccttcaggggtgcctgaaacccctcaccctctacttgggcagttaacacactcgatcttgagtgagggagcagagagactggaatgttgagatgtcaccagaaaaccccaaagactatacactgcattttaggggaggccctaaagcggcagagggggcaagacacagtcccaaggaagagctttttcaagagggaaacagagaatggaggacaagggaccaacagtgaggaggcacatggcctgcccagcacggaggaggctcccttccatggctggcagccggcagcttccctcaggctgacacggttgaaggtggcagcaggccgaggggcctgacttttcccctagctgagaaagctctcaggctcctgggctttgccttcctccctcagtttggccccaggtggaggacggacaggcccgagaccaggcgggcttggccacatgcttttcccatgtcccctcagaggtggctggtggagctgggcaagctggaagagaagatgaaggcgctgatgatggagaaggagcagctccagcagcagctgcagcagcacgggcctgtgtcctgcacctgctgtgtcctgtgagggccctggggagcaggcaggacggcacggcactctccacctgagacccagggatttcctgtttgagtgtaaggccaaccagtaaagcccatgcgggctgctgagaggcggacagggactccttcaacatggcacatgagcaggcacccatgtggcttcaaccctgacagacccatctgtgtagccaagaaactgctctcagccctgtccccaaatgaccttactttcagaaagaatgtgtaaaaccctgcccagagctcccctagggctaagctataagggattgtccttctccctaaaatgctcatttggcccaggctgaggtctgtgactccagttggctacacagtgccagaaaggaatctgtcatctcaggaaagcccctcaaagatggcgaggcatatttgatgactgtggttacagggcaagaggccaccctgcagcccccacccctgacttgctggaacttgtgactgtcaaagctccattaataaattacatgcacctgggacaagaatggttctttctaggacactgggtcagccggtcagatgctgcagggtcatgagtcccaggcccagcccacctctgtccaggaggcagaggacagacctgcaagggcagggagcccagcccctcagactccagtccagctctgtcttaaagaccagggaccgtggggcaaagtgctatgcctctgtgcttcagtttcttcatctataagacagtgacaatggccaggggcattttgtcaccatcggccagtgccctgtgtctacgccagctgtggcacagagcagcacctcacactaagggtctcagttcctttccaagacccctctggtccagtaagaccgttagcttaaaacaaacaaaaaaaaccagactcctccagctgcttcctgcctctggccgtttctcctgctgtctccaccagctgagccagaggctgcaaagccagagtctgatcacactcacgccacacctgcacccatagccctccaaattcttcaagagcaaagcccaaacttgatggcctacatggttctccaccacctagcccacccaacctcaatgtcttccgccccttatgtaagccacttcagccacgcccaccaacttgtttcatttgcactcctgcctcggggcctctgcgctacatagcggcctatttcctttcctcttcaccttcaagtccatgcttaatttcccacccaccctattttaaagacaccacctcccagcactgccactcccctgctcacttccacccttggtctccatctatgaactaccacactctgtagcttatatttggtgcttcccccactgaataactgctctgggggacaggggtttgggtatggctggcatatggtagacacccaataaatacctgctggtgagacaattaaggatactcctaaatttggggtctgagccaccagaaaatcaccaaaccttgttgaacagggcatttcacaggactagtgtccacagaacacacttcagtt

SEQ ID NO: 88033 - DNA, 1449 bp, Homo sapiens
gtggcaggccctttcctgcttgccctctgccctccctctctctggccctgcccagtctctgccaatctgtgtacctcccaggagccgggacactccctgagtcctctgggagcccttaagccacactgagaacacagaccctgggagaagcagccagcagtgaggaatcctggaaccccttcccagggagagccttcccatgacccccatgaagagatcagtgcaaacacaggtgtcagagcccttcatggagtcctggggtgaggagtccctgccggagctacccgcagagcagtccctgacggagtactctgacctcgaggaggctccctcggcgcacactctctatgtgggccatctgaacccccagttctcagtgccggtgcttgcctgcctgctgcgagacaccctggagcggctggagatgccggtggcgcgggagcacattgaagtggtgaggcggccgcggaaggcctatgcactggtgcaggtgactgtccacagggacaccctggcctccctcccctggcgcctgcagacggccctggaggagcacctaatcctcaaggagctggcagcccgtgggaaggacctgctattgagtgaggcccaagggcccttcagccacagagaggtaagtgggacttttcccaagcaagctccaaagcctcaccccaagggagagcctctgagtgggagtggcctgcagagtggggatggaggggtgtctctggggaagcagggacaaatctgcaaacttgggggctgccactcaaatgaccatggcttgcggctggtactgccagctttctctgggaaaaacagtttgcctcaagctcaagcccgacgtttgtgtgaagaaaggccacgaggggacctcctctccttaggtccttttacattccagcctctgggcctgggagaccctagaagacacaggggccccgattttctccttggcccaactcatttgttcaattgacaaacatgaacaccccctctgtgccaagagtaaggcagggatgagaggcccagccaggcccccaggaagccctgcatctgtggccagagctggacagccacccaccgagctgcaaggtggctgcgctcagagctgtgagagaagacaggaaggtttgccctgctctctggggacagattaacaggggaagtgaaatccaggccgggacttagggagttggacaggcacttgcaagggaggacattccaggcaagggacacagaatatgcagaggaacctgggggcttagagggagtgtcatgtctgcagaagggcaaaccatttggtgtccctggagctcccactaaaggctgcagggggtgctaaggaaggaagttgggccagaaggtagggtaggggccaggtcaccaaggctatcatccaaggcaaggctgaactgctggctttattgggtgggacatgggacg

SEQ ID NO: 88034 - DNA, 414 bp, Homo sapiens
cagcccactgtggtgaggggcaagtaggaagaggtgaggctgggcaggtgggcagggccagggcagatggggctctgtaggctatggaggagctgcgatcttatcacaaggaaagtgaacagccctatgattaactattgaaggcagtgatataatttatgcttttatattaatagcaattattctggctgttgtatagagtatagattggagaacagaattgggtgggggaactagagaaggtgaacagactggtgaagaggcttttatagttatccaggcaagagatgatggtgacttggaagaccaggaagagaagcaggggtagagagaaatggagatagtgaagatatagcagacatatttgaggagtccttcagttacagataatagaaaactagctcaagcacattt

SEQ ID NO: 88035 - DNA, 400 bp, Homo sapiens
cccctgtccccttcaggccccttagatagttaaccaacaatgtaattattcctcattcatacattaaaaaaccaccgcctcatatgtggacttgaaaaattgtactgtaatgtacttacatcaaagttacaataagggtcaactaaaaattattttcctttttttagagatggggatctcactatgttgcccaggctggtctcaaactcctgggctcaggtgatcctcctacctcagcctcccaaagtgctcggattacaggcatgagccagcatgcctggcctaattattttatcctattttgtatttatcacaataattattttgttcaaatagtagtattacaataatgaagattaaaaagtatttccgttagtctgaaatacatgtaaaatggcca

SEQ ID NO: 88036 - DNA, 373 bp, Homo sapiens
cactgtcttaaattctacttctagaaaatccaaactatgagactcttattaagaaaaataagcagtatttttctgaaattcttattctttctttttttcccaatataaaaggtttttttttcttttgctagtattgcagattttgtttcacatagcattctttctctctctctttcgctccttctctctttgtctgagagcggtcagggattattatcagtctgtcatcggtcagggattatttgatttaaccttcacagtggttttagcagatagggagcattatcataactggttttgttttgacaacagttagagtagctgtaaattggataatgtaaatattggccaaggtcacacatttagtaagtgg

SEQ ID NO: 88037 - DNA, 398 bp, Homo sapiens
cctaacgtctaatgatgttgaatatctttttatgtgcttattatgtatcttcttagaatagagacatgtctatacaaatccttagtccattttttttcattgggttgtgttctaattgttgagttataagctttcttcacatattttctggatacaagtcctttatcagatatgtgataggaacattttttcttccattttgtggactgtcttttcactttcttgatgacatctgttgagcacaaaagtttttaatttttatgaagtctaattttgttgttgttgctgttgcttttgttttagagtgtgtgtgtgtgtgtgtgtgggtgacagagcagaccctgtctcaaaaaaatgtgttcttttgcctttagtgagctagagtcatggaagaattt

SEQ ID NO: 88038 - DNA, 404 bp, Homo sapiens
ggaagggaacctacctggacagactgaaataaaggggctaagtcacagacggcttttgcaagatgttaagaaacttagtggcaatgggaaaccattggagaaagttagggaagagagtgatgtgatatgatgggctctcctgcttaaaaagctggtcctggtggccatggacaggcagaggaaggacaaggcctaagatggggagctcctgcagcaatgcaagaaagaaaggaaggtggaggccaggtgcagtggctcacgcctataatcccagcactttgacaggccaaggtaggcagatcgcttgagcctgggagtttgagaccagcctgggtaacatggagaaactccgtctctactaaaaatagaaaaatatcagccagctgtggtggcacatgcctgtg

SEQ ID NO: 88039 - DNA, 367 bp, Homo sapiens
agctctggaccgttgatggctgagggtccagatagtggggtgatggaagaaggagcaaaaccataggagcagataggacaaggacaggaggaggttgtggtgagccgagatcacttcagccaaaaacacatagcaggtgatgcccccaccaaggacgtcaagtgtaagcatggagtcaggccaggctctgctgtactggccgaatgacactgtcaggaggtcaggctttaggactcaaaaagacacccagtaccatctgtgtaggaagcagctgatttccagagggctttgcaaattaattagaattaactactggggcccagactaatgaccataggcaaataataacaatgccagccatgcaagg

SEQ ID NO: 88040 - DNA, 426 bp, Homo sapiens
cacattcttggctaccataggatgtgtagttgcatttagagtaagaacaaatcctgagtaaaacaatttgaggtatttatctcttcctaaaaaaagagtttgctaagtaaatgtgccatctccttatatgtaagaatttggtcccattttaaacacaatgtgttatctaactacaaaattcaatacagattagagaaaatgttaacaactactaaatggctctacatgtactttgcatatcactgaactgagactcaaaatgaaaaatgcatttgccatacttgaaaggagaaaaatgaagaaaagtaggttcattttcttagttaagtaggtaggcattttttatacatgtaaactttaaatgctgtatgcatactgttttattaagctatagattttagctctttattagtaaaaataggtagg

SEQ ID NO: 88041 - DNA, 141 bp, Homo sapiens
gatctgcccgcctcagcctcccattgttgaccatttttatatgtttatttacctatgtggttttcttttctcataaaatgcttgttcatatattttccccatttctacttatcttgttcttattaaattgccaaagtgcat

SEQ ID NO: 88042 - DNA, 478 bp, Homo sapiens
attgttttctgttgcttccacccaaagaaccctggttatccaggcttagagagggcgaagtagttttcctatgatcacgcacacagcaagtggcagaactggggtacagtcaggtctttcggcctctattgccaagcccttgattagagaccccctctgtgtgctgaacagcactggactggcagtccgaggatcagaggatggatgtagttcctgtggtacctgcctctggggccttgggccactgcctctttgagctggacagggtagacaggatgaaatctatacataactaggtgacacccagtttgagaggattttcttgtccatgagacttttggacacattttgccccggttttctaaaggcttttactttgaggtttgaggaacggtctgaagcagtggttttcaaagtgtgactccaggagatgtatcagtgtcatctaggaacttgttagcagaacttgggtggggcc

SEQ ID NO: 88043 - DNA, 418 bp, Homo sapiens
tttcttgtaacaaggcatttatttgggatgaggaaaggaaattgagcagtaggaaaactgtagtgtgacttttcagttaccttttcaaagattcaactaaatatctgctatttttaacttgagttccttttattacttctttttaaaaagtggccctgttgacacttgtgacctcaataaaagagatattttaatgttaaaatgtcttaaattaatgttgaaaataaaagtattttttctcatcccacctaaagaaggagggattttctttagcttcttcttgatcttgacagcattgctgctgcatccgtgactctggattcagtgtcagtgatacagtaggtgaccggtgacttgagctgggggctaggttatagcatgcaatgtaaatagttatttgtcacgtggttgacaactt

SEQ ID NO: 88044 - DNA, 500 bp, Homo sapiens
acaacagctcagttacaacagctgaggagaatatttttcttttgacatcacttatgcttctagttgtagctttttatgatgaaaaccgtgattgatttactagtaaactcagagaagatagcttaaagcagtaggaaaactgtagtgtgacttttcagttaccttttcaaagattcaactaaatatctgctatttttaacttgagttccttttattacttctttttaaaaagtggccctgttgacacttgtgacctcaataaaagagatattttaatgttaaaatgtcttaaattaatgttgaaaataaaagtattttttctcatcccacctaaagaaggagggattttctttagcttcttcttgatcttgacagcattgctgctgcatccgtgactctggattcagtgtcagtgatacagtaggtgaccggtgacttgagctgggggctaggttatagcatgcaatgtaaatagttatttgtcacgtggttgacaactt

SEQ ID NO: 88045 - DNA, 369 bp, Homo sapiens
ctgggattacaggcgtgagccaccgcgcccggcctgcagttcctcttatagtaaaaacatggagaaatcccacatgaggatcataaaaattacattgtttttccatgtttacattgatcacagtaggactttgcacccacaaaggtacaatatctaattgtcataatttactgtaatatactgccacaacacatttgaggtatgtcctatctgctgctggtggcggaggcaacatgaactaatgagccagctcattcatgctaacatgcgtcgctcagaccatttagtccaggtgcaatccctcctcccccgcagcgtgggcctggggtcaggacttaccacgaatgtgcagactagagtcttgaaaaa

SEQ ID NO: 88046 - DNA, 411 bp, Homo sapiens
tcaagcggaggcaggtgaatcatggaggcggtttcccccatgttgttcttgtgatagtgagttcttacaaggtctgatggttttataagggctctttcccctttgtttggcacttcttcctgctgccttgtgaagaaggtgccttgcttcctcctcctctgtgattgtgagtttcctgaggcctccccaaccatgctgaactgtgagtcaattaaacctcttagctttataaactaccccgtcttgggcagttcttcatcgcagtgtgagaatggactaatacaggtggaaagaccgatgaccagacattggagccctggagtcatcttctttctttgtcagttattcactttgtgaccatagccaagtccctcaagcaatctgagcctcagtttccatacttacaaaaaa

SEQ ID NO: 88047 - DNA, 372 bp, Homo sapiens
acgatcatcaaggagaatattctcaggcttcaagtctctacaagaaacaacaacaaaaggcccaattattcagaagttggcactgtgattcctgagtacccagtaggaacaaccagcgtgagcaagggctagcgcggcaaaacacgaaactgcccttcatgagccacggcaaacaggcaggacaagaatgttacaaaattcatctcagcaaacaactcacatgtgacgacagtgtaaaatgaacttctttgcatagttatacagatttgaagacatttcagtgattaaatatgcagcccagtaggaaggaaagcaaacagtccttaatgaacgtggcacaatttctcttaccattaacatatttttaagtgt

SEQ ID NO: 88048 - DNA, 2329 bp, Homo sapiens
  misc_feature (1823)..(1823): n is a, c, g, or t
  misc_feature (2284)..(2284): n is a, c, g, or t
  misc_feature (2286)..(2286): n is a, c, g, or t
  misc_feature (2325)..(2326): n is a, c, g, or t
  misc_feature (2329)..(2329): n is a, c, g, or t
agttgacataattaatttgacaaggtggagttgtgaaaagagcactcaacttcagggaggtgagttccagtctagactatgtccttaactacctgtgtatgttctccaagctacctcactgacccctgtgacccctcaactataccacctgtttctgctctttctgtgcccagtactctccttaggggcagcagcagaagaggggcgtttcccacccctctcccaacctctccactagggtctccagtggacaagttacagagtcacctgcccaaacttcgtgcaatacttactggctacttgatttctaaatccccgctatgtaaaccacgactccaccctcagtcaggcaggtttcactaactgactgatttttacagtggatgatttagaaactccactgggccatcagttttcccacagtgcctgcgtaccacctgaaaacagaaatgcacacagattgtgataaccattcccattctagctacgcagtggcacgtaaagaataggcataatagatgtggaacccaatggtcagagaaattaaggcacatctcaaaattaataaacatcaaaactaagattcagaccttggtcttttgactccaacactgaagctgtttctactctgttccactttactccattgtcaactgttatcatttgtctgatgagattcaagacttgaagacatgtcagtgttccaatcagctttcactctgacccttatatacatacagacaactttatcctctgcctgaagtcttgtattttcaatcctgcaccaaattattgattgattcactgatcacttcattcacaaaataatcattttgttcttacattgtgttaaggataaaacttcaaggatctaactgcatattacccttttttttttttacccattgctcctttagggccatctcacactgcagatagttacctaaaatgcacatccacttgtttcattctcttgcgtaaaattcctcaaggttaccactgctgttaggatgaagtccaaactctttaatatgaagtacaagagatgcaaattctggccactgcttccatccccagcctcttttccagccctccttccccttgtgtttcaacaaattcagccactttcagatcctcatggtccttcacatttgcaattctagtgtaagtactgtatactctacctgcacagtttcacccaaccagtttctaccttggctttggggtcaacttgacatcccctcttccaggaagttttcttgatgccagtgtttgggttgggtcctttctgcatccttctcataacacctggacttttccctatcatagcacttatcacactatattgtcattgtctgtttacttctccgtatctcccacttgccagtgacccaggaatgatatcagtcttgttaaccattgtatacctagtacctatcacaatgccaggcacacagtgtgcattcaataaatatttattcaattgactcaaatcacactgaatggaattaactcctggtataccttgtgtgctctggcttctcccagactctgtctgtggcattctccctcacctcccaacatacagacacacataccacacacacaccctgcatttctgttatgccttttcttccattcttccgctggttaaaggccaaatcctaggcttctatcttcttcctctgacctcctttagttttccttgatgccacctccttgacctcagggatgcattatagtaactttatgtttgtatgaaaactctctgaaaagcagagactatctcagttgcttccttgcgtggctcatttgtctaggangggggaaattgcgcaaagtaggtatcccatcaacatctagtggttaattaactgatttgctatgaagctgtgtcaactctgtggagcctatctgattctggctccaagaaagaattagttggtagatagagattgccaaagggaaaggtctttatactgatttttataacaatctgaactcctagctgggggaaaatgcaggtatggcttatcttagtgtgtcattcattcattattaggattctactatatgccgggaaccattctaggccttggaaagaaagcagaaaaccagacagtttctggtttaggctgatgggaaagaattttcccagcagagtaccttgcgtattgcacacctcaataaatatctccagagtaaaggaatgaatgaccctcgtggtcacagcaacgaatcttaaaagaagaaaccaatatattttaaagtcatatttatatananacattaaactaacattttgttttctgttaaaaaagcctnnacn

SEQ ID NO: 88049 - DNA, 361 bp, Homo sapiens
atccatcttgagttaatttttgtatgaggtgtaaggaaggtgcccagtttcaattttctgcatatggctagccagttttcccagcaccatttattaaatagagaatcctctccccattgcttgtttttgtgtcaggtttgtcaaagatcagatggttgtaggtgtgtggtcttatttctgagatcactattctgttccattggtctatgtgtctgtttttgtaccagtaccatgctgttttggttactgtagccttgtagtatagtttgaactcaggtagcagagaaatacttttaacaatttgaccaaatattccctaataaatttgactgtgtttaaaaggaaatggagtttgtaagaa

SEQ ID NO: 88050 - DNA, 246 bp, Homo sapiens
tgttaatgtacttgcctagtggattcttcctgcctgctgcacagacaaaaccagttcactgagaccaaggcattgcagtaaagaatttaattgatgaaggcctgctatgccacatgggagacagagttactactcacatagtcccctgcaaaattcggagactagggtgttttaaggatagtttagtgggtcgggcggcggggggttagaggaatgggttcttttgattggttgggggtgcaatca

SEQ ID NO: 88051 - DNA, 576 bp, Homo sapiens
caggatagagtagtgcaggaagtaatgccagtattgactgttacacgttgcacttttataggcataactcgcctaattcatgcaacagccctgggggttaacagatgaagaaactgaggcgcagagaggcgaaccgattaccttgcccaggctcctacaccacctcctatcctctggctgcagctgcagtgtgctttggaggattcggaggcctctctaggtggcaattattttgcaaggcaggtcccacagaggcacccccagcagctttatcttgttgctgatgctggtcctgcatgagcaggtatgaaggccagaaagtataactcagagggttttcccggctccggggagctcgcattggagccagcagtcagtgtctggacaggcagaagtccagtgaggaaagacatgggcttccaaggtgctgcatggacctaagcctgagccatcacccatatgtccacatccagtgtcccagtggggagttagaggaatggttctcatctccaggaaagacactggactgataccaggtggcatttgtatgggaaagaatccctcaaatgtaataaa

SEQ ID NO: 88052 - DNA, 378 bp, Homo sapiens
ctgttttgaaaaatgagttctgctagtatcctgctgtgatcatttggtcataaatcagacttggttccagaacatgagttacatttgaaaactgataaaacactgagaatacgcaaaggaaactggcctaagatctggcacatagtgggcactccataatgtttgttgaataagtaaatgattgcatgaagtttatttacagtttttatccaagattgtaggggatctcatcacaagatgaccaaaagagtttgaactgtgtgtgctatttagaagatttaacttttatgtatctatagataccacagctgttgcttctgataaatttacctaccttttaactgaaagtttaataaagccaaatcaatttgaaatact

SEQ ID NO: 88053 - DNA, 343 bp, Homo sapiens
aaattacggatataataacatttgggtacttaaaatgtgttaggcactgtgcggagccctttatatgcattttcttcatttaatcctaacaacagatgtagaagaggtactattatctctattttacaaataaggttgagtgacttgtccaggtcttctcagcagtttgagtggcagtgctgtaatttaaagccaggaagcatgattccagatactgagctctttatccctatgtagtttactgcctcatcagtgaagccagtacagaaggttaaatttcatggtgagttaacttttaagatttaatatctctaaatcagaatcttccctaagcataccaata

SEQ ID NO: 88054 - DNA, 411 bp, Homo sapiens
agacaggcagctgatgtcctcatgaccttccccagtcctcccagccttaaagacgacaatcataacccacccagagctcttcatacttcctgcagccggttcatccacaataggtcacaagatgggcatcaccacccaggaggctggccgctcaggagacagtgtgcctcctttacagatggagaaactgaggtcctgactaggccaagcacttcccagggcagggatctaaatagtgggaagtcttctggcttctggatagggctcaagctgagagccaggttgcaggccaggtctgggccaatggaatctcggccagggcgggtgcaggggcctgaggccacaccccagaggtgtcactgggggcctgcatccgtcttgtccctttccctgagggatgaagcagcccct

SEQ ID NO: 88055 - DNA, 578 bp, Homo sapiens
ttcttcaaaaaccttttcaaaatgcctgacttttcctggaaatatatcctcactaaaaacataaagccttttatcatggatatagctcactataacatcaacatcaatacaactggttaaaaggtaaagtctttggtgattaaacaaggatctcttcttccagatacccattcctgatccttaagggaatgtgacccctctcttcttgggttcccctaattctctacctctcttacagcatgacatacccaaaggatgtttatttgtttgtatgtctcttctccgatccaattaactgtatactcctagggggatggaaccgtgacttctctatccctatatctcccagggtcatcacaatgcctggtatctgagttcaataaaatgaaaaagatagttgaagaatcctcatattaaaataaaattcactttttgcaaaaaacaaacaacaacaacaaaaaacatgacacaaaaaacaacaccaaaaaataagcgcgggcgccgcccctagatttctccccctggggaggcccccaatctcgccctgccccccgttgcttttacacaagggccaccct

SEQ ID NO: 88056 - DNA, 279 bp, Homo sapiens
gcaaccatccaagcccatgcaattcttcctcggttacttagagtggtttccatttcacacactaatagaatggtacatgttacatgaaaagtcagtagcaaaaacaggatgataaacatatgatagcagagtgaagtgacttgaagacagaaatattactcagtttttgtttttgtttctgtatgaatgctttaagaactttttttttttttttgagacagagtctctctctgtcccccaggctggagtacagtggtgtgatctcagctcaccacaacc

SEQ ID NO: 88057 - DNA, 2118 bp, Homo sapiens
ccccacagtgagaggaaggaaggcaacagtcgccagcagccgatgtgaagaccggactccgtgcgcccctcgccgcctctgcctggccacatcgatgttgtgtccgccgcctgctcgcccggatcacgatgaacgcgcagctgaccatggaagcgatcggcgagctgcacggggtgagccatgagccggtgcccgcccctgccgacctgctgggcggcagcccccacgcgcgcagctccgtggcgcaccgcggcagccacctgccccccgcgcacccgcgctccatgggcatggcgtccctgctggacggcggcagcggcggcggagattaccaccaccaccaccgggcccctgagcacagcctggccggccccctgcatcccaccatgaccatggcctgcgagactcccccaggtatgagcatgcccaccacctacaccaccttgacccctctgcagccgctgcctcccatctccacagtctcggacaagttcccccaccatcaccaccaccaccatcaccaccaccacccgcaccaccaccagcgcctggcgggcaacgtgagcggtagcttcacgctcatgcgggatgagcgcgggctggcctccatgaataacctctataccccctaccacaaggacgtggccggcatgggccagagcctctcgcccctctccagctccggtctgggcagcatccacaactcccagcaagggctcccccactatgcccacccgggggccgccatgcccaccgacaagatgctcacccccaacggcttcgaagcccaccacccggccatgctcggccgccacggggagcagcacctcacgcccacctcggccggcatggtgcccatcaacggccttcctccgcaccatccccacgcccacctgaacgcccagggccacgggcaactcctgggcacagcccgggagcccaacccttcggtgaccggcgcgcaggtcagcaatggaagtaattcagggcagatggaagagatcaataccaaagaggtggcgcagcgtatcaccaccgagctcaagcgctacagcatcccacaggccatcttcgcgcagagggtgctctgccgctcccaggggaccctctcggacctgctgcgcaaccccaaaccctggagcaaactcaaatccggccgggagaccttccggaggatgtggaagtggctgcaggagccggagttccagcgcatgtccgcgctccgcttagcagcatgcaaaaggaaagaacaagaacatgggaaggatagaggcaacacacccaaaaagcccaggttggtcttcacagatgtccagcgtcgaactctacatgcaatattcaaggaaaataagcgtccatccaaagaattgcaaatcaccatttcccagcagctggggttggagctgagcactgtcagcaacttcttcatgaacgcaagaaggaggagtctggacaagtggcaggacgagggcagctccaattcaggcaactcatcttcttcatcaagcacttgtaccaaagcatgaaggaagaaccacaaactaaaacctcggtggaaaagctttaaattaaaaaaaatttttaaaagaccaggacctcaagatagcaggtttatacttagaaatatttgaagaaaaaaaagcgttatttatagtccaaagaaaccaaagacttagctcacctgcattctgactttgtttggagacacacacttcagcagggcggcgacttggcaagacaaatgatgagcaggaaaacaccactggatctcacaccttcaatccatgaccatcctcgctgtgcttggctgtttagtggtttggagcatagtgattttgagccattgagcggacatcttttaagatcgaactttctcatctgttctaccatgccacgaaggtgtatggtgtctcagtactaccaccaccagtggttacagacttaggcagagctggtcttcagaaatggttgttctataggagtgcaaccaacatggtatggggttgtctgagttcattggattaggagtgtgattttgctcgtctagcctaacgtttgaacctgccaggcccgcaacctaaatgcagattcaaacccagcaaagaaaatttgaatgac

SEQ ID NO: 88058 - DNA, 964 bp, Homo sapiens
gaactttcataattacattacaagtactggacatctgattaaatggtatcattacattcatattttgttagaagggaatttattaccagataaaagctgtctcctcctcctacgcccaatagttataaaattttaaaaagacacatttacaagtcacaaccacagggatcaaaataacatttggcaggtcaactcatagaaatgaagaaaagcttttgtttcttcagtggatgagtatctctagggttgtgaaactactaaatttctttgcatataaaaatcacaataaagcatcacattttattattgtaattaatacaataaaaaactaaagctttataatctccactactacagagctttctgcgcaatcttaaaattacattcctctttcagatcccatttacctttttcactgtagcatctccttcaacgcccttcttagcattctgatcccatcccaagttccaaaaggttaaaagtcctgtgcattacgttcaggaccgcaatgtacttagagaagctcaatattttgaatgaattaacgaatactaaactgtccttccttccctcatccagttagaatggtatgttacatttattccccactcaaaaattctcagatgtagggaggaagattaaaaagaaaactcccaccttatggaaagaaagtggcaggaaattaaatgagatactatgtaatcttaatagacaaactggttctatcctctttcccttttttgtttccacaaatttgcttctgcttaagtgacaagactctcgcagacaagtcaataaatcaggtccccatcctgctttacctattcaacatctctagctctctgtaggatggtgaaggagaaaagggtagagaaaattgggcaaattctataataccatttggtactatatatttcatcttaaatcaggttttagttcaacatctgtgtattgccatgcaaga

SEQ ID NO: 88059 - DNA, 485 bp, Homo sapiens
tgaagcagtaggcaaggtgtctgttttaaagtccaccttaaagataaggaaaccgagactctgataggatgtttatcctatcagaggtggtaagtggctggacctgaccctttctatgccccgtgtctttctaatttcatcaaatggataactttctatccttggagttgcccttggtcagagtcagcagagaggaagaaaagcagtatgcctgttcctgcaatttttctacatcaacatcattaatttccaagtcattttcattgtttgagagtgggtatatgtatgcagcttttctaaagcatagtgtactcagttgtggatttttttttctaatggaatcaagtaaaaggcattaaaaaggggtaagtcaaatgtgtacaaaggaaaagaattccatctacatgcgcatttttttccataggatttcttccattcttggaaatgatagcataaatgacctgattgtagttataagtcacagg

SEQ ID NO: 88060 - DNA, 252 bp, Homo sapiens
ctgagttgatctaaaagcagatgctgtagctgcctactttaacccatttttcaacctgtttgttttttaaagggcttcactaagggttgatatgtaccattgtagggggcaattttaagtcagctaaggcaataaccttatgcatgaacatttcccagactttcatgaagctgttgaggtcctaggcaattaatgcggcagttgtgataaataaaaacatctcacctaagtctccttttcttcataatatag

SEQ ID NO: 88061 - DNA, 366 bp, Homo sapiens
gtgctaaagccatgcaggaaggaggaaataatcagtgagccacgggctgaacttgtggaaaagaaatggagggcaaggtcacaaaccagtccctaactgcttctaatttaatgtaatcctcactgtttgtcattattgcttttgatggccatgaaatctgttttttcccagttctctagtgtaatttggaattaatttcccagctgctttattttttttctagaagagtcggggacattttcaggattagtagaggtgtttctacaacaccttcatgccttcgatagtgtgtaagagttcaccaattgaattaccttattctgttcagaagtagtaactatggagtttaaccactctggacatatt

SEQ ID NO: 88062 - DNA, 366 bp, Homo sapiens
ggtcacgttttcatgtacttattggtcattcatgtgtcatctcttaaaagtgttcaaatcttttggtaaattcatgtggctgagtgcagtggctcacgcctgtaatatcaacacttggagaggccaaggcaggtggattgcttgagcccaggagttcgagaccagtgtgggcaaggcaacatggcgaaaccccgtctctactaaaaatacaaaaattagctgggtgtggtggtgcctgcctgtaatcccagctactcaggaggctgtggcacaagaattgcttgaacctgaaaggtggaggttgcagtgagccaagattgcaccactgcattgcagcctggatgacagaacgggacttggtctcaa

SEQ ID NO: 88063 - DNA, 187 bp, Homo sapiens
tcataacctttgggttgctctggtattttgacacatttgctgggttctgagccacatcctggaaggccaccataacttctggatcctgcatggctgcaagaacctctggatcactaagaatttcattgaatccaggcattccagccattccagacatgccccctcccattccaggcattcctctggg

SEQ ID NO: 88064 - DNA, 341 bp, Homo sapiens
tgatgtcttaagtcaaacctataatttactgttattgaaatttgttgaagtctgccttcaagtataaaaagctttttcattaattcgttatatgggatacggcatagtggactatatactgaattgcaggccaggttctgccctcagccacttaagtccaaatacatcactttatattttagggcctcactgtaattagcataaaaagaacctctttcctctgaggttgagacaaacagcctgccttgtaggggaagtcaccttataataaaattcccttaggtggacaactaagtgagttctacattctctccttctctctctttccccatctctctccc

SEQ ID NO: 88065 - DNA, 481 bp, Homo sapiens
atttcagtaaacctctgcttactgctattgattaagatatttcagttttatgtaattttcaggatgggagctggaaggcttttaattgatgaaggtaaagaatgtctcctatgagcaagagaagtcaactggacatacaatagcatgatagaaaatttgggggttttctcctataattatttgtattcttactgagagttgggaggaaaagggacaaatggttacaggagagctctttgaaaatgaataccttgaaaaagaggttgtgattttagcagtatcgtgaaccacagagaggcctgggaagtgaagtagatgtttatgcatttgctggtagttgagtttatgatggagagaggaaaatgcaaagacaaaaacacttaatccctctcacattagtatctgattagaaaataattattccagataattaaaaataattgttttgactactagttgcacaaaagctgtaacaaaattt

SEQ ID NO: 88066 - DNA, 140 bp, Homo sapiens
ttcagccaagggcaaagggaaaaccagtagctataattaacttagactttcaagaagactaaactgaagtttcatacccaatgctgctcagggaaaaaaaaacccaaattaccaggagaccattaacgatagaaaattga

SEQ ID NO: 88067 - DNA, 464 bp, Homo sapiens
cctactaagctgggaatacaggtgcctgctaccatacccggctaatttttgtatttttagtaaaggtgaggtttcgccatattggccaggaggatcttgaactcctgaccttaagtgatctgctgccctccacctcccacagtgctgggattacatgggattacaggcatgagccatggtgaactgcctaaagttattaaatagtaattttttcttttgtttacttctgggtcctattttgatgtcctatgatattcaatgttctcatagtgccctttagtttctgagtcatttcaaataactagaagaatactgaatgtactcaacgtgaataaatgataaatgtttaagaatagatagatatgcctattaccctgatcttatcactaacctatatcttgcaacatcactctgcattccatgaatttgtacaattattgtgccaaactaagaaagtaaattca

SEQ ID NO: 88068 - DNA, 554 bp, Homo sapiens
gtcaatttaaggtttaattaagagataaattatgcatatctatcataatcagattacatttgtatgtgtatttatctataaatatgaccccaattttagttatggcttatattctttcttagctgatttttgatggtagttttatcttgtctaagtgagtacttatggagatagtcttattatcaccatgtgtttaacaatgaatatatatttgcttttgtgagagacacttctatgatttgaaagtaaatttcaaaaagatacataattgttttttttttttttttttcagtttttctttaaaaaaaattgcttaaaaacacgtaatataaaatttaccaccttaaatctattgaagtgtgcatttcagggccaggcttggtggaggctcttatttgtaatcccaggattttgagaggccaagactggaggatccatggagcccaacagtttgagaccagccagggcaacatatggtgacacctctctataaaaaataataataataatagccagccatagtgatgtgcagctgtggccccagctacttggga

SEQ ID NO: 88069 - DNA, 955 bp, Homo sapiens
gcggccgcctactactactaaattcgcggccgcgtcgacctccagagcaccagcactggcactggcactggcacacgctatggcaaatgaagtgcaagacctgctctcccctcggaaagggggacatcctcctgcagtaaaagctggaggaatgagaatttccaaaaaacaagaaattggcaccttggaaagacataccaaaaaaacaggattcgagaaaacaagtgccattgcaaatgttgccaaaatacagacactggatgccctgaatgacgcactggagaaggaacaagttcagctgggagtgaggaatgaaaggcaggtccagccttttcaccatggttgcagctggaaggaaacaagtggatttgacacaagctcagaggatccagaacggctgttcctgtccatgtgcctggtcacggtgctggggaacctgctcatcatcctggccgtcacccctgactcccacctccacatccccatgtgcttcttcctctccaacctgtccttgcctgacatcggtttcacctccaccacggtccccaagatgattgtggacatccagtctcacagcagagtcatctcctatgcaggctgcctgactcagatgtctctctttgccatttttggaggcatggaagagagacatgctcctgagtgtgatggcctatgaccggtttgtagccatctgtcaccctctatgtcattcagccatcacgaacccgtgtttctgtggctttctagttttgtagtctataaatactactcaggtcttttagacgcccaagacttgcacaactttgattggccttacacaaggacctgctatacgaggactgtggaaattccttaataccatcctgtgacacccttctcaagttccccgtattgcatgtgtgggaccattcagcaatcacataatccatgactaccctgctagcaacaaatatac

SEQ ID NO: 88070 - DNA, 581 bp, Homo sapiens
gcggccgcctactactactaaattcgcggccgcgtcgacctccagagcaccagcactggcactggcactggcacacgctatggcaaatgaagtgcaagacctgctctcccctcggaaagggggacatcctcctgcagtaaaagctggaggaatgagaatttccaaaaaacaagaaattggcaccttggaaagacataccaaaaaaacaggattcgagaaaacaagtgccattgcaaatgttgccaaaatacagacactggatgccctgaatgacgcactggagaagctcaactataaatttccagcaacagtgcacatggcgcatcaaaaacccacacctgctctggaaaaggttgttccactgaaaaggatctacattattcagcagcctcgaaaatgttaagcctggatttaaaacacagccgtctggccagctgcctcgaatatctgacagcttagcaaaaagggccaaagctttccataggcgtgctgcacttgcttggtaaattaaacagcttttgtatcttcccctttgactttaggtaataaagcatccaaacttgtaaatctgaaaaaaaact

SEQ ID NO: 88071 - DNA, 144 bp, Homo sapiens
gtggggcagccacagctggcattcagcctccagagcaccagcactggcactggcactggcacacgctatggcaaatgaagtgcaagacctgctctcccctcggaaagggggacatcctcctgcaggtaggctgccacctgccct

SEQ ID NO: 88072 - DNA, 468 bp, Homo sapiens
ttttattgaaaagaaaatcccatttttgtttttattgtttagtgtgctgagaattgtattaaagagtcacagaatttcatatgaagaagggacaggaagtccttggctctagcctgttcttactgataagaaatgtgatctaatggccattttagtgtgtgtgtgtgtgtgtgtgtgtgtgtgtgtgtgtgtgacaaatgctttttgaaacaggcttaagtgtatagcaggaaacaacaattaactggtttgtaattctatttggaataatgttttagccatgtcactggtatatattttgtcatatacacaaaaggagtcaggttatactatattttaagttacagcacttgttttcatcttatttaaagatttcatttatccaatggattcctggcttttagcaaaaaaatggaaatgaagtaggattttgccacagatttaaaaaatggaatgaaagggaattaa

SEQ ID NO: 88073 - DNA, 372 bp, Homo sapiens
cagaagtcaatcagctacgcacccagttctcaaagacctcacatgctagggaaggtgcggaggcagagttgtggttcagaagcagttacaggtctcaaagcaagaacagcagccaaagcttccacgccctgacgctgcctctgaatggtaaaccaatggcatatggtatccacagctaggctttgcttttttctgagtgaaggtaaaaggcatttgaaaataaaccaaagtttcacagactatgtttatggaacaaacatgggccattttcagggatataaaagtcgatgttctatgtaggcccccatatgagtatttatctactttatttacttatttatgtatttattgacagggtctcactctgtcgca

SEQ ID NO: 88074 - DNA, 658 bp, Homo sapiens
tcaagtttgtaagaacttaaaagtacaaatcatgagtctttgggaaaaaaccgcccaataatgaaattcaactaaagaagaaatgaatcaaattaaggacttaggaacaaagaatcagtaaaaggagtgttagtaaacacttcagaaactttaaaaataatgggcaatgattataaagtcaaatattatgaacactgtctatatagaaataacaagtagagtgtgctggtttcatctttcatagcaggaatcacgtacagtctctaattaaaacatacatgaagctagaaaaaaaaatagcctctttattgttttccgtaattgtccttaattttaggagaaatcttacaagactagattctcttgtggggaaaaaagtatttaaattgagcattttttcagtttcacacttgttttccttttgttaatttgctatatttgttaaatatagcatatgagcccacttttgtaaaactatttgtatatatgtgcctgtatgattaagagagatggttggaatgaatgaagttcaccagatagtacttctttctggctgatgaacttttgaatgatttttaaactttgtacttttatataatgcttattttctttttacaataaacatgttaatttctacaaggaagaaatgagttgttgg

SEQ ID NO: 88075 - DNA, 270 bp, Homo sapiens
aaaaaaagaaaaaagaaaaagaaaagaaactagggtgacgccagtagaaatggaaacaagggggtgagctgggaaactattttgaaagtagaagcaatggaaattagtaattatttggtaggaagatctgaagagtcctctgcccttcccccgtgaggcaccatgcatgcttccgcaagggagtaggttgccctgcgctgtagtttgctgctggcattccttctctcctaataggccctgtgctccaggaagagcatgaatgagaagaat

SEQ ID NO: 88076 - DNA, 571 bp, Homo sapiens
taagtaacaggcattttattgatgtggcatctgagcaaatcccattgccacctcacagtgtagaaccagtagaactaagaatactccagcctgtgcccccacccagccacctgccccggcccctcatgggaaatgacacataccctgaaagacaacagctccctttctgcttcggacaccactcaaacatttagacgcagctctatcccttttcctagctagagaaggtgatgccttcttccattactcagagatgttgagacgttttcagaatttcttgttgaaatgaaaaacatcaagataaaggacgcctttcaggcattagctaaacttccacttcataactttcggcgagacatggtgagcctcctggtgtagagttcttttgtctttgtatggaatgactttttgctgtgatggttttgaatgttgggtttctgctgtctgcttagtacccatgcctgaattttttgagattgtaaatatcaaaggagttagattgtgttctgacatggttgtagactttcacctggattattgatattctacttctaataaatttttaataggc

SEQ ID NO: 88077 - DNA, 1437 bp, Homo sapiens
gcggaagggtgcggcgaggcggaatggcggcggctgcggactcgttctcaggcggccccgcgggggtgcggcttccgaggtcgccgccactcaaggtgctggcggagcagctgcggcgcgacgcggagggcggcccgggcgcgtggcggctgtcacgggcggcggcgggccgcgggccgctggacctggcggccgtgtggatgcagggcagggtagtgatggcggaccgcggcgaggctcggctgagggacccgagcggggacttctcggtccgcggcctggagcgggtgccgcgcgggcggccctgtctagtcccaggaaagtatgtgatggtgatgggagtggttcaggcctgcagccctgagccctgcctgcaggctgtgaagatgacagacctttctgataatcccatccatgaaagtatgtgggaactggaggtagaagatttacacaggaatattccttagagtatgttggaactgtcgttaaaaacaaccaaaatcccgaaactatttagaagcttataatgatgtggatttcatggacacttttcaatgcgtatttttcaaatgcttctcagagagccttgctttggttgaccaaggagtccggatgtaggaatgtttaaatcctcggatacttcagtgacacagcctctgctgccccttgctttgcctgtgtttgctgatgaaaagcagatgcttgtgtttcattttccttcctggtttgtgtgtgttaattctctctctctctctcagacacagaagtctcatgttgcattttccaaattttatgagtgatgatactttttccattactgctgcgtccctgttttacaatgcaaaatttaagtacggtcattgcccatggtgattaaagtgtggttatgggcaggaagacagactgtgtaaaaaaggaatgacatcctggctcctcatcttcttcatcagcaactaccataaccagtttgcgagtcaaatggcatttcctaacggcaggcatggcggcccctgaaagacaacagctccctttctgcttcggacaccactcaaacatttagacgcagctctatcccttttcctagctagagaaggtgatgccttcttccattactcagagatgttgagacgttttcagaatttcttgttgaaatgaaaaacatcaagataaaggacgcctttcaggcattagctaaacttccacttcataactttcggcgagacatggtgagcctcctggtgtagagttcttttgtctttgtatggaatgactttttgctgtgatggttttgaatgttgggtttctgctgtctgcttagtacccatgcctgaattttttgagattgtaaatatcaaaggagttagattgtgttctgacatggttgtagactttcacctggattattgatattctacttctaataaatttttaataggc

SEQ ID NO: 88078 - DNA, 277 bp, Homo sapiens
atcaatagaaggaaaagtttaagccgatttaaaacttaagaatataaattccctacacaggtctgttgagaatgttcttcctgtaagtttctgaaagaaagagtctttctttctggaaacgaagcagtgagtcttaatagttatgaagttagttataagtgtaagtgaagaagatcaatataagaatttgtgctcatattgttttactgctccaatttctactaatctctccattgttagataccaaaatttttatgtatacttcttaatggtatat

SEQ ID NO: 88079 - DNA, 431 bp, Homo sapiens
gcgcccagcctaaaaaatattttttaaatgtcagttgttaatattaccaatcttcagaaaagactaagtattgggaagctatcaagcacatgaatacaagttttccaaaattctgtttttcactagaaagcttaaactttatcactggcaacaaatactgtcacttgttttatgtgacaggtttgctttactcattctcaagaaaatgactgccaaatacccaagtgtgaacaactgtaatttgtcagttgttcttcaggtaaaatagtattccataaaaaagcagctagttcagcatgcaactctaataataacacaagtgcttttcctggtaaccatcatgttttggtatgcagcagaaacattttagtcatacttcctcttatttttttttttttcttttttgacagggtcttcactctgtcgtccag

SEQ ID NO: 88080 - DNA, 1046 bp, Homo sapiens
ccctccagatctaagggtggggtggtggcatgtttcttgagttggttcctggaaagggagctgaaatggtttaatcgctcttccatgaaacgcaggcggtgaggacagccaccagacaggtaaacacactgtgcattgatccttttacgacttttgtgaaactgatggacaggcaggcagggaggagtcctgggagagagtctggggcactccatcttggggtaactcttttgctctcctcctttaattataattattaaataattaaataataaataattagagaagtgcacagatacatatgcccctggacgttcagatcagcgtggtggataatagtaacgtttcagaagtagggtctggttaaataaactactgcacatctttaccaagggatggtgcttcctatggaaaaagtttcctaaggaaaaaggttcctgtggaaaaaggttcctgtggaaaaaggttcctatggaaaatgctttcctgaagagcacatgctttgaaggtggccagacttgggtggaaactgaaactctgctagtgactagatgtgtaattcagggaacattccttcactctttcagcttcagtttccttatctttaaaaggaaatgatcataatagcacttatgctgctgtgagatttaaatgagataatgtgtccacagtactcagtacagtgccggacacacagtaagcactcaaacaatggtaatgattattataatgtattttaaaatatgacactatattcaaacataccattataatatgtcaaatgggaatatggacagaatatatgagacaacctgttcacaactgtttaatgaggaggttatccaacattaggaatgatttgatccttcaataaaaaatcaatgtgtgaaggttcctaggcataaaagaaagttcagaaggatatgtaggaaatactgttgtctctctggggattgggattacagggattttttcctcttttctttttgttaagtttgtgtttcctaaagtttctgcaataaacatatgatgcttgtataataaaa

SEQ ID NO: 88081 - DNA, 359 bp, Homo sapiens
actactactactaaattcgcggccgcgtcggcgattattataatgtattttaaaatatgacactatattcaaacataccattataatatgtcaaatgggaatatggacagaatatatgagacaacctgttcacaactgtttaatgaggaggttatccaacattaggaatgatttgatccttcaataaaaaatcaatgtgtgaaggttcctaggcataaaagaaagttcagaaggatatgtaggaaatactgttgtctctctggggattgggattacagggattttttcctcttttctttttgttaagtttgtgtttcctaaagtttctgcaataaacatatgatgcttgtataataaaa

SEQ ID NO: 88082 - DNA, 785 bp, Homo sapiens
aggaaaagtgaccgtcttcctttggtgtgagttccctgagtcttcacacaagtagattcacacagccgttggcaggatgcagaagaggtctgtcaccctgcaaaactctccgtgctgtcccttcactatcacaccgtccccaccattagccccggcaaacactgatctgttctctcactgtacttttgtctctgctggaactttatgtagatggcatcgcgagacaagtaacctgttgagactggcttcccgccatccacataatgtctctaatgagattcatccaagttgttccctccctgtatccacaggtcgttccctctcagatctgagtggtattccattgtatggatgcctacagtttatctgactgtccgctgagggtggtttgtgaaaaccaaacaaggccgctatccaaaatgcaaacaagactgctacaaacactggtgtgtgggtttctacaaggctgcgcgctttcacttctctgggggtaaatcttatacccaggagtggggcagccaagtcccacgggaagtgcgcttttaactgcatcagagatggccaaaccattttctacagtgcccgtaccacctgccttcccgccagtaacactggagtgtcccagttcctctgcatcctcccaggcacgtggcctcgtcagtgttgctgagtttcaccattctgaagccatgtgtttcgggccctcatcctggttgtagtttgtcttccctaacctgtaatggcgttgagcatcttttcctgtgctttttcgccatgtgtatatc

SEQ ID NO: 88083 - DNA, 406 bp, Homo sapiens
ccaactccaaagtcatcttcttaaacactagtgctaacttcttccatgaagcttcttgtgattacaccagcccaacatgcgatatggtcacagcatgggatggtggtcaggaccctttgatggttgaggagatgaagacccagaaaggcaaggggtttggcctagggagcctggcaagtgagtgacagagcctggtctaaagtccaggatatctctgttgttgctgttttccttttttcgttaattgcaaaagaatttacatgttcatagttaaaaacagagaagtgtatcaagtagaaaacagtagcaaactctcacccttattctgacactccagagttgcattcactctcaggcatccagatcctttccccatatacaaacatccatccatccatatatctat

SEQ ID NO: 88084 - DNA, 393 bp, Homo sapiens
ttaaggatagggtccaggcctagaatgacagaccagaagagtttaactagagagtgtgtgccaattacatatgtgatcttgtatctgaactttctgaaaacccacatcatcacctccttgtttaaaacccttctgggtttcccgttgcctgtaagtgaaagctgtttaacatcgtctgctggattcgacccctcctgctcttcacactctgctgatccctctctgccagccacactggcttttgggacttcataattgcagagctcctttctcaacaggcactgacgttctctctgtctgagctctccctctttgtctcattcttgagtgctcagctccagctgtcactttctcagtgaagcctttctggactcccctactttgtgctcataa

SEQ ID NO: 88085 - DNA, 351 bp, Homo sapiens
tgataaataaagaagttcaaaaaaatcttttaatagaagctataaaatagcagataagctaagtcattctcataaaacaccatttgtcatttgaatgcgtgcattgtggcctgttacttttaactagtctcactaatttatagttatatatgatgtagatctagattgtgatgtacactaagtgggttgatcctgagatcaagctatgattgctgcttgcgtaaagtgttccttttgggaaataaataatctttcatatctgtaaactttggtataattggttatttatgcaatgtattgttgtggttgtcaactcaagattgtattctcatctggggacattatgaatct

SEQ ID NO: 88086 - DNA, 272 bp, Homo sapiens
tttctttatctctaggattcctattagttgtacattggacatcctggactgattctgtaattttcgtatcttttttctcccatgttccctttatttgtcttttggttctgctttttgggagattttcttaacttgatctacctgaggctcagtcctcatctgtaaaatgctgataaaaggacctaccacctagcgttgctgtgaggtgtcagtgaaataaaatgtaaaatgcttagcacagtgaactttaataaatggtagttgtggttgca

SEQ ID NO: 88087 - DNA, 415 bp, Homo sapiens
tgatctacaggatcttaactggcatttaggaggctgaggcaggtggatcacttagaccaggagtttgagaccagcctggccaacatggtgaaaccccatctctatgaaacatttaaaaattagcctggcatgatggcctgtgcctgtggtctcagctacttgtgaggctgaggtgggaggattgctccggcctgggaggttgaggctgcagtgagctgtgattataccactgcatcccagcctagctgacagagcaagaccttgtctcaaaacaaaaacaaagaaaacaaaaacaaatcagacagaggcttggtcctcagtcagacagctcctggctttctggaggggtctttctgcatctgacttcttctgataccttgtctcccagcttaggcatcctgagccccccatgatg

SEQ ID NO: 88088 - DNA, 468 bp, Homo sapiens
gatgatattgatatttcaaacaccttgcagtccagttaaatgatacaaaagggcagatgatgtaaccccccaacaatgaagttataattacctttgctgtaatctaatttaggtgttttgttttacgattctcatgaaataatataggcagtccatatataagaaagcctatatccaaagatcctgaaagaattctttgaggaaaaagtgaaaagataggctaacatttgtatagctagattcaatcctttcctctaataatggaatgttaaaatagcaaacaagaacaacacatataagtgaaaaaacaacatatatctgaatatatttatcagaatataacctctggcaacagacaaagaaatctatcatttttaaatacataactctcactatattgtatacttttctttttcctcaaatctaatccaattttccaagtccattttttatgagttacttgttgaa

SEQ ID NO: 88089 - DNA, 2141 bp, Homo sapiens
ccagtctgatctcgtactcctggcctcaagtgatccaccagcactttgggaggccgaggcaggtggatcacgaggtcaggagttcaagaccagcctggccaagatggtgaaaccccatctctactaaaaatacaaaaattagccgggcgtggaggtgggcgcctgtcagctactcgtgaggctgaggcagagaattgcttgaactcaggaggtggaggttttggtgagctgagatggcgccactgcactccaacccgagcgacagagcaagattccgtcccaaaaagaaaaagcagtttttgccatcagcaaggatatctcctccactttaatggacaggcctcatttttggcagctatgctgtttgagatgtagactgaatatccaaggttcctccctagctcaagtttttacttgtgattacacacaccacattgaattccgtcttcagaggcaaagatttgggcttcatatctcaacagcaaaagggcctgttcagcaattcccttcattttagactcatatgacctcagcgattgcatgatagtagtaaactagtctcctggaaataatggatgtaggtgcttctagaatatgttacagaatttcagacttaacctattaatagataaatggatcttgacttaaggtgacaaaatgaaacttttattattgcttaaaaatgctgtgccaatattgtataactagctcctctaatacttttggtattttggatttaataataagaccttaagcattttaaatgtgaacatgttcagggaagtatgctttgatgtaaatgtctcagatctaagttgtaacacaattgaatacttgtggcttattcttggtttaacttaggaaaactggttaaacaatcccccatttgggcctgtcatcattttaatagtgacgatgttctttctgaaatcttcagggtcggagtcaggctgaatttttttaaaaattaaatattatgttcaaattctttcctttttgccattgtgaaaaagcaaaattttaaatgatttctcctgttagaatttttaaaaatacccacaggttggaccatctttcttatgggttgcacaatgaatttatattttaaattagattaagtagaatgtgaagtacatttcagatttactagttttctttccattgttcattttgggttgcctcagattcagtgtatattttaaaatattggttacataataggtactcaatgaaatggtttatagtagaatatctaagctagcactttattttaaaaagtaacttattaatcacacattgatggtacaccttgtatttagcaaatgtttgcatgttgataaaatctcctatgtcttctttcttaaatccagttgctgattttgtaaaatacagttgtgataaagcagcattacgggggggaaaaagctatattccaactggtgttaaatgtattcaacaaaatcttacatcatacagtatttatttcttaattaatagaacttcagtgatatacttggtagatatctcaagccttttgtcttttacacaatggtgctctatcctattgttttcttttcaaagaagcatctgaacacttgcatttctattttcctatccaaaggcatccacatctaagtgtgtttttaaagttgattaaaattatttttctgttaaagcattctgaaagtgtttgtctttacctagaatgatttgtacacactcgtggtcaactgaacatgaatgtcagtagtagtctaattatgggaagggtaaacgtgttagattaaggctcttaaagctctaaaccatataaactatggacttgtatcatgatttaactgttcttagatctttcttacacagtgattcattcctctatttgtacagtggctttatgaaatgttgtgaattgatactgtaatcaataaagtgcttttaaccagaaaaaaaaacaacacaacaaaaaacacttgtgcggggcgcgggcccggaaaaagtttctaacccctcgggggcggggcccagaggtatagccacgtgccactggccagaaacccggccgacccgggtggttccccaaaaaagccgggacgcgtctggacacagggcgggcacggctatacaggccggtaccccgcgcg

SEQ ID NO: 88090 - DNA, 2431 bp, Homo sapiens
ccagtctgatctcgtactcctggcctcaagtgatccaccagcctcggcctcccaaagtgctgggattacagacgtgagccaccgtgcccagccaggtttccttctttaccttctaagaaacatttaaacataatgtgcctgagaaggttaatttgttgactctgtagcatgtcaagaagagtagttttttgagatctggcaagaatattttagagatacatattcttttctaagtatgttatcaccctgtggtgttgagcatatcgtcccaaaaacctgcttcagcaagcagttcttggccaggcatggtggctcacacctgtaatcccagcactttgggaggccgaggcaggtggatcacgaggtcaggagttcaagaccagcctggccaagatggtgaaaccccatctctactaaaaatacaaaaattagccgggcgtggaggtgggcgcctgtcagctactcgtgaggctgaggcagagaattgcttgaactcaggaggtggaggttttggtgagctgagatggcgccactgcactccaacccgagcgacagagcaagattccgtcccaaaaagaaaaagcagtttttgccatcagcaaggatatctcctccactttaatggacaggcctcatttttggcagctatgctgtttgagatgtagactgaatatccaaggttcctccctagctcaagtttttacttgtgattacacacaccacattgaattccgtcttcagaggcaaagatttgggcttcatatctcaacagcaaaagggcctgttcagcaattcccttcattttagactcatatgacctcagcgattgcatgatagtagtaaactagtctcctggaaataatggatgtaggtgcttctagaatatgttacagaatttcagacttaacctattaatagataaatggatcttgacttaaggtgacaaaatgaaacttttattattgcttaaaaatgctgtgccaatattgtataactagctcctctaatacttttggtattttggatttaataataagaccttaagcattttaaatgtgaacatgttcagggaagtatgctttgatgtaaatgtctcagatctaagttgtaacacaattgaatacttgtggcttattcttggtttaacttaggaaaactggttaaacaatcccccatttgggcctgtcatcattttaatagtgacgatgttctttctgaaatcttcagggtcggagtcaggctgaatttttttaaaaattaaatattatgttcaaattctttcctttttgccattgtgaaaaagcaaaattttaaatgatttctcctgttagaatttttaaaaatacccacaggttggaccatctttcttatgggttgcacaatgaatttatattttaaattagattaagtagaatgtgaagtacatttcagatttactagttttctttccattgttcattttgggttgcctcagattcagtgtatattttaaaatattggttacataataggtactcaatgaaatggtttatagtagaatatctaagctagcactttattttaaaaagtaacttattaatcacacattgatggtacaccttgtatttagcaaatgtttgcatgttgataaaatctcctatgtcttctttcttaaatccagttgctgattttgtaaaatacagttgtgataaagcagcattacgggggggaaaaagctatattccaactggtgttaaatgtattcaacaaaatcttacatcatacagtatttatttcttaattaatagaacttcagtgatatacttggtagatatctcaagccttttgtcttttacacaatggtgctctatcctattgttttcttttcaaagaagcatctgaacacttgcatttctattttcctatccaaaggcatccacatctaagtgtgtttttaaagttgattaaaattatttttctgttaaagcattctgaaagtgtttgtctttacctagaatgatttgtacacactcgtggtcaactgaacatgaatgtcagtagtagtctaattatgggaagggtaaacgtgttagattaaggctcttaaagctctaaaccatataaactatggacttgtatcatgatttaactgttcttagatctttcttacacagtgattcattcctctatttgtacagtggctttatgaaatgttgtgaattgatactgtaatcaataaagtgcttttaaccagaaaaaaaaacaacacaacaaaaaacacttgtgcggggcgcgggcccggaaaaagtttctaacccctcgggggcggggcccagaggtatagccacgtgccactggccagaaacccggccgacccgggtggttccccaaaaaagccgggacgcgtctggacacagggcgggcacggctatacaggccggtaccccgcgcg

SEQ ID NO: 88091 - DNA, 2030 bp, Homo sapiens
taatggtatcaaggaaggtactagagcattgtaccatcagcaacgtactgatgccttcccatgcagactacctgctgatactgtgttatgtgggagaaagataagagtctagaacttatgccatggagcatagagcttctctgtggattgaaaacattccactgccctaatgtacaaagttacagggcccacttggaatcgctctctctagctaatgacattccaaccctatcattagcatgatttctaaattgggcattccatttccactcactcagtggagctctgagtacttcactggacatttaattttggaaatgagttttgaaactcagttcgtgaagcctgcagtcgagcaaatgactatatatttgccattaagtttgaggggtttcctttcctatatgctttcagtgatttattttgctttttaaataaagattgtttgtttattacctgaaagttgatactgatttaggaatatattttctgtgattggaatcctcaacaatttattttggaagcttgcagatggctagctttgaaattgaaattgtgtttttctccttcttttctcatacgacttctaagtcatcctttctgacataaggcaacttcagtgtagtctgcacaaaattagtccccttctgatcatgcgtcatataattttctctaaagttctgactatgacaaatcatctggccctcagtctttcaaaataatattatataatattttttaaattatggaactaatatattttccattgtaaaatacttaaaaaatatgatagtataaatatcacatgtaatccaacgatgcagatttatcttaaggagtaataaatatattattttaacatttccagctaacatctcttttctcttaggtggaaacttcattgttgaatagaaatgtttttaagtgaagaagttgacagaatagggtctgctgaatttaaacagccatcaaaagttaaactggaatcttgaaatgccatttgctcggcatagaatcagagccttttagaaacatccatttaagttttgttagaagatagtcaccagttgcctgaatcgaatgaggaaaagcctgcttccagagatggacagtatattatagagtgagatatagagtttaaagcaagtgtgtgagtatatgtatattccatattattggtatatgtgtgtttatatatgaatctgtatatatgtgtgtctttgaatagacacaacatatatgcccctcatgcataattgtgcttattttgccctaattgaggaatttgagacgtattattggttcttctccctctcagatactatggtgggtaaaacccacagcctgaaagggttaaattttccataaatgccactgagtgtacatttgtggatataaataaatatatataatacacacacacatatggcaaatacatatacacacacaatattgcctttagtgctaatgcaagttggatcatgaaaacaatgtaggtaaagtaaagtatgtatttgtctgtgcttgaaaaatattgtaaaatgttatgtatttggaatatattttgtggtttgtctaatatttataaacacaactcggggtgaattcacaatgagtttatttcattgaaatactagagatatgggggccatgttactgtgattggagccttacctttgtatagtgaaatttgcatttctatgtcaacatccagattgttttatatgttaatatggtggcaggaatccctaataaaaatactctggggtaaaaaaacaacaaacaaaaacaaaaaaaaagaaaaaaaaagaaacaaaaaaaaaaaaggagcgcaacaacacaaaagaagcacacaccgaagaaggacaacaaacacaaaggagaggggggggcacaaaaaaaaccgcaccaggaggacaaagcacaaaccaccaagggtgttgagaagagggcgcaccacagaggagagagcaaaacaggcgagggcggccgcgaaaaaaacacccagagcgggagaaccaaggggcacg

SEQ ID NO: 88092 - DNA, 384 bp, Homo sapiens
cttgacatttccttccactgcaggctgagtccaggccctcctggcttgtgccatgtgatgcattacggcaggctcagatgttaatgtagcatctgtgattagaaggggaaaacattgcttttataaactaggttttgttgctgccatttctgcattactcaggcacaggcactaggtctaccttccccctgttctcagtgccctccctctccaaacaaaagaaacagtactctaaacattttttgttcttctctgggttggtctggttgagcaacgatcatcatgctctgatttagtgttttcaaataagtatgccctctgctgcagcactctattgagagacaacacagcccaagcgcgagagttcagcatggccactaataa

SEQ ID NO: 88093 - DNA, 249 bp, Homo sapiens
tcctaatgctatccttcccctgccctccaccccgcgacagcccccggggtgtgatgttccccgccctgtgtccaagtgttctcattgttcaattcccacctatgagtgagaacatgcagtgttttgttctccatccacagaggactttatatatattaattcatttaggtttcaaaactactttgtggggtataataatttctactttataaataaggaagttatttataacctaggttcatttgacat

SEQ ID NO: 88094 - DNA, 514 bp, Homo sapiens
  misc_feature (64)..(64): n is a, c, g, or t
actctagaggatcttacgtactggcattttttgtattttaagtacagacaggtttctccatgtnggtcaggctggtctcgaacccccaacctcaggtgatccacccccccctcagcctcccaagtagctgggactacaggcacacaccaccacacccagttaatttttgtatttttagtagacattgctctctttactgtcacaattaaatgttctaccttactggctttaacttctcatatttccctactgatgaactatgtatgggttgggtagccattattccactgaaagtattcttccaaagataaaaatagctgcccatatcatttccaatgggtgttaatctcccaccataagaatctgtgacacacggatgcatgatctatgaagtgagagatgggaacaacaatggaacgaaaaagatcacaaagtgaagtaaacattttgaggataaaatgagtcaagttaaaaaagctagtaaatgattaaatgaaaggtgaccctagaagct

SEQ ID NO: 88095 - DNA, 439 bp, Homo sapiens
ttaagggctatggcctggttttggaccctgggaagcttacagacagtgggcaagtgaggtccactgtattgctttaagagatacatacacatacacacacacaaggaattctggtggcagtgagggggtgtcttactggggaaaggaggacagggtcggggaaatctttcttgctgaaactattaggattcttgaaggttcattaggtaggttggatatacaaggggaattgggcacaaggtcaaagcactataatacagagagtatgtgaagaatgggcctcccattaatgggtcacacgagcatggacctctcagggtagcataccctgtgtttcatctgtgatacctgattcatctgtgtcctccaagcagaggaagagggtttagctaagcaaggaggttctttctggaaagtggaagtcctgaagtgggtagtg

SEQ ID NO: 88096 - DNA, 1602 bp, Homo sapiens
gttattggcaagttcccctgcagtttgggctgtctctgtggctggttctgcggcgtgcggccagccatggagcgctctgggcccagcgaagtgacaggctcagacgcatcgggaccggacccgcagcttgcggtcaccatgggcttcacggggttcggtaaaaaagctcgcacatttgacttggaagcaatgtttgaacaaactcgaagaacagctgtggaaagaagttgcaaaacactggttcaacccaatggaaatggattgaaagagtgaaagtcactggtctcaaagaatctacggaatttagcattttgaaaatcacatagcaattttgggtaggtattcacctgcactaaaaaaccaggcaaacatccgactcccaggataaagtgactgagagcagtagaagacttgttgagccttaaggaataagaggaaaattacgttatgaagtgcaggaacagcacagacccagacgaggggacgcagcccggagccagtaacccggcgccacctcctccccagggcgcagcgctggctgatccccagataccgtgatcacacgtcccgggtcctgagagcgccacataggtagacagttctttgggacttctgggatgcagcacttgaagagaggtttacctaaactttcctcctgggagcctgtgatcatttgaaagtaacagaagaaagttgtcaggctgaggaaagtttcaacaggcacttggtgagaatgggaagcatccattcattgtgaaatcgcggggacagaggaggaattcacgggatcagagcactgagaaactccagaggcttctggttcaccgccctgattccacagatgtgggtcagaggcagagatggaagttggaatggacaagcctgccctctccttggctctccatggctctgtcctcaggctgtttctgcaatttgacatgaggcctggccccagggaaaccagtggggcctcatctcctccctgtgctgctctgaggtggagccttctcagggtcagtccagctctggagcccctctccagctcggtcaccaaagctgtctggtcccagggcggtgctgagtgacaggcatgccagccaatccaatcggcaatttcatatccaatgcatgtgactgataaagagataacgccctgtctccaagacacaggctttacataaacagctttaatgacttcttcacttagagacaagactccttagtggtggaacctcaggcatccgtgcaggacgtaagaaagctcccgtatatacatgaactgagaagtgtgtagaagaataaatactgtaataggtaataaaatgtatgtatttttatttatgtgctactttgtctttctccctctctgtgtatatacacatacatacaaaaatgtattcattctatggaaaacatgaaagatgtaatattctttacatatgaaattttaattaatgtattttttctgatcatatgaaccccacaaatataattttataatttttttacctaacaataagtcttaaacataaatatacatggacaatatcatagttttttttttaatcataattaaaatggttgtgaaacattccactttaa

SEQ ID NO: 88097 - DNA, 588 bp, Homo sapiens
cgaccataatggattaataagcgcagccagggctggtgaattaccagatctccgtcaagtgcagtaaccagttcaagttggaagtgtgtcttttgaaatcagaaaacaaagtcgtggacaaccaggctgggacccagggccagctgaaggtgctgggtgccaacctctggtggccgtacctgatgcacgaacaccccgcctacctgtactcgtgggaggatggtgattgctcacaccaaagccttggacccctcccagcctgtgacctttgtgaccaactccacctacgcagcagacaagggggctctgtatgtggatgtgatccgtgtgaacagctactactcttggtatcgcaactacgggcacctggagttgattcagctgcagctggccgcccagtttgagaactggtgtaagacatcacaatcccattattcagagcgtgtatggagtggaaacgcttgtagggtttcaccagattatatatattcctaccagatggagataattacagctttaaaaatttttattttttcattttatttcacatattgacattaaatttttatggacacataaaaaaaaaaa

SEQ ID NO: 88098 - DNA, 1087 bp, Homo sapiens
  misc_feature (436)..(436): n is a, c, g, or t
  misc_feature (508)..(508): n is a, c, g, or t
  misc_feature (548)..(548): n is a, c, g, or t
  misc_feature (556)..(556): n is a, c, g, or t
actaggccgcctctcttttcttgctccagtgacaggctcagacgcatcgggaccggacccgcagcttgcggtcaccatgggcttcacggggttcggtaaaaaagctcgcacatttgacttggaagcaatgtttgaacaaactcgaagaacagctgtggaaagaagttgcaaaacactggggctggtgaattaccagatctccgtcaagtgcagtaaccagttcaagttggaagtgtgtcttttgaaatcagaaaacaaagtcgtggacaaccaggctgggacccagggccagctgaaggtgctgggtgccaacctctggtggccgtacctgatgcacgaacaccccgcctacctgtactcgtgggagatggtgattgctcacaccaaagccttggacccctcccagcctgtgacctttgtgaccaactccacctangcagcagacaagggggctctgtatgtggatgtgatccgtgtgaacagctactactcttggtatcgcaactangggcacctggagttgattcagctgcagctggccgcccagnttgagaantggtgtaagacatcacaatcccattattcagagcgagtatggagtggaaacgcttgtagggtttcaccagggctggtgacttaccagatctccgtcaagtgcagtaaccagttcaagttggaagtgtgtcttttgaaatcaggtgccaacctctggtggccgtacctgatgcacgaacaccccgcctacctgtactcgtggggatggtgattgctcacaccaaagccttggacccctcccagcctgtgacctttgtgaccaactccacctacgcagcagacaagggggtgagcctgggggtccccaccccatttctcctgcctttgcctgggcttgtcctgaagcctgctcatgggaacagctggaaagaaccatgtgctgccagtctgagctttttattttgttttacttagaaagatagagacagggtcttgccatgttgcccaggctggtctcgaactcctgggctcaagtggtcctcctgcctcggccttccagagggctggggtgacaggcgtgtgccaccgcact

SEQ ID NO: 88099 - DNA, 1331 bp, Homo sapiens
  misc_feature (436)..(436): n is a, c, g, or t
  misc_feature (508)..(508): n is a, c, g, or t
  misc_feature (548)..(548): n is a, c, g, or t
  misc_feature (556)..(556): n is a, c, g, or t
actaggccgcctctcttttcttgctccagtgacaggctcagacgcatcgggaccggacccgcagcttgcggtcaccatgggcttcacggggttcggtaaaaaagctcgcacatttgacttggaagcaatgtttgaacaaactcgaagaacagctgtggaaagaagttgcaaaacactggggctggtgaattaccagatctccgtcaagtgcagtaaccagttcaagttggaagtgtgtcttttgaaatcagaaaacaaagtcgtggacaaccaggctgggacccagggccagctgaaggtgctgggtgccaacctctggtggccgtacctgatgcacgaacaccccgcctacctgtactcgtgggagatggtgattgctcacaccaaagccttggacccctcccagcctgtgacctttgtgaccaactccacctangcagcagacaagggggctctgtatgtggatgtgatccgtgtgaacagctactactcttggtatcgcaactangggcacctggagttgattcagctgcagctggccgcccagnttgagaantggtgtaagacatcacaatcccattattcagagcgagtatggagtggaaacgcttgtagggtttcaccagggctggtgacttaccagatctccgtcaagtgcagtaaccagttcaagttggaagtgtgtcttttgaaatcaggtgccaacctctggtggccgtacctgatgcacgaacaccccgcctacctgtactcgtggggatggtgattgctcacaccaaagccttggacccctcccagcctgtgacctttgtgaccaactccacctacgcagcagacaagggggtgagcctgggggtccccaccccatttctcctgcctttgcctgggcttgtcctgaagcctgctcatgggaacagctggaaagaaccatgtgctgccaatggagtcttgctgtgttgcccaggctggagtgcagtggcacagtctcagctcactgcaacctccgcctcccaggctctgtatgtggatgtgatccgtgtgaacagctactactcttggtatcgcaactacgggcacctggagttgattcagctgcagctggccgcccagtttgagaactggtgtaagacatcacaatcccattattcagagcgtgtatggagtggaaacgcttgtagggtttcaccaggatccaccttgatgttcagtgaagagaaccagaaaagtctgctagagcagtaccatctgggtctcaatcaaaaacgcagaaaatacgtggttggagagctcatctggaattttgccgatttcatgactaaccagtgtaagtg

SEQ ID NO: 88100 - DNA, 562 bp, Homo sapiens
gtggtattgaccacgttcttgtttttgtttgtgaccaggccagattacagaggggtattgatttgccttgcccccgcccccaccatcacagtgtgtccctgtccagtgttggtgctgtgtggcattggcttgtgtccataggagtccatcaaggcagagcggcagagcggcaaggcaggtcagcttccagctcttccaggctgcatgtcccactcaatatcctgtaagttctgatctggcagatactgaatactcaagggttcacattctcttagcctagaggtggctgcaataatgaaaggcatttggctgatgtgttttcaaaggagagggaagctgtctgtgtttgttacctgcggctgcataacaaatgaccacagcctagtgactcgaaacatcacacaccagttacctccgctctcagtaggtcagaagttcaggcatagaccagctgtggcctccactctgagtctcagcaggctacaatcagggctcaatcagggctgtggtcctgtcagaggctctctcaggttgttggtggttgtaggactgaagttcctgt

SEQ ID NO: 88101 - DNA, 1787 bp, Homo sapiens
gttattggcaagttcccctgcagtttgggctgtctctgtggctggttctgcggcgtgcggccagccatggagcgctctgggcccagcgaagtgacaggctcagacgcatcgggaccggacccgcagcttgcggtcaccatgggcttcacggggttcggtaaaaaagctcgcacatttgacttggaagcaatgtttgaacaaactcgaagaacagctgtggaaagaagttgcaaaacactgggccagattacagaggggtattgatttgccttgcccccgcccccaccatcacagtgtgtccctgtccagtgttggtgctgtgtggcattggcttgtgtccataggagtccatcaaggcagagcggcagagcggcaaggcaggtcagcttccagctcttccaggctgcatgtcccactcaatatcctttcaacccaatggaaatggattgaaagagtgaaagtcactggtctcaaagaatctacggaatttagcattttgaaaatcacatagcaattttgggtaggtattcacctgcactaaaaaaccaggcaaacatccgactcccaggataaagtgactgagagcagtagaagacttgttgagccttaaggaataagaggaaaattacgttatgaagtgcaggaacagcacagacccagacgaggggacgcagcccggagccagtaacccggcgccacctcctccccagggcgcagcgctggctgatccccagataccgtgatcacacgtcccgggtcctgagagcgccacataggtagacagttctttgggacttctgggatgcagcacttgaagagaggtttacctaaactttcctcctgggagcctgtgatcatttgaaagtaacagaagaaagttgtcaggctgaggaaagtttcaacaggcacttggtgagaatgggaagcatccattcattgtgaaatcgcggggacagaggaggaattcacgggatcagagcactgagaaactccagaggcttctggttcaccgccctgattccacagatgtgggtcagaggcagagatggaagttggaatggacaagcctgccctctccttggctctccatggctctgtcctcaggctgtttctgcaatttgacatgaggcctggccccagggaaaccagtggggcctcatctcctccctgtgctgctctgaggtggagccttctcagggtcagtccagctctggagcccctctccagctcggtcaccaaagctgtctggtcccagggcggtgctgagtgacaggcatgccagccaatccaatcggcaatttcatatccaatgcatgtgactgataaagagataacgccctgtctccaagacacaggctttacataaacagctttaatgacttcttcacttagagacaagactccttagtggtggaacctcaggcatccgtgcaggacgtaagaaagctcccgtatatacatgaactgagaagtgtgtagaagaataaatactgtaataggtaataaaatgtatgtatttttatttatgtgctactttgtctttctccctctctgtgtatatacacatacatacaaaaatgtattcattctatggaaaacatgaaagatgtaatattctttacatatgaaattttaattaatgtattttttctgatcatatgaaccccacaaatataattttataatttttttacctaacaataagtcttaaacataaatatacatggacaatatcatagttttttttttaatcataattaaaatggttgtgaaacattccactttaa

SEQ ID NO: 88102 - DNA, 831 bp, Homo sapiens
gttattggcaagttcccctgcagtttgggctgtctctgtggctggttctgcggcgtgcggccagccatggagcgctctgggcccagcgaagtgacaggctcagacgcatcgggaccggacccgcagcttgcggtcaccatgggcttcacggggttcggtaaaaaagctcgcacatttgacttggaagcaatgtttgaacaaactcgaagaacagctgtggaaagaagttgcaaaacactggggctggtgaattaccagatctccgtcaagtgcagtaaccagttcaagttggaagtgtgtcttttgaaatcagaaaacaaagtcgtggacaaccaggctgggacccagggccagctgaaggtgctgggtgccaacctctggtggccgtacctgatgcacgaacaccccgcctacctgtactcgtgggaggatggtgattgctcacaccaaagccttggacccctcccagcctgtgacctttgtgaccaactccacctacgcagcagacaagggggctctgtatgtggatgtgatccgtgtgaacagctactactcttggtatcgcaactacgggcacctggagttgattcagctgcagctggccgcccagtttgagaactggtgtaagacatcacaatcccattattcagagcgtgtatggagtggaaacgcttgtagggtttcaccaggatccaccttgatgttcagtgaagagaaccagaaaagtctgctagagcagtaccatctgggtctcaatcaaaaacgcagaaaatacgtggttggagagctcatctggaattttgccgatttcatgactaaccagtgtaagtg

SEQ ID NO: 88103 - DNA, 843 bp, Homo sapiens
ccccgcctacctgtactcgtgggaggatggtgattgctcacaccaaagccttggacccctcccagcctgtgacctttgtgaccaactccacctacgcagcagacaagggggctctgtatgtggatgtgatccgtgtgaacagctactactcttggtatcacaactatgggcacctggagttgattcagctgcagctggccgcccagtttgagaattggtgtaagacatcacaatcccattattcagagcgagtatggagtggaaacgcttgtagggtttcaccagggctggtgaattaccagatctccgtcaagtgcagtaaccagttcaagttggaagtgtgtcttttgaaatcagaaaacaaagtcgtggacaaccaggctgggacccagggccagctgaaggtgctgggtgccaacctctggtggccgtacctgatgcacgaacaccccgcctacctgtactcgtgggaggatggtgattgctcacaccaaagccttggacccctcccagcctgtgacctttgtgaccaactccacctacgcagcagacaagggggctctgtatgtggatgtgatccgtgtgaacagctactactcttggtatcgcaactacgggcacctggagttgattcagctgcagctggccgcccagtttgagaactggtgtaagacatcacaatcccattattcagagcgtgtatggagtggaaacgcttgtagggtttcaccagattatatatattcctaccagatggagataattacagctttaaaaatttttattttttcattttatttcacatattgacattaaatttttatggacacataaaaaaaaaaa

SEQ ID NO: 88104 - DNA, 847 bp, Homo sapiens
gttattggcaagttcccctgcagtttgggctgtctctgtggctggttctgcggcgtgcggccagccatggagcgctctgggcccagcgaagtgacaggctcagacgcatcgggaccggacccgcagcttgcggtcaccatgggcttcacggggttcggtaaaaaagctcgcacatttgacttggaagcaatgtttgaacaaactcgaagaacagctgtggaaagaagttgcaaaacactgggccagattacagaggggtattgatttgccttgcccccgcccccaccatcacagtgtgtccctgtccagtgttggtgctgtgtggcattggcttgtgtccataggagtccatcaaggcagagcggcagagcggcaaggcaggtcagcttccagctcttccaggctgcatgtcccactcaatatcctgtaagttctgatctggcagatactgaatactcaagggttcacattctcttagcctagaggtggctgcaataatgaaaggcatttggctgatgtgttttcaaaggagagggaagctgtctgtgtttgttacctgcggctgcataacaaatgaccacagcctagtgactcgaaacatcacacaccagttacctccgctctcagtaggtcagaagttcaggcatagaccagctgtggcctccactctgagtctcagcaggctacaatcagggctcaatcagggctgtggtcctgtcagaggctctctcaggttgttggtggttgtaggactgaagttcctgtttttggggggtagtcagctggtgtattagtctattttcacactagtgatcaagacatacctgagactgggtactttatttaa

SEQ ID NO: 88105 - DNA, 797 bp, Homo sapiens
ggagtggaccaggatgttgcctttctctccaccgccctgtctctatccagatctacttcactggctgctccatgaacccagcccgctcttttggccctgcggtggtcatgaatcggttcagccccgctcactgggtgagtctgtcccttcccctggctccctggagatgagggcctggagacccagcagtggcagctcagagctcaccagacctggattctgtgggtctagagcttgggggtgggccagggagtggtggctgacagagaaagggacacagtaggggatgggattcagctagaggggcagaggtggctttgtatggcctgaaccgctggggacagggagtctgagtatctatccgcttatggaagaggctctactgaacctggaggtgcagaggggctctgtgtcaattcccttgaggatttggtgtccgtccccctcggtgtctgcgtgctggtcctctctgatgttttatttatctgtccctgttgagggggttgggagagtcttcctgtgggtctgtccctgtggacagtctgtctgccccccctttggaagctcatggtcactctctccagggtctgcttctatccctgcgtggaggggacacgcgctctgttcatccgtctctctgaggacccacgtgtcccctctgaaggtttatttgcttctctttccggtgtggttggagggagcctgtccctctgggaatccgtttgccttctttgagggtctaggtgtctgtggtccatgtctctgtccctgggagtggtgtgtcagtatattcgtcc

SEQ ID NO: 88106 - DNA, 265 bp, Homo sapiens
gaaggtggccgggctctctaatcctctatccgctacagctcaacaacaacacaacgcagggccaggccatggtggtggagctgattctgaccttccagctggcactctgcatcttcgcctccactgactcccgccgcaccagccgctccttaggaagaagacagactggttcattgaatgccgccttatttatttctggtgaggatgcatgcgtggggctgctggtgtttagagtgggggctacccaataaatcactgatactca

SEQ ID NO: 88107 - DNA, 1965 bp, Homo sapiens
  misc_feature (284)..(284): n is a, c, g, or t
agctagacgccccgaggtcggagtgaagcgccgggaccgagccccgtctcccagggagtccggggcgcacggcaccgaggagagcgcgggagccaacctgggcgcatcatgcgcagggcccgggacgctgggccggtctacaccgccgcctgggtcacgtggcccggacgggccggcggctgccccggccggggggcgggggtcgcgccggggttgcgctggacgacggagagcggcgggcccgcagcggcctggagcctcccaacccgcgccgcgctggcccncgagcgtaggagccgccccctgcccccccgcgccggccccgcgcccggccgcccgccccctatatagcgcgccccagcagggcccgcgccaggccgccagcctcggagtgggcgcgggacagtgcgcggcgccccgcagccaggcccccgcccccgccgcatccacctcctccgccgcctgcgacccaacgggcgccccccgccgcggcagctgccgccgggcccccgcggccaccatgaagaaggaggtgtgctccgtggccttcctcaaggccgtgttcgcagagttcttggccaccctcatcttcgtcttctttggcctgggctcggccctcaagtggccgtcggcgctgcctaccatcctgcagatcgcgctggcgtttggcctggccataggcacgctggcccaggccctgggacccgtgagcggcggccacatcaaccccgccatcaccctggccctcttggtgggcaaccagatctcgctgctccgggctttcttctacgtggcggcccagctggtgggcgccattgccggggctggcatcctctacggtgtggcaccgctcaatgcccggggcaatctggccgtcaacgcgctcaacaacaacacaacgcagggccaggccatggtggtggagctgattctgaccttccagctggcactctgcatcttcgcctccactgactcccgccgcaccagccctgtgggctccccagccctgtccattggcctgtctgtcaccctgggccaccttgtcggaatctacttcactggctgctccatgaacccagcccgctcttttggccctgcggtggtcatgaatcggttcagccccgctcactgggttttctgggtagggcccatcgtgggggcggtcctggctgccatcctttacttctacctgctcttccccaactccctgagcctgagtgagcgtgtggccatcatcaaaggcacgtatgagcctgacgaggactgggaggagcagcgggaagagcggaagaagaccatggagctgaccacccgctgaccagtgtcaggcaggggccagcccctcagcccctgagccaagggggaaaagaagaaaaagtacctaacacaagcttcctttttgcacaaccggtcctcttggctgaggaggaggagctggtcaccctggctgcacagttagagaggggagaaggaacccatgatgggactcctggggtaggggccaggggctggggtctgctggggacaggtctctctgggacagacctcagagattgtgaatgcagtgccaagctcacaggctgcaagggccaggccagaaaagggtgggcctgcagcctgcaccccccaccttccccaacccttcctcaagagctgaagggatcccagcccctaggtgggcagaggcagaccctccccagagctccttaggaagaagacagactggttcattgaatgccgccttatttatttctggtgaggatgcatgcgtggggctgctggtgtttagagtgggggctacccaataaatcactgatactcaaaacaccagcagaccctccccagagctccttaggaagaagacagactggttcattgaatgccgccttatttatttctggtgaggatgcatgcgtggggctgctggtgtttagagtgggggctacccaataaatcactgatact

SEQ ID NO: 88108 - DNA, 1657 bp, Homo sapiens
  misc_feature (284)..(284): n is a, c, g, or t
agctagacgccccgaggtcggagtgaagcgccgggaccgagccccgtctcccagggagtccggggcgcacggcaccgaggagagcgcgggagccaacctgggcgcatcatgcgcagggcccgggacgctgggccggtctacaccgccgcctgggtcacgtggcccggacgggccggcggctgccccggccggggggcgggggtcgcgccggggttgcgctggacgacggagagcggcgggcccgcagcggcctggagcctcccaacccgcgccgcgctggcccncgagcgtaggagccgccccctgcccccccgcgccggccccgcgcccggccgcccgccccctatatagcgcgccccagcagggcccgcgccaggccgccagcctcggagtgggcgcgggacagtgcgcggcgccccgcagccaggcccccgcccccgccgcatccacctcctccgccgcctgcgacccaacgggcgccccccgccgcggcagctgccgccgggcccccgcggccaccatgaagaaggaggtgtgctccgtggccttcctcaaggccgtgttcgcagagttcttggccaccctcatcttcgtcttctttggcctgggctcggccctcaagtggccgtcggcgctgcctaccatcctgcagatcgcgctggcgtttggcctggccataggcacgctggcccaggccctgggacccgtgagcggcggccacatcaaccccgccatcaccctggccctcttggtgggcaaccagatctcgctgctccgggctttcttctacgtggcggcccagctggtgggcgccattgccggggctggcatcctctacggtgtggcaccgctcaatgcccggggcaatctggccgtcaacgcgatctacttcactggctgctccatgaacccagcccgctcttttggccctgcggtggtcatgaatcggttcagccccgctcactgggttttctgggtagggcccatcgtgggggcggtcctggctgccatcctttacttctacctgctcttccccaactccctgagcctgagtgagcgtgtggccatcatcaaaggcacgtatgagcctgacgaggactgggaggagcagcgggaagagcggaagaagaccatggagctgaccacccgctgaccagtgtcaggcaggggccagcccctcagcccctgagccaagggggaaaagaagaaaaagtacctaacacaagcttcctttttgcacaaccggtcctcttggctgaggaggaggagctggtcaccctggctgcacagttagagaggggagaaggaacccatgatgggactcctggggtaggggccaggggctggggtctgctggggacaggtctctctgggacagacctcagagattgtgaatgcagtgccaagctcacaggctgcaagggccaggccagaaaagggtgggcctgcagcctgcaccccccaccttccccaacccttcctcaagagctgaagggatcccagcccctaggtgggcagaggcagaccctccccagagctccttaggaagaagacagactggttcattgaatgccgccttatttatttctggtgaggatgcatgcgtggggctgctggtgtttagagtgggggctacccaataaatcactgatactca

SEQ ID NO: 88109 - DNA, 1795 bp, Homo sapiens
  misc_feature (284)..(284): n is a, c, g, or t
agctagacgccccgaggtcggagtgaagcgccgggaccgagccccgtctcccagggagtccggggcgcacggcaccgaggagagcgcgggagccaacctgggcgcatcatgcgcagggcccgggacgctgggccggtctacaccgccgcctgggtcacgtggcccggacgggccggcggctgccccggccggggggcgggggtcgcgccggggttgcgctggacgacggagagcggcgggcccgcagcggcctggagcctcccaacccgcgccgcgctggcccncgagcgtaggagccgccccctgcccccccgcgccggccccgcgcccggccgcccgccccctatatagcgcgccccagcagggcccgcgccaggccgccagcctcggagtgggcgcgggacagtgcgcggcgccccgcagccaggcccccgcccccgccgcatccacctcctccgccgcctgcgacccaacgggcgccccccgccgcggcagctgccgccgggcccccgcggccaccatgaagaaggaggtgtgctccgtggccttcctcaaggccgtgttcgcagagttcttggccaccctcatcttcgtcttctttggcctgggctcggccctcaagtggccgtcggcgctgcctaccatcctgcagatcgcgctggcgtttggcctggccataggcacgctggcccaggccctgggacccgtgagcggcggccacatcaaccccgccatcaccctggccctcttggtgggcaaccagatctcgctgctccgggctttcttctacgtggcggcccagctggtgggcgccattgccggggctggcatcctctacggtgtggcaccgctcaatgcccggggcaatctggccgtcaacgcgctcaacaacaacacaacgcagggccaggccatggtggtggagctgattctgaccttccagctggcactctgcatcttcgcctccactgactcccgccgcaccagccctgtgggctccccagccctgtccattggcctgtctgtcaccctgggccaccttgtcggaatctacttcactggctgctccatgaacccagcccgctcttttggccctgcggtggtcatgaatcggttcagccccgctcactgggtgagtctgtcccttcccctggctccctggagatgagggcctggagacccagcagtggcagctcagagctcaccagacctggattctgtgggtctagagcttgggggtgggccagggagtggtggctgacagagaaagggacacagtaggggatgggattcagctagaggggcagaggtggctttgtatggcctgaaccgctggggacagggagtctgagtatctatccgcttatggaagaggctctactgaacctggaggtgcagaggggctctgtgtcaattcccttgaggatttggtgtccgtccccctcggtgtctgcgtgctggtcctctctgatgttttatttatctgtccctgttgagggggttgggagagtcttcctgtgggtctgtccctgtggacagtctgtctgccccccctttggaagctcatggtcactctctccagggtctgcttctatccctgcgtggaggggacacgcgctctgttcatccgtctctctgaggacccacgtgtcccctctgaaggtttatttgcttctctttccggtgtggttggagggagcctgtccctctgggaatccgtttgccttctttgagggtctaggtgtctgtggtccatgtctctgtccctgggagtggtgtgtcagtatattcgtcc

SEQ ID NO: 88110 - DNA, 1211 bp, Homo sapiens
  misc_feature (284)..(284): n is a, c, g, or t
agctagacgccccgaggtcggagtgaagcgccgggaccgagccccgtctcccagggagtccggggcgcacggcaccgaggagagcgcgggagccaacctgggcgcatcatgcgcagggcccgggacgctgggccggtctacaccgccgcctgggtcacgtggcccggacgggccggcggctgccccggccggggggcgggggtcgcgccggggttgcgctggacgacggagagcggcgggcccgcagcggcctggagcctcccaacccgcgccgcgctggcccncgagcgtaggagccgccccctgcccccccgcgccggccccgcgcccggccgcccgccccctatatagcgcgccccagcagggcccgcgccaggccgccagcctcggagtgggcgcgggacagtgcgcggcgccccgcagccaggcccccgcccccgccgcatccacctcctccgccgcctgcgacccaacgggcgccccccgccgcggcagctgccgccgggcccccgcggccaccatgaagaaggaggtgtgctccgtggccttcctcaaggccgtgttcgcagagttcttggccaccctcatcttcgtcttctttggcctgggctcggccctcaagtggccgtcggcgctgcctaccatcctgcagatcgcgctggcgtttggcctggccataggcacgctggcccaggccctgggacccgtgagcggcggccacatcaaccccgccatcaccctggccctcttggtgggcaaccagatctcgctgctccgggctttcttctacgtggcggcccagctggtgggcgccattgccggggctggcatcctctacggtgtggcaccgctcaatgcccggggcaatctggccgtcaacgcgctcaacaacaacacaacgcagggccaggccatggtggtggagctgattctgaccttccagctggcactctgcatcttcgcctccactgactcccgccgcaccagccctgtgggctccccagccctgtccattggcctgtctgtcaccctgggccaccttgtcggagtgagcagtaccgacattgggctggggtgagggtggggcaggcactcaaggcaaataatggagccctggagcggagcccacttcagatggatgagtccagcagagtttaaggcctggatttagggctcctggactctggccctactgggccccagaattgatc

SEQ ID NO: 88111 - DNA, 1110 bp, Homo sapiens
  misc_feature (284)..(284): n is a, c, g, or t
agctagacgccccgaggtcggagtgaagcgccgggaccgagccccgtctcccagggagtccggggcgcacggcaccgaggagagcgcgggagccaacctgggcgcatcatgcgcagggcccgggacgctgggccggtctacaccgccgcctgggtcacgtggcccggacgggccggcggctgccccggccggggggcgggggtcgcgccggggttgcgctggacgacggagagcggcgggcccgcagcggcctggagcctcccaacccgcgccgcgctggcccncgagcgtaggagccgccccctgcccccccgcgccggccccgcgcccggccgcccgccccctatatagcgcgccccagcagggcccgcgccaggccgccagcctcggagtgggcgcgggacagtgcgcggcgccccgcagccaggcccccgcccccgccgcatccacctcctccgccgcctgcgacccaacgggcgccccccgccgcggcagctgccgccgggcccccgcggccaccatgaagaaggaggtgtgctccgtggccttcctcaaggccgtgttcgcagagttcttggccaccctcatcttcgtcttctttggcctgggctcggccctcaagtggccgtcggcgctgcctaccatcctgcagatcgcgctggcgtttggcctggccataggcacgctggcccaggccctgggacccgtgagcggcggccacatcaaccccgccatcaccctggccctcttggtgggcaaccagatctcgctgctccgggctttcttctacgtggcggcccagctggtgggcgccattgccggggctggcatcctctacggtgtggcaccgctcaatgcccggggcaatctggccgtcaacgcgctcaacaacaacacaacgcagggccaggccatggtggtggagctgattctgaccttccagctggcactctgcatcttcgcctccactgactcccgccgcaccagccgctccttaggaagaagacagactggttcattgaatgccgccttatttatttctggtgaggatgcatgcgtggggctgctggtgtttagagtgggggctacccaataaatcactgatactca

SEQ ID NO: 88112 - DNA, 233 bp, Homo sapiens
cattgaatgccgccttatttatttctggtgaggatgcatgcgtggggctgctggtgtttagagtgggggctacccaataaatcactgatactcacgttccgcctctgtctctcctcagagtgccttgagacactctggcccattgcctctcctctttgtcatcccacatcctccaccacgatctccacagggtaccggggaccccaggacaagtgctctgtgggaagaaaggg

SEQ ID NO: 88113 - DNA, 1822 bp, Homo sapiens
  misc_feature (284)..(284): n is a, c, g, or t
agctagacgccccgaggtcggagtgaagcgccgggaccgagccccgtctcccagggagtccggggcgcacggcaccgaggagagcgcgggagccaacctgggcgcatcatgcgcagggcccgggacgctgggccggtctacaccgccgcctgggtcacgtggcccggacgggccggcggctgccccggccggggggcgggggtcgcgccggggttgcgctggacgacggagagcggcgggcccgcagcggcctggagcctcccaacccgcgccgcgctggcccncgagcgtaggagccgccccctgcccccccgcgccggccccgcgcccggccgcccgccccctatatagcgcgccccagcagggcccgcgccaggccgccagcctcggagtgggcgcgggacagtgcgcggcgccccgcagccaggcccccgcccccgccgcatccacctcctccgccgcctgcgacccaacgggcgccccccgccgcggcagctgccgccgggcccccgcggccaccatgaagaaggaggtgtgctccgtggccttcctcaaggccgtgttcgcagagttcttggccaccctcatcttcgtcttctttggcctgggctcggccctcaagtggccgtcggcgctgcctaccatcctgcagatcgcgctggcgtttggcctggccataggcacgctggcccaggccctgggacccgtgagcggcggccacatcaaccccgccatcaccctggccctcttggtgggcaaccagatctcgctgctccgggctttcttctacgtggcggcccagctggtgggcgccattgccggggctggcatcctctacggtgtggcaccgctcaatgcccggggcaatctggccgtcaacgcgctcaacaacaacacaacgcagggccaggccatggtggtggagctgattctgaccttccagctggcactctgcatcttcgcctccactgactcccgccgcaccagccctgtgggctccccagccctgtccattggcctgtctgtcaccctgggccaccttgtcggaatctacttcactggctgctccatgaacccagcccgctcttttggccctgcggtggtcatgaatcggttcagccccgctcactgggttttctgggtagggcccatcgtgggggcggtcctggctgccatcctttacttctacctgctcttccccaactccctgagcctgagtgagcgtgtggccatcatcaaaggcacgtatgagcctgacgaggactgggaggagcagcgggaagagcggaagaagaccatggagctgaccacccgctgaccagtgtcaggcaggggccagcccctcagcccctgagccaagggggaaaagaagaaaaagtacctaacacaagcttcctttttgcacaaccggtcctcttggctgaggaggaggagctggtcaccctggctgcacagttagagaggggagaaggaacccatgatgggactcctggggtaggggccaggggctggggtctgctggggacaggtctctctgggacagacctcagagattgtgaatgcagtgccaagctcacaggctgcaagggccaggccagaaaagggtgggcctgcagcctgcaccccccaccttccccaacccttcctcaagagctgaagggatcccagcccctaggtgggcagaggcagaccctccccagagctccttaggaagaagacagactggttcattgaatgccgccttatttatttctggtgaggatgcatgcgtggggctgctggtgtttagagtgggggctacccaataaatcactgatactca

SEQ ID NO: 88114 - DNA, 977 bp, Homo sapiens
gaaggtggccgggctctctaatcctctatccgctacagctcaacaacaacacaacgcagggccaggccatggtggtggagctgattctgaccttccagctggcactctgcatcttcgcctccactgactcccgccgcaccagccctgtgggctccccagccctgtccattggcctgtctgtcaccctgggccaccttgtcggaatctacttcactggctgctccatgaacccagcccgctcttttggccctgcggtggtcatgaatcggttcagccccgctcactgggttttctgggtagggcccatcgtgggggcggtcctggctgccatcctttacttctacctgctcttccccaactccctgagcctgagtgagcgtgtggccatcatcaaaggcacgtatgagcctgacgaggactgggaggagcagcgggaagagcggaagaagaccatggagctgaccacccgctgaccagtgtcaggcaggggccagcccctcagcccctgagccaagggggaaaagaagaaaaagtacctaacacaagcttcctttttgcacaaccggtcctcttggctgaggaggaggagctggtcaccctggctgcacagttagagaggggagaaggaacccatgatgggactcctggggtaggggccaggggctggggtctgctggggacaggtctctctgggacagacctcagagattgtgaatgcagtgccaagctcacaggctgcaagggccaggccagaaaagggtgggcctgcagcctgcaccccccaccttccccaacccttcctcaagagctgaagggatcccagcccctaggtgggcagaggcagaccctccccagagctccttaggaagaagacagactggttcattgaatgccgccttatttatttctggtgaggatgcatgcgtggggctgctggtgtttagagtgggggctacccaataaatcactgatactca

SEQ ID NO: 88115 - DNA, 1301 bp, Homo sapiens
  misc_feature (284)..(284): n is a, c, g, or t
agctagacgccccgaggtcggagtgaagcgccgggaccgagccccgtctcccagggagtccggggcgcacggcaccgaggagagcgcgggagccaacctgggcgcatcatgcgcagggcccgggacgctgggccggtctacaccgccgcctgggtcacgtggcccggacgggccggcggctgccccggccggggggcgggggtcgcgccggggttgcgctggacgacggagagcggcgggcccgcagcggcctggagcctcccaacccgcgccgcgctggcccncgagcgtaggagccgccccctgcccccccgcgccggccccgcgcccggccgcccgccccctatatagcgcgccccagcagggcccgcgccaggccgccagcctcggagtgggcgcgggacagtgcgcggcgccccgcagccaggcccccgcccccgccgcatccacctcctccgccgcctgcgacccaacgggcgccccccgccgcggcagctgccgccgggcccccgcggccaccatgaagaaggaggtgtgctccgtggccttcctcaaggccgtgttcgcagagttcttggccaccctcatcttcgtcttctttggcctgggctcggccctcaagtggccgtcggcgctgcctaccatcctgcagatcgcgctggcgtttggcctggccataggcacgctggcccaggccctgggacccgtgagcggcggccacatcaaccccgccatcaccctggccctcttggtgggcaaccagatctcgctgctccgggctttcttctacgtggcggcccagctggtgggcgccattgccggggctggcatcctctacggtgtggcaccgctcaatgcccggggcaatctggccgtcaacgcgctcaacaacaacacaacgcagggccaggccatggtggtggagctgattctgaccttccagctggcactctgcatcttcgcctccactgactcccgccgcaccagccggggtctgctggggacaggtctctctgggacagacctcagagattgtgaatgcagtgccaagctcacaggctgcaagggccaggccagaaaagggtgggcctgcagcctgcaccccccaccttccccaacccttcctcaagagctgaagggatcccagcccctaggtgggcagaggcagaccctccccagagctccttaggaagaagacagactggttcattgaatgccgccttatttatttctggtgaggatgcatgcgtggggctgctggtgtttagagtgggggctacccaataaatcactgatactca

SEQ ID NO: 88116 - DNA, 1084 bp, Homo sapiens
  misc_feature (284)..(284): n is a, c, g, or t
agctagacgccccgaggtcggagtgaagcgccgggaccgagccccgtctcccagggagtccggggcgcacggcaccgaggagagcgcgggagccaacctgggcgcatcatgcgcagggcccgggacgctgggccggtctacaccgccgcctgggtcacgtggcccggacgggccggcggctgccccggccggggggcgggggtcgcgccggggttgcgctggacgacggagagcggcgggcccgcagcggcctggagcctcccaacccgcgccgcgctggcccncgagcgtaggagccgccccctgcccccccgcgccggccccgcgcccggccgcccgccccctatatagcgcgccccagcagggcccgcgccaggccgccagcctcggagtgggcgcgggacagtgcgcggcgccccgcagccaggcccccgcccccgccgcatccacctcctccgccgcctgcgacccaacgggcgccccccgccgcggcagctgccgccgggcccccgcggccaccatgaagaaggaggtgtgctccgtggccttcctcaaggccgtgttcgcagagttcttggccaccctcatcttcgtcttctttggcctgggctcggccctcaagtggccgtcggcgctgcctaccatcctgcagatcgcgctggcgtttggcctggccataggcacgctggcccaggccctgggacccgtgagcggcggccacatcaaccccgccatcaccctggccctcttggtgggcaaccagatctcgctgctccgggctttcttctacgtggcggcccagctggtgggcgccattgccggggctggcatcctctacggtgtggcaccgctcaatgcccggggcaatctggccgtcaacgcgctcaacaacaacacaacgcagggccaggccatggtggtggagctgattctgaccttccagctggcactctgcatcttcgcgctccttaggaagaagacagactggttcattgaatgccgccttatttatttctggtgaggatgcatgcgtggggctgctggtgtttagagtgggggctacccaataaatcactgatactca

SEQ ID NO: 88117 - DNA, 308 bp, Homo sapiens
ctggactgtaaagggtgttaattgagaagccagggtgcacagttgagtagggaatgatcaatggttccagaggcaaggtgacacagctgcctttttctggggaaaaaaatgttctgtgtagcctgagagccttaaagtgggtgtatgtctctcagctgcctctctccctctcacagagaggtccctctggaggcttctcccagtgagcaggggaagtgcgcatttgaaatggcacacttatcttgcagttgcaggggaagcttttgttttatttttctcttgctgcattaaagtatttgtctttcttt

SEQ ID NO: 88118 - DNA, 309 bp, Homo sapiens
ctgagctacatgtgcacactctggctccctccattggaaggtctttgatgttttttcttctcttgaccctggggtacctagcaccctgtgtactctctagagagggatctgggggttgtggaagcaggacacctgcagagtaaagactagggaagggtgacatctgcagccctgtgtagggcaactgtgcagagcccctctgcttcccaggcctcctccccgctcacccaggtgctcatggctcttctggattatttgagacaaggctagtttggccacatctgcttttccctggttgggcttcacgta

SEQ ID NO: 88119 - DNA, 1861 bp, Homo sapiens
  misc_feature (2)..(8): n is a, c, g, or t
  misc_feature (23)..(23): n is a, c, g, or t
  misc_feature (1097)..(1097): n is a, c, g, or t
cnnnnnnntcagcctcctgagtngctgggactacaggcacctgccactgcgcctggctcatttttgtgtttttagtagagatgtagtttcaccatgtcacccaggctgaggtagacatttatatacatggacataactgaagcatgggccagccctttttaaaactgttaccaaagtgctgagttgtttgaagagcctgagaggacatgaaacatgaggatggtgagcttcagggagactctcaggaagagtaccaccccaccttgagacggcaggtctcagtgacgtgaggtgggtaggatggttgaaaagtctgaaaacaccaggtcacccctgatgatggaagatgatcacacacaagatttacctgctctctttctgccatggttttgggtgttcatggtacacatgaagaagcatcctgagacagccaaagtccagtgttttcttgcccaccttggattctgtggtgctggatatgatgattctgttcttgtcccccttggctagctcagcctccattcatcctttctcctttccatctctggtaggctttccagatttggcaaataagaatacaggacacccagttaaactgcatgaataatgtcgtgacatacctatactgaaaagttacttgttgtttctttgaaattcaagtttaactaggtgtcctttatattctcttgcagtcccactggggttaatcagcacaagctctaaaagttatcttttctattctgtcattaacagtgtattcccagtttttgaagggaccaagtatggctttgtaaaattataattttaaactctgactcgggaccaaatgaatgttttggatgagattcagatccatgcactagcaggacacaccctctcacttcctttggtcctgatcttagctcttttcttcacccatttttgggccacacactccatttctaattttagctctcccatgtacttcttgccacttcatgcctgttttccctgaggacccactgactgagaaggactgttatagaaactctgttttcctctaggaacgtgctctcagacagtgtccctgagcctggaagtgctccccacatgtctcnggaagtggggcggggaggagagccaaaggtttcctccaccttcgctttggtggttggtcaccaggaagtaggtgcacactctaaagtgaaacaaacaaaaagtgatgtctgccaacagccaccaccaagacaagcgtctgggttctcgtttctcctctggtggctcctcaggccaaatgataccttcttgtcacccacggggtctgagtcagaggtgaaactcaacccccacaccgtactcctggtatctgccaggggatttggaattccagaatgtttatttctggttcattgacctaagattcaagcacacatagcctgaaattacagtactgtatatccagagcccagaactgcaagcccattattaacagtaatacattttgtggcctgaggatttttcccaaattgctctcagttgcatgttttacccgatatcattttgtctgttctgattttataagtgccacatattacagaaattttgaaaaagcatgtaatggagaacaaaatcccatactctcccttatccccatacccagacaggaggtatgcgaggaaagagatggaagtttcgcccaggactagacttgtgctgggaatcgccctctcttgcctatgtatacagagatttggagggggatgtggagagactggtggagttatggagggaaagataaggcagtatgtttaaaggagatttggagaaaagttttctgaaggaggggcaaatgaccctttgctatatctcctcatcaaaaaaa

SEQ ID NO: 88120 - DNA, 307 bp, Homo sapiens
agactccatatcaaaaaaaaaaaaaaaaaaaaagaatgagttcaaattctatagccagatacggaaaggaaaaaagcttgagagtaggttaagaaggggtattttacttgtcatcttatatccttctctactgtgtgtgtattaaaaaatacagcattaagcctgggcaccgtggctcatgcctataatccaagcattttgggaggccagggtgggtggattacctgagatcaggagtttgaggccagcctggccaacatgatgaaatcccatctctactaaaaataaaaaaattagccgggcatgg

SEQ ID NO: 88121 - DNA, 187 bp, Homo sapiens
acttcagaatatttcctcacaccaactttagtgtgtgtatacctagactggcatcaatgtaatccaattcagtccattttttatgtgctgcttaatgaaaatgaatctgtctctatctctttcaaatgttctaatatcagatatatttgctacaaaccttaatttcaataaagtaaaagtgatatac

SEQ ID NO: 88122 - DNA, 678 bp, Homo sapiens
gcgtcgacgaatctcatgcgtatgactctggagagcgtatattaactacttttttttgctctttatgtaaagtctgaggtcaaggcaaggtcacagatatacagtaattgaacttatagttttgctttctccagctagtactgaaaatttataaacatcttattaaggcacttaagttactttaagttccttaataagatagttttgtacaattatttttgtagcctctccaaaagtgacaagtcactgacatgtaaaaaagtagttaatatacgctctccagagtcatacgcatgagattctcttaagatccgtttgttctgcataatattaaaaattacgtatcaaatccagaaaatgaagaggacatattagattctgaaatagtaaattccttttagttcccaactcagatcaaatctgagcaggacataaaaaatacaatgaaaagtttaataaggctctattaatgattaaaggatccatagtccagtatgaattctagtttgtaaatctgcccacttcaggaaggaaaatagttcctaaaaaccaaaccattaaacagacagggacaggttttcaaaacaaaaatgcatacttcataacattttaagattctcaatatcctgtatccttgtgttctttcattatctgagaagtaattgaaacaaataatga

SEQ ID NO: 88123 - DNA, 321 bp, Homo sapiens
tgctgggattacaggcatgagccacctgcccagacacgtattttacttttaatctctagttttatattacatgctgattgcacatccccactcaggaacatcagaagaaatacaaaaagaggaaatatttcaaaactttgaaatcccacaaaaataatcacattcactaataaatatttctccttatttattttttagggtaccaggtaaggagactctccagtttagttaggactatgcctaatctgagttcccataaatcctcaaatgaactatatatgttattcttctggagactgaggaagctggttaatcactgtt

SEQ ID NO: 88124 - DNA, 836 bp, Homo sapiens
gtctgtaagagagagtgcccccgatcaaaactggtcagaaacccctcaggtttattctccaaaagaaactgactttgaatgttaagctgcttttcatgtttctttgctctttaactcttacactagtgggtcatttcccaagtgtgatgctatctacactagtttaccatggttgctgagaagataaaatatatgcctggacctgttgttagtctactaggttgctgtaaggagagtcttccaagaatgaggcaagataaaaaagcagagggtgccacagagtttgaagtcattatttgagctcctagatgcaactgcacctgaaactagacccctgtctctaggtttttgagccaatatattcctttgttttgcttaagccactttgaattcaatttctgtcacttgcaacccacacagttctgactgatatacaaaataaacatattacatgttatcttctgtgactcagaaattattatccatttttacagatgaggagttggagttttaaaggtgcaggtaacttgcagtgaaaagctaaggtctggcacaaggttgatcttgaatctgaagaagaaatggttcaaagtctcctttagagatgctaccttcctgctgctcacttccagaatttagtcagggaattattgggctgacttgagttgttgtgtatacagtctgtgaacttgcagtttatggtattttataattttgttttccctgccgttctgctaatgcagctttgtgagcaaacattgcctgtgatttaaatccaccaccgtaatgaaacgcacacacacacatgcacacacacttccttggaacagtccaca

SEQ ID NO: 88125 - DNA, 88 bp, Homo sapiens
gatctgcctagccaactttcttaacccaagcccaaactgaaagtctaaaagatgtatttctggggaattaccccacctcaacattctc

SEQ ID NO: 88126 - DNA, 737 bp, Homo sapiens
ttttatttttattttgcccaagatcacaccctacagcatgtcagaaaggagatttgaacccatgtctgttctaggttttttccataacactaagtagcctgacttgtggcttatggtaatattttctaaatccagcttctttctgaaaagacttcattttcacaaaggtttaaacacttgcaagtaaacaaaaggggtgggttctgtggtcttcacgacagccatgttcccactacaggcctggctgctccctcagctgggagctgctgcccactcttatggaaactgcatccaggacaggctttattgatgctgccttcaaagccaaggcggcccatctgagaggatggaagaaacccagtaaagtatgggactctggtgagccatcccaggtacagttgtgtttttatgcaccagcacatttgtggagcaaatttggtgtcctcataacggcagttcatgagtacaagtgaggttcagttctttgtgtaaacaggggagaaagcctgtgtctgaatataattccgacggcatcaaggtcattttagagctggtggagctctatttgtcttaggaaatctcgaaaacttttatagggaattcggaaaatattttcggccagcaggaaagataaaatccctgcacacaaagtgcaggcatgggcccagagactgaacagacagactgctgtaaaacccctgtttaataaggcattaaaatgccatcgacctggacac

SEQ ID NO: 88127 - DNA, 171 bp, Homo sapiens
cccaaatagcagtgaatttctttttctcacatttccaagtgccagtcagcttcataactaacttctttgcccttaaagtacagtcaaatacagtataggaatgttgtaagggattctgctgatgaggaaagatatatcagaatagcaagtgtttattctgaattcatctcg

SEQ ID NO: 88128 - DNA, 400 bp, Homo sapiens
cctccccgcccccccaaaaaatcaggaaggctatagaagatttaaacagcatatcaaatcaacttgaccccagttggcctttcctaaacactaccccaacaattgtataacacagagtcttttcccaggtgcatgtgaaatgtttatcaagatagaacatatatagggaagtcttaataaatttaaaataattggaatcatacagggtgtatattctacacccatgaattaaattagtaattgataacatacagaaaatctccaattatttggcaattaagcaatgcacttacatggacttaatctatgatactagaaaccagaagcagtgtttgcctcagagtaagtaagatgtggcgattgtttggaaagggagatatggaaactttctggattaatg

SEQ ID NO: 88129 - DNA, 655 bp, Homo sapiens
gtgaataagttatttggttctaactagaaggaacccataaaattatgagaataatgtccatatacaaggtaaccctgaatataatgcattctgtcatctttgcagtgaaaaaatatttttaaaaagtgatgtgaggccaggcatggtggctcactcctgtaattccagcactttggaagaccaaggtgggcagatcacttgagctcaggagttcgagaccagcctggccaacacagtgaaacccagtctatactaaaaaaaaaaaaaaaaaaaaaaaaaaaaaaaaaaaaaaaaaaaaaaaaaaaagaagagagggggcggcgcgcgcctagaaaagatatagatccccgcgaggaggggggcccacgagatatagcgctccatcacccaagcatgtttttgttgcggcaaaaagcgagagggcgcccatcaaagagagggacggcgagcaaatgattatacgacggacgatagagacgcacacggcgggcggcgcgcgagattaaaaaaacagcgtcgaggcagagcggggggagaaacacagcggcacgacagcgtgggagaaatctagcgggggagagagagcgacccattttaagcacatgaggggggggggggagaaccacaggagggggacacaacaaatccccccaaa

SEQ ID NO: 88130 - DNA, 942 bp, Homo sapiens
  misc_feature (165)..(165): n is a, c, g, or t
  misc_feature (741)..(741): n is a, c, g, or t
  misc_feature (922)..(922): n is a, c, g, or t
  misc_feature (931)..(931): n is a, c, g, or t
  misc_feature (934)..(935): n is a, c, g, or t
  misc_feature (937)..(937): n is a, c, g, or t
ctggacatctgagacacaggaagtgataggtggcgggacggagggattaaagaagtattataaggaacttcagaaccaactgaatgagattgtagagctggtaagaggaaagttgtctaagcagaccaggaccactctgggggctttggttactattgatgtccntgctagagatgtggtcatggacatgattaaaatgggtgtctcacatgatacagatttcctgtggcttgctcagctccgatattattgggaaaatgagaatgcccgagttcgtatcattaattgcaatgtaaaatatgcttatgaatatcttggtaactcacctcgacttgtcattacgcctctaactgacaggtgttacagaacattgataggtgctttctatttaaaccttggaggtgctccagaggggccagcaggcacaggaaaaaccgaaaccaccaaggacttggctaaagctcttgctgtacagtgtgtggtgttcaactgttctgatgggctagattatctagcaatgggaaagttttttaaaggactggcttcttctggtgcttgggcttgctttgatgaattcaatcgaattgagttggaagtgttgtcagtggtagctcaacagatcctttgcattcagagagctattcaacagaagttggttgtgtttgtttttgaagggacagaacttaagctcaatccgaattgttttgtagctattaccatgaatcctggctatgcaggacnctctgaattgccggacaatcttaaggttctttttagaacagtggctatgatggttccaaactatgcgcttatagcagaaatctccctctactcttacggatttttgaatgcaagacctctgtctgtgaaaatagtaatgacctataggctttgctcagagcagctctcatcgcaatttcantacgactanggnntncgagc

SEQ ID NO: 88131 - DNA, 1420 bp, Homo sapiens
tgtttttaaaaatgagaaaatttggagagagaatactattatgtcaacggtacaagactctgaatcttgaagatgtagatggatataatatttagactttatatacacccatagatatgtatttatatatgcatacgttttgtataaatttacaattgactttttgtattctcttttctgtcattacaagaatgagatggaaaccaaaatagttgttccatcctcttacccaaagaggatactgaaaagtccggtatgtgcatgcacttgtttctctggggtcaaatctgaatgactttctctttaataatgaaaggggagagtcctggttagcttggaaaattggtaattagataagcttcctttcctaggttagtgactcaaatgtagcaatgataataaagttatgaccatatcaatgtggtctaaatatctagatggaaagcaaaaatatccagaagaggtttagggccatctagaccacaaacctggaacctggattgtggtttgatttttttcattttcaacctatatgttgtgtagaaatacaatttatatctgcatagctaaaggtaaagtgaaaatatgaccattatctgtttagtttgagaaatcatttttggataatatggataaattagctttaagaaacttctttgacatctgacttttccaccatttctatctgtatcaattgtattaattagataatggttaaatttttatttttttatcatgtagacatatgctttcatgcttttctgtgggtgaaagttgaacaattgctagctgatattatgtggaagttacaggttaaagtagaaccagaaattttaatataatctgatcaggttccttagtcccattcccatgtgaatctgaactttgaatttgaatctgaaaggcctacttatttgggccattttttgttggaacttgtgattgtaactcacagatgtttcagttcatattagaataaattgcccaatctataagagagtgtttaatcattggaatgaatgtaaatctgattctgatttggttatttatttgataacatttgagaaacagctaatgtggcttgacatcaatacttattaatgtcttcaacctaataatacaattggtgtcatgtatgaatgcttagctgacaataagaatttaatcaactttatttggagacaatgacttatcaaggaggtcctacccatttgtggtagggatatttcccttacagttgtgattacaagggattgtttctatagagagatgaacagcaacaacagtgacaatgatgacaacagaaaaactgacttttgaacttgagtatatccaatagatagaagaaaaaagatattagaattcatggaaattttgttttgcttttctatcaataaaagagttttcttgttaattggct

SEQ ID NO: 88132 - DNA, 593 bp, Homo sapiens
gcacgagattatattaaaatttctggtcagattcacatgggaatgggactaaggaactttgaatttgaatctgaaaggcctacttatttgggccattttttgttggaacttgtgattgtaactcacagatgtttcagttcatattagaataaattgcccaatctataagagagtgtttaatcattggaatgaatgtaaatctgattctgatttggttatttatttgataacatttgagaaacagctaatgtggcttgacatcaatacttattaatgtcttcaacctaataatacaattggtgtcatgtatgaatgcttagctgacaataagaatttaatcaactttatttggagacaatgacttatcaaggaggtcctacccatttgtggtagggatatttcccttacagttgtgattacaagggattgtttctatagagagatgaacagcaacaacagtgacaatgatgacaacagaaaaactgacttttgaacttgagtatatccaatagatagaagaaaaaagatattagaattcatggaaattttgttttgcttttctatcaataaaagagttttcttgttaattggct

SEQ ID NO: 88133 - DNA, 916 bp, Homo sapiens
ttcggtaaacgttacttatgtgcgtctcataaatcaggtgtctgagttctcaggctgtggctgcagtctaccattgaattacatcccgtgagcaatgttgtccgatttcaccggccagcacgttcttctcgagtgtgggattggtttttgcaagacctcgaaaggattttgataagccacctgcttaaggccggctgaaaaagaagaaaggagggcatatgtgggtcagctcactcggaatagaagaggaatcagcttttcttgtgcacgtgcaacagtggaagtgatggctgactgtgtgttggctccataagaagaacatcacagaaagcaaaatggtgccagctcaacaccagtatcctcggactcttcagacagaaaaacctgttaattccaatcacaattcattctttcattcagctcatggaagccaagcagggctttgggacattcattctggcaaagtgaaacaactgactttttgtgaatgctatttaagttgtttaaattttccacattggaaataaagtcattgcatttttgtgaggataaaacacaaattgtggtggagtccagcgtcatggtaacaataatattcctactaaattaagacactaatgaaacagaaatgtgattggaacaggtcatggtgcacacacaatttgttattgcatataaataaatgtcaatattctataaattgacatttatagacgtacgtgacaaaatttacaaaatgttaaaacatatgcacagatttactgaactacaaacttgtgataaagttgttcatgaatttttttaaaaaactggactttcacatgtgttttctcttttattttcccattatcaatcaattttagtggacattgagtctcagcatcctaaaatgttattaaacagtgtattaaaacag

SEQ ID NO: 88134 - DNA, 532 bp, Homo sapiens
caaaacacttaagattatgaagatataaaaaatatgtgtttaactaaatcagtagttttcaactgggggtgatttcaccactcatggaacatttgataatatctggagacatttttggtggtcacaactgggacattgctactggtgtctttgtggatggaggccagggatgaggctaaataacctatagctccccacagtaaagaactgtatggtccaaaatgtcaagagcactgaggctgtgaaacactgaactaaattacagctttataaaaaagcatttgtttctctgatgctacagatcataagatgatgctgtattgatagttattccatttacagtttctatgtaaaaaattgtcatattcttaaaattcatccatgttattgtatatatcaattgtttcttttattgttaacatttcattgcatgaatataccacagttttatccattcaccagtttaaggacaattggattatttcaaagtttgggtgattattaataaagcttctataaacattgttacata

SEQ ID NO: 88135 - DNA, 114 bp, Homo sapiens
acccttgcaactattttctaagttgaggaagtatgacgtatcaagcttcccacgccttagttctagttcagtaacttgtactcggtgtcttaagatccccatttgtgaatactc

SEQ ID NO: 88136 - DNA, 211 bp, Homo sapiens
caactcctatacctacagggacagcaaaaataattttaaaaccttttctgcaatctggcataaagaacaaataagcaaatttaagaaggagtcttcaactagcttcagtaaaagaaaccgtttcttctttaacttctgtaaataatcttattccttcaaagtagtttataataatttataaattattagtttaaactgtcactagatctaa

SEQ ID NO: 88137 - DNA, 338 bp, Homo sapiens
ggggcttcaacctgaaggttggaattgagtttgggataacaaagtgccccgggagggtgcatggactcattaaattgactcccatgtgggccttgcaaaactgcagtcagtgactggcagtggcagcctgggccattcctccattgtttctctgccattgtttctctgcagactgctaaggtgaagctgtggaaccacatcctcctctaacaagggagagaaagggagtcccaagatttggggatgtggcccagtaaggtgcctcccaaaaggaagaaagaaaaaaaaacctctcgcataggaaagctctctgtatttgcaggtctgtgttaactcct

SEQ ID NO: 88138 - DNA, 207 bp, Homo sapiens
ataggccatgccctcagggaggttggagtggcacatggctgtatctagcaggctcctgttgactggtgggtccaagcagtgagtgcctgtgatatgtttggtgctcaggacctgcttacttgctggaccacacttgacaatgtagctccttcccttcgccttcccaggggtgcgggaaacacacaggcatgaagagcgtggcctggg

SEQ ID NO: 88139 - DNA, 655 bp, Homo sapiens
ttttaagcacacgcaatctagatctcaaaactgataaaaggagggagcggccattcactttacaaaaggattctctgaaggatactattaagtcttctcaggaacattagaacaccttcgctttactatttttagttggtggcttttccgtctccttcagcatctactcaaaaccacagtgtagttgcacaagggtagtggtttttatgttttgcttactgctgtattccttgaactccagcatgaggcctaggtacagtgtagtattaccatagcacaggtccttgatggtcacagcagtcttccaaaaaaccatcatgtgcttgagagcttctgtgctactgaaaggggacacctgtcacccctgccagcctattgttgctgtgagtgggtgtggacccactgttgccagatcttcaggttgttttagaaaactcagaaatctaagttactagatttttctgtttttcagttactagattttaaaaacactgttcaaacaaaactgttagtttgtaacctttgcctttactttctcataatataatttttttagtgccttattaggcactttaatgagagacggcagccgtttaatttactgttaatttgtgatgtcttcagaagagtgaatggttttgctttcaggatactg

SEQ ID NO: 88140 - DNA, 458 bp, Homo sapiens
gacttagtcatatctaccaagggaaatctctttggagtttcaattattcacagacccatatggagttttaataaatatattctgctgaatgctttggaaataagctgcagacatcttaagacttcacttagaaatatttcaacatgcaactcctgagagtaaagcctttttcctccataaccacaatacccaagaaaattactaattctctaacatctaatatccaattcttaccaagtgacctcaactgccccccaaaatgtcttttataacagagactcaactattttgactcatgatctcactcttttgactcagaaaaaactcaggactccctggaaagtctgaacctctactacccctgaagaatattaaattcttcatatcacaaatactctattagctttattttctaaaacttttaataccatatttcaaatataaaactatattaaaca

SEQ ID NO: 88141 - DNA, 380 bp, Homo sapiens
cactgctctgtccaggtggtagccactggccccatgtggctattagcacttgaaatgtgactagtccaaattgagacattctgtaaatgtgaaatatacactggatttcaaacttgtaggaagaaacgcaaaatatttctaatacttatatcaatgatgtgttgaaataatattttagatatattgggctaaataagttatagtattacagtttattttgcttgtttttcctttttaaaaagtgtggctataagaaaaaaacattagcttcatatgcatgacttgctttgttttttattgggcagcataatgcaaagaggtttggactgttattatctgccttttagagtgaaagaaaagtaggcacagagaggttaagc

SEQ ID NO: 88142 - DNA, 430 bp, Homo sapiens
cactttggggtttcttcagcaaaatgcaaatccctccattatcttgtggtttaaaccaaagctgccttttggaaactcccgctgattctccagcctcatggagggtggcaggttcctcttttaagtgttccaggctaggagttgcgtggttaacgctggggtaatacacactctgtattttacatttgaggtaactgaggcaacctggaggaggtcacagagctaaccattagtgggagagcatcaggcacatgaggacctgcagctttgcaggaggaagatcctgatgcccccaagcatcctcacaggcgctctcggctggaggttcatctttcaaatcagccctgcctcctccagtcagctctgtctggtttagctcagctaacaggatgcgtcagcttacctgaataaaacactttacacccccacg

SEQ ID NO: 88143 - DNA, 607 bp, Homo sapiens
taataaactggaacttagagcagaattaccaggatagtgggagaaatctgaaaccatatcatatggaaaatggtgaaggctctagtaatatttattccatgctgttgacaccaatttaaaagttatctttaaatacttgaagagttatgtaaagattagatttttgactcaatatacaacaaattgtaaattctattacaaaaatagaatatactgtcttataagtcctcttctattaatattattattaaaacagaactaaatggaagggtggtaattaataaagattcaagctaaggtagggggcccggcatgttggctcatgcctgtaatcccagcctgaccaacatgaggttgaagcgggcagatcacttgaggtcaggagtttgagaccagcctgaccaacatggtgaaatcccatctctactaaaaatacaaaattagctgggcatggtggtgcacgcccataatcccagctactcaggaggctgaggcaggagaattgcttgaacacaggaggcagaagttgcagtgagccgggatcacgccactgcactccagcctgggcgacaaaaaaaccccggctccagccatctcaaaaaaaaaa

SEQ ID NO: 88144 - DNA, 138 bp, Homo sapiens
tctgttttacccttcctaattgcaagctacccaaggtctcatcaggatctgaaaatctgactgaaagacactttcctgaaaagtttccaactctccccactttccacacatagggacgccatatatgtttcagggccc

SEQ ID NO: 88145 - DNA, 1541 bp, Homo sapiens
accactggtcttcttgtgcttatccgggcaagaacttatcgaaatacaatagaagtttttacttagaagagattttcagggagaagtgaaatgacaacctcactagatacagttgagacctttggtaccacatcctactatgatgacgtgggcctgctctgtgaaaaagctgataccagagcactgatggcccagtttgtgcccccgctgtactccctggtgttcactgtgggcctcttgggcaatgtggtggtggtgatgatcctcataaaatacaggaggctccgaattatgaccaacatctacctgctcaacctggccatttcggacctgctcttcctcgtcacccttccattctggatccactatgtcagggggcataactgggtttttggccatggcatgtgtaagctcctctcagggttttatcacacaggcttgtacagcgagatctttttcataatcctgctgacaatcgacaggtacctggccattgtccatgctgtgtttgcccttcgagcccggactgtcacttttggtgtcatcaccagcatcgtcacctggggcctggcagtgctagcagctcttcctgaatttatcttctatgagactgaagagttgtttgaagagactctttgcagtgctctttacccagaggatacagtatatagctggaggcatttccacactctgagaatgaccatcttctgtctcgttctccctctgctcgttatggccatctgctacacaggaatcatcaaaacgctgctgaggtgccccagtaaaaaaaagtacaaggccatccggctcatttttgtcatcatggcggtgtttttcattttctggacaccctacaatgtggctatccttctctcttcctatcaatccatcttatttggaaatgactgtgagcggagcaagcatctggacctggtcatgctggtgacagaggtgatcgcctactcccactgctgcatgaacccggtgatctacgcctttgttggagagaggttccggaagtacctgcgccacttcttccacaggcacttgctcatgcacctgggcagatacatcccattccttcctagtgagaagctggaaagaaccagctctgtctctccatccacagcagagccggaactctctattgtgttttaggtcagatgcagaaaattgcctaaagaggaaggaccaaggagatgaagcaaacacattaagccttccacactcacctctaaaacagtccttcaaacttccagtgcaacactgaagctcttgaagacactgaaatatacacacagcagtagcagtagatgcatgtaccctaaggtcattaccacaggccaggggctgggcagcgtactcatcatcaaccctaaaaagcagagctttgcttctctctctaaaatgagttacctacattttaatgcacctgaatgttagatagttactatatgccgctacaaaaaggtaaaactttttatattttatacattaacttcagccagctattgatataaataaaacattttcacacaata

SEQ ID NO: 88146 - DNA, 1994 bp, Homo sapiens
tgctgggcgaatccctttctgatctggttcatttggaccctccaaagcccacaggctggaacggctgagtcatccaaacaaaaaaggtggcagcccatccctcccccaggagctctaccctgtctcaagtaggtgctaccctgttgctggtggctggctggaattccaagccagttgatcttatcctgtgaggtcccttggaagtggggcccacagactgacgctgctctgcttcctggattcagccctcttcctaaggagctcatggaccctggccgtcatcaggttcaacctcatattcaactgctgggccttgtcttctggccacacactctctccaaatcagcgatggtggggaactgaggagccagaggccattgtggaagaactccaagaaaacaatctccaggttatcacatctaaagcctgagcaagatttgaggctgggaagaggtggatcccagaattggaagaaggagtggtgacgcctaagctatcactggacatatcaaggacttcactaaattagcagggagaagtgaaatgacaacctcactagatacagttgagacctttggtaccacatcctactatgatgacgtgggcctgctctgtgaaaaagctgataccagagcactgatggcccagtttgtgcccccgctgtactccctggtgttcactgtgggcctcttgggcaatgtggtggtggtgatgatcctcataaaatacaggaggctccgaattatgaccaacatctacctgctcaacctggccatttcggacctgctcttcctcgtcacccttccattctggatccactatgtcagggggcataactgggtttttggccatggcatgtgtaagctcctctcagggttttatcacacaggcttgtacagcgagatctttttcataatcctgctgacaatcgacaggtacctggccattgtccatgctgtgtttgcccttcgagcccggactgtcacttttggtgtcatcaccagcatcgtcacctggggcctggcagtgctagcagctcttcctgaatttatcttctatgagactgaagagttgtttgaagagactctttgcagtgctctttacccagaggatacagtatatagctggaggcatttccacactctgagaatgaccatcttctgtctcgttctccctctgctcgttatggccatctgctacacaggaatcatcaaaacgctgctgaggtgccccagtaaaaaaaagtacaaggccatccggctcatttttgtcatcatggcggtgtttttcattttctggacaccctacaatgtggctatccttctctcttcctatcaatccatcttatttggaaatgactgtgagcggagcaagcatctggacctggtcatgctggtgacagaggtgatcgcctactcccactgctgcatgaacccggtgatctacgcctttgttggagagaggttccggaagtacctgcgccacttcttccacaggcacttgctcatgcacctgggcagatacatcccattccttcctagtgagaagctggaaagaaccagctctgtctctccatccacagcagagccggaactctctattgtgttttaggtcagatgcagaaaattgcctaaagaggaaggaccaaggagatgaagcaaacacattaagccttccacactcacctctaaaacagtccttcaaacttccagtgcaacactgaagctcttgaagacactgaaatatacacacagcagtagcagtagatgcatgtaccctaaggtcattaccacaggccaggggctgggcagcgtactcatcatcaaccctaaaaagcagagctttgcttctctctctaaaatgagttacctacattttaatgcacctgaatgttagatagttactatatgccgctacaaaaaggtaaaactttttatattttatacattaacttcagccagctattgatataaataaaacattttcacacaata

SEQ ID NO: 88147 - DNA, 383 bp, Homo sapiens
ctcgtgcaagaaacttctaccctacctttgaacattatggtaaattatgaattaattctttcccagctaaaagagattttaaaaaagcagaacctcaataggcatgataaagaatctccaccatgtaacactacattagtccaactaagttatcatgtcattgtccacttaacagagaatggagcttaattagagaaaaaaaatcataaaaatgttcacagtttcccccgaaatggaaagatgtacagggagatgtgggggtggagaaaaagaagagagaaggcagtcagtaacaaacacttggttataatgatgataagaaccatttcctttatgcaattttgttggtgttcatttttatatccctctcagctatatgatct

SEQ ID NO: 88148 - DNA, 311 bp, Homo sapiens
cctggtccttgaccaccacgtgtgtggtttattaactctgttcccgtagacataggcagccttaactccatcgggggaatggtctggccttacaggtcgaattcaagtgaatcaatcgaactatcctccaagatagagcagaatgaaagacccaggatcagtgcagaatgaaagaccattaggcctctagaaaagctgttagccctcaagtttggctaaaagcaggggctggcaaagtatggcctatgggcagagctgcccctcaatctgtttttatggcttcaagctaagaatgacttaaatttttaaac

SEQ ID NO: 88149 - DNA, 378 bp, Homo sapiens
ctatagcagttaatcttattaaataaaacatagcaatttaaatgcactaaagtcttaagacttttccagttaaagtttgttgagcatgtagaaattacttagtatcttagagttctaggtgcaaaatatactttttaatatcattattttgggaggttagtctttctactccctactctcctctctaccagcctcatccagagaaataactctctcaaggtactgataagagatgccacagtcaggctagtcaatggagtgaaagatgtcactgccagatcccctgtatagtggcacagactcctggaattgaaacggagctagcttaaggagtcatttaatccagacctctttcttcctgcaaggggtctgcctgaa

SEQ ID NO: 88150 - DNA, 289 bp, Homo sapiens
gctttatggttgcaagttttgtgaataatctttaatccttttgagttaaagtgttttttttggtaccacaagagtcctgtattatttagtaccacaagagtcctgtattattcttttgcatatggatatctagttttggaaaccttccccattgtgttgttttggtggtgttttgaaaaatgtgttcactctgtgtaaatttgtgtttattattgagcgctctcattttgctcactggtctgtgtttctctgtgtatgccagtaacatatggattggttaactagggat

SEQ ID NO: 88151 - DNA, 300 bp, Homo sapiens
tggcatttggagcagtaagtgtgcctgggtcatgtgtctgtcagcagctatcctgggttggctcacagggcagtggcagggtaattgaagctcacacatcattacttgtgcagtatagtacaaagaagtcagtctcaaggcgaatccagatttaaggagtaagaagatatactctatttcttgatgcaacaagctacaaattacaaagcatgtagatacagaattatggccatttttgcaatctactccccataatagagtctgggataaaatgggtcctctgttattttatgatttaat

SEQ ID NO: 88152 - DNA, 817 bp, Homo sapiens
tttttacatgtgggttggtagggaaggataatttgtattggatgatagggcagcatgcttcctttttacgtgtgagttggtaggggaggatgattagtattggacaagagggcagcaggctcctgtatgtgctgtcagctccattggaccgctgtgaaggccttctgaccccagagcagtttgagatgctgcagtggcctggatgggtctatgtgtccaggtgacaggtgagagcttttgatatttatgttatgtagaatactcatatgcttggatatgttttaaataaagcatagtatgaattttagttcttttttgcttttctttggaaagagggaaaattatacttagtgacacaaatattttttgtctgatcaagtacctaactgattaatgagctaaagcaaagtttgatcccaacttctggagagaggtagatctggcaactgaagaagaatataactgaattttgctaaaaaaaaaagtgctgattcgaaaagttgttttatgaagtaaaaattctaagctcttatctcttaggctttattttgctaacattgttagaactagcacatctggcttagattccaaaatagtttggttttatgcttgtaaaaatgaaaccaatcaaattggaattgaagatagatgaaaggatggattttggtacaatgaggattcttaaacacagtaaagttatcagggaagatcctgaacattgcctttctgagtgtcccttaaaaatagactggtgtcaaacatcagcatcacacaatatacccaggtaacaaacttgaacacgtacccgttgaatcta

SEQ ID NO: 88153 - DNA, 229 bp, Homo sapiens
gactgactcaagatactcatgaacgtggaaaactcctaaatgtgtcattctgagttcctgagaagttgaacatacacagatgacaaaaaagaatgccatttagccataactaccctttctagattaccaagtatttgtaggtttattggcaagatagcttaaattacgtatgtatttctggcctgcaacatcatgtaatagaagagttgcagaattctttgcagttaag

SEQ ID NO: 88154 - DNA, 514 bp, Homo sapiens
ctttggagcactgtggtcacttgctggattccctttaaactgccattttggaattcatgccaagacaccactgaatgtaatttgggacagcctatgaagcagagaattcagaaaaagcccatgtacctttgaaaatacatttgggaggaccaccacattaaccaaatgaaatagaaccaacagttcccaggctgtttgggttaatttctactttagctgttcacagtgtggggattggggggcagtgatttagaggctccacggagaccctaggaggtgctgcttcttggggtccagtcagtttgcccttcaacaccaagcagccccctgggaggaagccctgtgctctctgctgatggcacaagaagtcagttctctctggaggtgctttacttaaaccagtgctgtttatggtgccaggtttctgatgcaatgcctgcctccagccagcctgtcgaacaaatcgaagtgtgatgggtggctggcttggggccagagtggcgtcactgcccat

SEQ ID NO: 88155 - DNA, 465 bp, Homo sapiens
agagacggggttttgtgacagtggccaggctggtcttgaactcctgacctcaggtgatccacttgcctcggcctcccaaagtgttgggattacaggagtgagccaccacgcccagactcaatgcacccatttcacagatgcgccacagcagtccagagagggctgctggaacatgaagcatcaggcagcaccagggtcctgagctgggtcaattttccaacctggaggttggaagtcgaggtgagcatgaaatcaggtggtcatccagtattcaggaccctctggcctcccaggcccccagcctccttcttcctgtcagccagattcccgtgcaccgcagtcacgcttgctagtttccatggacacgcgtggactcctaggaaaccttttccggagactgggcacgagaggagtgatttgcatctcatttgaatgctaggccctgccccgaaagtgtgccatctc

SEQ ID NO: 88156 - DNA, 538 bp, Homo sapiens
ttccagctgggcactcctgcagcatggctaagatgacaactcaagttccctgggagtgggggttcctgggatgtgaacctttcggtgcaaaaactggagaagttccagttgggaccccaggcatagatactaggataaatagggcctctctcctccaggagcatcaatttaacccaaagattcttggagtcagtttcacataagtaatcttgttgaaaatagtaatcccaacagatctatttttccaaatgcaccatttgcataaatctcagaaaaaagacaacttcaagaacatacctttgctgggcaccatggctcatgcctgtaatcccaactacttggcaggctgaggcacgaggatcacttgaggccaggagtctgagatcagcttgggcaactgatttatggtttggatttgtgtccatgcccttcctcttctgccatgattataagtttcctgaggcctccctagccatgcttcctgtacagcctacagaactatgagtcaattaaacctcttttctttataaattaccca

SEQ ID NO: 88157 - DNA, 770 bp, Homo sapiens
  misc_feature (1)..(1): n is a, c, g, or t
nggtgtcgggcacaccatagcgctaggtacgaggcctgggtgttggcggcgcgcacgctgcgctccttcccctggcaggggggcggcgggcgagcggagaggcccgcggggctcgcgggagtccagggcagacgggatgggtctccgtgctgaaacccccggcgctcctgccacagcttagaagcaaagttaagagactcatcagattctgagctgctgcgggatattttgcagaagactgtgaagcatcctgtgtgtgtgtgaagcacccgccgtcagtcaagaaagcccggtgctttctctcagaactcatcaaaaagcacgaggctgtccacatggaggctttggacgagctgtatgaggcactggcagagaccctgatggccaaggagtccacccagggccaccggagttatttgctgacgtgctgtattgcccagaagccatcgtgtcgctggtcgggatcctgcggaggctggctgcctgctgggagcaccagcaggctcctgaggtctacgtggcctttaccgtccacaacccagagacgtgccagctgttcaccaccgagctaggccgggctgggatcatatgggaagcggaagctcatcatgaccagaaactgtttccctatggagagcacttggagatggcaatgctgaacctcacactgtaggactcacacacgactccaacgggattgtgagaatcaagtcaatctcatgggaagaatttttatatgggaaagcggataaaactttcattgtactgga

SEQ ID NO: 88158 - DNA, 2804 bp, Homo sapiens
  misc_feature (1439)..(1439): n is a, c, g, or t
  misc_feature (2115)..(2115): n is a, c, g, or t
  misc_feature (2499)..(2499): n is a, c, g, or t
  misc_feature (2795)..(2795): n is a, c, g, or t
  misc_feature (2802)..(2802): n is a, c, g, or t
cggtgtacccgggttaggatatgtgaccacgcgtcgcgtatggcgcccgaggagaatgcggggaccgaactcttgctgcagagtttcgagcgccgcttcctggcggcgcgcacgctgcgctccttcccctggcaggggggcggcgggcgagcggagaggcccgcggggctcgcgggagtccagggcagacgggatgggtctccgtgctgaaacccccggcgctcctgccacagcttagaagcaaagttaagagactcatcagattctgagctgctgcgggatattttgcagaagactgtgaagcatcctgtgtgtgtgtgaagcacccgccgtcagtcaagaaagcccggtgctttctctcagaactcatcaaaaagcacgaggctgtccacatggaggctttggacgagctgtatgaggcactggcagagaccctgatggccaaggagtccacccagggccaccggagttatttgctgacgtgctgtattgcccagaagccatcgtgtcgctggtcgggatcctgcggaggctggctgcctgctgggagcaccagcaggctcctgaggtctacgtggcctttaccgtccacaacccagagacgtgccagctgttcaccaccgagctaggccgggctgggatcatatgggaagcggaagctcatcatgaccagaaactgtttccctatggagagcacttggagatggcaatgctgaacctcacactgtaggactcacacacgactccaacgggattgtgagaatcaagtcaatctcatgggaagaatttttatatgggaaagcggataaaactttcattgtactggaatgtttggagaatgttaaattccaaatcagaaaccacaaactgccctctaataagacatcggctatctaagcgtgtgggtgccccctttctgccagcagttctggttcttacgaaaatcaccatatatcagacatgaaaattctggctttgtgcagataaaaaagtgtgtatcaagtatgacgttcccccaatgtggacacacttggttcctcagaaagccaagcccactgcagctgccacatccctggacacactcggttcctcacaaagccaagcccgctgcagctgtcacatccctggacacactcggttcctcacaaagccaagcccactgcagctgccacatccctgagcctatggtgcagcaggtgcttttttcaagacagggatcaaagtgttaggaacacggcagaaaggtgacacctggagaccaaatgcaggatgaggagtactgcagaggtcacagggaagtcagagaacagtaatacgctaacaggggcacggggcatgaagaacaaaagacaggaaaaaagcatctgcaaaatactaaagagcagagcttacctcattgcctgtccccaccccatcccaggtcaccacctggctgaccncaggtccccgacccaacaacaacccctcccaagtccctaactccctcacttggacttgagacccttcacaccccagcagcgctccgcctcccacttgacatcatgctttctggaaacttccccgtatgtcccactttcccacacttggtgccctggagcaccttccggcctctacatgctgtacgttcccctgtgagcaccctcctctcggcctctggccaacacagtcccacccatctgtgggtaacaagggggagtgggtgttcttttcagccttgctaaactctctgaatcaaggatcacaaactacagcctgcaggccaaatccagcccacagcctgtgtttgtaaataaagctttattggaagaaagccacaccccttaatctacagatgatctgtggctactttcacaccacaacagagtaccatggttctgacagagactgggggacccagtctaaatgacttctgacctggacctttactgaaaatcctcccaatcattctgttgacaagaatgatgtattactttttgcaataagaaacaagtaacctttgcagaattccacccatctttcaaggctggtcccagaagttcccttagcccatgcacctacctgatcctgatcacttcctaaactgcagcctggcccacctggatccagcatcatttntggcgtgtcagctccataaatccagagggcaggtggcgttgtgtcctaactttcccgagcctactgtactgaaacaggacagcagagtaggccagcctctgtgacttctgctccctccctagcttttccaccagaccccccatggtcccaccctggctgtgggaagcagggatcagggagtgtggctcggtgccagtctccagaaccctgcccaccctggcgtggtggcagacatggctacctgcagctgagctgccagttcctctgagtcctcaaagaccaggccattttcttcatgtttcaccagctcatgtaaactgcagagagaaccaagggaacccgagagcttcctggagaagacaccagacccctggggtgcccagntgggctcccacccaccccacgctcaagccaggctgggggttggaacagggggtgtggtttctgggagctggttcttagatttggcatctgaagggtataaaggcctggcgggggtgcacatcaaaatggccaaaccgatttgaggagggagccttaaggagggtttgtaccttctgtgctggatgctcttcaaggactgaagaattatttttgcatgtttttctaaattccatggccatggaacaagtaaatgcaaccccctggggactggttcagcacataaaagatgacttttntaggacncc

SEQ ID NO: 88159 - DNA, 2747 bp, Homo sapiens
  misc_feature (1)..(1): n is a, c, g, or t
  misc_feature (1382)..(1382): n is a, c, g, or t
  misc_feature (2058)..(2058): n is a, c, g, or t
  misc_feature (2442)..(2442): n is a, c, g, or t
  misc_feature (2738)..(2738): n is a, c, g, or t
  misc_feature (2745)..(2745): n is a, c, g, or t
nggtgtcgggcacaccatagcgctaggtacgaggcctgggtgttggcggcgcgcacgctgcgctccttcccctggcaggggggcggcgggcgagcggagaggcccgcggggctcgcgggagtccagggcagacgggatgggtctccgtgctgaaacccccggcgctcctgccacagcttagaagcaaagttaagagactcatcagattctgagctgctgcgggatattttgcagaagactgtgaagcatcctgtgtgtgtgtgaagcacccgccgtcagtcaagaaagcccggtgctttctctcagaactcatcaaaaagcacgaggctgtccacatggaggctttggacgagctgtatgaggcactggcagagaccctgatggccaaggagtccacccagggccaccggagttatttgctgacgtgctgtattgcccagaagccatcgtgtcgctggtcgggatcctgcggaggctggctgcctgctgggagcaccagcaggctcctgaggtctacgtggcctttaccgtccacaacccagagacgtgccagctgttcaccaccgagctaggccgggctgggatcatatgggaagcggaagctcatcatgaccagaaactgtttccctatggagagcacttggagatggcaatgctgaacctcacactgtaggactcacacacgactccaacgggattgtgagaatcaagtcaatctcatgggaagaatttttatatgggaaagcggataaaactttcattgtactggaatgtttggagaatgttaaattccaaatcagaaaccacaaactgccctctaataagacatcggctatctaagcgtgtgggtgccccctttctgccagcagttctggttcttacgaaaatcaccatatatcagacatgaaaattctggctttgtgcagataaaaaagtgtgtatcaagtatgacgttcccccaatgtggacacacttggttcctcagaaagccaagcccactgcagctgccacatccctggacacactcggttcctcacaaagccaagcccgctgcagctgtcacatccctggacacactcggttcctcacaaagccaagcccactgcagctgccacatccctgagcctatggtgcagcaggtgcttttttcaagacagggatcaaagtgttaggaacacggcagaaaggtgacacctggagaccaaatgcaggatgaggagtactgcagaggtcacagggaagtcagagaacagtaatacgctaacaggggcacggggcatgaagaacaaaagacaggaaaaaagcatctgcaaaatactaaagagcagagcttacctcattgcctgtccccaccccatcccaggtcaccacctggctgaccncaggtccccgacccaacaacaacccctcccaagtccctaactccctcacttggacttgagacccttcacaccccagcagcgctccgcctcccacttgacatcatgctttctggaaacttccccgtatgtcccactttcccacacttggtgccctggagcaccttccggcctctacatgctgtacgttcccctgtgagcaccctcctctcggcctctggccaacacagtcccacccatctgtgggtaacaagggggagtgggtgttcttttcagccttgctaaactctctgaatcaaggatcacaaactacagcctgcaggccaaatccagcccacagcctgtgtttgtaaataaagctttattggaagaaagccacaccccttaatctacagatgatctgtggctactttcacaccacaacagagtaccatggttctgacagagactgggggacccagtctaaatgacttctgacctggacctttactgaaaatcctcccaatcattctgttgacaagaatgatgtattactttttgcaataagaaacaagtaacctttgcagaattccacccatctttcaaggctggtcccagaagttcccttagcccatgcacctacctgatcctgatcacttcctaaactgcagcctggcccacctggatccagcatcatttntggcgtgtcagctccataaatccagagggcaggtggcgttgtgtcctaactttcccgagcctactgtactgaaacaggacagcagagtaggccagcctctgtgacttctgctccctccctagcttttccaccagaccccccatggtcccaccctggctgtgggaagcagggatcagggagtgtggctcggtgccagtctccagaaccctgcccaccctggcgtggtggcagacatggctacctgcagctgagctgccagttcctctgagtcctcaaagaccaggccattttcttcatgtttcaccagctcatgtaaactgcagagagaaccaagggaacccgagagcttcctggagaagacaccagacccctggggtgcccagntgggctcccacccaccccacgctcaagccaggctgggggttggaacagggggtgtggtttctgggagctggttcttagatttggcatctgaagggtataaaggcctggcgggggtgcacatcaaaatggccaaaccgatttgaggagggagccttaaggagggtttgtaccttctgtgctggatgctcttcaaggactgaagaattatttttgcatgtttttctaaattccatggccatggaacaagtaaatgcaaccccctggggactggttcagcacataaaagatgacttttntaggacncc

SEQ ID NO: 88160 - DNA, 2702 bp, Homo sapiens
  misc_feature (1337)..(1337): n is a, c, g, or t
  misc_feature (2013)..(2013): n is a, c, g, or t
  misc_feature (2397)..(2397): n is a, c, g, or t
  misc_feature (2693)..(2693): n is a, c, g, or t
  misc_feature (2700)..(2700): n is a, c, g, or t
cggtgtacccgggttaggatatgtgaccacgcgtcgcgtatggcgcccgaggagaatgcggggaccgaactcttgctgcagagtttcgagcgccgcttcctggcggcgcgcacgctgcgctccttcccctggcaggggggcggcgggcgagcggagaggcccgcggggctcgcgggagtccagggcagacgggatgggtctccgtgctgaaacccccggcgctcctgccacagcttagaagcaaagttaagagactcatcagattctgagctgctgcgggatattttgcagaagactgtgaagcatcctgtgtgtgtgtgaagcacccgccgtcagtcaagaaagcccggtgctttctctcagaactcatcaaaaagacgtgctgtattgcccagaagccatcgtgtcgctggtcgggatcctgcggaggctggctgcctgctgggagcaccagcaggctcctgaggtctacgtggcctttaccgtccacaacccagagacgtgccagctgttcaccaccgagctaggccgggctgggatcatatgggaagcggaagctcatcatgaccagaaactgtttccctatggagagcacttggagatggcaatgctgaacctcacactgtaggactcacacacgactccaacgggattgtgagaatcaagtcaatctcatgggaagaatttttatatgggaaagcggataaaactttcattgtactggaatgtttggagaatgttaaattccaaatcagaaaccacaaactgccctctaataagacatcggctatctaagcgtgtgggtgccccctttctgccagcagttctggttcttacgaaaatcaccatatatcagacatgaaaattctggctttgtgcagataaaaaagtgtgtatcaagtatgacgttcccccaatgtggacacacttggttcctcagaaagccaagcccactgcagctgccacatccctggacacactcggttcctcacaaagccaagcccgctgcagctgtcacatccctggacacactcggttcctcacaaagccaagcccactgcagctgccacatccctgagcctatggtgcagcaggtgcttttttcaagacagggatcaaagtgttaggaacacggcagaaaggtgacacctggagaccaaatgcaggatgaggagtactgcagaggtcacagggaagtcagagaacagtaatacgctaacaggggcacggggcatgaagaacaaaagacaggaaaaaagcatctgcaaaatactaaagagcagagcttacctcattgcctgtccccaccccatcccaggtcaccacctggctgaccncaggtccccgacccaacaacaacccctcccaagtccctaactccctcacttggacttgagacccttcacaccccagcagcgctccgcctcccacttgacatcatgctttctggaaacttccccgtatgtcccactttcccacacttggtgccctggagcaccttccggcctctacatgctgtacgttcccctgtgagcaccctcctctcggcctctggccaacacagtcccacccatctgtgggtaacaagggggagtgggtgttcttttcagccttgctaaactctctgaatcaaggatcacaaactacagcctgcaggccaaatccagcccacagcctgtgtttgtaaataaagctttattggaagaaagccacaccccttaatctacagatgatctgtggctactttcacaccacaacagagtaccatggttctgacagagactgggggacccagtctaaatgacttctgacctggacctttactgaaaatcctcccaatcattctgttgacaagaatgatgtattactttttgcaataagaaacaagtaacctttgcagaattccacccatctttcaaggctggtcccagaagttcccttagcccatgcacctacctgatcctgatcacttcctaaactgcagcctggcccacctggatccagcatcatttntggcgtgtcagctccataaatccagagggcaggtggcgttgtgtcctaactttcccgagcctactgtactgaaacaggacagcagagtaggccagcctctgtgacttctgctccctccctagcttttccaccagaccccccatggtcccaccctggctgtgggaagcagggatcagggagtgtggctcggtgccagtctccagaaccctgcccaccctggcgtggtggcagacatggctacctgcagctgagctgccagttcctctgagtcctcaaagaccaggccattttcttcatgtttcaccagctcatgtaaactgcagagagaaccaagggaacccgagagcttcctggagaagacaccagacccctggggtgcccagntgggctcccacccaccccacgctcaagccaggctgggggttggaacagggggtgtggtttctgggagctggttcttagatttggcatctgaagggtataaaggcctggcgggggtgcacatcaaaatggccaaaccgatttgaggagggagccttaaggagggtttgtaccttctgtgctggatgctcttcaaggactgaagaattatttttgcatgtttttctaaattccatggccatggaacaagtaaatgcaaccccctggggactggttcagcacataaaagatgacttttntaggacncc

SEQ ID NO: 88161 - DNA, 3103 bp, Homo sapiens
  misc_feature (1738)..(1738): n is a, c, g, or t
  misc_feature (2414)..(2414): n is a, c, g, or t
  misc_feature (2798)..(2798): n is a, c, g, or t
  misc_feature (3094)..(3094): n is a, c, g, or t
  misc_feature (3101)..(3101): n is a, c, g, or t
cggtgtacccgggttaggatatgtgaccacgcgtcgcgtatggcgcccgaggagaatgcggggaccgaactcttgctgcagagtttcgagcgccgcttcctggcggcgcgcacgctgcgctccttcccctggcaggggggcggcgggcgagcggagaggcccgcggggctcgcgggagtccagggcagacgggatgggtctccgtgctgaaacccccggcgctcctgccacagcttagaagcaaagttaagagactcatcagattctgagctgctgcgggatattttgcagaagactgtgaagcatcctgtgtgtgtgtgaagcacccgccgtcagtcaagaaagcccggtgctttctctcagaactcatcaaaaagccctcgggaggctcagtcacactctccgagagcacagccatcatctcccatggtaccacaggcctggtcacatgggatgccaccctctaccttgcagaatgggccatcgagaacccagcagccttcactaacaggactgtcctagagcttggcagtggtgccggcctcacaggcctggccatctgcaagatgtaccgcccccgggcattcatcttcagtgactgtcacagccgggtcctcgagcagctccgagggaatgtccttctcaatggcctctcaattagaggcagacatcactgccaacttagacagccccagggtgacagtggcccagctggactgggacgtagcgacggtccatcagctctctgccttccagccagatgttgtcattgcagcagacgtgctgtattgcccagaagccatcgtgtcgctggtcgggatcctgcggaggctggctgcctgctgggagcaccagcaggctcctgaggtctacgtggcctttaccgtccacaacccagagacgtgccagctgttcaccaccgagctaggccgggctgggatcatatgggaagcggaagctcatcatgaccagaaactgtttccctatggagagcacttggagatggcaatgctgaacctcacactgtaggactcacacacgactccaacgggattgtgagaatcaagtcaatctcatgggaagaatttttatatgggaaagcggataaaactttcattgtactggaatgtttggagaatgttaaattccaaatcagaaaccacaaactgccctctaataagacatcggctatctaagcgtgtgggtgccccctttctgccagcagttctggttcttacgaaaatcaccatatatcagacatgaaaattctggctttgtgcagataaaaaagtgtgtatcaagtatgacgttcccccaatgtggacacacttggttcctcagaaagccaagcccactgcagctgccacatccctggacacactcggttcctcacaaagccaagcccgctgcagctgtcacatccctggacacactcggttcctcacaaagccaagcccactgcagctgccacatccctgagcctatggtgcagcaggtgcttttttcaagacagggatcaaagtgttaggaacacggcagaaaggtgacacctggagaccaaatgcaggatgaggagtactgcagaggtcacagggaagtcagagaacagtaatacgctaacaggggcacggggcatgaagaacaaaagacaggaaaaaagcatctgcaaaatactaaagagcagagcttacctcattgcctgtccccaccccatcccaggtcaccacctggctgaccncaggtccccgacccaacaacaacccctcccaagtccctaactccctcacttggacttgagacccttcacaccccagcagcgctccgcctcccacttgacatcatgctttctggaaacttccccgtatgtcccactttcccacacttggtgccctggagcaccttccggcctctacatgctgtacgttcccctgtgagcaccctcctctcggcctctggccaacacagtcccacccatctgtgggtaacaagggggagtgggtgttcttttcagccttgctaaactctctgaatcaaggatcacaaactacagcctgcaggccaaatccagcccacagcctgtgtttgtaaataaagctttattggaagaaagccacaccccttaatctacagatgatctgtggctactttcacaccacaacagagtaccatggttctgacagagactgggggacccagtctaaatgacttctgacctggacctttactgaaaatcctcccaatcattctgttgacaagaatgatgtattactttttgcaataagaaacaagtaacctttgcagaattccacccatctttcaaggctggtcccagaagttcccttagcccatgcacctacctgatcctgatcacttcctaaactgcagcctggcccacctggatccagcatcatttntggcgtgtcagctccataaatccagagggcaggtggcgttgtgtcctaactttcccgagcctactgtactgaaacaggacagcagagtaggccagcctctgtgacttctgctccctccctagcttttccaccagaccccccatggtcccaccctggctgtgggaagcagggatcagggagtgtggctcggtgccagtctccagaaccctgcccaccctggcgtggtggcagacatggctacctgcagctgagctgccagttcctctgagtcctcaaagaccaggccattttcttcatgtttcaccagctcatgtaaactgcagagagaaccaagggaacccgagagcttcctggagaagacaccagacccctggggtgcccagntgggctcccacccaccccacgctcaagccaggctgggggttggaacagggggtgtggtttctgggagctggttcttagatttggcatctgaagggtataaaggcctggcgggggtgcacatcaaaatggccaaaccgatttgaggagggagccttaaggagggtttgtaccttctgtgctggatgctcttcaaggactgaagaattatttttgcatgtttttctaaattccatggccatggaacaagtaaatgcaaccccctggggactggttcagcacataaaagatgacttttntaggacncc

SEQ ID NO: 88162 - DNA, 3119 bp, Homo sapiens
  misc_feature (1754)..(1754): n is a, c, g, or t
  misc_feature (2430)..(2430): n is a, c, g, or t
  misc_feature (2814)..(2814): n is a, c, g, or t
  misc_feature (3110)..(3110): n is a, c, g, or t
  misc_feature (3117)..(3117): n is a, c, g, or t
cggtgtacccgggttaggatatgtgaccacgcgtcgcgtatggcgcccgaggagaatgcggggaccgaactcttgctgcagagtttcgagcgccgcttcctggcggcgcgcacgctgcgctccttcccctggcaggggggcggcgggcgagcggagaggcccgcggggctcgcgggagtccagggcagacgggatgggtctccgtgctgaaacccccggcgctcctgccacagcttagaagcaaagttaagagactcatcagattctgagctgctgcgggatattttgcagaagactgtgaagcatcctgtgtgtgtgtgaagcacccgccgtcagtcaagaaagcccggtgctttctctcagaactcatcaaaaagcacgaggctgtccacatggaggctttggacgagctgtatgaggcactggcagagaccctgatggccaaggagtccacccagggccaccggagttatttgctgacgtgctgtattgcccagaagccatcgtgtcgctggtcgggatcctgcggaggctggctgcctgctgggagcaccagcaggctcctgaggtctacgtggcctttaccgtccacaacccagagacgtgccagctgttcaccaccgagctaggccgggctgggatcatatgggaagcggaagctcatcatgaccagaaactgtttccctatggagagcacttggagatggcaatgctgaacctcacactgtaggactcacacacgactccaacgggattgtgagaatcaagtcaatctcatgggaagaatttttatatgggaaagcggataaaactttcattgtactggaatgtttggagaatgttaaattccaaatcagaaaccacaaactgccctctaataagacatcggctatctaagcgtgtgggtgccccctttctgccagcagttctggttcttacgaaaatcaccatatatcagacatgaaaattctggctttgtgcagataaaaaagtgtgtatcaagtatgacgttcccccaatgtggacacacttggttcctcagaaagccaagcccactgcagctgccacatccctggacacactcggttcctcacaaagccaagcccgctgcagctgtcacatccctggacacactcggttcctcacaaagccaagcccactgcagctgccacatccctgagcctatggtgcagcaggtgcttttttcaagacagggatcaaagtgttaggaacacggcagaaaggtgacacctggagaccaaatgcaggatgaggagtactgcagaggtcacagggaagtcagagaacagtaatacgctaacaggggcacggggcatgaagaacaaaagacaggaagcgtttcagagactccaaagaagaaatcagggccaaccacagcttcccgggtcattcaccaggtggcaccactgccgtcatttcagcttctggccactgggaggcgctgctcgaaagggtttgccctgacactccaagaagctgcgggaaggacagcaggggccctggggttttagcctctggcccaggagttatgtgtccataaccaaagggagcacagtctgcacccagctctcatcccatcagagctgctgcgactcctgcaggttcttccggaactggtttagcttgcctgcaggatcaggaaagtttgagaaaagcatctgcaaaatactaaagagcagagcttacctcattgcctgtccccaccccatcccaggtcaccacctggctgaccncaggtccccgacccaacaacaacccctcccaagtccctaactccctcacttggacttgagacccttcacaccccagcagcgctccgcctcccacttgacatcatgctttctggaaacttccccgtatgtcccactttcccacacttggtgccctggagcaccttccggcctctacatgctgtacgttcccctgtgagcaccctcctctcggcctctggccaacacagtcccacccatctgtgggtaacaagggggagtgggtgttcttttcagccttgctaaactctctgaatcaaggatcacaaactacagcctgcaggccaaatccagcccacagcctgtgtttgtaaataaagctttattggaagaaagccacaccccttaatctacagatgatctgtggctactttcacaccacaacagagtaccatggttctgacagagactgggggacccagtctaaatgacttctgacctggacctttactgaaaatcctcccaatcattctgttgacaagaatgatgtattactttttgcaataagaaacaagtaacctttgcagaattccacccatctttcaaggctggtcccagaagttcccttagcccatgcacctacctgatcctgatcacttcctaaactgcagcctggcccacctggatccagcatcatttntggcgtgtcagctccataaatccagagggcaggtggcgttgtgtcctaactttcccgagcctactgtactgaaacaggacagcagagtaggccagcctctgtgacttctgctccctccctagcttttccaccagaccccccatggtcccaccctggctgtgggaagcagggatcagggagtgtggctcggtgccagtctccagaaccctgcccaccctggcgtggtggcagacatggctacctgcagctgagctgccagttcctctgagtcctcaaagaccaggccattttcttcatgtttcaccagctcatgtaaactgcagagagaaccaagggaacccgagagcttcctggagaagacaccagacccctggggtgcccagntgggctcccacccaccccacgctcaagccaggctgggggttggaacagggggtgtggtttctgggagctggttcttagatttggcatctgaagggtataaaggcctggcgggggtgcacatcaaaatggccaaaccgatttgaggagggagccttaaggagggtttgtaccttctgtgctggatgctcttcaaggactgaagaattatttttgcatgtttttctaaattccatggccatggaacaagtaaatgcaaccccctggggactggttcagcacataaaagatgacttttntaggacncc

SEQ ID NO: 88163 - DNA, 989 bp, Homo sapiens
cggtgtacccgggttaggatatgtgaccacgcgtcgcgtatggcgcccgaggagaatgcggggaccgaactcttgctgcagagtttcgagcgccgcttcctggcggcgcgcacgctgcgctccttcccctggcaggggggcggcgggcgagcggagaggcccgcggggctcgcgggagtccagggcagacgggatgggtctccgtgctgaaacccccggcgctcctgccacgtgagttcctgggctctccccggtcagggccgcgagacccggtccccgtccctggggcctggccagagtcgctcgcacccctcctgccccgcgagctggcggcggaagatgagggcgtctccaccgccttgggggggcagacgcgtgctcggtgtggggtacagttcacgatcattttcacgactttttaaagagcttagaagcaaagttaagagactcatcagattctgagctgctgcgggatattttgcagaaggtggtgaagcatgaaatgttgggagagctgctttaaaacccagcacaaggctgggtgcactggctcacacctgtaatcccaggactctgggaggctgaggtggacggatcacctaaggtcaggagttcaacaccagcctagccaacatgactgtgaagcatcctgtgtgtgtgtgaagcacccgccgtcagtcaagaaagcccggtgctttctctcagaactcatcaaaaagacgtgctgtatttgcccagaagccatcgggtcgctggtcgggatcagcggaaggatgttgctgccggagaccaaaagctcctgaggcatagtgggcttaacggcaacacccaaaaagtccagagggtaccaccgagaagccagtggacataagggagggaagccaatgcagaatgtcccacgagacacacgcggaggagggcccaagagaagacccgaacaaggatgaacacactcggaaatgagaaggaccggagggagagaaacaacg

SEQ ID NO: 88164 - DNA, 900 bp, Homo sapiens
cggtgtacccgggttaggatatgtgaccacgcgtcgcgtatggcgcccgaggagaatgcggggaccgaactcttgctgcagagtttcgagcgccgcttcctggcggcgcgcacgctgcgctccttcccctggcaggggggcggcgggcgagcggagaggcccgcggggctcgcgggagtccagggcagacgggatgggtctccgtgctgaaacccccggcgctcctgccacagcttagaagcaaagttaagagactcatcagattctgagctgctgcgggatattttgcagaagactgtgaagcatcctgtgtgtgtgtgaagcacccgccgtcagtcaagaaagcccggtgctttctctcagaactcatcaaaaagcacgaggctgtccacatggaggctttggacgagctgtatgaggcactggcagagaccctgatggccaaggagtccacccagggccaccggagttatttgctgccctcgggaggctcagtcacactctccgagagcacagccatcatctcccatggtaccacaggcctggtcacatgggatgccaccctctaccttgcagaatgggccatcgagaacccagcagccttcactaacaggactgtcctagagcttggcagtggtgccggcctcacaggcctggccatctgcaagatgtaccgcccccgggcattcatcttcagtgactgtcacagccgggtcctcgagcagctccgagggaatgtccttctcaatggcctctcaattagaggcagacatcactgccaacttagacagccccagggtgacagtggcccagctggactgggacgtagcgacggtccatcagctctctgccttccagccagatgttgtcattgcagcaggtaatggccagccccaggca

SEQ ID NO: 88165 - DNA, 2724 bp, Homo sapiens
  misc_feature (1359)..(1359): n is a, c, g, or t
  misc_feature (2035)..(2035): n is a, c, g, or t
  misc_feature (2419)..(2419): n is a, c, g, or t
  misc_feature (2715)..(2715): n is a, c, g, or t
  misc_feature (2722)..(2722): n is a, c, g, or t
cggtgtacccgggttaggatatgtgaccacgcgtcgcgtatggcgcccgaggagaatgcggggaccgaactcttgctgcagagtttcgagcgccgcttcctggcggcgcgcacgctgcgctccttcccctggcaggggggcggcgggcgagcggagaggcccgcggggctcgcgggagtccagggcagacgggatgggtctccgtgctgaaacccccggcgctcctgccacagcttagaagcaaagttaagagactcatcagattctgagctgctgcgggatattttgcagaagactgtgaagcatcctgtgtgtgtgtgaagcacccgccgtcagtcaagaaagcccggtgctttctctcagaactcatcaaaaagtaacctgaagctttcaccgtagacgtgctgtattgcccagaagccatcgtgtcgctggtcgggatcctgcggaggctggctgcctgctgggagcaccagcaggctcctgaggtctacgtggcctttaccgtccacaacccagagacgtgccagctgttcaccaccgagctaggccgggctgggatcatatgggaagcggaagctcatcatgaccagaaactgtttccctatggagagcacttggagatggcaatgctgaacctcacactgtaggactcacacacgactccaacgggattgtgagaatcaagtcaatctcatgggaagaatttttatatgggaaagcggataaaactttcattgtactggaatgtttggagaatgttaaattccaaatcagaaaccacaaactgccctctaataagacatcggctatctaagcgtgtgggtgccccctttctgccagcagttctggttcttacgaaaatcaccatatatcagacatgaaaattctggctttgtgcagataaaaaagtgtgtatcaagtatgacgttcccccaatgtggacacacttggttcctcagaaagccaagcccactgcagctgccacatccctggacacactcggttcctcacaaagccaagcccgctgcagctgtcacatccctggacacactcggttcctcacaaagccaagcccactgcagctgccacatccctgagcctatggtgcagcaggtgcttttttcaagacagggatcaaagtgttaggaacacggcagaaaggtgacacctggagaccaaatgcaggatgaggagtactgcagaggtcacagggaagtcagagaacagtaatacgctaacaggggcacggggcatgaagaacaaaagacaggaaaaaagcatctgcaaaatactaaagagcagagcttacctcattgcctgtccccaccccatcccaggtcaccacctggctgaccncaggtccccgacccaacaacaacccctcccaagtccctaactccctcacttggacttgagacccttcacaccccagcagcgctccgcctcccacttgacatcatgctttctggaaacttccccgtatgtcccactttcccacacttggtgccctggagcaccttccggcctctacatgctgtacgttcccctgtgagcaccctcctctcggcctctggccaacacagtcccacccatctgtgggtaacaagggggagtgggtgttcttttcagccttgctaaactctctgaatcaaggatcacaaactacagcctgcaggccaaatccagcccacagcctgtgtttgtaaataaagctttattggaagaaagccacaccccttaatctacagatgatctgtggctactttcacaccacaacagagtaccatggttctgacagagactgggggacccagtctaaatgacttctgacctggacctttactgaaaatcctcccaatcattctgttgacaagaatgatgtattactttttgcaataagaaacaagtaacctttgcagaattccacccatctttcaaggctggtcccagaagttcccttagcccatgcacctacctgatcctgatcacttcctaaactgcagcctggcccacctggatccagcatcatttntggcgtgtcagctccataaatccagagggcaggtggcgttgtgtcctaactttcccgagcctactgtactgaaacaggacagcagagtaggccagcctctgtgacttctgctccctccctagcttttccaccagaccccccatggtcccaccctggctgtgggaagcagggatcagggagtgtggctcggtgccagtctccagaaccctgcccaccctggcgtggtggcagacatggctacctgcagctgagctgccagttcctctgagtcctcaaagaccaggccattttcttcatgtttcaccagctcatgtaaactgcagagagaaccaagggaacccgagagcttcctggagaagacaccagacccctggggtgcccagntgggctcccacccaccccacgctcaagccaggctgggggttggaacagggggtgtggtttctgggagctggttcttagatttggcatctgaagggtataaaggcctggcgggggtgcacatcaaaatggccaaaccgatttgaggagggagccttaaggagggtttgtaccttctgtgctggatgctcttcaaggactgaagaattatttttgcatgtttttctaaattccatggccatggaacaagtaaatgcaaccccctggggactggttcagcacataaaagatgacttttntaggacncc

SEQ ID NO: 88166 - DNA, 2511 bp, Homo sapiens
  misc_feature (1146)..(1146): n is a, c, g, or t
  misc_feature (1822)..(1822): n is a, c, g, or t
  misc_feature (2206)..(2206): n is a, c, g, or t
  misc_feature (2502)..(2502): n is a, c, g, or t
  misc_feature (2509)..(2509): n is a, c, g, or t
tttctaagctttgtgaagagtgagttgactgagcagccaggtagatgtgggttcagatctctgcttctgtcctgctgtgccaagtgctggggcagacgcgggcagagagtggacagtggcatggtgcctgctgctagccatttctatgcaaaaccagatttctagtcccatcctggtggccaattctaggtacctgggtgggcctgggaacctgtgaaacaagtaaactgacttagacaccccctaccccaccaggcctgtcctagcagccccacacaaaacgctcacatcctgtccccaaacaccgccatcctcaagcacgtgctctgtttccaggccgggctgggatcatatgggaagcggaagctcatcatgaccagaaactgtttccctatggagagcacttggagatggcaatgctgaacctcacactgtaggactcacacacgactccaacgggattgtgagaatcaagtcaatctcatgggaagaatttttatatgggaaagcggataaaactttcattgtactggaatgtttggagaatgttaaattccaaatcagaaaccacaaactgccctctaataagacatcggctatctaagcgtgtgggtgccccctttctgccagcagttctggttcttacgaaaatcaccatatatcagacatgaaaattctggctttgtgcagataaaaaagtgtgtatcaagtatgacgttcccccaatgtggacacacttggttcctcagaaagccaagcccactgcagctgccacatccctggacacactcggttcctcacaaagccaagcccgctgcagctgtcacatccctggacacactcggttcctcacaaagccaagcccactgcagctgccacatccctgagcctatggtgcagcaggtgcttttttcaagacagggatcaaagtgttaggaacacggcagaaaggtgacacctggagaccaaatgcaggatgaggagtactgcagaggtcacagggaagtcagagaacagtaatacgctaacaggggcacggggcatgaagaacaaaagacaggaaaaaagcatctgcaaaatactaaagagcagagcttacctcattgcctgtccccaccccatcccaggtcaccacctggctgaccncaggtccccgacccaacaacaacccctcccaagtccctaactccctcacttggacttgagacccttcacaccccagcagcgctccgcctcccacttgacatcatgctttctggaaacttccccgtatgtcccactttcccacacttggtgccctggagcaccttccggcctctacatgctgtacgttcccctgtgagcaccctcctctcggcctctggccaacacagtcccacccatctgtgggtaacaagggggagtgggtgttcttttcagccttgctaaactctctgaatcaaggatcacaaactacagcctgcaggccaaatccagcccacagcctgtgtttgtaaataaagctttattggaagaaagccacaccccttaatctacagatgatctgtggctactttcacaccacaacagagtaccatggttctgacagagactgggggacccagtctaaatgacttctgacctggacctttactgaaaatcctcccaatcattctgttgacaagaatgatgtattactttttgcaataagaaacaagtaacctttgcagaattccacccatctttcaaggctggtcccagaagttcccttagcccatgcacctacctgatcctgatcacttcctaaactgcagcctggcccacctggatccagcatcatttntggcgtgtcagctccataaatccagagggcaggtggcgttgtgtcctaactttcccgagcctactgtactgaaacaggacagcagagtaggccagcctctgtgacttctgctccctccctagcttttccaccagaccccccatggtcccaccctggctgtgggaagcagggatcagggagtgtggctcggtgccagtctccagaaccctgcccaccctggcgtggtggcagacatggctacctgcagctgagctgccagttcctctgagtcctcaaagaccaggccattttcttcatgtttcaccagctcatgtaaactgcagagagaaccaagggaacccgagagcttcctggagaagacaccagacccctggggtgcccagntgggctcccacccaccccacgctcaagccaggctgggggttggaacagggggtgtggtttctgggagctggttcttagatttggcatctgaagggtataaaggcctggcgggggtgcacatcaaaatggccaaaccgatttgaggagggagccttaaggagggtttgtaccttctgtgctggatgctcttcaaggactgaagaattatttttgcatgtttttctaaattccatggccatggaacaagtaaatgcaaccccctggggactggttcagcacataaaagatgacttttntaggacncc

SEQ ID NO: 88167 - DNA, 940 bp, Homo sapiens
cggtgtacccgggttaggatatgtgaccacgcgtcgcgtatggcgcccgaggagaatgcggggaccgaactcttgctgcagagtttcgagcgccgcttcctggcggcgcgcacgctgcgctccttcccctggcaggggggcggcgggcgagcggagaggcccgcggggctcgcgggagtccagggcagacgggatgggtctccgtgctgaaacccccggcgctcctgccacgtgagttcctgggctctccccggtcagggccgcgagacccggtccccgtccctggggcctggccagagtcgctcgcacccctcctgccccgcgagctggcggcggaagatgagggcgtctccaccgccttgggggggcagacgcgtgctcggtgtggggtacagttcacgatcattttcacgactttttaaagagcttagaagcaaagttaagagactcatcagattctgagctgctgcgggatattttgcagaagactgtgaagcatcctgtgtgtgtgtgaagcacccgccgtcagtcaagaaagcccggtgctttctctcagaactcatcaaaaagtaacctgaagctttcaccgtagacgtgctgtattgcccagaagccatcgtgtcgctggtcgggatcctgcggaggctggctgcctgctgggagcaccagcaggctcctgaggtctacgtggcctttaccgtccacaacccagagacgtgccagctgttcaccaccgagctaggccgggctgggatcatatgggaagcggaagctcatcatgaccagaaactgtttccctatggagagcacttggagatggcaatgctgaacctcacactgtaggactcacacacgactccaacgggattgtgagaatcaagtcaatctcatgggaagaatttttatatgggaaagcggataaaactttcattgtactgga

SEQ ID NO: 88168 - DNA, 482 bp, Homo sapiens
tttggtttactgaagtcagagttgccacaacatacgatccttcattttcttccaattctaaaagctctgattctcttatattattaagcttcctttcccagctttggtctttacagaagggacgggaaataaaggtagtaaaaatgaggcatgtttttaggagtgagaagggaggtgaacatgtgaattaaggtggtgatggtaggatgctgagactaaaaacagaggacagcacaacccataaagtgttgactaacttcctgggagaagtttgttctagtaaatcagagtctctatgaaactccctggcaaagaccccagatgtccctgtgttaaattgcaaacacacattctaaaattccccttatgttccattccttagttcctctcaatctttttcactatccaaagtatggttttctactttgttagctagaattttgggggctccaagtgacaaaagcccaactcaacctagctca

SEQ ID NO: 88169 - DNA, 1233 bp, Homo sapiens
cataatccaacaggtatttatcattttttttctctaaagtattatgctaaattttgtggaggcattttttagaaatacagtaaacacattaactgtactcagaatgagaaagggaaatacaatccaataagtaaaacacaaagtagaatgtgatacatgctccaaaagaggtaagaaggaagactcaggtcttggagccttgaaggatatgcatgatttttacaggtggtgatgataaagaagggcctcactgatgaaaagaatagtgtgtttttgtgccagactgttagtctcattcagtcacacttcagtaataaattaggctcatttagatggaactgacttgaaatttctctcttatcttccacagtctgtttccctaggcattgtgggcatctttgagatttcgaatggtaccatctctttgaatcgtcataaggactattctgggactttgcttcatcaattatttttcctttttcttgattcttctatttcatcttcactgaattatttcattccacctatgtatgtattcaagtcttcctccctccctccaacactgtaagagaaaaaagaattattttctcaatcctattatctctgttaagctttcatcctgtttttctctcctttaacttcagtagtattcacttaatgcttccacctcttaacatcgccagttgttcaacctcttgcaatctgaatttgataaggaaaatgtggttcatatacacaatggagtactgttcatccatgaaagggatgagatccggtcattcgcaacagcatggagggaactggagatcattaagtaaaataagccaggcacagaaagacaaacattgcatgttctcacttatttgtgagatctaaaaagccctcaaccacttttctggaaaaaaaaaaaaaattttaaggagaatcctagcatctcctgttcaataagtctaatactttttactttaaggtcagattttttttggcctatctataggcactgttagccatatctttcttcttgatggtctctccttcctaggtttcacttgattctcctgcatctgccttccctgactcttcttccatcccttactgacagtgtttaccaaggatttcccttggcctgcttctttctttgacgctcatttaaacctttcccttcagttgcagacctcgtctgcttctcccagctattccattcagttcaaattcaaggggtaccgagcttcg

SEQ ID NO: 88170 - DNA, 366 bp, Homo sapiens
gagccggtacctgctggggaagagggggagctggacgccaccagctggctacagctttcgagagtgaggcctgccagcaggccagtggactcagcgtcccctgctactcctgtgctctggaggctgcagagctgacccagagtggagtctgagtctgagtcctgtctctgcctgcggcccagaagtttccctcaaatgcgcgtgtgcacgtgtgtgtgtgtgtgtgtgtgtgtggcggggctggggggttggggaggtggtgcctggatacacagttccagggctcagtggagaggtcctggctggagatgggcatttttccccaataatttttatggtagtaaaatatgcagaacacgcagtttc

SEQ ID NO: 88171 - DNA, 357 bp, Homo sapiens
agactgagcactcctaacacccgaccctcactggccatgctgggaccggctgtgaacagtagccatctaatacctaacacagccctttcaggcgggtgcttgttttcccatttgctcagttgtagacaccaggacacagaattgtctggggttccgagccagttctgcctggcactcacctgggtgtgaaggaagagcaggcacctacctaggaggaggtggaggtggagcagggaacgtcatggtcctgtttgagcaggatgtggtgaagggtcattggagctgccattccagggccactggatgccaagggaggcgggagagctgctggccctgtgtcctgggttgtggggaaag

SEQ ID NO: 88172 - DNA, 391 bp, Homo sapiens
ctgtgttgattgcttgagcccatcacagtttagctctcacagctttaatttactagcccatgagaagtcagcttcaaagaacaccatttcgactctcaaagaacattatcaatgtacatggatagcttccaacttcataaggtgtttctctctacctagagcaattaacattaatttgcagaatagtgtttattgaaaacctttgtgtatctccaacaaagtaatagtgtattgatttcattcctactatcttcaactgtatcattaagaggaatttcttaggaaagtctatatgcagtaagcaagtaagatcgcagaacatcaagggagaagtaaatccaaaactgattttacttcttttcttagtgaggaaagaattatgttttaagct

SEQ ID NO: 88173 - DNA, 392 bp, Homo sapiens
tatatcccaggcagcactatgcaaacagtgaggaaaattagaatctcatgaaactcaaaatgggactaattatcctcattaactaataactaataacctactataggtttcctactatgaaggaaaaactactgtaataagaaaaaaaggattaaggatgcaggcaatttttaagtcccgtgttccacccaagttatacttttaatgaataaaactgtatttttttttttttttttgagagggagttttgctttggttgcccaggctggaatgcaatggcacgatttaagctcactgcaacctccaccttctgggttcaagcaattctcctgcctcagaatcctgagtagctgggattacaggcatgcgccaccatgcccagctaattttgt

SEQ ID NO: 88174 - DNA, 325 bp, Homo sapiens
tagctctttaaactgttggggctcaggaaacaaaactccaaaatgaagccccagcagcagcctcaggagcaaaagtttttctctgaccttctcctgccctcctgcctcccagtcctgttctctcccgaggctggccttagaaaccacaaaggtcccctctccacaaaggtgaatcatagaaaccagaactcctttccccaaagccagccacgaaacctgaacatattactctaactctccctccacctttctgtgtaaaaattggccacaaaggacaaaggaattgaccggacctaccttgtttgccaattccagagagggtccc

SEQ ID NO: 88175 - DNA, 330 bp, Homo sapiens
ctctatgtttcttgatgaaagctcatgtatcctgagtgttggagttagttttggaaaaattaacaaatctcactggtggttgcgctgtgtctctggtgctttcgtttgatattaattgtactatactgaccacaaacttttgttgatgattttaataaactatgaggttatgcatattacactatttttacaaagtaagtgacttaatggtaaactgtttgtttgtggacctaccttgtgaagagagatctttcctccatttcagttcctgcaataaagtacacttttcagtgtttgaagtgaagcactttgacttgtgactggaaaatg

SEQ ID NO: 88176 - DNA, 496 bp, Homo sapiens
ccgtgtaaatctagcagtacgggtaagagtgtttgcggaggaactcctcaggtctcttcctccgcatcagcaggagggtatcatgggtgtgactgtcgggcactaacacgaatctccatcccatgattctaggcgttaggactggagaagcagctccgggccaccgtcccagctctaatctcacttaggcaatgcagagctgtgggcctgactaccacgtgtgtctctggcttgttgaaatgggcactttgtacatctcacttgtgctgggtagagtgtcttttctttagaaccagtaccaatctcttaggcttttggcattctctgcagccaaattctaacatgcttctagttagctggaatgtaccctcggcttacctttggtaaatggtatctccccaggtgagcttagccacttccatggctacaaagacctcattttaggtctagctccaatttcttttctatgtactccagattcctacattcaggtgcc

SEQ ID NO: 88177 - DNA, 1522 bp, Homo sapiens
  misc_feature (4)..(4): n is a, c, g, or t
  misc_feature (7)..(7): n is a, c, g, or t
ggcncgnggctgagcggcgcccccgggctcggggcttcccttgcctggcccgaagccgtggagatgagacacccgcgagccccgagctctgagaccttcccctgactcggaggcgctaagccgtaccctctcgttcccgcctccgagagctcccaccgtcaaagacccagagatagccggtccgaatccagaaaccccgcctgcccaccctagtttccgaaacctccctcctgaaccactgaaagtccgttccccgtctcggagctcacacagagaatctgtccttcaaggccaaagctctgagacttgcccccagcaccctgtgcttggagctccgacacccgagactgcactgacctccctcgccagctcggagccctcagtcccctccggggcttgagggcccttccatcccattctggactcgaagcacagcacccccatcagaatggttttgtggattttgagccctttgtcccatcccagagctcagagccctccatcctgcatggaggcccaaccctggggctctgaggattgggcaccctcccctcatctaagaatatatttcatacccctgcccccccttcacccacccccgcctctggctcaggcccttcccttcctcggctcaggcatggggctcagctcctagtctgtccctcccatcccagggacaagcacagcccatctagccttagtgtggagccaactctcagcctttcccaccagggcgctgacctcccgatactcagtgctggtccccagtctcagactctcagctcttcaccccgatctgactttcgtcctcctgcccaagcctttggctcttgaccccccccccatacccaatgctggcactcagcacccacccctgccattcactagtcaaggtccagtgaggaatccgtccctgggatgtcctcatccccttttcgtcccaggacgagctcttcagtcctgccggataggtgcaggtgccatgcacccctagtgcatactggcagatccttgtagggaaggagagagtcttgggtgtgtgaaagggatagtggggcatcgtggcctcagagaggggcaggaagtggggtctgaagggctggaagttgctgcccttcgatttctctatgctctctcccacccctgtggctcttcgcccttggggattccttgccaccaccgctaccaccaccacctcaccccgtgtatcttctgaaagagaagtaggtctttcctcctgcctcaggcacaagccctcctggttcagggtcagaagctcagcaccttgccttctccatgatcccaaagcacaattggtgagtgggggagaggaccccctctccctgactccccaccctctagatcaggcagaatggctggcctgtgctgcgtctgcacacaggaagtcaccttcctttaatatattggcttgaggcctgcctgccctccccatacccagaaaatctggatctcccttgagcagttttctataaagtctgcaataatctcagatactctactc

SEQ ID NO: 88178 - DNA, 1493 bp, Homo sapiens
  misc_feature (4)..(4): n is a, c, g, or t
  misc_feature (7)..(7): n is a, c, g, or t
ggcncgnggctgagcggcgcccccgggctcggggcttcccttgcctggcccgaagccgtggagatgagacacccgcgagccccgagctctgagaccttcccctgactcggaggcgctaagccgtaccctctcgttcccgcctccgagagctcccaccgtcaaagacccagagatagccggtccgaatccagaaaccccgcctgcccaccctagtttccgaaacctccctcctgaaccactgaaagtccgttccccgtctcggagctcacacagagaatctgtccttcaaggccaaagctctgagacttgcccccagcaccctgtgcttggagctccgacacccgagactgcactgacctccctcgccagctcggagccctcagtcccctccggggcttgagggcccttccatcccattctggactcgaagcacagcacccccatcagaatggttttgtggattttgagccctttgtcccatcccagagctcagagccctccatcctgcatggaggcccaaccctggggctctgaggattgggcaccctcccctcatctaagaatatatttcatacccctgcccccccttcacccacccccgcctctggctcaggcccttcccttcctcggctcaggcatggggctcagctcctagtctgtccctcccatcccagggacaagcacagcccatctagccttagtgtggagccaactctcagcctttcccaccagggcgctgacctcccgatactcagtgctggtccccagtctcagactctcagctcttcaccccgatctgactttcgtcctcctgcccaagcctttggctcttgaccccccccccatacccaatgctggcactcagcacccacccctgccattcactagtcaaggtccagtgaggaatccgtccctgggatgtcctcatccccttttcgtcccaggacgagctcttcagtcctgccggataggtgcaggtgccatgcacccctagtgcatactggcagatccttgtagggaaggagagagtcttgggtgtgtgaaagggatagtggggcatcgtggcctcagagaggggcaggaagtggggtctgaagggctggaagttgctgcccttcgatttctctatgctctctcccacccctgtggctcttcgcccttggggattccttgccaccaccgctaccaccaccacctcaccccgtgtatcttctgaaagagaagtaggtctttcctcctgcctcaggcacaagccctcctggttcagggtcagaagctcagcaccttgccttctccatgatcccaaagcacaattggtgagtgggggagaggacccccgcatgcctatcaccccgccctgtgatccagaccatactggctgactcagaccattctctactcaagatgccacctatcttctgggtgtgggggcgagcgtgtgctgccccagctacttgcgaagctgaagcaggaaaattgcgtgaacctttgac

SEQ ID NO: 88179 - DNA, 422 bp, Homo sapiens
agagcttagcatgctgttggttcatgtttttatgtgtttatttcacattgacttttgccgtgagctttgagggagacaacaccatcacatatgtgtaaattgtaaaagaattgggagagaatagctttgggagatcattttcttactggccatgatgaagaaagctgtatcgtaggaaaattactaggtaattttactcacttgataaagttaatttgcaaggtatcattcgattggtagagttaccaaaatgagagttaaagaaacagaaatatggtttcagtttatggtgcattcttatctttttcactgagtctatttctgtctggttgcttcacttagtactccaaccagacaagagaagacaactatgctagtgttttagaaatggacagaatgggtgatttaagtagagcctggtt

SEQ ID NO: 88180 - DNA, 398 bp, Homo sapiens
atggattggaagaatcaatattgttaaaatagccatgctaccccaaagtgatctacagattcagtgaaatttctatcaaaattcctaatggcattttttacagaaatagaaaacactattctaaaaatttccctaaatagccaaagcaactttaatcaagagcaaaactggaagtatcataagtcctaatttgatttttgtcaaattatgccattaaatatgacatttgattaatgtcaaaaaatgccattaaaatccatttcaaagctacagtaatcaaaacagtatagtcttggaataaacccaggcatataggccaattaaataaaatagagatctcagaaataaaaccataaagttgtggttaacttcaacaaggctgccaagaatacacaagg

SEQ ID NO: 88181 - DNA, 650 bp, Homo sapiens
  misc_feature (598)..(598): n is a, c, g, or t
gagcatgggatgtgtttacatttgtttgtgttgtctataatttctttcaccagtattttgcagttttccttgtagaggtcttgcacctccttggttaggtatattcctaagtattttctttttttttttttttttttttgcagctattgtaaagggggtggagttcttgattttattctccatttgatcactgttggtatatagaacagctacagatttgtgtatattaatcttctatctgtaaactttgctgaatgcttttatcaattctaggagctttctggaggaatctttagggttttcaaggtaaatggtcatatcatcagcaaacagtgacagtttgacttcctctttactgatgatgccctttatttcttttctttgtctgattgctctggctatgacttccagtactatgttgaagaggagtggtgagagtgggcatccttgtcttgttccagtgctcagagggaatgctttcaacttttcctcagtcagtattatgttggctgtgggtttgtcatagatggcttttattacattgaggtatgtcccttgtacgccaattttaattgtttcgtggaggagccaagatggncgaataggaacagctccggtctacagctcccagcgcgagcgacgcagaagac

SEQ ID NO: 88182 - DNA, 411 bp, Homo sapiens
tttaatttagacattgttgagagatttcatgtcctaaaaaatatttaaattttacatattttaaagttcagtgtttgttaacaggacaaatcccaatctgctgaaatatgggaaaaattgaattttggaaacaaggaccaaaatgtcaaatttaggaaattgatgggtattaagggtgagtttcacatgtgccaggggatctttgtattagctattagccctcctgcactgttcttccctcattttcttagttctggtctttactcaggtgtcagcgtttttgagttctttcccaccaccttttgtgaaataacaagcaatcccattctgaaacatttccatctcccctacccactgtcctccctacacacacacttggagagagagagagagacggggttttgctctgct

SEQ ID NO: 88183 - DNA, 1930 bp, Homo sapiens
ggcgccgggcctcctcgccttgtgccatccgggtctctcgcgcgagcgatttagtctgaggcgaagcttcggagcggccggtactgttgaaagcgacaagtggaggcgccgctctagcggccgggactctgaactatggcggctagtgatacagagcgagatggactagccccagaaaagacatcaccagatagagataagaaaaaagagcagtcagaagtatctgtttctcctagagcttcaaaacatcattattcaagatcacgatcaaggtcaagagaaagaaaacgaaagtcagataatgaaggaagaaaacacaggagccggagcagaagcaaagagggaagaagacatgaatccaaagataaatcctctaagaaacataagtctgaggaacataatgacaaagaacattcttctgataaaggaagagagcgactaaattcatctgaaaatggtgaggacaggcacaaacgcaaagaaagaaagtcatcaagaggcagaagtcactcaagatctaggtctcgtgaaagacgccatcgtagtagaagcagggagcggaagaagtctcgatccaggagtagggagcggaagaaatcgagatccagaagcagagagaggaagaaatcgagatccagaagcagggaaagaaaacggcggatcaggtctcgttcccgctcaagatcaagacacaggcataggactagaagcaggagtaggacaaggagtaggagtcgagatagaaagaagagaattgaaaagccgagaagatttagcagaagtttaagccggactccaagtccacctcccttcagaggcagaaacacagcaatggatgcacaggaagctttagctagaaggttggaaagggcaaagaaattacaagaacagcgagaaaaggaaatggttgaaaaacaaaaacaacaagaaatagctgcagcagctgcagctactggaggttctgttctcaatgttgctgccctgttggcatcaggaacacaagtaacacctcagatagccatggcagctcagatggcagccctgcaagctaaagctttggcagagacaggaatagctgttcctagctactataacccagccgctgttaatccaatgaaatttgctgaacaagagaaaaaaaggaaaatgctttggcagggcaagaaagaaggggacaaatcccaatctgctgaaatatgggaaaaattgaattttggaaacaaggaccaaaatgtcaaatttaggaaattgatgggtattaagagtgaagatgaagctggatgtagctcagttgatgaagaaagttacaagactctgaagcagcaggaagaagtatttcgaaatttagatgctcagtatgaaatggcaagatcacaaacccacacacaaagaggaatgggtttgggtttcacatcttcaatgcgaggaatggatgcagtttgaaaatgatcacacttgtaaagtttgggacttatagacttcttgttctgatgtcacgtccttgttcaccaaacagctagcactctagcttgcatgggtgttgcattgactttaatttattgaaaaatacaaatttttgtaaatatcagatcagtgatactggtgttagtgttgtaatcaggttaaacccacttccattaaacttgacaggactatagaaggataatattttttagttcatgaattctacttttcaaatatataaaagctgcaggtggggataaaatctcatacatggattttttcgtgtccgctgtcttgtgtacttttgtacttaaccttgtacagttattttcatctcttgaaacatgaaagaaatgttatgtagatgttctttagaagatctggccatttggtacataatccagcacagataagctgggtggtaatgataataaaaatggttttctcaaaactggtgttaatttaa

SEQ ID NO: 88184 - DNA, 2030 bp, Homo sapiens
ggcgccgggcctcctcgccttgtgccatccgggtctctcgcgcgagcgatttagtctgaggcgaagcttcggagcggccggtactgttgaaagcgacaagtggaggcgccgctctagcggccgggactctgaactatggcggctagtgatacagagcgagatggactagccccagaaaagacatcaccagatagagataagaaaaaagagcagtcagaagtatctgtttctcctagagcttcaaaacatcattattcaagatcacgatcaaggtcaagagaaagaaaacgaaagtcagataatgaaggaagaaaacacaggagccggagcagaagcaaagagcgtgcttatgcgcgaagagactgaactgaagacgctgcagactcagatagcaaaataataagcctacttcatgataagaaccaacttcttcttaaaacagggaagaagacatgaatccaaagataaatcctctaagaaacataagtctgaggaacataatgacaaagaacattcttctgataaaggaagagagcgactaaattcatctgaaaatggtgaggacaggcacaaacgcaaagaaagaaagtcatcaagaggcagaagtcactcaagatctaggtctcgtgaaagacgccatcgtagtagaagcagggagcggaagaagtctcgatccaggagtagggagcggaagaaatcgagatccagaagcagagagaggaagaaatcgagatccagaagcagggaaagaaaacggcggatcaggtctcgttcccgctcaagatcaagacacaggcataggactagaagcaggagtaggacaaggagtaggagtcgagatagaaagaagagaattgaaaagccgagaagatttagcagaagtttaagccggactccaagtccacctcccttcagaggcagaaacacagcaatggatgcacaggaagctttagctagaaggttggaaagggcaaagaaattacaagaacagcgagaaaaggaaatggttgaaaaacaaaaacaacaagaaatagctgcagcagctgcagctactggaggttctgttctcaatgttgctgccctgttggcatcaggaacacaagtaacacctcagatagccatggcagctcagatggcagccctgcaagctaaagctttggcagagacaggaatagctgttcctagctactataacccagccgctgttaatccaatgaaatttgctgaacaagagaaaaaaaggaaaatgctttggcagggcaagaaagaaggggacaaatcccaatctgctgaaatatgggaaaaattgaattttggaaacaaggaccaaaatgtcaaatttaggaaattgatgggtattaagagtgaagatgaagctggatgtagctcagttgatgaagaaagttacaagactctgaagcagcaggaagaagtatttcgaaatttagatgctcagtatgaaatggcaagatcacaaacccacacacaaagaggaatgggtttgggtttcacatcttcaatgcgaggaatggatgcagtttgaaaatgatcacacttgtaaagtttgggacttatagacttcttgttctgatgtcacgtccttgttcaccaaacagctagcactctagcttgcatgggtgttgcattgactttaatttattgaaaaatacaaatttttgtaaatatcagatcagtgatactggtgttagtgttgtaatcaggttaaacccacttccattaaacttgacaggactatagaaggataatattttttagttcatgaattctacttttcaaatatataaaagctgcaggtggggataaaatctcatacatggattttttcgtgtccgctgtcttgtgtacttttgtacttaaccttgtacagttattttcatctcttgaaacatgaaagaaatgttatgtagatgttctttagaagatctggccatttggtacataatccagcacagataagctgggtggtaatgataataaaaatggttttctcaaaactggtgttaatttaa

SEQ ID NO: 88185 - DNA, 2008 bp, Homo sapiens
ggcgccgggcctcctcgccttgtgccatccgggtctctcgcgcgagcgatttagtctgaggcgaagcttcggagcggccggtactgttgaaagcgacaagtggaggcgccgctctagcggccgggactctgaactatggcggctagtgatacagagcgagatggactagccccagaaaagacatcaccagatagagataagaaaaaagagcagtcagaagtatctgtttctcctagagcttcaaaacatcattattcaagatcacgatcaaggtcaagagaaagaaaacgaaagtcagataatgaaggaagaaaacacaggagccggagcagaagcaaagagcgtgcttatgcgcgaagagactgaactgaagacgctgcagactcagatagcaaaataataagcctacttcatgataagggaagaagacatgaatccaaagataaatcctctaagaaacataagtctgaggaacataatgacaaagaacattcttctgataaaggaagagagcgactaaattcatctgaaaatggtgaggacaggcacaaacgcaaagaaagaaagtcatcaagaggcagaagtcactcaagatctaggtctcgtgaaagacgccatcgtagtagaagcagggagcggaagaagtctcgatccaggagtagggagcggaagaaatcgagatccagaagcagagagaggaagaaatcgagatccagaagcagggaaagaaaacggcggatcaggtctcgttcccgctcaagatcaagacacaggcataggactagaagcaggagtaggacaaggagtaggagtcgagatagaaagaagagaattgaaaagccgagaagatttagcagaagtttaagccggactccaagtccacctcccttcagaggcagaaacacagcaatggatgcacaggaagctttagctagaaggttggaaagggcaaagaaattacaagaacagcgagaaaaggaaatggttgaaaaacaaaaacaacaagaaatagctgcagcagctgcagctactggaggttctgttctcaatgttgctgccctgttggcatcaggaacacaagtaacacctcagatagccatggcagctcagatggcagccctgcaagctaaagctttggcagagacaggaatagctgttcctagctactataacccagccgctgttaatccaatgaaatttgctgaacaagagaaaaaaaggaaaatgctttggcagggcaagaaagaaggggacaaatcccaatctgctgaaatatgggaaaaattgaattttggaaacaaggaccaaaatgtcaaatttaggaaattgatgggtattaagagtgaagatgaagctggatgtagctcagttgatgaagaaagttacaagactctgaagcagcaggaagaagtatttcgaaatttagatgctcagtatgaaatggcaagatcacaaacccacacacaaagaggaatgggtttgggtttcacatcttcaatgcgaggaatggatgcagtttgaaaatgatcacacttgtaaagtttgggacttatagacttcttgttctgatgtcacgtccttgttcaccaaacagctagcactctagcttgcatgggtgttgcattgactttaatttattgaaaaatacaaatttttgtaaatatcagatcagtgatactggtgttagtgttgtaatcaggttaaacccacttccattaaacttgacaggactatagaaggataatattttttagttcatgaattctacttttcaaatatataaaagctgcaggtggggataaaatctcatacatggattttttcgtgtccgctgtcttgtgtacttttgtacttaaccttgtacagttattttcatctcttgaaacatgaaagaaatgttatgtagatgttctttagaagatctggccatttggtacataatccagcacagataagctgggtggtaatgataataaaaatggttttctcaaaactggtgttaatttaa

SEQ ID NO: 88186 - DNA, 1752 bp, Homo sapiens
atagtaattacatctgcaacatttgggtgatgtgaaactagatcttttttttatttgccacacactcctaaggttactaatgttgcatcacaacatttttgtctactgatacccatactaactctctttgttgcactattagaaccaacttcttcttaaaacagggaagaagacatgaatccaaagataaatcctctaagaaacataagtctgaggaacataatgacaaagaacattcttctgataaaggaagagagcgactaaattcatctgaaaatggtgaggacaggcacaaacgcaaagaaagaaagtcatcaagaggcagaagtcactcaagatctaggtctcgtgaaagacgccatcgtagtagaagcagggagcggaagaagtctcgatccaggagtagggagcggaagaaatcgagatccagaagcagagagaggaagaaatcgagatccagaagcagggaaagaaaacggcggatcaggtctcgttcccgctcaagatcaagacacaggcataggactagaagcaggagtaggacaaggagtaggagtcgagatagaaagaagagaattgaaaagccgagaagatttagcagaagtttaagccggactccaagtccacctcccttcagaggcagaaacacagcaatggatgcacaggaagctttagctagaaggttggaaagggcaaagaaattacaagaacagcgagaaaaggaaatggttgaaaaacaaaaacaacaagaaatagctgcagcagctgcagctactggaggttctgttctcaatgttgctgccctgttggcatcaggaacacaagtaacacctcagatagccatggcagctcagatggcagccctgcaagctaaagctttggcagagacaggaatagctgttcctagctactataacccagccgctgttaatccaatgaaatttgctgaacaagagaaaaaaaggaaaatgctttggcagggcaagaaagaaggggacaaatcccaatctgctgaaatatgggaaaaattgaattttggaaacaaggaccaaaatgtcaaatttaggaaattgatgggtattaagagtgaagatgaagctggatgtagctcagttgatgaagaaagttacaagactctgaagcagcaggaagaagtatttcgaaatttagatgctcagtatgaaatggcaagatcacaaacccacacacaaagaggaatgggtttgggtttcacatcttcaatgcgaggaatggatgcagtttgaaaatgatcacacttgtaaagtttgggacttatagacttcttgttctgatgtcacgtccttgttcaccaaacagctagcactctagcttgcatgggtgttgcattgactttaatttattgaaaaatacaaatttttgtaaatatcagatcagtgatactggtgttagtgttgtaatcaggttaaacccacttccattaaacttgacaggactatagaaggataatattttttagttcatgaattctacttttcaaatatataaaagctgcaggtggggataaaatctcatacatggattttttcgtgtccgctgtcttgtgtacttttgtacttaaccttgtacagttattttcatctcttgaaacatgaaagaaatgttatgtagatgttctttagaagatctggccatttggtacataatccagcacagataagctgggtggtaatgataataaaaatggttttctcaaaactggtgttaatttaa

SEQ ID NO: 88187 - DNA, 2244 bp, Homo sapiens
ggcgccgggcctcctcgccttgtgccatccgggtctctcgcgcgagcgatttagtctgaggcgaagcttcggagcggccggtactgttgaaagcgacaagtggaggcgccgctctagcggccgggactctgaactatggcggctagtgatacagagcgagatggactagccccagaaaagacatcaccagatagagataagaaaaaagagcagtcagaagtatctgtttctcctagagcttcaaaacatcattattcaagatcacgatcaaggtcaagagaaagaaaacgaaagtcagataatgaaggaagaaaacacaggagccggagcagaagcaaagagggaagaagacatgaatccaaagataaatcctctaagaaacataagtctgaggaacataatgacaaagaacattcttctgataaaggaagagagcgactaaattcatctgaaaatggtgaggacaggcacaaacgcaaagaaagaaagtcatcaagaggcagaagtcactcaagatctaggtctcgtgaaagacgccatcgtagtagaagcagggagcggaagaagtctcgatccaggagtagggagcggaagaaatcgagatccagaagcagagagaggaagaaatcgagatccagaagcagggaaagaaaacggcggatcaggtctcgttcccgctcaagatcaagacacaggcataggactagaagcaggagtaggacaaggagtaggagtcgagatagaaagaagagaattgaaaagccgagaagatttagcagaagtttaagccggactccaagtccacctcccttcagaggcagaaacacagcaatggatgcacaggaagctttagctagaaggttggaaagggcaaagaaattacaagaacagcgagaaaaggaaatggttgaaaaacaaaaacaacaagaaatagctgcagcagctgcagctactggaggttctgttctcaatgttgctgccctgttggcatcaggaacacaagtaacacctcagatagccatggcagctcagatggcagccctgcaagctaaagctttggcagagacaggaatagctgttcctagctactataacccagccgctgttaatccaatgaaatttgctgaacaagagaaaaaaaggaaaatgctttggcagggcaagaaagaaggggacaaatcccaatctgctgaaatatgggaaaaattgaattttggaaacaaggaccaaaatgtcaaatttaggaaattgatgggtattaagagtgaagatgaagctggatgtagctcagttgatgaagaaagttacaagactctgaagcagcaggaagaagtatttcgaaatttagatgctcagtatgaaatggcaagatcacaaacccacacacaaagaggaatgggtttgggtttcacatcttcaatgcgaggaatggatgcagtttgaaaatgatcacacttgtaaagtttgggacttatagacttcttgttctgatgtcacgtccttgttcaccaaacagctagcactctagcttgcatgggtgttgcattgactttaatttattgaaaaatacaaatttttgtaaatatcagatcagtgatactggtgttagtgttgtaatcaggttaaacccacttccattaaacttgacaggactatagaaggataatattttttagttcatgaattctacttttcaaatatataaaagctgcaggtggggataaaatctcatacatggattttttcgtgtccgctgtcttgtgtacttttgtacttaaccttgtacagttattttcatctcttgaaacatgaaagaaatgttatgtagatgttctttagaagatctggccatttggtacataatccagcacagataagctgggtggtaatgataataaaaatggttttctcaaaactggtgttaatttaagttacctgggatgtttctttgaatttgttttatagtttctgtagcatttggcaattgctgttagaaaacactagctagaaatcccctccccaccaccctttttaaggccagttaactatactacagtcaataccgtggtgagcaaaaatgtaaaaggtggaaggagaaaacttattaaaatagtatgttttcctattataagggacagacttggtattcagtatttgtcaaatattacatgtgttattcaggagatagattaatgcattaaagggatgtaagcacttttattttaataaagtgccttataacaa

SEQ ID NO: 88188 - DNA, 2328 bp, Homo sapiens
ggcgccgggcctcctcgccttgtgccatccgggtctctcgcgcgagcgatttagtctgaggcgaagcttcggagcggccggtactgttgaaagcgacaagtggaggcgccgctctagcggccgggactctgaactatggcggctagtgatacagagcgagatggactagccccagaaaagacatcaccagatagagataagaaaaaagagcagtcagaagtatctgtttctcctagagcttcaaaacatcattattcaagatcacgatcaaggtcaagagaaagaaaacgaaagtcagataatgaaggaagaaaacacaggagccggagcagaagcaaagagggaagaagacatgaatccaaagataaatcctctaagaaacataagtctgaggaacataatgacaaagaacattcttctgataaaggaagagagcgactaaattcatctgaaaatggtgaggacaggcacaaacgcaaagaaagaaagtcatcaagaggcagaagtcactcaagatctaggtctcgtgaaagacgccatcgtagtagaagcagggagcggaagaagtctcgatccaggagtagggagcggaagaaatcgagatccagaagcagagagaggaagaaatcgagatccagaagcagggaaagaaaacggcggatcaggtctcgttcccgctcaagatcaagacacaggcataggactagaagcaggagtaggacaaggagtaggagtcgagatagaaagaagagaattgaaaagccgagaagatttagcagaagtttaagccggactccaagtccacctcccttcagaggcagaaacacagcaatggatgcacaggaagctttagctagaaggttggaaagggcaaagaaattacaagaacagcgagaaaaggaaatggttgaaaaacaaaaacaacaagaaatagctgcagcagctgcagctactggaggttctgttctcaatgttgctgccctgttggcatcaggaacacaagtaacacctcagatagccatggcagctcagatggcagccctgcaagctaaagctttggcagagacaggaatagctgttcctagctactataacccagccgctgttaatccaatgaaatttgctgaacaagagaaaaaaaggaaaatgctttggcagggcaagaaagaaggggacaaatcccaatctgctgaaatatgggaaaaattgaattttggaaacaaggaccaaaatgtcaaatttaggaaattgatgggtattaagagtgaagatgaagctggatgtagctcagttgatgaagaaagttacaagactctgaagcagcaggaagaagtatttcgaaatttagatgctcagtatgaaatggcaagatcacaaacccacacacaaagaggaatgggtttgggtttcacatcttcaatgcgaggaatggatgcagtttgaaaatgatcacacttgtaaagtttgggacttatagacttcttgttctgatgtcacgtccttgttcaccaaacagctagcactctagcttgcatgggtgttgcattgactttaatttattgaaaaatacaaatttttgtaaatatcagatcagtgatactggtgttagtgttgtaatcaggttaaacccacttccattaaacttgacaggactatagaaggataatattttttagttcatgaattctacttttcaaatatataaaagctgcaggtggggataaaatctcatacatggattttttcgtgtccgctgtcttgtgtacttttgtacttaaccttgtacagttattttcatctcttgaaacatgaaagaaatgttatgtagatgttctttagaagatctggccatttggtacataatccagcacagataagctgggtggtaatgataataaaaatggttttctcaaaactggtgttaatttaagttacctgggatgtttctttgaatttgttttatagtttctgtagcatttggcaattgctgttagaaaacactagctagaaatcccctccccaccaccctttttaaggccagttaactatactacagtcaataccgtggtgagcaaaaatgtaaaaggtggaaggagaaaacttattaaaatagtatgttttcctattataagggacagacttggtattcagtatttgtcaaatattacatgtgttattcaggagatagattaatgcattaaagggatgtaagcacttttattttaataaagtgccttataacaagttctttgcatgctttttgctcattatccctttgaaggcttctccagcatagactataaaatattaaaatattagaaatttttt

SEQ ID NO: 88189 - DNA, 2038 bp, Homo sapiens
ggcgccgggcctcctcgccttgtgccatccgggtctctcgcgcgagcgatttagtctgaggcgaagcttcggagcggccggtactgttgaaagcgacaagtggaggcgccgctctagcggccgggactctgaactatggcggctagtgatacagagcgagatggactagccccagaaaagacatcaccagatagagataagaaaaaagagcagtcagaagtatctgtttctcctagagcttcaaaacatcattattcaagatcacgatcaaggtcaagagaaagaaaacgaaagtcagataatgaaggaagaaaacacaggagccggagcagaagcaaagagggaagaagacatgaatccaaagataaatcctctaagaaacataagtctgaggaacataatgacaaagaacattcttctgataaaggaagagagcgactaaattcatctgaaaatggtgaggacaggcacaaacgcaaagaaagaaagtcatcaagaggcagaagtcactcaagatctaggtctcgtgaaagacgccatcgtagtagaagcagggagcggaagaagtctcgatccaggagtagggagcggaagaaatcgagatccagaagcagagagaggaagaaatcgagatccagaagcagggaaagaaaacggcggatcaggtctcgttcccgctcaagatcaagacacaggcataggactagaagcaggagtaggacaaggagtaggagtcgagatagaaagaagagaattgaaaagccgagaagatttagcagaagtttaagccggactccaagtccacctcccttcagaggcagaaacacagcaatggatgcacaggaagctttagctagaagagaagacggggtctccctatgttgcccaggctggtaacacagtgtaacctgatgtgcttccctgggaacccagcctgacagaaactgcagctgaacagcagcaaaagtgttggaaagggcaaagaaattacaagaacagcgagaaaaggaaatggttgaaaaacaaaaacaacaagaaatagctgcagcagctgcagctactggaggttctgttctcaatgttgctgccctgttggcatcaggaacacaagtaacacctcagatagccatggcagctcagatggcagccctgcaagctaaagctttggcagagacaggaatagctgttcctagctactataacccagccgctgttaatccaatgaaatttgctgaacaagagaaaaaaaggaaaatgctttggcagggcaagaaagaaggggacaaatcccaatctgctgaaatatgggaaaaattgaattttggaaacaaggaccaaaatgtcaaatttaggaaattgatgggtattaagagtgaagatgaagctggatgtagctcagttgatgaagaaagttacaagactctgaagcagcaggaagaagtatttcgaaatttagatgctcagtatgaaatggcaagatcacaaacccacacacaaagaggaatgggtttgggtttcacatcttcaatgcgaggaatggatgcagtttgaaaatgatcacacttgtaaagtttgggacttatagacttcttgttctgatgtcacgtccttgttcaccaaacagctagcactctagcttgcatgggtgttgcattgactttaatttattgaaaaatacaaatttttgtaaatatcagatcagtgatactggtgttagtgttgtaatcaggttaaacccacttccattaaacttgacaggactatagaaggataatattttttagttcatgaattctacttttcaaatatataaaagctgcaggtggggataaaatctcatacatggattttttcgtgtccgctgtcttgtgtacttttgtacttaaccttgtacagttattttcatctcttgaaacatgaaagaaatgttatgtagatgttctttagaagatctggccatttggtacataatccagcacagataagctgggtggtaatgataataaaaatggttttctcaaaactggtgttaatttaa

SEQ ID NO: 88190 - DNA, 1965 bp, Homo sapiens
  misc_feature (1938)..(1938): n is a, c, g, or t
ggcgccgggcctcctcgccttgtgccatccgggtctctcgcgcgagcgatttagtctgaggcgaagcttcggagcggccggtactgttgaaagcgacaagtggaggcgccgctctagcggccgggactctgaactatggcggctagtgatacagagcgagatggactagccccagaaaagacatcaccagatagagataagaaaaaagagcagtcagaagtatctgtttctcctagagcttcaaaacatcattattcaagatcacgatcaaggtcaagagaaagaaaacgaaagtcagataatgaaggaagaaaacacaggagccggagcagaagcaaagagggaagaagacatgaatccaaagataaatcctctaagaaacataagtctgaggaacataatgacaaagaacattcttctgataaaggaagagagcgactaaattcatctgaaaatggtgaggacaggcacaaacgcaaagaaagaaagtcatcaagaggcagaagtcactcaagatctaggtctcgtgaaagacgccatcgtagtagaagcagggagcggaagaagtctcgatccaggagtagggagcggaagaaatcgagatccagaagcagagagaggaagaaatcgagatccagaagcagggaaagaaaacggcggatcaggtctcgttcccgctcaagatcaagacacaggcataggactagaagcaggagtaggacaaggagtaggagtcgagatagaaagaagagaattgaaaagccgagaagatttagcagaagtttaagccggactccaagtccacctcccttcagaggcagaaacacagcaatggatgcacaggaagctttagctagaaggttggaaagggcaaagaaattacaagaacagcgagaaaaggaaatggttgaaaaacaaaaacaacaagaaatagctgcagcagctgcagctactggaggttctgttctcaatgttgctgccctgttggcatcaggaacacaagtaacacctcagatagccatggcagctcagatggcagccctgcaagctaaagctttggcagagacaggaatagctgttcctagctactataacccagccgctgttaatccaatgaaatttgctgaacaagagaaaaaaaggaaaatgctttggcagggcaagaaagaaggggacaaatcccaatctgctgaaatatgggaaaaattgaattttggaaacaaggaccaaaatgtcaaatttaggaaattgatgggtattaagagtgaagatgaagctggatgtagctcagttgatgaagaaagttacaagactctgaagcagcaggaagaagtatttcgaaatttagatgctcagtatgaaatggcaagatcacaaacccacacacaaagaggaatgggtttgggtttcacatcttcaatgcgaggaatggatgcagtttgaaaatgatcacacttgtaaagtttgggacttatagacttcttgttctgatgtcacgtccttgttcaccaaacagctagcactctagcttgcatgggtgttgcattgactttaatttattgaaaaatacaaatttttgtaaatatcagatcagtgatactggtgttagtgttgtaatcaggttaaacccacttccattaaacttgacaggactatagaaggataatattttttagttcatgaattctacttttcaaatatataaaagctgcaggtggggataaaatctcatacatggattttttcgtgtccgctgtcttgtgtacttttgtacttaaccttgtacagttattttcatctcttgaaacatgaaagaaatgttatgtagatgttctttagaagatctggccatttggtacataatccagcacagataagctgggtggtaatgataataaaaatggttttctcaaaactggtgttaatttaaaaaaaaanataaaatgggcctcgttgggctcagcg

SEQ ID NO: 88191 - DNA, 1302 bp, Homo sapiens
ggaggcaatcacttgaacctgggaggtggaggttacagtgagctgagatcgcaccactgcactcctgcctgaacaacagagtgagactctgtctcaataaaaattcaggagatagaaagaagagaattgaaaagccgagaagatttagcagaagtttaagccggactccaagtccacctcccttcagaggcagaaacacagcaatggatgcacaggaagctttagctagaaggttggaaagggcaaagaaattacaagaacagcgagaaaaggaaatggttgaaaaacaaaaacaacaagaaatagctgcagcagctgcagctactggaggttctgttctcaatgttgctgccctgttggcatcaggaacacaagtaacacctcagatagccatggcagctcagatggcagccctgcaagctaaagctttggcagagacaggaatagctgttcctagctactataacccagccgctgttaatccaatgaaatttgctgaacaagagaaaaaaaggaaaatgctttggcagggcaagaaagaaggggacaaatcccaatctgctgaaatatgggaaaaattgaattttggaaacaaggaccaaaatgtcaaatttaggaaattgatgggtattaagagtgaagatgaagctggatgtagctcagttgatgaagaaagttacaagactctgaagcagcaggaagaagtatttcgaaatttagatgctcagtatgaaatggcaagatcacaaacccacacacaaagaggaatgggtttgggtttcacatcttcaatgcgaggaatggatgcagtttgaaaatgatcacacttgtaaagtttgggacttatagacttcttgttctgatgtcacgtccttgttcaccaaacagctagcactctagcttgcatgggtgttgcattgactttaatttattgaaaaatacaaatttttgtaaatatcagatcagtgatactggtgttagtgttgtaatcaggttaaacccacttccattaaacttgacaggactatagaaggataatattttttagttcatgaattctacttttcaaatatataaaagctgcaggtggggataaaatctcatacatggattttttcgtgtccgctgtcttgtgtacttttgtacttaaccttgtacagttattttcatctcttgaaacatgaaagaaatgttatgtagatgttctttagaagatctggccatttggtacataatccagcacagataagctgggtggtaatgataataaaaatggttttctcaaaactggtgttaatttaa

SEQ ID NO: 88192 - DNA, 1850 bp, Homo sapiens
ggcgccgggcctcctcgccttgtgccatccgggtctctcgcgcgagcgatttagtctgaggcgaagcttcggagcggccggtactgttgaaagcgacaagtggaggcgccgctctagcggccgggactctgaactatggcggctagtgatacagagcgagatggactagccccagaaaagacatcaccagatagagataagaaaaaagagcagtcagaagtatctgtttctcctagagcttcaaaacatcattattcaagatcacgatcaaggtcaagagaaagaaaacgaaagtcagataatgaaggaagaaaacacaggagccggagcagaagcaaagagggaagaagacatgaatccaaagataaatcctctaagaaacataagtctgaggaacataatgacaaagaacattcttctgataaaggaagagagcgactaaattcatctgaaaatggtgaggacaggcacaaacgcaaagaaagaaagtcatcaagaggcagaagtcactcaagatctaggtctcgtgaaagacgccatcgtagtagaagcagggagcggaagaagtctcgatccaggagtagggagcggaagaaatcgagatccagaagcagagagaggaagaaatcgagatccagaagcagggaaagaaaacggcggatcaggtctcgttcccgctcaagatcaagacacaggcataggactagaagcaggagtaggacaaggagtaggagtcgagatagaaagaagagaattgaaaagccgagaagatttagcagaagtttaagccggactccaagtccacctcccttcagaggcagaaacacagcaatggatgcacaggaagctttagctagaagcagctgcagctactggaggttctgttctcaatgttgctgccctgttggcatcaggaacacaagtaacacctcagatagccatggcagctcagatggcagccctgcaagctaaagctttggcagagacaggaatagctgttcctagctactataacccagccgctgttaatccaatgaaatttgctgaacaagagaaaaaaaggaaaatgctttggcagggcaagaaagaaggggacaaatcccaatctgctgaaatatgggaaaaattgaattttggaaacaaggaccaaaatgtcaaatttaggaaattgatgggtattaagagtgaagatgaagctggatgtagctcagttgatgaagaaagttacaagactctgaagcagcaggaagaagtatttcgaaatttagatgctcagtatgaaatggcaagatcacaaacccacacacaaagaggaatgggtttgggtttcacatcttcaatgcgaggaatggatgcagtttgaaaatgatcacacttgtaaagtttgggacttatagacttcttgttctgatgtcacgtccttgttcaccaaacagctagcactctagcttgcatgggtgttgcattgactttaatttattgaaaaatacaaatttttgtaaatatcagatcagtgatactggtgttagtgttgtaatcaggttaaacccacttccattaaacttgacaggactatagaaggataatattttttagttcatgaattctacttttcaaatatataaaagctgcaggtggggataaaatctcatacatggattttttcgtgtccgctgtcttgtgtacttttgtacttaaccttgtacagttattttcatctcttgaaacatgaaagaaatgttatgtagatgttctttagaagatctggccatttggtacataatccagcacagataagctgggtggtaatgataataaaaatggttttctcaaaactggtgttaatttaa

SEQ ID NO: 88193 - DNA, 1202 bp, Homo sapiens
atcggtggagggatgctaaaaatttaaaattttatggaagttggcttgtctctgtacatgcacatatagagagatatatacataatggttttatattgtgttattttaaattcattgaaattaattttgcaggttggaaagggcaaagaaattacaagaacagcgagaaaaggaaatggttgaaaaacaaaaacaacaagaaatagctgcagcagctgcagctactggaggttctgttctcaatgttgctgccctgttggcatcaggaacacaagtaacacctcagatagccatggcagctcagatggcagccctgcaagctaaagctttggcagagacaggaatagctgttcctagctactataacccagccgctgttaatccaatgaaatttgctgaacaagagaaaaaaaggaaaatgctttggcagggcaagaaagaaggggacaaatcccaatctgctgaaatatgggaaaaattgaattttggaaacaaggaccaaaatgtcaaatttaggaaattgatgggtattaagagtgaagatgaagctggatgtagctcagttgatgaagaaagttacaagactctgaagcagcaggaagaagtatttcgaaatttagatgctcagtatgaaatggcaagatcacaaacccacacacaaagaggaatgggtttgggtttcacatcttcaatgcgaggaatggatgcagtttgaaaatgatcacacttgtaaagtttgggacttatagacttcttgttctgatgtcacgtccttgttcaccaaacagctagcactctagcttgcatgggtgttgcattgactttaatttattgaaaaatacaaatttttgtaaatatcagatcagtgatactggtgttagtgttgtaatcaggttaaacccacttccattaaacttgacaggactatagaaggataatattttttagttcatgaattctacttttcaaatatataaaagctgcaggtggggataaaatctcatacatggattttttcgtgtccgctgtcttgtgtacttttgtacttaaccttgtacagttattttcatctcttgaaacatgaaagaaatgttatgtagatgttctttagaagatctggccatttggtacataatccagcacagataagctgggtggtaatgataataaaaatggttttctcaaaactggtgttaatttaa

SEQ ID NO: 88194 - DNA, 1077 bp, Homo sapiens
ggtaattctcgaggatcccaagatcacctcaagaacagcgagaaaaggaaatggttgaaaaacaaaaacaacaagaaatagctgcagcagctgcagctactggaggttctgttctcaatgttgctgccctgttggcatcaggaacacaagtaacacctcagatagccatggcagctcagatggcagccctgcaagctaaagctttggcagagacaggaatagctgttcctagctactataacccagccgctgttaatccaatgaaatttgctgaacaagagaaaaaaaggaaaatgctttggcagggcaagaaagaaggggacaaatcccaatctgctgaaatatgggaaaaattgaattttggaaacaaggaccaaaatgtcaaatttaggaaattgatgggtattaagagtgaagatgaagctggatgtagctcagttgatgaagaaagttacaagactctgaagcagcaggaagaagtatttcgaaatttagatgctcagtatgaaatggcaagatcacaaacccacacacaaagaggaatgggtttgggtttcacatcttcaatgcgaggaatggatgcagtttgaaaatgatcacacttgtaaagtttgggacttatagacttcttgttctgatgtcacgtccttgttcaccaaacagctagcactctagcttgcatgggtgttgcattgactttaatttattgaaaaatacaaatttttgtaaatatcagatcagtgatactggtgttagtgttgtaatcaggttaaacccacttccattaaacttgacaggactatagaaggataatattttttagttcatgaattctacttttcaaatatataaaagctgcaggtggggataaaatctcatacatggattttttcgtgtccgctgtcttgtgtacttttgtacttaaccttgtacagttattttcatctcttgaaacatgaaagaaatgttatgtagatgttctttagaagatctggccatttggtacataatccagcacagataagctgggtggtaatgataataaaaatggttttctcaaaactggtgttaatttaa

SEQ ID NO: 88195 - DNA, 1376 bp, Homo sapiens
ggcgccgggcctcctcgccttgtgccatccgggtctctcgcgcgagcgatttagtctgaggcgaagcttcggagcggccggtactgttgaaagcgacaagtggaggcgccgctctagcggccgggactctgaactatggcggctagtgatacagagcgagatggactagccccagaaaagacatcaccagatagagataagaaaaaagagcagtcagaagtatctgtttctcctagagcttcaaaacatcattattcaagatcacgatcaaggtcaagagaaagaaaacgaaagtcagataatgaaggaagaaaacacaggagccggagcagaagcaaagagggaagaagacatgaatccaaagataaatcctctaagaaacataagtctgaggaacataatgacaaagaacattcttctgataaaggaagagagcgactaaattcatctgaaaatggtgaggacaggcacaaacgcaaagaaagaaagtcatcaagaggcagaagtcactcaagatctaggtctcgtgaaagacgccatcgtagtagaagcagggagcggaagaagtctcgatccaggagtagggagcggaagaaatcgagatccagaagcagagagaggaagaaatcgagatccagaagcagggaaagaaaacggcggatcaggtctcgttcccgctcaagatcaagacacaggcataggactagaagcaggagtaggacaaggagtaggagtcgagatagaaagaagagaattgaaaagccgagaagatttagcagaagtttaagccggactccaagtccacctcccttcagaggcagaaacacagcaatggatgcacaggaagctttagctagaaggttggaaagggcaaagaaattacaagaacagcgagaaaaggaaatggttgaaaaacaaaaacaacaagaaatagctgcagcagctgcagctactggaggttctgttctcaatgttgctgccctgttggcatcaggaacacaagtaacacctcagatagccatggcagctcagatggcagccctgcaagctaaagctttggcagagacaggaatagctgttcctagctactataacccagccgctgttaatccaatgaaatttgctgaacaagagaaaaaaaggaaaatgctttggcagggcaagaaagaaggggacaaatcccaatctgctgaaatatgggaaaaattgaattttggaaacaaggaccaaaatgtcaaatttaggaaattgatgggtattaaggagtagatgagctgatgtagctcagttgatgagaagtacagcctctaagcgccggagagtattcgaattagtcccagtataaatgcaagaccaaccccccaagggggtggttg

SEQ ID NO: 88196 - DNA, 1517 bp, Homo sapiens
ggcgccgggcctcctcgccttgtgccatccgggtctctcgcgcgagcgatttagtctgaggcgaagcttcggagcggccggtactgttgaaagcgacaagtggaggcgccgctctagcggccgggactctgaactatggcggctagtgatacagagcgagatggactagccccagaaaagacatcaccagatagagataagaaaaaagagcagtcagaagtatctgtttctcctagagcttcaaaacatcattattcaagatcacgatcaaggtcaagagaaagaaaacgaaagtcagataatgaaggaagaaaacacaggagccggagcagaagcaaagagggaagaagacatgaatccaaagataaatcctctaagaaacataagtctgaggaacataatgacaaagaacattcttctgataaaggaagagagcgactaaattcatctgaaaatggtgaggacaggcacaaacgcaaagaaagaaagtcatcaagaggcagaagtcactcaagatctaggtctcgtgaaagacgccatcgtagtagaagcagggagcggaagaagtctcgatccaggagtagggagcggaagaaatcgagatccagaagcagagagaggaagaaatcgagatccagaagcagggaaagaaaacggcggatcaggtctcgttcccgctcaagatcaagacacaggcataggactagaagcaggagtaggacaaggagtaggagtcgagatagaaagaagagaattgaaaagccgagaagatttagcagaagtttaagccggactccaagtccacctcccttcagaggcagaaacacagcaatggatgcacaggaagctttagctagaaggtgtatatttcttaattcatttgttccagttcgcctttaaataaatgctcaattgtgtggataagatgaattctttcagtaagagaatgattcacatactttagtaatatggtgacatatttgtgatctagaactatgtaaatagtttaattctcatcctaaacatttgcacaactataagattgagatgtctacaatttctgttttttccttcatgatttaactgatttcatttttctcaaatttagactcccaaatattttcagtttgcatttgaaacttttttttttgagtcttaaatctggttcaagaactattattttctcatctaagatgacttttcctttactttttgtttttctccctcaaatagacaaaatacctgaaacagtaagtaaaattttgtcaatattattattttgaagatggcaattaacagataatacattataagctaatttatttgatcttgtaagttttattcctggtaactatgggagaactttttttttttttttttaattttctgctgtttcggccgggtgcaatcggtcacacctgtaatcccagcattttgggaggccgaggcgggcggatcacttgaggtcaggagttgggagaccagcctggccaacatggtgaaaccccatctctact

SEQ ID NO: 88197 - DNA, 326 bp, Homo sapiens
atatactatgcaaaagattggaaacagccagatgcggtggggcatgcttgtagacctgtgtactctggaggctaaggcaggaggatcactggaggccagcctgggcaacatggtgagaccctgtctcttaaaaagggatgagggagttggaaacaaatgttatttccaatgagttcagctgtaacactgatgttttaaatcttttgcatctcaaactaaatgtttttgtatcgttgggatttttgtttgaactaattgatttcttattaacaaaatagttatgacttggccataatttgacatatgaaatacgatttactacagag

SEQ ID NO: 88198 - DNA, 1912 bp, Homo sapiens
gggttaatgacattaagatgaggttctcacttaggctagtgatacagagcgagatggactagccccagaaaagacatcaccagatagagataagaaaaaagagcagtcagaagtatctgtttctcctagagcttcaaaacatcattattcaagatcacgatcaaggtcaagagaaagaaaacgaaagtcagataatgaaggaagaaaacacaggagccggagcagaagcaaagaggtaattaacactttgtagtgaataggtactttaaaatacttataaagtgtctggtagaaagatttgtatgaatataagacgttgtcaagggaagaagacatgaatccaaagataaatcctctaagaaacataagtctgaggaacataatgacaaagaacattcttctgataaaggaagagagcgactaaattcatctgaaaatggtgaggacaggcacaaacgcaaagaaagaaagtcatcaagaggcagaagtcactcaagatctaggtctcgtgaaagacgccatcgtagtagaagcagggagcggaagaagtctcgatccaggagtagggagcggaagaaatcgagatccagaagcagagagaggaagaaatcgagatccagaagcagggaaagaaaacggcggatcaggtctcgttcccgctcaagatcaagacacaggcataggactagaagcaggagtaggacaaggagtaggagtcgagatagaaagaagagaattgaaaagccgagaagatttagcagaagtttaagccggactccaagtccacctcccttcagaggcagaaacacagcaatggatgcacaggaagctttagctagaaggttggaaagggcaaagaaattacaagaacagcgagaaaaggaaatggttgaaaaacaaaaacaacaagaaatagctgcagcagctgcagctactggaggttctgttctcaatgttgctgccctgttggcatcaggaacacaagtaacacctcagatagccatggcagctcagatggcagccctgcaagctaaagctttggcagagacaggaatagctgttcctagctactataacccagccgctgttaatccaatgaaatttgctgaacaagagaaaaaaaggaaaatgctttggcagggcaagaaagaaggggacaaatcccaatctgctgaaatatgggaaaaattgaattttggaaacaaggaccaaaatgtcaaatttaggaaattgatgggtattaagagtgaagatgaagctggatgtagctcagttgatgaagaaagttacaagactctgaagcagcaggaagaagtatttcgaaatttagatgctcagtatgaaatggcaagatcacaaacccacacacaaagaggaatgggtttgggtttcacatcttcaatgcgaggaatggatgcagtttgaaaatgatcacacttgtaaagtttgggacttatagacttcttgttctgatgtcacgtccttgttcaccaaacagctagcactctagcttgcatgggtgttgcattgactttaatttattgaaaaatacaaatttttgtaaatatcagatcagtgatactggtgttagtgttgtaatcaggttaaacccacttccattaaacttgacaggactatagaaggataatattttttagttcatgaattctacttttcaaatatataaaagctgcaggtggggataaaatctcatacatggattttttcgtgtccgctgtcttgtgtacttttgtacttaaccttgtacagttattttcatctcttgaaacatgaaagaaatgttatgtagatgttctttagaagatctggccatttggtacataatccagcacagataagctgggtggtaatgataataaaaatggttttctcaaaactggtgttaatttaa

SEQ ID NO: 88199 - DNA, 1873 bp, Homo sapiens
ggcgccgggcctcctcgccttgtgccatccgggtctctcgcgcgagcgatttagtctgaggcgaagcttcggagcggccggtactgttgaaagcgacaagtggaggcgccgctctagcggccgggactctgaactatggcgataatgaaggaagaaaacacaggagccggagcagaagcaaagagcgtgcttatgcgcgaagagactgaactgaagacgctgcagactcagatagcaaaataataagcctacttcatgataagaaccaacttcttcttaaaacagggaagaagacatgaatccaaagataaatcctctaagaaacataagtctgaggaacataatgacaaagaacattcttctgataaaggaagagagcgactaaattcatctgaaaatggtgaggacaggcacaaacgcaaagaaagaaagtcatcaagaggcagaagtcactcaagatctaggtctcgtgaaagacgccatcgtagtagaagcagggagcggaagaagtctcgatccaggagtagggagcggaagaaatcgagatccagaagcagagagaggaagaaatcgagatccagaagcagggaaagaaaacggcggatcaggtctcgttcccgctcaagatcaagacacaggcataggactagaagcaggagtaggacaaggagtaggagtcgagatagaaagaagagaattgaaaagccgagaagatttagcagaagtttaagccggactccaagtccacctcccttcagaggcagaaacacagcaatggatgcacaggaagctttagctagaaggttggaaagggcaaagaaattacaagaacagcgagaaaaggaaatggttgaaaaacaaaaacaacaagaaatagctgcagcagctgcagctactggaggttctgttctcaatgttgctgccctgttggcatcaggaacacaagtaacacctcagatagccatggcagctcagatggcagccctgcaagctaaagctttggcagagacaggaatagctgttcctagctactataacccagccgctgttaatccaatgaaatttgctgaacaagagaaaaaaaggaaaatgctttggcagggcaagaaagaaggggacaaatcccaatctgctgaaatatgggaaaaattgaattttggaaacaaggaccaaaatgtcaaatttaggaaattgatgggtattaagagtgaagatgaagctggatgtagctcagttgatgaagaaagttacaagactctgaagcagcaggaagaagtatttcgaaatttagatgctcagtatgaaatggcaagatcacaaacccacacacaaagaggaatgggtttgggtttcacatcttcaatgcgaggaatggatgcagtttgaaaatgatcacacttgtaaagtttgggacttatagacttcttgttctgatgtcacgtccttgttcaccaaacagctagcactctagcttgcatgggtgttgcattgactttaatttattgaaaaatacaaatttttgtaaatatcagatcagtgatactggtgttagtgttgtaatcaggttaaacccacttccattaaacttgacaggactatagaaggataatattttttagttcatgaattctacttttcaaatatataaaagctgcaggtggggataaaatctcatacatggattttttcgtgtccgctgtcttgtgtacttttgtacttaaccttgtacagttattttcatctcttgaaacatgaaagaaatgttatgtagatgttctttagaagatctggccatttggtacataatccagcacagataagctgggtggtaatgataataaaaatggttttctcaaaactggtgttaatttaa

SEQ ID NO: 88200 - DNA, 2306 bp, Homo sapiens
ggcgccgggcctcctcgccttgtgccatccgggtctctcgcgcgagcgatttagtctgaggcgaagcttcggagcggccggtactgttgaaagcgacaagtggaggcgccgctctagcggccgggactctgaactatggcggctagtgatacagagcgagatggactagccccagaaaagacatcaccagatagagataagaaaaaagagcagtcagaagtatctgtttctcctagagcttcaaaacatcattattcaagatcacgatcaaggtcaagagaaagaaaacgaaagtcagataatgaaggaagaaaacacaggagccggagcagaagcaaagagggaagaagacatgaatccaaagataaatcctctaagaaacataagtctgaggaacataatgacaaagaacattcttctgataaaggaagagagcgactaaattcatctgaaaatggtgaggacaggcacaaacgcaaagaaagaaagtcatcaagaggcagaagtcactcaagatctaggtctcgtgaaagacgccatcgtagtagaagcagggagcggaagaagtctcgatccaggagtagggagcggaagaaatcgagatccagaagcagagagaggaagaaatcgagatccagaagcagggaaagaaaacggcggatcaggtctcgttcccgctcaagatcaagacacaggcataggactagaagcaggagtaggacaaggagtaggagtcgagatagaaagaagagaattgaaaagccgagaagatttagcagaagtttaagccggactccaagtccacctcccttcagaggcagaaacacagcaatggatgcacaggaagctttagctagaaggttggaaagggcaaagaaattacaagaacagcgagaaaaggaaatggttgaaaaacaaaaacaacaagaaatagctgcagcagctgcagctactggaggttctgttctcaatgttgctgccctgttggcatcaggaacacaagtaacacctcagatagccatggcagctcagatggcagccctgcaagctaaagctttggcagagacaggaatagctgttcctagctactataacccagccgctgttaatccaatgaaatttgctgaacaagagaaaaaaaggaaaatgctttggcagggcaagaaagaaggggacaaatcccaatctgctgaaatatgggaaaaattgaattttggaaacaaggaccaaaatgtcaaatttaggaaattgatgggtattaagagtgaagatgaagctggatgtagctcagttgatgaagaaagttacaagactctgaagcagcaggaagaagtatttcgaaatttagatgctcagtatgaaatggcaagatcacaaacccacacacaaagaggaatgggtttgggtttcacatcttcaatgcgaggaatggatgcagtttgaaaatgatcacacttgtaaagtttgggacttatagacttcttgttctgatgtcacgtccttgttcaccaaacagctagcactctagcttgcatgggtgttgcattgactttaatttattgaaaaatacaaatttttgtaaatatcagatcagtgatactggtgttagtgttgtaatcaggttaaacccacttccattaaacttgacaggactatagaaggataatattttttagttcatgaattctacttttcaaatatataaaagctgcaggtggggataaaatctcatacatggattttttcgtgtccgctgtcttgtgtacttttgtacttaaccttgtacagttattttcatctcttgaaacatgaaagaaatgttatgtagatgttctttagaagatctggccatttggtacataatccagcacagataagctgggtggtaatgataataaaaatggttttctcaaaactggtgttaatttaagttacctgggatgtttctttgaatttgttttatagtttctgtagcatttggcaattgctgttagaaaacactagctagaaatcccctccccaccaccctttttaaggccagttaactatactacagtcaataccgtggtgagcaaaaatgtaaaaggtggaaggagaaaacttattaaaatagtatgttttcctattataagggacagacttggtattcagtatttgtcaaatattacatgtgttattcaggagatagattaatgcattaaagggatgtaagcacttttattttaataaagtgccttataacaaaacacaaaacaaaaaaccacataacacacaaacacaacgaaaaaaaaaggggcgcaaatctc

SEQ ID NO: 88201 - DNA, 1840 bp, Homo sapiens
ggcgccgggcctcctcgccttgtgccatccgggtctctcgcgcgagcgatttagtctgaggcgaagcttcggagcggccggtactgttgaaagcgacaagtggaggcgccgctctagcggccgggactctgaactatggcggctagtgatacagagcgagatggactagccccagaaaagacatcaccagatagagataagaaaaaagagcagtcagaagtatctgtttctcctagagcttcaaaacatcattattcaagatcacgatcaaggtcaagagaaagaaaacgaaagtcagataatgaaggaagaaaacacaggagccggagcagaagcaaagagggaagaagacatgaatccaaagataaatcctctaagaaacataagtctgaggaacataatgacaaagaacattcttctgataaaggaagagagcgactaaattcatctgaaaatggtgaggacaggcacaaacgcaaagaaagaaagtcatcaagaggcagaagtcactcaagatctaggtctcgtgaaagacgccatcgtagtagaagcagggagcggaagaagtctcgatccaggagtagggagcggaagaaatcgagatccagaagcagagagaggaagaaatcgagatccagaagcagggaaagaaaacggcggatcaggtctcgttcccgctcaagatcaagacacaggcataggactagaagcaggagtaggacaaggagtaggagtcgagatagaaagaagagaattgaaaagccgagaagatttagcagaagtttaagccggactccaagtccacctcccttcagaggcagaaacacagcaatggatgcacaggaagctttagctagaaggttggaaagggcaaagaaattacaagaacagcgagaaaaggaaatggttgaaaaacaaaaacaacaagaaatagctgcagcagctgcagctactggaggttctgttctcaatgttgctgccctgttggcatcaggaacacaagtaacacctcagatagccatggcagctcagatggcagccctgcaagctaaagctttggcagagacaggaatagctgttcctagctactataacccagccgctgttaatccaatgaaatttgctgaacaagagaaaaaaaggaaaatgctttggcagggcaagaaagaagggagtgaagatgaagctggatgtagctcagttgatgaagaaagttacaagactctgaagcagcaggaagaagtatttcgaaatttagatgctcagtatgaaatggcaagatcacaaacccacacacaaagaggaatgggtttgggtttcacatcttcaatgcgaggaatggatgcagtttgaaaatgatcacacttgtaaagtttgggacttatagacttcttgttctgatgtcacgtccttgttcaccaaacagctagcactctagcttgcatgggtgttgcattgactttaatttattgaaaaatacaaatttttgtaaatatcagatcagtgatactggtgttagtgttgtaatcaggttaaacccacttccattaaacttgacaggactatagaaggataatattttttagttcatgaattctacttttcaaatatataaaagctgcaggtggggataaaatctcatacatggattttttcgtgtccgctgtcttgtgtacttttgtacttaaccttgtacagttattttcatctcttgaaacatgaaagaaatgttatgtagatgttctttagaagatctggccatttggtacataatccagcacagataagctgggtggtaatgataataaaaatggttttctcaaaactggtgttaatttaa

SEQ ID NO: 88202 - DNA, 1508 bp, Homo sapiens
gtctcgagcatgcaggccgtcgcacgtggaccgacagaggaggtcggtagaaacagtcgtctgcatccacgtgatgtaccgaagcaggataccatgagtcgatgatcttcagagactcagaagatgactgcgaccgaaattctgaaaatcgcaccagaggcgaggggaacacaggagacagtcgcgtgagactcaagtgctcatcagtggcccgtcttcgaaggatcattgactaggggtcttatgcgactaggaaggtccggagctaggcatcggagtgaatgctaagagtagatcggcacgatgagcacatggagatagaaagaagagaattgaaaagccgagaagatttagcagaagtttaagccggactccaagtccacctcccttcagaggcagaaacacagcaatggatgcacaggaagctttagctagaaggttggaaagggcaaagaaattacaagaacagcgagaaaaggaaatggttgaaaaacaaaaacaacaagaaatagctgcagcagctgcagctactggaggttctgttctcaatgttgctgccctgttggcatcaggaacacaagtaacacctcagatagccatggcagctcagatggcagccctgcaagctaaagctttggcagagacaggaatagctgttcctagctactataacccagccgctgttaatccaatgaaatttgctgaacaagagaaaaaaaggaaaatgctttggcagggcaagaaagaaggggacaaatcccaatctgctgaaatatgggaaaaattgaattttggaaacaaggaccaaaatgtcaaatttaggaaattgatgggtattaagagtgaagatgaagctggatgtagctcagttgatgaagaaagttacaagactctgaagcagcaggaagaagtatttcgaaatttagatgctcagtatgaaatggcaagatcacaaacccacacacaaagaggaatgggtttgggtttcacatcttcaatgcgaggaatggatgcagtttgaaaatgatcacacttgtaaagtttgggacttatagacttcttgttctgatgtcacgtccttgttcaccaaacagctagcactctagcttgcatgggtgttgcattgactttaatttattgaaaaatacaaatttttgtaaatatcagatcagtgatactggtgttagtgttgtaatcaggttaaacccacttccattaaacttgacaggactatagaaggataatattttttagttcatgaattctacttttcaaatatataaaagctgcaggtggggataaaatctcatacatggattttttcgtgtccgctgtcttgtgtacttttgtacttaaccttgtacagttattttcatctcttgaaacatgaaagaaatgttatgtagatgttctttagaagatctggccatttggtacataatccagcacagataagctgggtggtaatgataataaaaatggttttctcaaaactggtgttaatttaa

SEQ ID NO: 88203 - DNA, 1807 bp, Homo sapiens
ggcgccgggcctcctcgccttgtgccatccgggtctctcgcgcgagcgatttagtctgaggcgaagcttcggagcggccggtactgttgaaagcgacaagtggaggcgccgctctagcggccgggactctgaactatggcggctagtgatacagagcgagatggactagccccagaaaagacatcaccagatagagataagaaaaaagagcagtcagaagtatctgtttctcctagagcttcaaaacatcattattcaagatcacgatcaaggtcaagagaaagaaaacgaaagtcagataatgaaggaagaaaacacaggagccggagcagaagcaaagagggaagaagacatgaatccaaagataaatcctctaagaaacataagtctgaggaacataatgacaaagaacattcttctgataaaggaagagagcgactaaattcatctgaaaatggtgaggacaggcacaaacgcaaagaaagaaagtcatcaagaggcagaagtcactcaagatctaggtctcgtgaaagacgccatcgtagtagaagcagggagcggaagaagtctcgatccaggagtagggagcggaagaaatcgagatccagaagcagagagaggaagaaatcgagatccagaagcagggaaagaaaacggcggatcaggtctcgttcccgctcaagatcaagacacaggcataggactagaagcaggagtaggacaaggagtaggagtcggttggaaagggcaaagaaattacaagaacagcgagaaaaggaaatggttgaaaaacaaaaacaacaagaaatagctgcagcagctgcagctactggaggttctgttctcaatgttgctgccctgttggcatcaggaacacaagtaacacctcagatagccatggcagctcagatggcagccctgcaagctaaagctttggcagagacaggaatagctgttcctagctactataacccagccgctgttaatccaatgaaatttgctgaacaagagaaaaaaaggaaaatgctttggcagggcaagaaagaaggggacaaatcccaatctgctgaaatatgggaaaaattgaattttggaaacaaggaccaaaatgtcaaatttaggaaattgatgggtattaagagtgaagatgaagctggatgtagctcagttgatgaagaaagttacaagactctgaagcagcaggaagaagtatttcgaaatttagatgctcagtatgaaatggcaagatcacaaacccacacacaaagaggaatgggtttgggtttcacatcttcaatgcgaggaatggatgcagtttgaaaatgatcacacttgtaaagtttgggacttatagacttcttgttctgatgtcacgtccttgttcaccaaacagctagcactctagcttgcatgggtgttgcattgactttaatttattgaaaaatacaaatttttgtaaatatcagatcagtgatactggtgttagtgttgtaatcaggttaaacccacttccattaaacttgacaggactatagaaggataatattttttagttcatgaattctacttttcaaatatataaaagctgcaggtggggataaaatctcatacatggattttttcgtgtccgctgtcttgtgtacttttgtacttaaccttgtacagttattttcatctcttgaaacatgaaagaaatgttatgtagatgttctttagaagatctggccatttggtacataatccagcacagataagctgggtggtaatgataataaaaatggttttctcaaaactggtgttaatttaa

SEQ ID NO: 88204 - DNA, 1227 bp, Homo sapiens
agtagttgggaccacaggcatgcctggctaatttttgtattttttgtagagaagacggggtctccctatgttgcccaggctggtaacacagtgtaacctgatgtgcttccctgggaacccagcctgacagaaactgcagctgaacagcagcaaaagtgttggaaagggcaaagaaattacaagaacagcgagaaaaggaaatggttgaaaaacaaaaacaacaagaaatagctgcagcagctgcagctactggaggttctgttctcaatgttgctgccctgttggcatcaggaacacaagtaacacctcagatagccatggcagctcagatggcagccctgcaagctaaagctttggcagagacaggaatagctgttcctagctactataacccagccgctgttaatccaatgaaatttgctgaacaagagaaaaaaaggaaaatgctttggcagggcaagaaagaaggggacaaatcccaatctgctgaaatatgggaaaaattgaattttggaaacaaggaccaaaatgtcaaatttaggaaattgatgggtattaagagtgaagatgaagctggatgtagctcagttgatgaagaaagttacaagactctgaagcagcaggaagaagtatttcgaaatttagatgctcagtatgaaatggcaagatcacaaacccacacacaaagaggaatgggtttgggtttcacatcttcaatgcgaggaatggatgcagtttgaaaatgatcacacttgtaaagtttgggacttatagacttcttgttctgatgtcacgtccttgttcaccaaacagctagcactctagcttgcatgggtgttgcattgactttaatttattgaaaaatacaaatttttgtaaatatcagatcagtgatactggtgttagtgttgtaatcaggttaaacccacttccattaaacttgacaggactatagaaggataatattttttagttcatgaattctacttttcaaatatataaaagctgcaggtggggataaaatctcatacatggattttttcgtgtccgctgtcttgtgtacttttgtacttaaccttgtacagttattttcatctcttgaaacatgaaagaaatgttatgtagatgttctttagaagatctggccatttggtacataatccagcacagataagctgggtggtaatgataataaaaatggttttctcaaaactggtgttaatttaa

SEQ ID NO: 88205 - DNA, 1753 bp, Homo sapiens
ggcgccgggcctcctcgccttgtgccatccgggtctctcgcgcgagcgatttagtctgaggcgaagcttcggagcggccggtactgttgaaagcgacaagtggaggcgccgctctagcggccgggactctgaactatggcggctagtgatacagagcgagatggactagccccagaaaagacatcaccagatagagataagaaaaaagagcagtcagaagtatctgtttctcctagagcttcaaaacatcattattcaagatcacgatcaaggtcaagagaaagaaaacgaaagtcagataatgaaggaagaaaacacaggagccggagcagaagcaaagagggaagaagacatgaatccaaagataaatcctctaagaaacataagtctgaggaacataatgacaaagaacattcttctgataaaggaagagagcgactaaattcatctgaaaatggtgaggacaggcacaaacgcaaagaaagaaagtcatcaagaggcagaagtcactcaagatctaggtctcgtgaaagacgccatcgtagtagaagcagggagcggaagaagtctcgatccaggagtagggagcggaagaaatcgagatccagaagcagagagaggaagaaatcgagatccagaagcagggaaagaaaacggcggatcaggtctcgttcccgctcaagatcaagacacaggcataggactagaagcaggagtaggacaaggagtaggagtcggttggaaagggcaaagaaattacaagaacagcgagaaaaggaaatggttgaaaaacaaaaacaacaagaaatagctgcagcagctgcagctactggaggttctgttctcaatgttgctgccctgttggcatcaggaacacaagtaacacctcagatagccatggcagctcagatggcagccctgcaagctaaagctttggcagagacaggaatagctgttcctagctactataacccagccgctgttaatccaatgaaatttgctgaacaagagaaaaaaaggaaaatgctttggcagggcaagaaagaaggggacaaatcccaatctgctgaaatatgggaaaaattgaattttggaaacaaggaccgtagctcagttgatgaagaaagttacaagactctgaagcagcaggaagaagtatttcgaaatttagatgctcagtatgaaatggcaagatcacaaacccacacacaaagaggaatgggtttgggtttcacatcttcaatgcgaggaatggatgcagtttgaaaatgatcacacttgtaaagtttgggacttatagacttcttgttctgatgtcacgtccttgttcaccaaacagctagcactctagcttgcatgggtgttgcattgactttaatttattgaaaaatacaaatttttgtaaatatcagatcagtgatactggtgttagtgttgtaatcaggttaaacccacttccattaaacttgacaggactatagaaggataatattttttagttcatgaattctacttttcaaatatataaaagctgcaggtggggataaaatctcatacatggattttttcgtgtccgctgtcttgtgtacttttgtacttaaccttgtacagttattttcatctcttgaaacatgaaagaaatgttatgtagatgttctttagaagatctggccatttggtacataatccagcacagataagctgggtggtaatgataataaaaatggttttctcaaaactggtgttaatttaa

SEQ ID NO: 88206 - DNA, 1130 bp, Homo sapiens
ggcgccgggcctcctcgccttgtgccatccgggtctctcgcgcgagcgatttagtctgaggcgaagcttcggagcggccggtactgttgaaagcgacaagtggaggcgccgctctagcggccgggactctgaactatggcggctagtgatacagagcgagatggactagccccagaaaagacatcaccagatagagataagaaaaaagagcagtcagaagtatctgtttctcctagagcttcaaaacatcattattcaagatcacgatcaaggtcaagagaaagaaaacgaaagtcagataatgaaggaagaaaacacaggagccggagcagaagcaaagagggaagaagacatgaatccaaagataaatcctctaagaaacataagtctgaggaacataatgacaaagaacattcttctgataaaggaagagagcgactaaattcatctgaaaatggtgaggacaggcacaaacgcaaagaaagaaagtcatcaagaggcagaagtcactcaagatctaggtctcgtgaaagacgccatcgtagtagaagcagggagcggaagaagtctcgatccaggagtagggagcggaagaaatcgagatccagaagcagagagaggaagaaatcgagatccagaagcagggaaagaaaacggcggatcaggtctcgttcccgctcaagatcaagacacaggcataggactagaagcaggagtaggacaaggagtaggagtcgagatagaaagaagagaattgaaaagccgagaagatttagcagaagtttaagccggactccaagtccacctcccttcagaggcagaaacacagcaatggatgcacaggaagctttagctagaaggttggaaagggcaaagaaattacaagaacagcgagaaaaggaaatggttgaaaaacaaaaacaacaagaaatagctgcagcagctgcagctactggaggttctgttctcaatgttgctgccctgttggcatcaggaacacaagtaacacctcagatagccatggcagctcagatggcagccctgcaagctaaagctttggcagagacaggaatagctgttcctagctactataacccagccgctgttaatccaatgaaatttgctgaaca

SEQ ID NO: 88207 - DNA, 937 bp, Homo sapiens
  misc_feature (893)..(893): n is a, c, g, or t
  misc_feature (905)..(905): n is a, c, g, or t
ggcgccgggcctcctcgccttgtgccatccgggtctctcgcgcgagcgatttagtctgaggcgaagcttcggagcggccggtactgttgaaagcgacaagtggaggcgccgctctagcggccgggactctgaactatggcggctagtgatacagagcgagatggactagccccagaaaagacatcaccagatagagataagaaaaaagagcagtcagaagtatctgtttctcctagagcttcaaaacatcattattcaagatcacgatcaaggtcaagagaaagaaaacgaaagtcagataatgaaggaagaaaacacaggagccggagcagaagcaaagagggaagaagacatgaatccaaagataaatcctctaagaaacataagtctgaggaacataatgacaaagaacattcttctgataaaggaagagagcgactaaattcatctgaaaatggtgaggacaggcacaaacgcaaagaaagaaagtcatcaagaggcagaagtcactcaagatctaggtctcgtgaaagacgccatcgtagtagaagcagggagcggaagaagtctcgatccaggagtagggagcggaagaaatcgagatccagaagcagagagaggaagaaatcgagatccagaagcagggaaagaaaacggcggatcaggtctcgttcccgctcaagatcaagacacaggcataggactagaagcaggagtaggacaaggagtaggagtcgagatagaaagaagagaattgaaaagccgagaagatttagcagaagtttaagccggactccaagtccacctcccttcagaggcagaaacacagcaatggatgcacaggaagctttagctagaagtggaaaggcaaagaattacaagaacagcgagangaatggttgacnagaaccacagtagctgcagtcgcgcggccgcg

SEQ ID NO: 88208 - DNA, 557 bp, Homo sapiens
caaagacagctggggatttttagcagaatcgggaggcaggtggtcagtggatagaaaattactaagaggagacatcaaggagagggtgattcttgctcaaggcagggtagtgtgatcagatatcaagggtaggggattctctctacactgacttagcacagaattctttccaaaactgcgctgtgcaggccagcaagggcaggggccaatttcaagccttagttgagaagagggctcagtggagtctgactaaagtttggtttaaggagagtcttcatcaagctgtcctcacagagcagctcctagagcagagagccatgtggggaagggtatagagggaatctaggggccaaccaggagctaccttgggagctatacaagtgaaatatttttcagtaaagaatgctgactcccttataaacagggtaaagtgaaatttgaccaaaatcagtttctttgaaagccctgatggaacataacacattacaaggatatgtctgccaagtgcctgagtaaaagtccttagagttgtacgtgaaaatgtacgtgtttaatta

SEQ ID NO: 88209 - DNA, 1335 bp, Homo sapiens
agggtcctctggcgcgagggtgggtaggaggggagcggactcgcccaacacggctcgtctgcagccgccgcctctgcaccgccgctgcccggtcggttcaaaaaacagaaatcgggtttgctgcccggcggacaggcgtgaagagcaagggaaaggaacttcctccaccttcggggctggagccttttcctctgcatctccagtctctgagtgaagatggggggcctgacagcctcggacgtacacccgaccctgggggtccagctcttctcagctggaatagcggcgtgcttggcggacgtgatcaccttcccgctggacacggccaaagtccggctccaggtccaaggtgaatgcccgacgtccagtgttattaggtataaaggtgtcctgggaacaatcaccgctgtggtaaaaacagaagggcggatgaaactctacagcgggctgcctgcggggcttcagcggcaaatcagctccgcctctctcaggatcggcctctacgacacggtccaggagttcctcaccgcagggaaagaaacagcacctagtttaggaagcaagattttagctggtctaacgactggaggagtggcagtattcattgggcaacccacagaggtcgtgaaagtcagacttcaagcacagagccatctccacggaatcaaacctcgctacacggggacttataatgcgtacagaataatagcaacaaccgaaggcttgacgggtctttggaaagggactactcccaatctgatgagaagtgtcatcatcaattgtacagagctagtaacatatgatctaatgaaggaggcctttgtgaaaaacaacatattagcagatgacgtcccctgccacttggtgtcggctcttatcgctggattttgcgcaacagctatgtcctccccggtggatgtagtaaaaaccagatttattaattctccaccaggacagtacaaaagtgtgcccaactgtgcaatgaaagtgttcactaacgaaggaccaacggctttcttcaaggggttggtaccttccttcttgcgacttggatcctggaacgtcattatgtttgtgtgctttgaacaactgaaacgagaactgtcaaagtcaaggcagactatggactgtgccacataatcagcttcaagaaaatgatgtaacataccagtgggaatcttgctgactggatcataaaaacaaacaaacttattcacttattttaacctaaaaagataaaggaattttggcagagaattttggacttttttatataaaaaagaggaaaattaatgcctatttcatataactttttttttttctcagtgtcttaag

SEQ ID NO: 88210 - DNA, 263 bp, Homo sapiens
aattaaaaagagtggacctattgtatgggtgtagagacaggaatatatataaagagcccagtttcaattcacttcgcttcaagtatccctgctgggtaggctgggattcacagttgtgcttttgacctatctttagcatctgaatttcagctttctagaatccttagagtctgatttgacatatgctaaaaacactttgcaagttttgtaggctcttttctcctcactgacattctagttcaggcttaattattctttttttt

SEQ ID NO: 88211 - DNA, 546 bp, Homo sapiens
cttgtgattgactgcttggaactaaagcccctctatctcttccttcagatcttattaatgaaattctatctgagggttcataacccagaaaaacatctgttatctaattatttctgttatctaatcatttctgtctacagagccttcttttccaaaagcgaacctgtatccaaacttccataatgtcctcagcagatttacatggccatatttattagaaagtatttataaatagtgtagtaattctctatatgacacacttagtagggaaaaacagatcacattattagacaaaaagccagaaaatgtagtttgagagattgagaaagcatcaaatggatccttgttcagattgaaactgctcccgtagcataaatgggttcaaaatgggacagaaaatgcttatatagccttaggaacgagggaaagaagcttcttataggtcaattacagaggtgctaaaccttgtcctaagctgttaatgttatactttgagagaagaaaatgtatctgtgaccaccagattgagccttcactaaaattaaa

SEQ ID NO: 88212 - DNA, 412 bp, Homo sapiens
gtatttttagtagaggaggtttcaccatgttggttaggctggtcttgaactcttgacctcaagtgatccaccctccttggcctccaaaagtgctgggattacaggtgtgagctgccatgcctggctaactctgcttgttattaaagtgtttcttaccaattatttcattttatataaaagtacatagtaggaaatagagttttagttggacaaggacaacatggtaaagaggaatttggagtaggaagactgtcacgttagtcactgaatcctacctagttcacttagttttttttagcctgttttcacttctgcaagccatggagtgaagagtgcctacttcagagtctttggtgctctcaaagcagcgtaatgtctataaagtacctattgagtgtggtacttcttatgt

SEQ ID NO: 88213 - DNA, 159 bp, Homo sapiens
agagaagtgttttgtgaaggtgagggagggatactggccacgccgtggctttccccgtgtctgtctgacagtgtaaggaggggctgtgtggccacacatgggccttggcatcagagatcctagattcccctaatgctaaaattaacttggatattttat

SEQ ID NO: 88214 - DNA, 293 bp, Homo sapiens
gaagttagagcaagccctagtgagggcactctgggatgcagacaagccccagggagttctgtgccaagaacagccacatcccaccttcctcattgtggtgaaaagattccttgtgtgactttaggcacagggacattagctagtagcatgtgaccctgtgactcatggccatcaggagtggccccagctctgcattccatgcatgataactcacttcacaaccccgctgtcccattttgaccccgcttacccatttggacatttcttgggatgactctgcctgcataaaaccc

SEQ ID NO: 88215 - DNA, 278 bp, Homo sapiens
aaaaaatcttggaaatttatggacacagttttaaaaaatcataggtcagagatgaaaccataaaggatattaggaaatacttacaactttaatgacaatgaaagcactaactattgaaatatatgggattcagctaaaccactacttagagagaaatgtagagttttacgtgtgtattagaaaagaagaaagcctgaaaaccaataatttaaatgtatgactcgggctgagtgctgtggctcaggcctgtagtcccagctctttgggaggccggggga

SEQ ID NO: 88216 - DNA, 752 bp, Homo sapiens
gctcgaaaacagcctgggcgacatggtaaaatcctgtctctacaaaaaaaaatggaaaaaattagccaggcccggtggtgcacacctgtagtctcagctacttcagaggctgacagaggatggcttgagcctgggaggttgcagtaaaccgagattgcgccattgcactctaatctgggcgacagaaccagaccctgtctcaacaaaaaagaaagggaagatggaaaaggtgtgttaaggcagcccggaggcaaacatatccttgagatgcttttggagctattgtagaaagaaagaatgtgtttgttaggactagtcttggctgcaggttgcagaaaaacataaattgcagctcaggcaagaaacaagcatatttttgtcaggtaaaaaaagttcagagctaggtagtccaaaggctaggatagtcactcctcaatcatgttcttctagcttcccatctttttgctctggtgttttgtctgtcacctcttgtcatagatacgctacagaacaaataaccctaaaactcagtgccttgaagtagcaagcatttactttttactcatggaatgtggatctgcttggcttggctgggatccactggacttgacttggctccaggcttaggttgggttcagagctgttccatgtgtctcctcatcatgggaccagcagctacctgggccgtatttttttcaaggcagatggcagaagcaacaaagcaagccaagccacatgagcatatttaaagc

SEQ ID NO: 88217 - DNA, 372 bp, Homo sapiens
tcattttatagatgaagaaattgccctagtaagtactttgcccattgatttgcctcaatcatatcaaatgtaagtatatcaaatgtaagtataatgaactgtgaattaatcacttaatcaccactattaattgaagacatgcttatatgcactgagtatatactctactggattatgaaggatgtatattttagaaagattttccaaaagcatggaaactgtatgatcaactctcaatccttcagaaaaattaagcattacagtagttatagttatttttccagctgctgcctcatcaaagacctccagtctcttacaatcagctgcctagttgacatctccacttgattatatgacacattaaatctcaga

SEQ ID NO: 88218 - DNA, 908 bp, Homo sapiens
agatggtaagttccaatttttccggtgatgggagttaaagtgtgaacaggaactggatataaagggccacacttcagggtatcccaggtctgctttctccccagaatcctaatttgctgcttactggatggaatcgatggggaagatcacgttcgtgggatgcaaacagtgaagttgagagaaaatacagaagagtcccacaatcacgtacccacaggaatgagaacctataaagaggaacttgcaccaagtcagggtggaaatactaacgcttcagtaacagatgaggaagaacatggcaacattttaccgaagctaaatattgaacatggagaaaaagtgaactggctcttggggtacaaaaataaagggacaccaaatgctgggattacaggtgtgagccaccacgcccagcctaattctctttttctaatagttgcactttatcatattttacaaatgtgtgagtctgctatggattagaaattaataagagattttgccacagatagtttgagaagcccagcactgccactcaacaaatgctggtgcattcagatggtgaaatattctgcagctattaaaggagttaaaactgcctccacttacctggaggcccatctgtgacacctttttaggttaaaaggaaaagaaaaacttgcttaggactgaatatgagcggttgcaatttgtaacaatgatgtatatatacatatacattttcatgtatttgtatgaacataaaagtattgaaggatattcatcaaactgctaaaagggttgcttcagagtaacggactcggagaaggcagattaattttctcttaatggaactctgtattgtatcacttgtaaaaataagcatgtgttatctttatgataaaaaagtaaaaacctaaaaaagaaaa

SEQ ID NO: 88219 - DNA, 596 bp, Homo sapiens
ttcaccatgttagccaggatggtctcaatctcctgatctcgtgatctgcccgccttggcctcccaaaatgctgggattacaggtgtgagccaccacgcccagcctaattctctttttctaatagttgcactttatcatattttacaaatgtgtgagtctgctatggattagaaattaataagagattttgccacagatagtttgagaagcccagcactgccactcaacaaatgctggtgcattcagatggtgaaatattctgcagctattaaaggagttaaaactgcctccacttacctggaggcccatctgtgacacctttttaggttaaaaggaaaagaaaaacttgcttaggactgaatatgagcggttgcaatttgtaacaatgatgtatatatacatatacattttcatgtatttgtatgaacataaaagtattgaaggatattcatcaaactgctaaaagggttgcttcagagtaacggactcggagaaggcagattaattttctcttaatggaactctgtattgtatcacttgtaaaaataagcatgtgttatctttatgataaaaaagtaaaaacctaaaaaagaaaa

SEQ ID NO: 88220 - DNA, 1313 bp, Homo sapiens
ttcaccatgttagccaggatggtctcaatctcctgatctcgtgatctgcccgccttggcctcccaaaatgctgggattacaggtgtgagccaccacgcccagcctaattctctttttctaatagttgcactttatcatattttacaaatgtgtgagtctgctatggattagaaattaataagagattttgccacagatagtttgagaagcccagcactgccactcaacaaatgctggtgcattcagatggtgaaatattctgcagctattaaaggagttaaaactgcctccacttacctggaggcccatctgtgacacctttttaggttaaaaggaaaagaaaaacttgcttaggactgaatatgagcggttgcaatttgtaacaatgatgtatatatacatatacattttcatgtatttgtatgaacataaaagtattgaaggatattcatcaaactgctaaaagggttgcttcagagtaacggactcggagaaggcagattaattttctcttaatggaactctgtattgtatcacttgtaaaaataagcatgtgttatctttatgataaaaaagtaaaaacctaaaaaagaaaaaaaaaaaaaaaaaaaaaaaaaaaaaaaaaaaaaaaaaaaaaaaaaaaaaaaaaaaaaaaaaaaaaaaaaaaaaaaaaaaaaaaaaaaaaaaagaaaaaaaaaaaaaaaaaaaaaaaaaaaaaaaaaaaaaaaaaaaaaaaaaaaaaaaagagaaggggggaaggaagaactaacatgaagacgcgggggccacaaacaatcaacacccgcgagcagaacaatctagtaaggaagacgagctgaccctcgaagagaacagacaatataacaaaaatcgagcacgtcgcgcaaggcgctaggaaaacacatacagagaacgacaaacaaaaccgccaccggaacgataacacggcagcaaacacacaacccccatctggtgtgagtcaagcgaaaaacaccgagcagcacaacaaaacacgcacatcaagcgcaggagaaccacaaaaaaacaaacagtcagagtgaagagtagaacaaccaacacaagcctcagcgccagggacgaagaaaagagtccaagcagtcagcctaaacaaaaacaacaacggcacggacgcacatacacaccctgcccaactagaaaaggagaggagccagcgcagaccgacagacagagaacaggatgaggaccacaaacataaggccacacgccaccaagaccaaccacagcacccccaccgaacaccggcgccgcacgaacggacacgcgaaacaaca

SEQ ID NO: 88221 - DNA, 618 bp, Homo sapiens
agagcttcatcagaaggccaaaaaggcctacctatgaataatattcattctaaagagtaagaataggtaaggaataagaccaccttgatgctgtgatgatgcttttctataatacaaatatttggtcaatgctctttctccaaaagcttgctttctagattttacctggaaatttctaggaccctgcaaatccttgcgaaagtcaaaagagggaaacggcctaattctctctcatttaccatgcaccacctaggtgaaacaagaagttctgcaaattactcactgtttttatttacccctgctgggctccttgtaagccttcctgggtttgttatactctgaaatatggagcattaatgaccttttaggaagtgccagcacatgtcaggaggtggctacttgctctgctcgccataaaaaagggtgttaataggctccaaagggggccctcagttaggaaaatagtacttcaagcctttattaacggactgctatcttgtagggggatccaaagtgataagccctcaatttgaagaaaggctacattctagaacaagggaaagaagacactaatggggtccttttacaatttgaattagatgtgtgaccttgtaaagc

SEQ ID NO: 88222 - DNA, 781 bp, Homo sapiens
ttcaagcctgtagtgcactatgatcatgcctgtggatagccagcctggcaacatagcaagatcttatcactacaaaacaaacaaaaagaggttagaaaaggaacacaaaatgtgatggttaatactgagtgtcaacttgattggatcgaagcatacaaagtattgttcctgagtgtgtctttgggagtgttgccaaaggagattaacatttgagtcagtggactgggagaggctgacccaccctcagtctgggtgggcaccatctaatcagctgccagcataaaaacagaaatggaaagagcagacttgctgagtcttctggcctccatctttctcccgtgctggatatttctgccctcaaacagcagactccaagttcttcagcttttggactcttggacctataccagtggttcaccaagggctcttcagccttcagtcacagactggaggctgcactgtcagcttctctacttttgaggttttgggactcaaactggcttccttgctcttcagcttgcaaacagcctgttgtgggacttcaccttgtgaccgttcatcttcttagagaataaataagaaaaacgtatggaatgatattgtggttaatacaatgtaagagatcacacgacagactccaaagaaggcatagactgataatataaacaataagtgctggaagagttgaagaggtagctgtatcccttggaggaggtgttcagatgatacgtcaagtagaaacttggaccttgaagatgaatgtaagaggagtgggaaatca

SEQ ID NO: 88223 - DNA, 254 bp, Homo sapiens
ccttccataaacagaacaactcattcatcaaaatagtttgttataaccgaatcaatggcccacttattggaaaagtgctaaacacaaagaatttcattgaaatcaaattttctgagctggctctataaagtaagtgcaataactacatttgttcataagtaatgacataatggcaaaactactaccaaaagtgtaaattctcctaacaaaactagtcaagaaataaaaaaaaaaaaaaaagtaggaccagcttt

SEQ ID NO: 88224 - DNA, 4588 bp, Homo sapiens
  misc_feature (2767)..(2767): n is a, c, g, or t
  misc_feature (3036)..(3036): n is a, c, g, or t
  misc_feature (3091)..(3091): n is a, c, g, or t
ttaattgaagaaacactgagctgaactacaagtctatttcttatggtgctggattactcctacagaactgccctgagatcaaccgtgagagagggctctgacagacacaagtcaccttcttattgcacttagctctccctggggacttaaattttggcagtgttcctctttacatgatatcctccaagatgatgagttctaatcctgaggaagaccctttggacacatttctccagtacattgaggatatggggatgaaggcctacgatggcttggttattcagaatgcgtcagatattgctcgagagaatgatcgcttgagaaatgaaactaacctagcctatttgaaagagaagaatgaaaaacgccgaagacaagaagaagcaataaagcgcataggtggagaagtagggcgaggccacgaaggaagttacgtgggcaaacatttccgcatgggattcatgacaatgcctgctcctcaggacagacttccccatccttgctccagtggcttttctgtgagatcacagtccctgcactcggttgggggcacagacgatgacagcagctgtggctcacggagacaaccaccacccaaacccaagagggaccccagcaccaagctgagcacctcatcagagacagtcagcagcactgcagccagtaagagcgggaaaacccctgagaggactgaagcgtcagctaaaccaagaccccacagcgatgaatattccaagaagattcctcctcccaaaccgaagcgaaatccgaacactcagctgagcacatctttcgatgaaacgtacatcaaaaagcatgggccccggaggacgtcgctgccgcgggactcctccttgtcccagatgggcagccccgcgggagaccccgaggaagaggagcccgtgtacatcgagatggtggggaacattctcagagacttcaggaaggaggacgatgaccagagcgaggccgtctacgaggaaatgaagtaccctatctttgacgacttgggccaagacgccaaatgtgacttcgaccatcacagctgttcttcgcagtgtgctactcccacggtgcctgacttggacttcgccaaggcctcagtgccatgcccccccaaggggctgctttgcgacatccctccgcccttccccaacctgctttctcacagacccccgctgctggtatttccccccgcccccgtgcattgctcccccaactccgacgagtccccgcttacccctctggaggtcacgaagcttcccgtgctggaaaacgtgtcttacatgaaacagccagccggggcgtcgccctccacgctgccgtcccacgtccccggccatgcgaaactggagaaagagcaggccgcggccctgggacctgcctctgccacccctgcgctctcctcgtcgcccccacccccgtctacgctgtaccgaacccagtctccccatggctaccctaaaagtcactccacctctccctcccccgtcagcatggggaggtccctgactcccctgagcctcaaaaggcctcccccttacgacgctgtgcattcgggcagcctctcaaggagctctccttcagtgcctcactcgacccccagacccgtgtcgcaagatggggccaagatggtcaacgccgcggtgaacacctacggggcagccccgggtggctcccggtcccggacacccacgagcccgctggaggagctgaccagcctcttctcctccggccgcagcctgctgcgcaagtcgtccagtggccggcgctccaaagagcctgcagagaaatcaacagaggaactgaaagtccgaagccacagcacggagccattaccaaagttggacaacaaggaaagaggccaccatggggcgtcttcctccagagagcctgtcaaagctcaggaatgggatggaacaccagggccacctgtggtcaccagtcgactaggaagatgctctgtgagccccaccttgttagcgggaaaccacagttcagagcctaaagtaagctgcaaattaggccggtctgcgtcgacgtcaggtgtgcctcctccatcagtcactcccctcaggcaaagcagtgacctgcaacagagccaggtaccatcatcgttagccaatcgtgattgacttcctgtgatacaacttgccaaatgcttcccacctctgtctgtcctgttgctgtagacaactttcgcatttgcttttatttttctatgtgtgtatgggttaggggatgcgggggatgagttctggcagtctgtgttttcatttgaaaaagaatatctttcttccttgtgattggtggtgaaactttctttgctgtttgttaccaaatcgtttttgtctctggtttccatcattctgtaatataaatgtagtaaacttgtactatatgtattggcttagtggttcttttttaaattctttctctctttcatgttttgtgtacttttatactgtctctgaaaatttatcaatatttgataaatttatctactttgttttatgtagatttctttttaaatgttttgtccagaacactcgcacagatgttgtcaatgaatttgtacatatttcttagctcttatcctattatactgtaatatttctggtggttttatttttatttagcttggagcatgactgtaagacactgttgaatattgatgtccttataaatattcatatcccgattcatttggattgagtatggcagctagtctttcttctttcttaggctattgactggcctaagacantttgactggccagacaaattgactggccagataatctagatatttaacaaaaactgcagattaataaggcaacctttaaatgaatgacttttctctcttataccaacaatatcagaaatgttctcagaaagggaatgtaagtgttcatgcatggtaaatgagatctcaattatcacttggagaaaagagacaagaaataaaggcataaactgaaatatcatttaatcctttacagcataatatgttgctctgatgttcgtttgggtacntggttgtggatggggaattagtatggggaaaaatcactacacataaatgtcctanctttagctcacccaataggaattcaatacattgacttaatttgtgaggcttaattgtcgttactgttaagtattataggtgttaagtagggtggtgtcattctggaatgttttctctctgcttcctagcttcaatctttgcattcatgaaactcttctgaaatagcaacttataaaacactgatgatacctccaagggaactgcccattactgatgagaaaattacatattcatctattattttaaatgtcaggctattttaaaaacataactaagtagaataattgcgttttcttctaatgagagacattgtgcctcttagtgtttttgtctgacttaaatatgcaaaatagttgatttataaatatatgaggtatctgcaaatacaagaaatgagaggcttctctcaagggtatctcaagtaccatttagaatttcttgtgtcttaatttaaaatttaaatgcctttatataaatgttaaatgcctttataactaaatgtaccaactcaaacactttttggatataaaagaagtagaaacagtaagacactgaataaaataaataagataaactgccaacttagctaattaaagctattccaaaaatattgtacttaccaacatttaaagcttaaaaacattgggtactgaaagaagagaagtttagctaattggcagaggattgcactaatacaatcaagttttcaagtttatgacccttgctagtatattaccttcaatatctcagagatgttttgtattatttgttttgttttgcttttttcctagttgtctttatagctgtttcaccctaagccccttcaaactctcaatgaaagcaggttcttgggataaacttccagaatagagacaaggtataccctttgtgcctttgcattatcaactctttgttcacctgatgggaagttcttcgtttttcaaaatgtagcaagggagaaagcccaggacgcctttatatgctgttagtttccttacctgctgatagagattctgacacacagtcaaatcatacatgggctgtcagagctataaattagaaggctggcctctaggcttctcctctgtggcttatagccagttgtaatatacatgcattcctatactctagagatgaagtggtaagcatagctcatatgaacactgctctgaactcctctgacttagcattcaacttaagtcaagaaatacttattggctgggcgtggtggctcacgcctgtaatcccagcactctgggaggcagaggtgggtggatcacaaggtcaggagattgagaccatcctggctaacacggtgagaccccatctctactaaaaatacaaaaaattagccaggtgtggtggcgggcgcctgtagtcccagctacttgggaggctgaggcaggagaatgtggtgaacctgggaggtggagcttgcagtgagctgagatcgcaccactgcactccagcctgggtgacagagcgagactccatctc

SEQ ID NO: 88225 - DNA, 2353 bp, Homo sapiens
ttaattgaagaaacactgagctgaactacaagtctatttcttatggtgctggattactcctacagaactgccctgagatcaaccgtgagagagggctctgacagacacaagtcaccttcttattgcacttagctctccctggggacttaaattttggcagtgttcctctttacatgatatcctccaagatgatgagttctaatcctgaggaagaccctttggacacatttctccagtacattgaggatatggggatgaaggcctacgatggcttggttattcagaatgcgtcagatattgctcgagagaatgatcgcttgagaaatgaaactaacctagcctatttgaaagagaagaatgaaaaacgccgaagacaagaagaagcaataaagcgcataggtggagaagtagggcgaggccacgaaggaagttacgtgggcaaacatttccgcatgggattcatgacaatgcctgctcctcaggacagacttccccatccttgctccagtggcttttctgtgagatcacagtccctgcactcggttgggggcacagacgatgacagcagctgtggctcacggagacaaccaccacccaaacccaagagggaccccagcaccaagctgagcacctcatcagagacagtcagcagcactgcagccagtaagagcgggaaaacccctgagaggactgaagcgtcagctaaaccaagaccccacagcgatgaatattccaagaagattcctcctcccaaaccgaagcgaaatccgaacactcagctgagcacatctttcgatgaaacgtacatcaaaaagcatgggccccggaggacgtcgctgccgcgggactcctccttgtcccagatgggcagccccgcgggagaccccgaggaagaggagcccgtgtacatcgagatggtggggaacattctcagagacttcaggaaggaggacgatgaccagagcgaggccgtctacgaggaaatgaagtaccctatctttgacgacttgggccaagacgccaaatgtgacttcgaccatcacagctgttcttcgcagtgtgctactcccacggtgcctgacttggacttcgccaaggcctcagtgccatgcccccccaaggggctgctttgcgacatccctccgcccttccccaacctgctttctcacagacccccgctgctggtatttccccccgcccccgtgcattgctcccccaactccgacgagtccccgcttacccctctggaggtcacgaagcttcccgtgctggaaaacgtgtcttacatgaaacagccagccggggcgtcgccctccacgctgccgtcccacgtccccggccatgcgaaactggagaaagagcaggccgcggccctgggacctgcctctgccacccctgcgctctcctcgtcgcccccacccccgtctacgctgtaccgaacccagtctccccatggctaccctaaaagtcactccacctctccctcccccgtcagcatggggaggtccctgactcccctgagcctcaaaaggcctcccccttacgacgctgtgcattcgggcagcctctcaaggagctctccttcagtgcctcactcgacccccagacccgtgtcgcaagatggggccaagatggtcaacgccgcggtgaacacctacggggcagccccgggtggctcccggtcccggacacccacgagcccgctggaggagctgaccagcctcttctcctccggccgcagcctgctgcgcaagtcgtccagtggccggcgctccaaagagcctgcagagaaatcaacagaggaactgaaagtccgaagccacagcacggagccattaccaaagttggacaacaaggaaagaggccaccatggggcgtcttcctccagagagcctgtcaaagctcaggaatgggatggaacaccagggccacctgtggtcaccagtcgactaggaagatgctctgtgagccccaccttgttagcgggaaaccacagttcagagcctaaagtaagctgcaaattaggccggtctgcgtcgacgtcaggtgtgcctcctccatcagtcactcccctcaggcaaagcagtgacctgcaacagagccagagcttcactcttgttgcctaggctggcgtgcaatgatgcgatctcagcttattgcaacctccacctccaagttcaactgattctcctgcctcagactcctgtgtagcagagattacaggcgtctgccaccacaccaggctaaattttttgtatttttagtagagacggggtttcaccatgttggccaggctggtctcaaacttctgacctcgtgatccacctgcctcagcctcccaaagtgctgggat

SEQ ID NO: 88226 - DNA, 416 bp, Homo sapiens
aactgtccaggacacagtgttacatccattctccatagggttttcttaagctgcgtggtttgcaatgtaaggacaagtgttatcctctcaaaagcgcctttggactggaattgattcctgtgtccttgagccatgtccttttcagccatttcacaattccttaactgttgaggacttaacatatatgagatatttgggcaggcacgacttccatgttcctgtctttcttcctaaaatatcagaggagcgggagtcacagcatctaaaatgaaactcatcttggcagtcccgtgaaatacggagctgatttgttttcttgctgcagagagcacaagaataaaggaagactccacaagcctcgtcttccagatcgtgctgacctgcttggctcagccttgccctggaggcagactcgg

SEQ ID NO: 88227 - DNA, 965 bp, Homo sapiens
tgtgtcctcacatgatggaaagcaggaacaccgtgtcctcacatggtggaaggggaaatactgtgtcctcacatgatggaaagtgggaacactgtgtcctcacatggtggaaggggcaatactgtgtcctcacatggtggaaggggcaatactctgtcattacatagtggaagcagggaacactatgtccttacataatggaaggagaaacaccatgtcctcatatggagaaagggggtaagactatgtcctcacatggtggaagggagcaacactgtgtcctcacatggtgaaaggcaggaacatcatgtccttatatggtggaagggggaaacacaatgtcttcacatgatccaaggcaggaacactgtgtcctcacatggtggaagtggggaacactgtattctcacatggtggaaggaggaacactgtgccctcacatggttgaagtgacagaagggcaaaaggggtgacactgtcctcaagccattttatgagtaccaatcccattcttgggacctaattacctcctaaaacccggctcttcttcatgcttttgcattggggattaagttccaacatgaaacatccaaaccatagcaacggtcttcagtgaccattgtcatgaggggaaaagataggagctttggaatcatccagtgttggatctaaggctttgctctgccaccaactagttttgaatactgttgacctataccaactatagtaggttcttataacaattaaaaggaatatcagagtaaaatgtgtatttataatgtaatgttttcaacagaagaaaatataaataaaaatttattgggtcctttgaatgcagaggaattttaagtttgatatcattggaagaaatcataaacaagaagagtaaaacatttagtattttaaaattaaaaatgtatttaaagaagaattaaaaagaataatatgtgcaaagtgcctgggac

SEQ ID NO: 88228 - DNA, 410 bp, Homo sapiens
tgagtgtcaggctagaatttgggagttaaggttttaggcaaaaaatagccggccaggtacggtagctcacgcctgtaatcctagcactttgggaggccaaagtgggaggattacttgagcccaggagttccagactagcctaggcaatatggtaagacccatatattagtccattttcacactactgataaagacatacctgagactgggtaatttatgcatgaaaaagggtttaatggacttacagttctacgtggctgggaggcctcacaatcatggcagaaggcaaggaagagcaaagtcacgccttaggatggcagcaggcaaagagagagcttgtgcaaggaaactcccccttataataactgtcagatctcatgagacttactcactgtctcaagaacagcaaa

SEQ ID NO: 88229 - DNA, 953 bp, Homo sapiens
accacacctccaataaaccatggctgccctaaagagaagaggccagtctgtctccccaggtcccctggtccccgctgcttgtcattgggcagggactcctggcttgaatccacaacacagctgccccacccagggctgattgtaccaactggtagtggctctgcatatctctgcagtggagccccaagaaacaagtgaaagtcctgctgccacaaccattgccaaggtcccatctcttgcttcctccaagctggggagggaacataaagcctgagcttaccccagggctgcagtgtggatcctgggcatgccaagctaagatctacagccagcattctggaggagctgacactttcagatcactaagagggagcacagatacaattgggaggaagtacagaggttccacatggctgagcaagagcctacctactggccattatgcttcagcaccatctactgagtcatagcccaaacttcatcaccaaaaacattttgctaatatacccacctgtgaaaccaaggacaaaaattagaattcagctacaaataaagaccctgcacaaaggtcttggccttctgaaaacatccagaaaagaagtcaactgacgatattcaaattataccacagttaaaggaatatcagcctacacaaatgagaaaggacctgacccgtagaagaactctggcaattcaaaaagccagagtttctcctttcctccaattgattgtgctggttccatagcaaaggttcttaaccagactgaaagtactgaaatgacagacatagaattcagatatggatagaaatgaaaagcatcaagattcaggagaaagtcaaaattttattctaatccaaggaatctaaggattgcagcaaaacaatacaggagctgaaagatgaaatggccattataaggaagaaccaaatggatctgatagaactgaaaaaa

SEQ ID NO: 88230 - DNA, 405 bp, Homo sapiens
cgaatctcctgcctcagcctcccaagtagatgtgattacaggcacgcaccaccacatgtggctaatttttgtatttttagtagagatggggttttgccatgttgggcaggctggtcttgaactcctaacctcagatgatcgatcggcccacctcggcctcccaaagtgctggaattacaggcgtgagccactgcgcccagcccaatttgtttttatctgttgaaatacacaagtctttcacaccatacctatgctacacaggaaggactcagataatgtaagaacagaagtctctatttaggttaggactcagttttcataaaaccaacagataataaatttacttttcaagatttctgtaatcactatttaatttaacttttacaaatccaaccaaaaccaaat

SEQ ID NO: 88231 - DNA, 399 bp, Homo sapiens
tgactctagcaggatctccgtcactggcatttgccttctttgaacgtggtttgagtagttggccccctttgattggccaaaactcagtgattggcacaagggtaggttacagtctgtttacacttccatttaggttatagttcactattttcagagaaacttaaaatatgtaaggaggcaactttagagtaaatttgatttaacatcatgtaggtcacaaccagaacttgcatctaatcccagctacaccatacactgaactttagacaagcaatttaacccctttcctttggtttactcaaaggcataaagggatagtaaataacattctaaccactgaattgtgagaactaattgctgaaaacatgaaatgcttgaaacagaaccaacatatattaa

SEQ ID NO: 88232 - DNA, 224 bp, Homo sapiens
ttgcacacacagctagtaaattgtttatgtactttttggtaattgtggtgatgacttaagtcatatgtgtcccaagtctctagaattttaggcaaatggagtttggggcacaaatgtacttctcagtcattgcttttcttttgctgcttggttacctgtttctgcaattgtcagtattcagtatcttcagagacagaggttttaggaaaataagtaaaaatatt

SEQ ID NO: 88233 - DNA, 377 bp, Homo sapiens
accatggctatggctttttcttgatgtttttgtgagtctatcgtgtttatagcttatgtcttttaggccctacttataagtagaaagagaacaggaagtgagctcccccaaaatagacatgcagtcaatatcacaaaccccaagagggcaagttctggaaccagcagattccagctctgcaatattagctctataacttcacccacattacttaacctcagtttcttcctctggaaaatggggaaaataatgacacccttctcatattatcacacatgaagttcctgacacagagtacacactgaatgcatgtgtgctgttattacaaaaaggaattaaatcagatggttttaccttccttagaaagaattaataca

SEQ ID NO: 88234 - DNA, 480 bp, Homo sapiens
ttactttatgttaaatacagaagtattccacattttatccacttacactaacaaacagctatcaaagtctttgttttcaaggataaccagtctactaatagacaacatacaggacaacaaatattaacataaaactgtttttcagtaaaaacaaaaaattgttcttttcagactttacagattaagaagcctgtggcaaacaatgtaatgaagaggccagtttcatatagaaactgtatgttaatccaatagagtttacttcaaataagttattttattgggttactaagattatacataggattcaagtctgtggctgttatctggagggaccgttatttgatttctgtgcttggctgagaaatactgtaagtatcttgatgaggctgccttttaaatagaggccagtgttaaaactagagcagctactgccacaggacacacgcatacttaaatacaatttaagagtgcagatcaatc

SEQ ID NO: 88235 - DNA, 748 bp, Homo sapiens
agatgtgcctgttatgataagtgtggagtgaaagaggacaactgcaacgatgtgaggcttcctaaggcctagattcagggctggtgcactggactgtctcttcagcttatctgccattggccaaagcaagtcacagggccaaagccaagttaaggggcagggagttgtactcctcccaagaaggtgatgaggaaattaataattttgaacagttatctgatacacactggattaataactactccaggatgcttgggtatcttatgagaaaagggttattattattatttccatcactgttgcaagtatttaatgagattttgtacccacaatggcaaaacccatgcaaaaccgcaagcgcaggaactgtgtatggttggctcgtgatgcatttaagatttattttctagcctcttacctaattcaaaaaggagaattctggtttctcatccatggatgagaaattagtgtcttggactgttttgcttacccgggctgactgagctgagtgattcttttattggctccggagctgttttcctaggagtggtaatagtgcttctctggccaaaggctaggactgcggaaaggatggctagcatcaggggtctactctgggcacagcaggagcgtgtcagtgtgagcttcaggaacagtgggacaagtgtcatgcatttacctgcttcagatgctgtccttcagtggagtgttcttacctactcagtctcattgcccaaatgcttgctac

SEQ ID NO: 88236 - DNA, 376 bp, Homo sapiens
caattaaatacaaattcaggagaaacaaattttgaggtcccattctagtttcccctgcacaaaaaaaaaaaaatacccgaccacaaacattagcagtcttaaatgtaaaccagattttcagttagacatatctaagtagatcattacataattttgactaaagtatttggttacatatggaatatagcaaagacggcagcaagctgataattttgtatatgtaactgattatctgagaaatttttattccaaaatagattacatatatactaaattcctactggtcattagcactttaccatagaacagaaaagagacaatagaagaaactcaaatttgacttaggtggtaatattaatttttatggcaatagttt

SEQ ID NO: 88237 - DNA, 354 bp, Homo sapiens
gtcatttccacccagcgacactcagaaatgttcaagaaaaccactcagtttttgcaatgttggattccagccccttgcagaatcagcaggtccacagtcttaggggctggggcagagagagccagaggcaggcgtttgagtccagagatggcttgcaactaccttagggcttgagccaagttttttttaaaaaaaatgtccaagcaacaaggcccacaaatgatacctgattataaatatataaagtgtctggcccatagctgctcaccaagtggtagttattattattttcctattggtctgtggtcaagatgtgtctgtaaatacctcaaacaagctcccaccttagcacct

SEQ ID NO: 88238 - DNA, 467 bp, Homo sapiens
ctctttaggcaaaaccagaaggtcagtgtctcttgatatcctcctcagctagcaaatgagaaaactgtcagagccatttggggagtggaaggtcacatcctccgaggggaaataaaataactgatttattctggcccacggattctatgtggtctgttaggggaaggaagaaagaggtgggatgaaaagagaataaagtagaaaaaaaaaggtggatggaaattttgaggggagcatttcccttgtgtcaggagtaacaaggataggatgattgggttaggagagaatctacatgaccatatctaattttcggtggatacatttaggtttttaattttcttttatttttgtttcttttgttagatcttcccctgacctgctcccagggctataacagatacggactttgaaactgtatggagtatagagcagtgctctataatttaaaatatacatatattgcaacc

SEQ ID NO: 88239 - DNA, 335 bp, Homo sapiens
ttaattagtttaaatctgtaagctaccttgaagataatggatgttggatatttaggcaaggacaggctgggtttgggacagtaatgtatctcccataatacaagagtgtgtaattaagtatgttaatggattttatgtccttctctgaagcatctgtcttggccagagtggaagacagaatattggacacactggacaattgatctctttaataggacagaacttatgctcctcttttatgcctcaaaagctaccatttcgccccatgcctgatgacataaactccaaagcctggtaatgcgcactcagggcatcctgccactgctaaatcattt

SEQ ID NO: 88240 - DNA, 431 bp, Homo sapiens
acagcatccacctaatcataaggagattctgtgggagggagctgagcaggtattgtaggaaaagatgtcaagggaacaattcagagtgcaggaacccacaagagtcacagcaccttgtgcctgtggggtgtgtaaggacaggggaggctgctcctgctgactgagtaaacgcctcaggatcatgagcatggtaaaaaaaaatggattaatatatttgttttttactttgaagcttatggattccttcccttccaagagaagaaaatcctctttctcatttatgtcaattataatttaacctttaggtgtgtggtcccaagcagcacattattggcaaaagacagctcagctcatcatttagaaccggacagctcttttagattttccgtcattcacattagctatgttgtgaacaaagtgatgcataaggc

SEQ ID NO: 88241 - DNA, 218 bp, Homo sapiens
tagatgctagatgctacccacaatgcaggcatgggatgccatcctctgccctcatgcccaaacctgcagcaaatacatttttcttatcaaatacaactcaagtcacttagaagtctataatcgtctggtgggaatcttagatttagcttgataacatacacaaatattaaataaaacctctccctataaacttgatatttgtgcaaaacaggtaaaca

SEQ ID NO: 88242 - DNA, 423 bp, Homo sapiens
actgaggggaaggagtaattatttaaattttttttttgtttaattaacatttattgtcttctgggtaacaggcactgttagggacttttacatctgctattttatttaattacaagagttcttcatttccagataagatttcccatgggcttcctttgactaatgagttatcttagcctggtgcttgtcagtcccagctgcacatgaaaatcacctggggagctttggagcaatatggtgctggggtgcttccccagagagtctgtttaattatgcagagtggggacccggctgcagtatttttaaactctggacaaaccagagatgtcatttcacttgcaggaaaaatacagcaataagcaactgctgcaaacttctgcagtagagcatgctatgccaagtagaataagcaaaacacctgtt

SEQ ID NO: 88243 - DNA, 209 bp, Homo sapiens
caggctggtggagcagctgcttctggaacatttcttgttgctacaactgaggaaaaagagaacagggtgaattatgcttgggttcttagagtttctgttcaggagtgatacacattacttctgctcaccttttattgacaaaagcatgtcgtaggcgatgcttaacttcttcagggggtgggaaagtaagcctcggacgggagcacgct

SEQ ID NO: 88244 - DNA, 318 bp, Homo sapiens
gcagtgagaatttcaagccagtggttcttggtttgctgggctttgtgggagtgggacctgctgagtgagaccacttggctccctaacttcattcaggcccctttccaggggagtggacggttctcctgtcccattggggttccaggtgccactgggatatgaaaaatctcctgcagctagctcagtgcctgcctaaacagccacccagttttgtgcttgaaactcagggttctggtggtgtaggctcacaaaggaatctattgatctgtggattgcgaagatctgtgggaaaagcatagtacccggggcgggtagcac

SEQ ID NO: 88245 - DNA, 337 bp, Homo sapiens
acactgatgcaatcgtagctcactgtggcctccaactctagggctcaagtgatgtctcacctcagctacttgagtagctagaactacaggcatgtgccaccatatctggctaagtctttaattttttttgtagagaaggggtcttgctatgttgcccaggcaggtcttgaactccttggctcaagcaatcctcttatctccacctcccaaagtgttaggattataggcatgagccaccatgcctggcctcaaattattttgttgtatttttttctgctacttgaaataactgagccatgacttggggatttcattatcattttttgttatatgggga

SEQ ID NO: 88246 - DNA, 413 bp, Homo sapiens
tttaaaaccattatcttagaggttaggattttaacatctgcgttttaggggaacacaaatattcaaaccatagtaccagatgttttattaaatgaggaaagtaactccctgcttcacagtcatattttctattacatacttaccacagcatccctaactgccttcttataacatagatcgtgggtgtccttgtaatcacttttagtttttttcaattccaaacaaaatatcataattcctaatcaaggtaacacaattatttcaacatgtgtacaataaatcctgtccataatttacaaaggcacaatatattatttgttctgaatatataatagcaaataaagtttcagcagtattgtataacagctaatattatatgagacactggcaggagagatcagcatgtgtgttgt

SEQ ID NO: 88247 - DNA, 597 bp, Homo sapiens
cttgtttttttaaagcaaaatttcattgctgcccatttgaataaacttaagcttaagaatattaatttctttacattatgtgcccttctgtgataatacaccattttcacaaatgcctctgtgtatctgtgtcagaatgttatgatagaatttgaaatgaattatttcaaaattaagctcttatgtatggttatacacgggacatgcatatttgatgtttaataggaagatttaggataaacatgtaactattattattgtggtcaaattatttttatttaataagacttttttcattccctaaacttttaaaaactactggctcttgtaccccaatcctggaaattcttccaatctgcaccgggatactggaaactgcctttaaaaaatttccacaaagtgattcttacttaggtagcttgagccaaactagcgtttggatttaagccgtagattaagggttagaggtgttcagatgagagaaggatgaatgtaggatagagtggtaaggaaaggctttgtgatattagatagattttagataaaggaagagaaggctgtagaggaggtatgatgaggaaagtcagttcagaagaa

SEQ ID NO: 88248 - DNA, 277 bp, Homo sapiens
atttttttttcatttttgaagttttcaagcaccctccctatattttgtgcctgagatgatgatccactatctgccatgttgctatagcagatggataatttaactcagtagtaggaggttctataggttatcaccctatgaaactcatatcttttgtattaaaacctcaattctttattttcgaagggtgactaggagaaacttggcatactaccataaatcagagagaagttgaactatagcaatttaattggatacatattcattgacttcaaac

SEQ ID NO: 88249 - DNA, 398 bp, Homo sapiens
cctccttttactccatccatgcctcatactctccactgaccagtcttaatacacagcatctgatcccagcctttggggttggggcccctgcctctagtattgtccaggacttaggtttagttgggagagcatcacctcttaaatgtataccattggctcatgtcatctccatcagtttttgggtggagccccggtgtttggccattgtaacgaggggccctcctgcctcccaaaattatgtgtgtattattcttatattcccttttctggagacaagttcttgatcatgcctaaccaaaaggtgggttttgaggaagcagtacagcaaagacagttggaaaattgaaggaaagtacagcctgggactgctgcctggtcgtgtgacattggtcgacttc

SEQ ID NO: 88250 - DNA, 84 bp, Homo sapiens
actgatatgtaaaaccaattttattaatttttcagtggggatatgtctgtctccctcgacaggagccctcccatcaggcagatc

SEQ ID NO: 88251 - DNA, 190 bp, Homo sapiens
aaattcttttctcctcagtatacatggaatagtgttttttttgttttgttttgttttgtttttcagtcaaggctggtaccacccttacctggggatttaaaaaacaaaatatgtgggagcattttatggaggaatcgttggcccagaatactaatagcatctcattgagaaacaatgatatgtgtactga

SEQ ID NO: 88252 - DNA, 1009 bp, Homo sapiens
aacggtcaataatgaaggtggctgcggcgcggcggcaggctcagctgcgccgggcgggggcggcgctggggccgcgcctgtaggactcggggccgacgccgcgggatggggacgcggcgcggggagtgaggcagtggcggcggcggcggtaagcggaacttcggcccgaggggctcgcccgctcccgcctctgtcttgtcggcctccacctgcagccccgcggcccccgcgccccgcgggacccggacggcgacgacgggggaatgtggcgctggatccggcagcagctgggttttgacccaccacatcagagtgacacaagaaccatctacgtagccaacaggtttcctcagaatggcctttacacacctcagaaatttatagataacaggatcatttcatctaagtacactgtgtggaattttgttccaaaaaatttatttgaacagttcagaagagtggcaaacttttattttcttattatatttttggttcagcttatgattgatacacctaccagtccagttaccagtggacttccattattctttgtgataacagtaactgccataaagcagggatatgaagattggttacggcataactcagataatgaagtaaatggagctcctgtttatgttgttcgaagtggtggccttgtaaaaactagatcaaaaaacattcgggtgggtgatattgttcgaatagccaaagatgaaatttttcctgcagacttggtgcttctgtcctcagatcgactggatggttcctgtcacgttacaactgctagtttggacggagaaactaacctgaagacacatgtggcagttccagaaacagcattattacaaacagttgccaatttggacactctagtagctgtaatagaatgccagcaaccagaagcagacttatacagattcatgggacgaatgatcataacccaacaaatggaagaaattgtaagacctctggggccggagagtctcctgcttcgtggagccagatt

SEQ ID NO: 88253 - DNA, 372 bp, Homo sapiens
tgccaatttggacactctagtagctgtaatagaatgccagcaaccagaagcagacttatacaggtatggtgtgatattcagtatacttattttaagtcctatttacagacctcatttttaaataaccataaacataaaatgaaatctttagctaattggagactgtatttgtggggtgggttggtgggagatgcaattaatggtgaaaaaaactaagagcagaaattgctagaattctaagcaaaagataatagttcaaagccagagtttatattcacaagtttcttcacattaccttctattttgctatgaactagcatgctcactttgtagctataacagtagttatagtagacataagattattttctt

SEQ ID NO: 88254 - DNA, 491 bp, Homo sapiens
gcagcagctgggttttgaccccaccacatcagagtgataacagtaactgccataaagcagggatatgaagattggttacggcataactcagataatgaagtaaatggagctcctgtttatgttgttcgaagtggtggccttgtaaaaactagatcaaaaaacattcgggtgggtgatattgttcgaatagccaaagatgaaatttttcctgcagacttggtgcttctgtcctcagatcgactggatggttcctgtcacgttacaactgctagtttggacggagaaactaacctgaagacacatgtggcagttccagaaacagcattattacaaacagttgccaatttggacactctagtagctgtaatagaatgccagcaaccagaagcagacttatacagattcatgggacgaatgatcataacccaacaaatggaagaaattgtaagacctctggggccggagagtctcctgcttcgtggagccagatt

SEQ ID NO: 88255 - DNA, 718 bp, Homo sapiens
taccacttatctaagccaagtaaggttaaaaatcagtgtgttcacaaaatccttcaatgataccatcataggaacagtttgctatctttgtgacaaataatgaagacctatctagaataccaacttattggtactaaagaaatcagtcaatatttacatgtatgcatagtatattaattcagattgtaatatatgtgtagcctgctagtagcttttcaatggaaaaagtgaaaagagcttcatgttaacttttttaattttaataggttgcttcttcaagtggaagaagtatttgactgggggtcagaagacctgggttggaatcctagttccatctttctgtaataatgtaggtctgctctgcccatcctctgccctcctccctcagaaaaatctctgcaaacccatgatgtccaacagacatagctcatattggtcacagctaacggagttaactacctaaccaagttgggcctatctaactggctaagaaaaccaataacttctgggacttggtcaaaatgatgcattgtcttgcaagagtttttaattgagagacatgaggaagttgctagtgggttgtgtatgctacagctgaaatatcccatagggcagcaagattaatgtacagaagaagccagtcatggctaggcatggtggctcacacctgtaatcccagcactttgggagggtgaggtgggagaaccctgtctcaaaa

SEQ ID NO: 88256 - DNA, 146 bp, Homo sapiens
tattatgacacaaaaagtgaattacatacattctttcacttcagaataaactggagtaatagtaaacagatttacttcacaccttataatctagaaaactagaaaattacatgaaaacagttttcataaacattgtaaaataggac

SEQ ID NO: 88257 - DNA, 462 bp, Homo sapiens
agccaacatttgatcatttctcttttaatgcattaatgtgatgactctgtgttactaggatttctaatgttaagtaatgcctccttggatatatcttttagtttatgaattaaactaaattaaaatgttaagggtttgtttaataacttgtatatttaataacaattgttattactgtttgataacaaatattaaaggttagttgaatagtaacaaaggttattatgaaatatttcaaaagtaaaaaatgttaaaaagcaaaaggcccactaaacaccttgagaaaaaaaaaaataaaagctttagtaagaagttgagccaggccctgtagctcacatctatagtcccatcactttgggaggcggaggtggcagaattgcgtgggctagggaggccagcttgcagtgagtcatcattatgccactgcactctagcctgggtgacagggtaagaccttgtctc

SEQ ID NO: 88258 - DNA, 571 bp, Homo sapiens
acacgtcgaccctgtaggtagtgcactgtcttgtgtactggccagcggtgtcacagtgtccgggacagcatgtgctccgctggtggatgacactggctgagcatagcaagaaaaagttaatggagttgcacgaacaaacactgaactaaaacgtcttcatttaaatacagaatctgcctctgtcaagaccagtactcctctctcagatttctaagagtaactgcttactaaaatgccactgtattcctgcttgacccaaaattaatccaaaatatactccagggcaatcagaaaacttcatgtactctacctggaaaccttattctagcttctacctgctggaaagagtatttttggagagatggaatatgtcctatgctgaagacctgcatacctgccacccagcaattccactcctaggtccacccaacagaaatgcatccagatgtttggcagaatatgctttagaatgtctctcttcccatctccacccatgctctagaatgtccaaagccatactgttcataatagcccaaactggcgaccacctgcatgcccatcaacagtgaat

SEQ ID NO: 88259 - DNA, 1471 bp, Homo sapiens
gttataaaatatagacacaaatcttcttggaaggccggaaggttttgcaaaagtctcaggatagggttatggctgaaagccgcctaatccttactttgagtaaatagcttaaagtagatacaaaggaatgtagagtagtttatctgaatagcttgtttactcatgtggtcttaagaccaatctttgatcaaccgggtgcacaaccgcagggggtgggggcggggttgttggcaaccaggtcaattaccctctagcagtgtttactcaaaacctttgtcatttaatctatactgaataaatgcaagcttcgctggctgatggggccggctgctactctttacagcaccttccttggtgtctgtgaggggcccagacccttagctggagtgacaggcagaatatctgtgttagtgtacgttattcaaccgttgttgggtcaaggtctgtgggacagaccccggcaagcagggactgataaactacttactgttaggtactatgctcactacctaggttcaatcataccccaaacctcagcatcacacaatatacctttatcacaaatctgcacatgtatcctcgattctaaaatagaagttgaaaaataaaataaaattatagtctttccaaccccacttccctatccctttacctagttttattctttttcttttcccactggacatattgtctaataacatactatataatttatttatgtgttgattgtctacgtttcctcactatagtgtgagcaccacaaagggaggaaattttggggagtctattttatctactgatcattgcagtgcctagaagagtccctccacataataggtgctgataaatatttgttgaatgaataaatgagtagcatcagacatctaatactcaccttaaagtagggctgcacctaagtcatccaagacaaaaagggattttgtcatcttgttctaaaactctccaggacccggactgcacaaacatcctttgttaagccaattcctgattaccatcacaccctctccttaaatgtaatcttcagtttatttctggtaatatttaaataaagtaaatatgccaatgaccaatgactgaagaaaactatttctgtatatcctcaccaatttatccaaggttaccatgaccatattgctttcattcctttcttcttctcctacatgtggatctgtcttcattggccatcctttcactctctccaatcccccaatctgcagtctcattcactctatcaatgtgattcccaaatctatatcattgattctgcatctattcttccagcttccatcgtgtattttctaggcctactcagatgattccattagaatgccttattggtacctaaaagtgaacaggttgcaatttaaatgcctcaccttccccttgagactggcttctcctgacttcctacttccattgggcaatcaaatcctggaattctctttgactc

SEQ ID NO: 88260 - DNA, 180 bp, Homo sapiens
attttggagcagttcaaatctaacaagcatttaccaaaggatttaatccatatcattctttcaaaaagtctggcctataatcccaatgctttgggaagccacggtgagaagaccacttgatcccaggagttcaagaccagcctaggaaacacagaccaatctctaccaaaaatgtttaaa

SEQ ID NO: 88261 - DNA, 493 bp, Homo sapiens
gtagtgggaaatcagtaggaagctggtaggactgaaatatggttagaaaacactgctctcctgaaacacaagatgctttagaatacctgaggagaggaagaagggcaacgtaatagtaaaggaaactaaaaggcaaataattagttctatagtttaattaattaatccgttcattaaacatgaggggaggttattctgcagggtcataatgaaattagcagcaacaataagctccagaagacaacaccctttaaaaaaaaaatgagttctctgtacttccaagaaagccctaagtctatattagagttttcttagtctgaatcaggcaagtgaagaaattgcttctctttgtctcttgttgctaatcacagaggaaggagtgatggggcttatctccaaagccatttcccaagaacacttttccgctcctcacatcagcattatccctttctgttgaatgtttcacacttcaagtgctcgatgatgaatgagc

SEQ ID NO: 88262 - DNA, 448 bp, Homo sapiens
tgtagatactgatagcctgtatttgttgagttctaattatgtgttcaattatcaacatcacaatgagatagttaccattttctagaaaagaaaatccaaacttagagtaagaaagtgatttacctacatttccatatgtagtgatattggagccatgactctgactcatttgtaatttaaaacctcatgttcttaaccacagtgctgtggttatcatatatattaatcagtgtaagtaaatgtaaatgctttaacagagaaactttgaatttcatcagattgacaaaataaagtttacattgtttactcatgttatgatccaagattcaatgcagttgaaatgttgaaatgttgtctatcagtaatggaatctgaggaacagacttaatcggagtgcccaaagacaaaaatgtaatagatttgatataaataaaacattttatctgcc

SEQ ID NO: 88263 - DNA, 346 bp, Homo sapiens
ctcaggtgatccatccacctcggccagtcaaagtgctgggattacaggcatgagccactgcacccagccgatactactatatccccattttacagatgagcacatgggcaaattgagggtaaggcactgacccatgatcatacagctgagaagtggcaaaggcaggatttgaacctagaacctctggctccacacactagtaatctaaaccactctccctacaatacaacatacgtggtaaagatgtgtggtgggcacgcaatcaacgtaggtcccttcacagttgctgggagaggcaggaatttgcagttcctccgcgttctcctcctccgctgcccacctgtcc

SEQ ID NO: 88264 - DNA, 402 bp, Homo sapiens
acaagtccaaagaaggcaactgcatcactgtaaacaatctagtatttaatatggtttggctcctcatgcaacatattgtaaaccaaaaatattggagatgcttctggatcaacttagaagtttattttcccaaggttaagaatagacccagaagaaatcaacacggaatcacagcaacagtctgtgactttctccaaggacaattttgaggacttcaatatataaaggggaaaagtgtgctggataggtaagagggagggttagtatgtaatccacatactgcaacaggaaagaagcaggcaagagaatagtcagttaggtatttgtgtctcacccagtaaatcaacactttacttgagatacacagtttcctgtggagatatataactttttttttttttt

SEQ ID NO: 88265 - DNA, 426 bp, Homo sapiens
aaatagagtggaaagttacagagagttcccatatcccccatccctctcccctctttcaagttcagagcttcctcaaaatgccatccaacagcttcttcttacacctcattggtcagaacataggcaggctgggctaaaggagaccggggaagagtagttttttagctgcacactttgctgttttatataatggcgttcctgaccaaggtaggcaaggaagattgttgagtaggaaacctaaaatctctgtttacagccatataagataatctcttattttctcttccttaagcaagagaaagttgaagtccataccataaactggtatttttagaaagctgtttttttggaggttgtttttgctgttgaaatatatctactctgtttaattattattagttcttaagggcttcatctttagcaggg

SEQ ID NO: 88266 - DNA, 1005 bp, Homo sapiens
tatccagtggacccagaaccatcaattcactaaatttttcttgaacctatgtatttagaatctcccggctgggtgcaatagctcacgcctgtaatcctggcacttcgggaggctgaggagggtagatcacttgcgctcaggagttcaagacccgcccacctcgacctcccaaagtgccaggattacaggcttgagccaccgtgcccagccagaaggaattgatggtggccgaagtcaggagccgggtgcctctttggggtggatcttgaccgggaaaagggacttgagagaaccttctaggataattttatttcttgattaggtggtggttacatttgtaaaaatcatcgacctctaaatttagggtttgtgcccttcacataccttgttgtatgcattttgccacttgttttttcaaagcaatgaaaaagtatcactgcaattaggttttaaataaatttgtttcgttaacatgtctggaagtcttagatgtcttactgtggaaggtctcgctgctgtggagcccacctctttcaggccctctaaagtatagagaagaagcagagtgctcggccccctttggggtgttacctggggtttgggtgggagctaagagacacacacagtaagtagtaacgatacgaggcaggcggctctgcaaggcggcactgcagaaagggttgtgtatgccacatcatatgccaaattcacatgcatgtctttttttccccataaaaactgaaattttaaaatgatctgtgataggaaatacagggagctgtgattctcctgggaaataaaggcacttagagcatggagccggtgagaactcgcagcggagaccagagcaggcccgggggaggctttgcactatgggaggtgtgagttccagagggaggggtggccgagctcaccttcaggtttctgttattcagtgaaagcctgcccttgttccttggcgttggtgtgtgcaggacctgcctgctctctcccacctccttcagg

SEQ ID NO: 88267 - DNA, 571 bp, Homo sapiens
atttagacacagcacagaagcctccctcatggctgtgtggtgagggaaaggattgtccaggtgacttctagggttttgggtggagcagttggatgaatggcagagctacgtactgacatggagaaagggctggtaggagagggaagagcagggagaaacccagctcaagtaggtggttcgcctgcccaggaatcactgctcatcattaagtagatttgccgctactgccctcacgaggggcattgatgacgagttgcccctgttagtagtaagtagtcgcccatgctgttcaacaccagccacacagagcacctgccctgtgtctaacgtcagaagctgcagtctgctgatcctgtccagcgtcttgctacattgacctgaatctcctggtgggctctggttgaatcccagtttctgctgctctggagaacatttccttagattcccgagatgcccccaagttccccaccaagtgagtgccttgtaagccctccaaccccaaagtcataccgtcccagtgtccccttcaaatctgataaaaatccagccagccatttctaccaaatgagat

SEQ ID NO: 88268 - DNA, 470 bp, Homo sapiens
tgtaaacatatatgtagtgtatattggtacagtattttcattaaggtgtgtttcattgcctcagttaaataattaagggtgttggctgctgggatgttgaagtatttgcttacataatccattgctgtttgggtgagactcttaaatggatttagacagataatggtgagaaaactggattttttatttagaacgtggctgaacaaggcaatgtggaaatagtgtgataacaaggtgcattatataacttgaacaaatcaactgcaaaaagacattttcaaagaaatggaggaaaattgaataatatttactgaacttgacgtattaaggaattgttttaaattatgttggatgtgataatggtattgtgatttttttttttagtgctttagagcaatatactgaagtttttacaagtgaaataatgaatgagggccttaaaatatgccagcaaaaaaaaaaaaaagtga

SEQ ID NO: 88269 - DNA, 371 bp, Homo sapiens
tgattatgagcctgggctttaactcgtgatagaagtttttcaagtactggctctaccacttatgagctgtgtgaacttggacaagttaattgacctagcaaagcctccctttccttatttgtggatgagaatgatggatggtacttaactcacagggcctgtgtgcagatgagatgagacctagaattaatagcacactttcaggtgctattccaaatgctttacatgcattcatgcattgaatttttgaaacggtaaccatataaggtagtgccatcattatccccatttaacagatgaagaagctgagggccagagaggttaagtaagtttcctaaagtcacatgactagtttcagagctgggatttga

SEQ ID NO: 88270 - DNA, 317 bp, Homo sapiens
tttttgtctccccctcctttatctctcaaataaatacttatacttgaatccatactctaggattaggcagattggcccaaatctggggaacccacattgagatggaccctataatttctcttttttaaaaaaacaatcaggctgggcgcagtggctcacacctgtaatcccagaactctgggaggtcgaggcaggcagattgcttgaggtcaagagtttaagaccagcctggccaacatggcaaaaccccatctctactaaaaatacaaaaattagcctggtgtggtggcgtatgcatgcctgtagtcccagctact

SEQ ID NO: 88271 - DNA, 787 bp, Homo sapiens
taaatatatattagtctaaagataaatcttagttgtaagaaaactatggaatatgagtttgtccctactttcagaaaaaaaaagagcaatataggaacaaaacaagtcattttaacaaggtgactactagaaaactaaaaacctcaaaaatgcaaaagcaaacatatactctctgctttgtattgaatttattactgtataatctatgccttatacttcggaatctccccatgcaaattctgtttatacttgcctggtactcatgatagacccctactttttggtattttgtatatttattttatagtttatgaaatattcattatgtgagctggaatgtgagtataagaataatttttatgaaatgtgcatacaaaataattttatatgtaattccacaattagtatattaagttacattttatttagctagaacactccattttgttttcaattggagaaccctatataagcttactattctttagttattgttctttttactttttataattgacaaagtaaatttatttatggagtcaaattgttcaggtaaatacaagggaagcttagtaagtcatgaagatgtttttacatgtaaatgtggaaagcatatatagcagttcttggtgtgtaacatgctccagaaaaagccataaacatttctgctaaagttagtttgtaacttcaagtcagagatagaaaatattagtagtgaagaaatacagctgatgttttatgtggagaggacacttttccaggctgcaaagctgagtgttgctgaatt

SEQ ID NO: 88272 - DNA, 388 bp, Homo sapiens
tttcaggtatgtgaacacttcctttttggtgttttcaatgctggtacactctatttagatatatttatagtcatttcagtggtaactagatgtggggttagagggagtcagatgcttgtaccacactgctatctgtacctgtgaggaacaggttttgctattagtaacagacaccagaaataaaccatcttatgttccagcttgggttttcactcatataaaatatatctagaaataggcagtctggagcatatatgcagctatgtgctcatcaaggacctaggtgctttctatctttctacatcaccttatgccctaagaaagctactgaagcctcagccatcatgtctgtgttgtatcccagaaagaaaaagaaaggcagaagggc

SEQ ID NO: 88273 - DNA, 971 bp, Homo sapiens
caagcgattctcctgcctcagcctcccgagtagttgagatttacaggtgcccaccaccatgccaggctaatttttgtatttttagtagagacggggtttcaccatgttggccaggctggtctcgaactcctgaccccaaatgatccacccacctcggcctcccaaagtgctgggattacaggtgtgagccaccgcacccagccatgttgatctatttttaaaaagtttttatttcctgttacactgtgttcagctatcttcagccaccttaaattcccatggatgagttttcataaactttttgaaaatagatttagatttacgggaaagttgcaaagataatacagaatttaatggatgagtttttttattgatgtgtaatagatgtatgtattttcagagtacaagtgataatttaatacatgtatataatgtgtaaatattaaatcaagagttattgggatgtccttcaccttaatatttatcttgtctttatgctaggaacattatttgaattattctcttttacctattttgaaatgtacaatagattaacattagctatagttactctactgatctatcataggtcttatttcttctgtatttgtgtccactaatcaaactcttcatcctcacgtccccaccacctttcctggcctctggtaaccaccaatctacctccatctccatgagatccacttttttagctcccacatgtgagtgagaacatgtaatatttgtcttttctgtgcttggcttagttcagttaacacaatcacctccagtttcatccatgttgctgagaatgacagaatttcattccttttatggctgaacaatattccattgtgtatatataccacattttctttacccattcatccattgatggacacttaggttgattccatattttagctattgtgaatagtgctgcaataaacatgagagtgcatatatctctttga

SEQ ID NO: 88274 - DNA, 177 bp, Homo sapiens
cctctggtacctaccactggtccccactttcccccttgaattgagctttctccctaggagctgtctcagctcccaaggcccgcttctccattacagacatatttagagcacagtgattagacctagggaggtacaacctgctgcttactgtgcttctgctaaggaggcacctcagat

SEQ ID NO: 88275 - DNA, 793 bp, Homo sapiens
caaatgcacatgaaaagatgctcatcattagccctcagggaaatacaaatcaaaactgcaatgagatacaacttcacacccactagaaaaactaaaatttaaaaaatgataaatgctggtgagaatgtggacaaatcagaactctcatgcactattcatgggattgtatcatggtgcggccatgttgaaaaagtttggcagctcttcaaaaaaatgttaaacatagaattatcatatgaaccagcagttctacacttaggtatatactcaagagaaatgataacgtgtgtgcatacaagcacttgcacgtgcatattcatagcagcattattcataatagacggcagaaacagccccaatatccgtcatttgatgcatggataaacaaagtgtgctatatccatacaatgaaaggttatttgacccttaaaaggaatgaagtacagatagatgctacaatatagataaacttgaaaaattatgctaagtgaaagtggccagacacaaaaggcacattaattacgcgattctatttacataaaatgttcagagtaggcaaaattctaaatatagacagtagattggtcatttccagggttggttttttgttttgggttttgtttttttttgtattgatggaaataaatgctctggaattattgacgatgttcagaaaaacctcatgaatatattaaaaaccactggcatatgttttttatatgttttaaaaggatgagttttatggcaatgtgaactatatttcaataaaacttatttttaaaagttcaatggt

SEQ ID NO: 88276 - DNA, 289 bp, Homo sapiens
cctgacccacagatttgtggggagggatttccccacacaatgaagacgtcctcgcaaccagcgaggaggcggctaccgtggaacttgtccctctcacctgccagcgatgtcctggggccacatgtgattttcaacactgggggcagagagcactctggtggccaaggggctccgcctcaccctgggtatcctccgcctgcctgggctgggcctcctctgtgagccagagaaggtggacccctgaccaagccgaaacacatttcctttcaactcactgaaatatcttttc

SEQ ID NO: 88277 - DNA, 289 bp, Homo sapiens
gggtaggacccgactacagagtagacacctcagatccatagccctacggtcagagccaatgtatgggatggcggatcgtcaggtgttgtaattactgtggcccctcattgacataaatattatactagcatttaccatctcacttcgtaggaatactagtatatcgctcacacctcatatcctccctactatgcctagcaaggaataatactatcgctattcttatattcagctgctctccagtgccccagaccagccccccaattccttctacatggtccgtatcatt

SEQ ID NO: 88278 - DNA, 412 bp, Homo sapiens
tgccaaggaaggggtgggtacagagaaagttgggaaattctagccgagtgttgggccaacctaagcctggagcagtttccaggaaaaatgaaatcattctggagaagaggcaggaatgtgacttccaacatcctctccaagaaggctcccaagggtaaaggtgtgagggagaattggagagatagaaatcaagagacttcctcccggagggcagaggcaggtgctgcctcacagatgtggaaaaagaattctgtaattttagagtcgtggaatatcagaattttagctcccaagctctaaaacccaaaattatcagaggtctgctgtccaatcttttcccagtgcctgagtcccctctgcagcctccctgataggggccatccagtcccttgctcaccctctcatcccctct

SEQ ID NO: 88279 - DNA, 396 bp, Homo sapiens
gtttttcaggctgaaagcttatacattattagataaaatgtgctttgattctatttaacgggaacaaaaaagggcacttaaacgagaggtttaatcagtactattggatatttatctttcattcttttacagtcatacatttgtttgtttttgagacaggaatctcgttctgttgcccaggctggagtacagtggcgctatcatagctcactgtagcctcaaactcctgggctcaagcgatcctctgcctcagcctcctgagtaactgggagtacagttgtgcccagcatgcctacctaaattttttaacttttgatagacacagggtctcgccacgttgatcaggctggtctcagcctcctgatttcaaatgatcatcccacctcagcctcccaa

SEQ ID NO: 88280 - DNA, 394 bp, Homo sapiens
taattgccctgagtcaactaattgacaaaggaaaatgctatgcttaaaagctcagttctcagtgtaattatttttctctccccacatataatcatcctttaaatataaaagctattatagagatgcagtttccagcaaactttatctcacattgaggcccttgactttatgtggtgtttcagatcagcttttttgtcaagggtcacacattcattccagcatcacttaattctttagctgttagtctccatccagcactagggtagaccctggagatgcaaaagcaagctagagacagtacccttattctcatggagctaaacattagagaggtattggtgtattcttcggagtatataatgccctttccagctatggactctgcctttcttta

SEQ ID NO: 88281 - DNA, 561 bp, Homo sapiens
cacgagcagaaatgtaacagatctttgaactgccttaatatgttgcctccctatcttgaactcctcttaggagtttagccttttaaactaattgttacgtgctttattatttatgaaggagctttgcactgaaatatgccaaataggaataattactacagatagaaggagtcgagaatgttagttgataatcaagcagacaaatcaccggttgtcctgttctgccaaatcctatgttgcctgtaattagctgtgggggcaggaggtgtatgttacacatcatgaatcctcaagcctacttttgcttttacatctcaagaccaaagccatccttgcattccaatatctgtccactttttttcctaaccaatcatcctaataatgtttggataaatcgtattagcagtcattcccttttcgagtctaccctcatctccatggcatcctgttcatagtcttaaattccagggcaagggaacaaaagagaacaaaggaatcgacaaggaatgatatgtaggttaattatgtacagataaaacatattttaactctctccacagc

SEQ ID NO: 88282 - DNA, 468 bp, Homo sapiens
tgctatgatgttgaagtagcataaaacatatattagatatctgcaacaactgtgatgtaacatgaaaatacctgatttctgttgacaaagttactgctagtacaactgtggattgttgtctgcactcgtcattgaaggaaatactaaattttagttttaggctagtgaaattaaagttaatttttcccatccaagttcatgtatcttctgaattctatccgtgaatcccttagaggtctgtgaattgtaggttaagaacccctgccctagctaatcagatccaccaatgtttcaaataggactataacttattcaaaggccaatgatacttcgcataattcaattttaatattattcacatttcatgtcacaaatttagtaagttacatgtgttatgtgatgttttgttttgatagattatatcttactcctaaataaaaagtcaagatttttgtagcaacttctatt

SEQ ID NO: 88283 - DNA, 613 bp, Homo sapiens
tcaagcctctcctcccaacttgtatgcagccaacttggcgtgttctcacaatggcctttctgctgtgtctgcagagagggagagatctctggtgtatcttcctccttttgcaaagacaccagtcctctgggattagggccccacccttatcacctcagttaaccttaatcacctctttaaaggttctgtctccaaatgaaatcacattggaggtcagggcttcaacatgtgaatgctggggggacacaattcagtctcacatatgcagtggaaagaagttgacacactgagcagagcttttgcatctcctagtgttggggagacaataattggtgacagcccacaagatagggagactctgatgagtgacccagaccttcagctgagagcactgagggctgcaataggggaggaaggctgaggggtgagtagatcgtccctctcaaagtctgaaaccaagcttccaaagggctgactcccagactaagttgatctgctctctttcccacagccagcccaaagcaaaaggaaatatgcagaggtaaatagcatcatccagggcctcaaattaactaaaatatttccatatacaatatccagatttaaagtttac

SEQ ID NO: 88284 - DNA, 422 bp, Homo sapiens
taatcatctttgtgaatctaacatttatatattgttgaattattttccatggataaaaatccaaatgaggcttttaatttaaatgttatcctattagtattacttggattactaaattaatatttaaacagattaaacaataatagtagtaaagaagtgtctgtcttcagccttgaatacatttcttaattctcagaaataaccatccccattaggttttcttatatcctttcagaagtagtattctgtgcttttttgtgtgtgtgtatgcatatattttgataaaactatcttcttcattattttcaatgtctgcatagtaaatatgaattttttgatattactcttatccagtgggaatgattagagatggagtctcgccctgttgcccaggctggagtgtagtggtgcgatttcagctc

SEQ ID NO: 88285 - DNA, 188 bp, Homo sapiens
actaagcatttataaacttttaaaacttatgaacatcgaaaggtcgtgttttgaagatagttttttaataaacataggatttaaatcacttaaatatctaaactcaataaaatctatacttcaggtccagtaaaaatccacctagataacaaatttcctaaaaatcttaatgtgttttctttggtaag

SEQ ID NO: 88286 - DNA, 212 bp, Homo sapiens
gtaaaagccttttcaaatgactgctttaactgctgctacagcatgtgtcatcagttgaatggaatctgtcacgtgactttaagcaaccctttgctgagagacaagattcaatactagggacagtattctagtgtactacatcattgattttatgttatgaagatcatcatttattgaaaatgtataaataatgaagcccagcattactcttc

SEQ ID NO: 88287 - DNA, 442 bp, Homo sapiens
tgatagacatttccaacttttttcttagatactcctattcttgcttcagttcacagcttccattaaaaacttaggtcccttcttatgtatacagatagaaatatatctacttatattcatgttataatgcaaacagacatttctagtttattttagaagttgacaacagacataagatcacaactatcttgtgaggtggaatgtgtgtcttgctcatgtttataatcttaggacaaattatagtgattgcactttgcagatgctcagcaagttcactcactgattaaccagaatttcacagtggcaatacactccaactatctaaagttgatatgggccaggcgcggtagctcacacctgtaatcccagcaatttgggaggccgaggtgggcggatcacttgaggtcaggagttcgagaccagcctggccaacatggtgaaa

SEQ ID NO: 88288 - DNA, 174 bp, Homo sapiens
atccaagatatctttgagagccaggaacctgctttgtgataatgatctccacttttacctttgagggaaaggaagtggccctctagtcacagatggatcatggcgagcagtggtcccgaaggttgacttctgcaagccatccacatcaggtttggaacctaccgagaagagtct

SEQ ID NO: 88289 - DNA, 270 bp, Homo sapiens
ggctccttctactgcaggccagacctggggctggagtgaaagagtaatgaattgatttaagcctacggccctggcatacttcttctgaagtcacaggggaattcacatcactctgtgtgacctctgtcctaccccttttatgtgagggtggtgaaaagcaagttgaaatgcaaagggtaggtagtctgggagactgacagaaaatgctgtgcacatgtggtttttataatgagatatacagcttgtacccgaagccaagaacatttcaca

SEQ ID NO: 88290 - DNA, 624 bp, Homo sapiens
tatttttgcccttaaaacctttgcaatacatttatacacacacactcagcttgcaaagccttctttagaaaataacccactctgagtagaagtaatgagatatggtagcagcatgggcaaagccataagaaacgttatttgcattaaaaatgagtttttcagtatggaaaatcaattaccaaatgaaatagagattttttttaaaggttcaaaccttttcaaatttttatgttatagggtttatattgattaaaataaatgtacgtttgtagttattcaacattatgaatttcaagatggccacctattttgaaacgcacacctttgccatgaagtctgttgttgcatatattagtgctgatgtaataaaatgcttctattaactatgtggttgttaataaatcttgtaaaaataaagttctgtttattttatggtgtcagaacaaaatagctgtttaaaatcacttattttagtcttagcttttaaatcaaaatgcctataagaatattaagttctaagattgttgagaatactaagataaaattaaaaattgtatgattttacaatttgctataatttaaaaatcttgtattgattaaatgttaaatcaggttaaatatttg

SEQ ID NO: 88291 - DNA, 1200 bp, Homo sapiens
gcagcacctctgtgaattagcataagatagaaagaacagaggtttggagtaagacagaccttatccttgagcaggagaaggacacaaggtctgtgacagaagaggttggccatatagcagggtacttttcctgccaccccatcatgcaccccctcccccattaaacagaacccagcaagcccagctcagagaggggcataaggagccaggcagactttttcactggtagcagaagcttgtcacattctactttaaatgtcatataaccatttttttttcaaatggatataaattcctaatttggctttttcctttacacattcctttggcatatgtactaagcacatgtttaaaaaaaaaaaaactagctgtagttcacttctgattttcttactttaaaatgatcgtcacttcatactcatgcatatttcattatgtaaaccgtaagatcctttttgaactcatgggaggaagggtaggcaagtgtaaagatacagttttgtgggtcataccaagttcgcacctacaagaattccatagtgagacctatttccacccacgtgacttccagtgcacagatattcagctgggtgtatctaaatgtcactgcacagcatttgtgaatggttataaagaagaaaaatgatacaacatgctgctttgaggccattggttttttcctttttttcttttttgtttttacctcctaaagttcaaaattagaactttgtttaattaaatacacatcttcatctaggcttatgttgttagagaaactcctgtttatcttaatatctctgaaaccaggatgtgtcttatggtctctgtgagccagactcatgacgtagttaccattgcctgtgatgggtgaatattggttgtagttgttcacctcatcatctctccatttgaggcaaatgcatcattggtgctatgtgtatttaactgctgttttaaaagccttcacaaagatttactgtgatttagcattgaaacaaaaagttgttgtgtgtgcagaagggcaagcagaccagcaggccaggaatttgatattcatggaacaaatgtcatcattgtgagaatggtctccattccatattccaaagcaacaaccaagttctacaacggaacaaaggaaagaagacactcacggagcagttgaaactaggtattttgttgctgagatgcttgcaaaaagat

SEQ ID NO: 88292 - DNA, 3027 bp, Homo sapiens
  misc_feature (1615)..(1615): n is a, c, g, or t
  misc_feature (1749)..(1749): n is a, c, g, or t
  misc_feature (1945)..(1945): n is a, c, g, or t
ccagtgagagctagaaccaagtgccagcccccgggggtgcacccgtgctggtgtggggccacgtggtccttgtggtccaggcagggccagcatgtggcggggtgtccagctccactgtttggaggaagtgggcgctgacacagcagagtgccctgggcccgtggggatttccttccagaggacacgtggctgaaagcataggataaggatgtataggtgaatgactggtgccatccctggctgtctgatagatgcaggtagggcaggtgaactgttgctggcctggccagcaggcctagggtcacatggtgattggcgtcctcctgccaccccttctccatgccagggtgcctgtggtgggtttgcccagcacgcatgaccccaggtcccaaggagagtgtgaactgaggcctgggtggtgaaggcagggcctctcctcagccctgtgtcctgtgggtgccagccagtcccatctcgcattttggggtgccctttccctgctgccaggggactcttcatttgtccttaccctagaatcagcccagacactggacatcacccagacgtggcccttcaggaggtgcacagggcaggggcaggcccgtccctccctgccccaatttgctgggctgcctcagcccagggtctggccttctccttggtgaaggtctgctgggcccctgtccacctcctgctgggaggaggagatggggagaggaccaggaggacaccggaggccctgtcccctgcactgtgagctcagtcaggtccatgagctgcccaccgtcctggccttactgtgccccctgccccaccaacataggtgaaagcacctcccctctaaggaagaccatagagaccccaacactgtgggaccccaaagctccttcatgctcactggagctcccaccgtgggtgcttgcaagtcctcagcgctcccggggtacagccctccccttcctgccctctaatgtcctcccctcccttgcccttccctccacttcctttctctgccgtcccctcctctcccatcttgtgacctctttactggcggggcctggagcccatgatggacacttgcggaaggaggggtggcggagcacccctgagatgacatcgctgcctgccccagagcaccccgcctctccctgtgactcagttctttgcagcccagatgtgagcatgtgcaccctgggacctgctgcccgttgggatgcccaggccaaatcagcccctctgcctccatgctgcactgattgcaagagtttcccacatctgcagaggccgtgggctcagccccacaccagccaggccaccagtgttgatagcggtgaggcggggacaaagggaatgtctcagttcacagtgtggacatggtggaggtctcggccttgcgagacaaggcagggggaggggataggaaattgggggtattctgtgactcctgggccaccggggagccagaatcttccagccagactggatgggcagggcttagcttcctgatgccgcccattcaccactttcaccccgggaacctacctgggcatcatgggaggcagagcctgaaccccaacccaaccctaactctaatgctaacccctaaaccatcccncaccctaacccaatcctcgccctaaccctaatgctaacccctgacccgacccaatcctaaccctgatgctaacccctgactcaactctcaccctaaccctgatgctaacccctgacccaatcctcaccctaacnctgatactaacccttaacctaacccaacccagccctaactccaactctaaagctaactcctaaccctaggagaggagcccaggccgggccctctccctgctggtttcctgttgggctttggagccccagatgcctgcccagaggcttccttgtgcggggtggggtccagcagtgggggatgggcccagagctggtntagccaccagcagagccatcctgatccacaggaccatccctggtggggtggggccccctggggcaggaaggccactgaggccagggagactcccaggcccactcacggcgcaggccccacaggagctggctggaggctatgggtgcggggcgtgggcctgccgggggttgcgtgacaggcagtggggagtgggttgtgctggcagctgtgggtgagtgaggaggctcctctcatgaagggccctggggaagtggaatctggccctgagagacccccggcctcctctgcaggggctgccggcaggaggggaaccggggaccacctcccgccacagagcctggggcccccagccttgcctacagggagggtagatgagagtgtaaactgcatatgaggttgggctaaacctggacatgtgtttcataaccaaagcagccaggaatctccggctctgcccagtgatcatctgggcaggacatggggacgagtgtccaggctgaagtcagggcccggccagcagagggccattttgtattgagctccacagctggtcacattctgtggaatgtgcagacgtgcacggcccatcagacagggtctggagtggggctgccgtcttgggcagctcctcccgggtgtctgcaaaatgcagaggtcaccagagccaaggcagcaaggcaaggagcccggcttctaaggaactctgagcaggtgtggtccatggctgggaggcagctggccccacagcacatagcacggagggcggcgcggagtcctggacgctcttggcaggtcccctcatggaggatgtgggggattggcttaggcctggtctggctggccttcctggaccgcagtggccaggagctgaaaaccgtgaccccagtctccctgcagctgttcttgatgggatttctgttcgccagtcagatgcatttgcacaggacttggatcctgaactgtgtaacctggagaggcaggtgtgagcgggccatgctgctggcccagcctgtgccggtgtctgtttctgttgtctctcggcccttctgtgagccctcagtaaagctcttcgtgcttcagtc

SEQ ID NO: 88293 - DNA, 3629 bp, Homo sapiens
  misc_feature (1615)..(1615): n is a, c, g, or t
  misc_feature (1749)..(1749): n is a, c, g, or t
  misc_feature (1945)..(1945): n is a, c, g, or t
ccagtgagagctagaaccaagtgccagcccccgggggtgcacccgtgctggtgtggggccacgtggtccttgtggtccaggcagggccagcatgtggcggggtgtccagctccactgtttggaggaagtgggcgctgacacagcagagtgccctgggcccgtggggatttccttccagaggacacgtggctgaaagcataggataaggatgtataggtgaatgactggtgccatccctggctgtctgatagatgcaggtagggcaggtgaactgttgctggcctggccagcaggcctagggtcacatggtgattggcgtcctcctgccaccccttctccatgccagggtgcctgtggtgggtttgcccagcacgcatgaccccaggtcccaaggagagtgtgaactgaggcctgggtggtgaaggcagggcctctcctcagccctgtgtcctgtgggtgccagccagtcccatctcgcattttggggtgccctttccctgctgccaggggactcttcatttgtccttaccctagaatcagcccagacactggacatcacccagacgtggcccttcaggaggtgcacagggcaggggcaggcccgtccctccctgccccaatttgctgggctgcctcagcccagggtctggccttctccttggtgaaggtctgctgggcccctgtccacctcctgctgggaggaggagatggggagaggaccaggaggacaccggaggccctgtcccctgcactgtgagctcagtcaggtccatgagctgcccaccgtcctggccttactgtgccccctgccccaccaacataggtgaaagcacctcccctctaaggaagaccatagagaccccaacactgtgggaccccaaagctccttcatgctcactggagctcccaccgtgggtgcttgcaagtcctcagcgctcccggggtacagccctccccttcctgccctctaatgtcctcccctcccttgcccttccctccacttcctttctctgccgtcccctcctctcccatcttgtgacctctttactggcggggcctggagcccatgatggacacttgcggaaggaggggtggcggagcacccctgagatgacatcgctgcctgccccagagcaccccgcctctccctgtgactcagttctttgcagcccagatgtgagcatgtgcaccctgggacctgctgcccgttgggatgcccaggccaaatcagcccctctgcctccatgctgcactgattgcaagagtttcccacatctgcagaggccgtgggctcagccccacaccagccaggccaccagtgttgatagcggtgaggcggggacaaagggaatgtctcagttcacagtgtggacatggtggaggtctcggccttgcgagacaaggcagggggaggggataggaaattgggggtattctgtgactcctgggccaccggggagccagaatcttccagccagactggatgggcagggcttagcttcctgatgccgcccattcaccactttcaccccgggaacctacctgggcatcatgggaggcagagcctgaaccccaacccaaccctaactctaatgctaacccctaaaccatcccncaccctaacccaatcctcgccctaaccctaatgctaacccctgacccgacccaatcctaaccctgatgctaacccctgactcaactctcaccctaaccctgatgctaacccctgacccaatcctcaccctaacnctgatactaacccttaacctaacccaacccagccctaactccaactctaaagctaactcctaaccctaggagaggagcccaggccgggccctctccctgctggtttcctgttgggctttggagccccagatgcctgcccagaggcttccttgtgcggggtggggtccagcagtgggggatgggcccagagctggtntagccaccagcagagccatcctgatccacaggaccatccctggtggggtggggccccctggggcaggaaggccactgaggccagggagactcccaggcccactcacggcgcaggccccacaggagctggctggaggctatgggtgcggggcgtgggcctgccgggggttgcgtgacaggcagtggggagtgggttgtgctggcagctgtgggtgagtgaggaggctcctctcatgaagggccctggggaagtggaatctggccctgagagacccccggcctcctctgcaggggctgccggcaggaggggaaccggggaccacctcccgccacagagcctggggcccccagccttgcctacagggagggtagatgagagtgtaaactgcatatgaggttgggctaaacctggacatgtgtttcataaccaaagcagccaggaatctccggctctgcccagtgatcatctgggcaggacatggggacgagtgtccaggctgaagtcagggcccggccagcagagggccattttgtattgagctccacagctggtcacattctgtggaatgtgcagacgtgcacggcccatcagacagggtctggagtggggctgccgtcttgggcagctcctcccgggtgtctgcaaaatgcagaggtcaccagagccaaggcagcaaggcaaggagcccggcttctaaggaactctgagcaggtgtggtccatggctgggaggcagctggccccacagcacatagcacggagggcggcgcggagtcctggacgctcttggcaggtcccctcatggaggatgtgggggattggcttaggcctggtctggctggccttcctggaccgcagtggccaggagctgaaaaccgtgaccccagtctccctgcagctgttcttgatgggatttctgttcgccagtcagatgcatttgcacaggacttggatcctgaactgtgtaacctggagaggcaggtgtgagcgggccatgctgctggcccagcctgtgccggtgtctgtttctgttgtctctcggcccttctgtgagccctcagtaaagctcttcgtgcttcagtcagcaagtgtggattctgtcgtcggcaactctgcggcccaaaccccgagcctccccctcccccagaccttgcagtgccatggagctgagggacctgtggatccacagctgtggccccggaagggctgcaggagctgaacctgcgtgagccccgcagagggtgcagagccggcttgtgcaggctcccagcaggctcatgacagcgcggatggttaaatgtagctcctgacagccaactgttaaggtttcaggcatttttgcaccaggtgacatgatggtagcctgaacgtgaccttggcagcagtctctacatcaaggaaactggcaaatgtcaacatgctgggtaccctcgctcctgccgccgcaggctgtcagtgtcttccagcccacactgcggggggccttgttgtgtggctgcctcccaggctggggcgagggtctccagagaccaccatcgtgcaggctcttggtcaatagcagggtgtggtgctcctgccaggggacgcattctccgtgtgacctctacaccccaggtcaggtcaggatgtgatttgcttctccagggccgtgactcactagatccacctcccactggtgcctggtg

SEQ ID NO: 88294 - DNA, 245 bp, Homo sapiens
aatactagaggacacttgaaaattacatgaaattcaaatttctgtgtccaaaataaagttttattggactgcagccatacttgtttgtttacatcttgtctatggctgtggcagcatggaattgttgaaccaaagactgtatgcccacaaaacctaaaatatttacagcaaaactactgcagacctctgatttaccccagtttaacatacttcaaattttaaataaaaatttgttcacttaaagc

SEQ ID NO: 88295 - DNA, 936 bp, Homo sapiens
aatgatatagctaacatttatgttccaggcactatgctaagcagctttacctatattacctcatgtaatcctcacaacaactacaggaagtggataattactgtccttactttacagttaagaaattgaggctcagagaagttaactgtcccaaagtctcagagctagtaggagacaaaggtgggattgaatccacacaatcagattccagaggcagcacccagaatcactatattctattgccttttctgggtgtctgtctgaatttgatattttcaatttggtggccaggggtcatggtccatgtgtatttttctgggaaaaaggaccttggttttcatcatgatttcctaaacagcaatctttgaccccagagattaagaaccactcctggagcctgtgtggtttgaaaagcactggccagcagaaatcccatagaactgctaccatcttaccatgtgatttggcacacctcggttgtgtctgtcatatgaagtgtaaagatggcatgccggcaggccctcccccctctgacccccttttcccaggctcctgttcaagggcagcatccaggggtaggaggaagatcaggttgcttgggctcagtgagacagcaggtcagtgggaggtgatgatgaagggagggagctgtcagttcccaggagcccttaaggatgagcactgagggttggacccagaccgaggtaagcccttaaccaatccttccctgggtgaagatgaagagggaggccccctactgcagaaatggaaacaccaaggtggtagctctagatctaccccctccccatgccagcctacctcaggactagagcttggctgggggctgctggccatactcccccagtacctgaagcctgactgactctccacacctgttccctaaagatgctcaacggttttgctgctgagacactt

SEQ ID NO: 88296 - DNA, 397 bp, Homo sapiens
tatgtacttagtatttgtggactatattttatccagcattctgtatatattagtagtgggataacatcagctactcattgtggcacattgttactctggaaggcttgaacaggaatactcttattattgaaacaaaaattcagaaaataattaaatttatatgtgaacttgatattatttgcatgcaacatcaataccatttcagctaaacatcatctttcttatgaaattaatgttattaatttgaatgtcaatgtttttgtaatttttaaatatatttaatttgtgaatttatattaatttaatagttataaaggagttatatgcataatagtttagatctaattttgttagtatgtatttatatggcattaaaatatgagtatttaaagcaaca

SEQ ID NO: 88297 - DNA, 242 bp, Homo sapiens
ccttgcacaagacagtatgagactttctcctttgaaataaccttcagagtctacagataactcattcattccttcactccacaaacactgactgactataatgtgtctgacttactgccacctggtgctggactgttgtgaatagtctcactgcagctcgatctttgatcactgtacctgaacttgatttttgccctctccagcccaggacaaattgcttcccgaggctcattgcagttcca

SEQ ID NO: 88298 - DNA, 229 bp, Homo sapiens
gcaacattttttggtgtatttttcttccactctcttttgccaagattaggattttgtgtgtgtgtgtgtgtgtgtgtgtgtgcagttctctgtgtaaaactgtattaactatacggcattttttaaccccactaatattttaacaaaagaatttactaacgtagttacatgaagtcgttaaacattttaatgactacatagccattcacattttcccattttcctctgt

SEQ ID NO: 88299 - DNA, 507 bp, Homo sapiens
cgtgtttttactggagacagagtttcaccatgttggccaggctggtctcgatctcctgacctcaggtgatccacctgccttggccttcccaaagtgctgggattacagacgtgagccaccgcgcccagcctagaagtgatttttgtcaggagacagaagacctttagtgattggagtcaagcaggtggagtgtgaagatcagctctgccctttagctgtggaaccttgagcaagccacctcacctctccacgcctctgttctgtcaccttttggagatgaataatgcccatctcacagggcagctgtggccagtgcatactgccatgcctgtaaagtgcctactgcacagcccaggacatagaaagatggtaactgaggttttgttgtggttgttcactagcattgcataggacccaggtctgatcccttcattcagctggtgtgattgtgagtcaaggatctgatatccccaaagaaaggactgcaagtatttgccagtcagactt

SEQ ID NO: 88300 - DNA, 375 bp, Homo sapiens
aaaacatgcataagatctacttgagaagaactactcaactctgatgaaagaaatcaaagaaaaactaaataaatggaggcattccatgttcatagataggaagattccattttgtgaagatgtaagttatttcaaacttaacgtgtagattcagagcaatctcattcgaagcctcggcaagttctcttgtagctactgacaagctgattctaaagtttatatggagaggcaaaagactcagaaatagccaacacaatattgaaggaaaagaacaaagttggaggattgacactattctactttaagacttgctataaagctgtaataatcaagaaggtgtggcattggcaaaagaataaacaaatagagcaatgt

SEQ ID NO: 88301 - DNA, 441 bp, Homo sapiens
gtaataacaaaactccagtctcccacacagcaggctctgcatgaattactctttctccattgtaattggcctgtcttgataaatcagctctgtctaggcagccagcaaggtgaacccattgggcagttacagtagcaagtattcctacaccttcaagcaagatgctatctggacaaagtaagatatggtgaaagctgtcctgcccccagttatgactgctcacctcaagcctattcaacaagctgaagaggctatggggagattcttttgaagcccgtgctgcagtagtctcttctggcattccattctccactgggagatgaagaagcactttttcctaccttagactatttgagaagggattaagacatttaggataatatgtgcctctagaggttagtgcgcagtgattggctagatttcctaaggcagcagaacaga

SEQ ID NO: 88302 - DNA, 276 bp, Homo sapiens
tgggggtgagacctgccttttggggctgaggatgaaatgagatgacccctgtgaagactttagcccagggccagggacttgataggtgcataatcaggattattttgatggcagttattggtccaagggtcgatggggggccagtgagagtccaggagcagcaaagccacttctggacttctgggaacatggacggctgggcctggaggctccgggcaggtgcaggaggaatgctggccacactcgttcagtcttcagtctctgcctggcccagct

SEQ ID NO: 88303 - DNA, 454 bp, Homo sapiens
attaatccatccgcattccaaaacaattaattacttaagaaatccaaccagcacacatctaaggcgaagctgcttctttggtagttttttattctacagagtgctaccactgtacaaacagtcaagcgttttggttggcagacaataataaaataagctttatttccttttcttcttcccttagcaaaactccagtctgtcatcacctctgacatgcgccaagaactaccaggaatgatgaagtatatttcaaataaactttcctattaaagtgagtccttgtggttaacatcataccaaaatgctttacattttatccagcaaaacctttacacaccgtaaaaaaagaaatcttaagacacgagctcgtatctgtatttaataataaactcttatcttggccgtacttaccaaatcgtaggcttttactatttataagcctttgaaaaaactt

SEQ ID NO: 88304 - DNA, 277 bp, Homo sapiens
aattcaacaacttagatgtaatgagcatattcattgaaagacacaaattaccaaagctcattcaataagaaatcaataacctgaatagcagtgtacttatatataaacaaattgcatttgtagttcaaaatgtccaacaaagaaaactccagacctataaggcttcgctggtaaattctactaaacatttaaggaggaaataatatcaattctataaaaactcttttgtaaaatttaagaaaatacttcccaaatcatgtgaccagcattgtcatgg

SEQ ID NO: 88305 - DNA, 420 bp, Homo sapiens
gtagaatcaaaattttaactaagggacatttatattatatcttagtatcctgtagcaattttggttctgggtcaagaggggtatgtacaagaccagtttgacacccttaactctgctcaattggggagggtctattttcctttaagaggcaaagcctttggagaaggaaattgaggggactaaatgatttctgtctttcaagctccctcttcttgagatagagcaagctgaatccttgtttttaatttgctaatctggaaccattgaagtgtttgactggttataccagtttgcctacaaagagttgtcctgacataggcattttctcaactgatagttgaagctgtttaacctactttctcattccctggtgccagtaaagtaggagccctccttattccatggtctcttagctctagg

SEQ ID NO: 88306 - DNA, 497 bp, Homo sapiens
tttgaataagcacaaaattatctatttttgtcaagaacccaatttttcatgctctgcaaattgttttctgtttctatgtaaaaattttaattatactcctatactttattataaaagatactgatttgattagcatcctcttaccagaaacacatactagacatgagattaaatccttttgactatgaattacctaaaaatttctaagaaagacctgtgagtgatttagaaaactttatttggtaaagagtatgaaagtaggaatgatttattcttataattcagcctcgttagtaagaatggctcaggattgcctagagaaatgcccaaatattgttccaaaagttactttgaactattaatattgagttattttcaatgttttcattcagtgaatttctcaacccttggttttgagaacataatgctaattaaagtgtctgctgttgtttaatgctattccattgtaactgctaataataatagcatttttctgc

SEQ ID NO: 88307 - DNA, 771 bp, Homo sapiens
gcacagactccggagctggctactgcggtaaaaacccaaccgtctgcctgctggctgtaggaccatggattagttccataacttctctgtgccttatcggtaaaatggagatagtaatgatacctgtctcacagtgtcgtaaggattagaagagttaatatttgtgaagaacagagcatggcagatagtattataaaagtgtttgttaaatagaattagtaaaattgaaaaggttcactctgctgttatatggaaagtgtttgccaaggggaagtaaggctagaagtagaaagaccagttaggagataattgcaacaatccgtgcaagggatggcttagatgaggtgctgatggtggaggtggggaagtgaggagaagggtcacatcctgggtatattttggcggggtggctggaggattggatctgcttttctttccatcctggaactttccaagttttctttgctgccttgtctgctccctcttgaacaggggttctccagtggggtggtgccattccggaatatgtgggtgcatgttttggttgttgcagactggagagatgggtatttctggtatttagtggccaggggctgggccaggggtactcagcatcctatctggtgaagacttgttccttgaaatgtgccagtggcatcctggatgagaaatgctgctttagacctttatttccccgacccccactcacctcccgtctctgctcgctcacctgcctcctcaagatttcttaacctatagtccctgtgtggg

SEQ ID NO: 88308 - DNA, 660 bp, Homo sapiens
agagacgcagatttcagatgtaagaagcccgatccacattgcataagtggacccagctgccagatgtgtgggcagctgcagggagtggcccggggtgctgggcccagctgtggttgttcttttctgggtcaggagtgactgcggagtggctgggacgctcctgccgggggaccctcctgccgggggtggccgcttgcctgggggaagacccctttccctttctttttttttttgaggctcaaaaaaaaaatccaaataaagcaccatattcccaccacgccaaattaaccttgacaacaatgttggcgtatttgcgtccagtgctgtttttattaattaaggtaaaatttacatatggtgagatgcatgctcttcagtggagacccagcccctagaaggtccctccagcccttcctgtcggcgtccctccccatctgtggctctgacttaagcaccgtggattgacctctccggctcacgaccttcgaggagtcagaatcctgcagttggagcctttgatgtctggcttcttcatcctatgacttagagcttcatccgtgctgttgtgtgtgtccgtagctccttgctgtctgttccttcgtttttaattgtgagcagtgttcttctgtctgaataaactaagacgcagtttgtccatca

SEQ ID NO: 88309 - DNA, 343 bp, Homo sapiens
tggattgacctctccggtgcttaagtcagagccacagatggggagggacgccgacaggaagggctggagggaccttctaggggctgggtctccactgaagagcatgcatctccccatctgtggctctgacttaagcaccgtggattgacctctccggctcacgaccttcgaggagtcagaatcctgcagttggagcctttgatgtctggcttcttcatcctatgacttagagcttcatccgtgctgttgtgtgtgtccgtagctccttgctgtctgttccttcgtttttaattgtgagcagtgttcttctgtctgaataaactaagacgcagtttgtccatca

SEQ ID NO: 88310 - DNA, 697 bp, Homo sapiens
cacgaggtttaatttaaactctgatggagagatttcagtttaaattctcagttttttacccctttttcttccagtcatctttgaggtagcctttgttgctttagaaccaagctgacaaaaatctcagtatgtacaaaatgtttatgaatttactcttgtgtccagggacttaaatgtatatgagaatggtgcaggcagaagggaagacactggctgcaaggctgacaaacatactctgtgttctttttttgtggcaaaaaacaggaaaaaaatagtagctaaaattaggagctctgttctcagactgcctgggtctgaatcctagatccaccagtggtctggttaactcaaagaattatttaacctctctaagctataatttcctcatatgtgaaacaaggataaaaagagtgtctgttttatagggttgtgaagattgaaattatcaaatatggtgcttggaattgggtagagacactcaatatatggtagttggtagcattgtaggaagtgaatagtaatagtcattttccattaatttatttacatgctttatcttgtgtaattgttaaaaaatatcaaatgcgttcctatgtgtcaaaaggcctaaatagccctgtgtacctaaaagatggtaattaattttggtggttggtttgggtgaaaatatctgtcactatttcaggaaaatacaaaa

SEQ ID NO: 88311 - DNA, 320 bp, Homo sapiens
tgcaatgttacaggagaggggtcctgatccagaccccaagagagggttcttggatttggatcctgtgcaagaaagaattcaggtgacttagaatgcctgaccatgtgggaatgcagcccagtaggactcagtctcattttacccagcccctgttcaagatggagtcgctctggttcacacgcctcagacacagcctctgcctcccgcctcagcctcctaagcggctgggactacagtgcatacctgattttctcgacctcttttatgaaatatccccgccagactccctcgaccgtgccacccccaggttcccgtgcata

SEQ ID NO: 88312 - DNA, 607 bp, Homo sapiens
cagacagagctgctgcccatccttgcaacagctaggggctgaactcctgctctgctgagttttgggtttattctctaacctgtggcaatgtgctgtagtcagcccgacttatgctactgtcatggacagtgctaataataatactgccttttgctggagatgttagttctcacttatgcattttaagaccttttgctggaagtgttagttcttgcttatctaattttaaacgaatatgaaagacaatttaagtgattttgtacattttaatttactcatctacattttcttgtattttttggattaaagtgtacctgtatgctctttctttctgtggaacacttcatttgtagtgtccaatttttaaaaagaaaacattttgataacagtttcagagtaatgacaaaccaaacacacattctaattgtctacttgtacaatttgttgggtaggtactatagggggaagaattaaatatacatgaggaagagaaaaaatctttgccaagaatttcagttattatcacttatggtttacccatattgtcataaaagtaagaaaatgggaattctaattttctgtcacaaaataaagattatataaaaat

SEQ ID NO: 88313 - DNA, 364 bp, Homo sapiens
tccttgaaagcttatggttattcatagtctaacaaaactagggtcaccaaacttggcagcagaaataatctagtcttactgtgataactacccaattactttattatttttccagttgcagttcaaaatgttttgtggaaatattttttgctgtttgtgattttcaaagcttagaggggaaaacaaactttccagtgttggagagcactgaatagtttatgaattgtgtaaaagagtcagatttcaatgcaattatcttttcctagacatttatccaacattaaaaacctatgattataaaaagtaaaggcttaaagtatatttcaaccacagctaggaaatgtaaagttaaatctagcttgtg

SEQ ID NO: 88314 - DNA, 109 bp, Homo sapiens
aggtccctgacttttctggagcataaccagacatgtggttggcttcttgagcaactcatttcgaaaatgaaaaggaacaaattacttttcttttggcaattctttacta

SEQ ID NO: 88315 - DNA, 504 bp, Homo sapiens
gcagtttataccaaactaacgctttaatgcagtgcttttcaaacttcagccttcacataaaacagcttgtacaccgtaaagcttcagatgcaggctctgattcagtaggtctggggagatgcttgagattcagcatttctagcagctcctcaaggaggggattctgggaactgtaagaccacacttggagtgtcaaggttttgcagcatgtttttcatattccagtatagattgccaggagtgcatttttaaagtgcctttttgttaaataatataaaaactagtagaagaaccattagtggtggcaaaggagtaagagttgaatgggccagctctgggtgggcccagccagggtctcagaacagaaggttcttctaaagctcttctacgtggatatggggagtatcaggccaatagagtcctttagggttcccttgtgcctattaatccaaacctctggggaatacctttcaggatccatccacattctaaactccactggaa

SEQ ID NO: 88316 - DNA, 645 bp, Homo sapiens
tgtctgcctctgaggtcagacgctctgcactgggacagcgtggagtggagggaaaccaagcttggggctcattggaggggcttgctggcagacaccgccctttgtgggaaactgactgtgggagaggggaaccccaacctctgtcaccacatccctcttccctgttgtcacacctgtcacctgctgccgtagccatgagacttcccaagggtcactgctgccactcactgcacagcctggaagggagtccacaggggacatacagtgagcaagagacctgtgccactcaggcctcctgggggtgtccccagtgcagccatgatgataatcacagctaccattcaccaagccctgcccacagtctaacctactctattcacaacactcccagcagcaaggcaagtgaggtgctgccgtcatccaggctggacagttcagtgatttgcctgaggccccacagcaggtgagtggcaagtccagcgtcagagcagggcaggctggcggtgccccctgagccccctttgccatgcttaccgcatgcacatcctgggcttgtgcaggaatgccctgtcccctacctgccctgctccgtgcaaaaccctgtgcctgggagacatgctgagagaattcatggaaacaaatgtg

SEQ ID NO: 88317 - DNA, 292 bp, Homo sapiens
ggaaataactaagatcagagcaaaactaaatgaaattgaaacaaacaaacaaacaaaaaaataccaaaggtaaataaaacaaaaagctggttcttcaaaaagataaataaaattgatagaccattagcaagatcaaccaagaagagagaaaatccaaataacttcattaagaaacgaaacagaagatattacaactgacaccactgaaatacaaatgatcattcaaacctacaatgaacatctttacacacataaactagaaaacctggaagaaatgaataaactgctggaa

SEQ ID NO: 88318 - DNA, 279 bp, Homo sapiens
ctagggtgtctgtacagagtcctgtgatgtgagcttctgttggattctcagcgtggataccaacgcctgttccagtggaggtggctgtggtgtgcaggggactctgtcagggttcttagtttggcggtttaatgctttatttttgtgctggttggcctcctgccaggcagtggcactttccagagaacatcagctgtagtagtatccagagggaccagcggtgggcagggccctagaacgcccaagattatatgtcctttgccttcagctaccaaggtg

SEQ ID NO: 88319 - DNA, 161 bp, Homo sapiens
acagatacgctcgagctcggacatcttgctctactttctgatacttggtcacagctgcagttttacatttgtcatatacttaacatttacctttccactagaaggtacacttctgaggaccagggtcatccattggccccagcacatggcctaatatttag

SEQ ID NO: 88320 - DNA, 1935 bp, Homo sapiens
gtctcttttgagttttctatactggacatttcatacaaatgcaatcatacaatatgtggtcttttctgactggcttctttcatttagcttagtgttttcaaggctcatccacactatagcatgtttactacttcattcttttttatcgctgaatacaattccattttatggatgggccatgttttatttatccattcataagttggtgaacatttgggttgttttctctttttctgttatcttatgggtgtaccatagtttgtttaaataacttaaagaacaattttaaaaaggtaagcctggtcatgaatactgtctcaaagaaagtaggcttttgctagattggtattttttaacaaaataagttaggccttttaaaattccatggctagaatctagtagaatccagggagcttgtctctccatctatccatctcttcatccatctgtccatctaaccattcattcaggcaactatccgtggatcctttaagcatcagatatgtgctaggtagtggagacacagagagcaactgatttcactaggtgctcacagagtgtgggcatgggagcaggagggcagatggacatgtgtgttagtcagctcaggctgccgtaacacaataccacacactagggggcttattttcttatagttctggaggctagaagtacaagaccaaggcactggtagagttggtttctggtgaggcccttcttcctggcctgtctagttgccttctcactttgttctcacatggcctttcctctgtaagcaggcaaccctgatgtctcctcctcctcttataaagacaccaggcttattggattagtgccctcccattatgacctcatttaatcttagttacctcctttaaagccctatttccaaatatagtcaccctgggggttaggttccaacatacagatttaggggagacatacttccatctataacaacatgtaaacacggtcattggagtgatatgtgtctcaatagagacaagtctgtgacatttggaagtccagagggggagcttccagttccctaggaggttgagggacacttgaccatgaagggccgtttagggtgtgtgttgaaaaatcaataagagcttaccatgcggcttgagtaaaggctaggaggatccatgtgtgtagagctccttgctgggggtgtggtttcagggtgaagtgccaatggggaggatgagggaggaggagaaataagatgaggctggacccaggtgggcatttatgtaattgtcaaaatcagaatttatccgaagcagagtgaatgggaaggggagtgtagacctggaacaggaactctttctggatgcttcactgaagaggagagagattgagtgatggtgagcgggaggaacaatggtcaagggaggttttcatttttaatataattcttgtgcaatattccatgcatcagagtattataaggtctgtgtatggttagaagaagaataaaatgaacatgatttacccatcaccagagagaaacaaggactttgggggccctcccgttcccttccatgcacatctccttcctgcttcccagaggtaaccactttgttgactcaagtgtttattatttgagaaaggtttttttttaaagcccttgattgggtgtaaagctatcatttaactaatttcctgacattctcctagttttgttttgttctgacacatttttaaagttaagttttatgtcatttataatgatgctaaaagcattttggcaggagctaggttaattctctgtagccttttctcttggcacatgtgaaagagaactgctggttggcgggtggctcacccctgtaatcccagcactttgggaggctaaggcaggaggatcagtagagtccaggagtttgagaccagcctgggcaacatagtgagacccctatctctaca

SEQ ID NO: 88321 - DNA, 1422 bp, Homo sapiens
gtctcttttgagttttctatactggacatttcatacaaatgcaatcatacaatatgtggtcttttctgactggcttctttcatttagcttagtgttttcaaggctcatccacactatagcatgtttactacttcattcttttttatcgctgaatacaattccattttatggatgggccatgttttatttatccattcataagttggtgaacatttgggttgttttctctttttctgttatcttatgggtgtaccatagtttgtttaaataacttaaagaacaattttaaaaaggtaagcctggtcatgaatactgtctcaaagaaagtaggcttttgctagattggtattttttaacaaaataagttaggccttttaaaattccatggctagaatctagtagaatccagggagcttgtctctccatctatccatctcttcatccatctgtccatctaaccattcattcaggcaactatccgtggatcctttaagcatcagatatgtgctaggtagtggagacacagagagcaactgatttcactaggtgctcacagagtgtgggcatgggagcaggagggcagatggacatgtgtgttagtcagctcaggctgccgtaacacaataccacacactagggggcttattttcttatagttctggaggctagaagtacaagaccaaggcactggtagagttggtttctggtgaggcccttcttcctggcctgtctagttgccttctcactttgttctcacatggcctttcctctgtaagcaggcaaccctgatgtctcctcctcctcttataaagacaccaggcttattggattagtgccctcccattatgacctcatttaatcttagttacctcctttaaagccctatttccaaatatagtcaccctgggggttaggttccaacatacagatttaggggagacatacttccatctataacaacatgtaaacacggtcattggagtgatatgtgtctcaatagagacaagtctgtgacatttggaagtccagagggggagcttccagttccctaggaggttgagggacacttgaccatgaagggccgtttagggtgtgtgttgaaaaatcaataagagcttaccatgcggcttgagtaaaggctaggaggatccatgtgtgtagagctccttgctgggggtgtggtttcagggtgaagtgccaatggggaggatgagggaggaggagaaataagatgaggctggacccaggtgggcatttatgtaattgtcaaaatcagaatttatccgaagcagagtgaatgggaaggggagtgtagacctggaacaggaactctttctggatgcttcactgaagagggggagcttccagttccctagagcttgaggacaacgaatgttcggtacagaactcgagttgtatata

SEQ ID NO: 88322 - DNA, 1200 bp, Homo sapiens
gtctcttttgagttttctatactggacatttcatacaaatgcaatcatacaatatgtggtcttttctgactggcttctttcatttagcttagtgttttcaaggctcatccacactatagcatgtttactacttcattcttttttatcgctgaatacaattccattttatggatgggccatgttttatttatccattcataagttggtgaacatttgggttgttttctctttttctgttatcttatgggtgtaccatagtttgtttaaataacttaaagaacaattttaaaaaggtaagcctggtcatgaatactgtctcaaagaaagtaggcttttgctagattggtattttttaacaaaataagttaggccttttaaaattccatggctagaatctagtagaatccagggagcttgtctctccatctatccatctcttcatccatctgtccatctaaccattcattcaggcaactatccgtggatcctttaagcatcagatatgtgctaggtagtggagacacagagagcaactgatttcactaggtgctcacagagtgtgggcatgggagcaggagggcagatggacatgtgtgttagtcagctcaggctgccgtaacacaataccacacactagggggcttattttcttatagttctggaggctagaagtacaagaccaaggcactggtagagttggtttctggtgaggcccttcttcctggcctgtctagttgccttctcactttgttctcacatggcctttcctctgtaagcaggcaaccctgatgtctcctcctcctcttataaagacaccaggcttattggattagtgccctcccattatgacctcatttaatcttagttacctcctttaaagccctatttccaaatatagtcaccctgggggttaggttccaacatacagatttaggggagacatacttccatctataacaacatgtaaacacggtcattggagtgatatgtgtctcaatagagacaagtctgtgacatttggaagtccagagggggagcttccagttccctaggaggttgagggacacttgaccatgaagggccgtttagggtgtgtgttgaaaaatcaataagagcttaccatgcggcttgagtaaaggctaggaggatccatgtgtgtagagctccttctgtggtggcagaattggatcctctagatca

SEQ ID NO: 88323 - DNA, 178 bp, Homo sapiens
agaaaggcagtaatggggtctgacagagtattacgggtatcagcacgtggaattctgaaaatatattgaagcaaatataattaacccatatttcaccatcacaacactgcaaagttccctggcttctgatccctccctgagccactgactatgcaggcacagacactgtagggaaagt

SEQ ID NO: 88324 - DNA, 432 bp, Homo sapiens
tttaagagacagttcttgcttagtttcccaggctggtctcaaacttctgtcctcaagtgatcctcccatcttggcctcccaaagtgctgggattgcaggcaagaaccactgtgctcagcctggacgccatttctgatgcctggatatcatgcccttgtatgattaatttaagcctgtctccattgataattttggtttcttccagtttttcctctgctaaacaatacagtgttaaacatccttgaacatacttctgtattcatttgtagcagaacctctaccaatcactgttttggttatttccagttgttttgtttgatttctagctacaaaataacactggaataaatttcctcatctttgcacatttttttttttttttagaatttagcttttttagaatttagaaattttagaatttagcatttttgc
